United States Patent Application Publication US 2023/0026259 A1 - sequence listing, part 3

SEQ ID NO: 8586 - protein, 1126 aa, Homo sapiens; identical to SEQ ID NO: 8582
  Payload ID: 1783;
  Gene Symbol: BAG6;
  Gene Name: BCL2-associated athanogene 6;
  Uniprot ID:  P46379;
  ENSP ID: ENSP00000365143

SEQ ID NO: 8587 - protein, 1126 aa, Homo sapiens; identical to SEQ ID NO: 8582
  Payload ID: 1783;
  Gene Symbol: BAG6;
  Gene Name: BCL2-associated athanogene 6;
  Uniprot ID:  P46379;
  ENSP ID: ENSP00000372938

SEQ ID NO: 8588 - protein, 1126 aa, Homo sapiens; identical to SEQ ID NO: 8582
  Payload ID: 1783;
  Gene Symbol: BAG6;
  Gene Name: BCL2-associated athanogene 6;
  Uniprot ID:  P46379;
  ENSP ID: ENSP00000372940

SEQ ID NO: 8589 - protein, 259 aa, Homo sapiens
  Payload ID: 1783;
  Gene Symbol: BAG6;
  Gene Name: BCL2-associated athanogene 6;
  ENSP ID: ENSP00000387588
MEPNDSTSTAVEEPDSLEVLVKTLDSQTRTFIVGAQMNVKEFKEHIAASVSIPSEKQRLIYQGRVLQDDKKLQEYNVGGKVIHLVERAPPQTHLPSGASSGTGSASATHGGGSPPGTRGPGASVHDRNANSYVMVGTFNLPSDGSAVDVHINMEQAPIQSEPRVRLVMAQHMIRDIQTLLSRMECRGGPQPQHSQPPPQPPAVTPEPVALSSQTSEPVESEAPPREPMEAEEVEERAPAQNPELTPGPAPAGPTPAPET

SEQ ID NO: 8590 - protein, 259 aa, Homo sapiens; identical to SEQ ID NO: 8589
  Payload ID: 1783;
  Gene Symbol: BAG6;
  Gene Name: BCL2-associated athanogene 6;
  ENSP ID: ENSP00000388143

SEQ ID NO: 8591 - protein, 259 aa, Homo sapiens; identical to SEQ ID NO: 8589
  Payload ID: 1783;
  Gene Symbol: BAG6;
  Gene Name: BCL2-associated athanogene 6;
  ENSP ID: ENSP00000388244

SEQ ID NO: 8592 - protein, 197 aa, Homo sapiens
  Payload ID: 1783;
  Gene Symbol: BAG6;
  Gene Name: BCL2-associated athanogene 6;
  ENSP ID: ENSP00000388388
MEPNDSTSTAVEEPDSLEVLVKTLDSQTRTFIVGAQMNVKEFKEHIAASVSIPSEKQRLIYQGRVLQDDKKLQEYNVGGKVIHLVERAPPQTHLPSGASSGTGSASATHGGGSPPGTRGPGASVHDRNANSYVMVGTFNLPSDGSAVDVHINMEQAPIQSEPRVRLVMAQHMIRDIQTLLSRMECRGGPQPQHSQPP

SEQ ID NO: 8593 - protein, 238 aa, Homo sapiens
  Payload ID: 1783;
  Gene Symbol: BAG6;
  Gene Name: BCL2-associated athanogene 6;
  ENSP ID: ENSP00000388541
SSAEGAPPPGPAPPPATSHPRVIRISHQSVEPVVMMHMNIQGPLSLSPCPDSGTQPGGVPSAPTGPLGPPGHGQTLGQQVPGFPTAPTRVVIARPTPPQARPSHPGGPPVSGTLQGAGLGTNASLAQMVSGLVGQLLMQPVLVAQGTPGMAPPPAPATASASAGTTNTATTAGPAPGGPAQPPPTPQPSMADLQFSQLLGNLLGPAGPGAGGPGVASPTITVAMPGVPAFLQGMTDFL

SEQ ID NO: 8594 - protein, 742 aa, Homo sapiens
  Payload ID: 1783;
  Gene Symbol: BAG6;
  Gene Name: BCL2-associated athanogene 6;
  ENSP ID: ENSP00000388770
MEPNDSTSTAVEEPDSLEVLVKTLDSQTRTFIVGAQMNVKEFKEHIAASVSIPSEKQRLIYQGRVLQDDKKLQEYNVGGKVIHLVERAPPQTHLPSGASSGTGSASATHGGGSPPGTRGPGASVHDRNANSYVMVGTFNLPSDGSAVDVHINMEQAPIQSEPRVRLVMAQHMIRDIQTLLSRMECRGGPQPQHSQPPPQPPAVTPEPVALSSQTSEPVESEAPPREPMEAEEVEERAPAQNPELTPGPAPAGPTPAPETNAPNHPSPAEYVEVLQELQRLESRLQPFLQRYYEVLGAAATTDYNNNHEGREEDQRLINLVGESLRLLGNTFVALSDLRCNLACTPPRHLHVVRPMSHYTTPMVLQQAAIPIQINVGTTVTMTGNGTRPPPTPNAEAPPPGPGQASSVAPSSTNVESSAEGAPPPGPAPPPATSHPRVIRISHQSVEPVVMMHMNIQDSGTQPGGVPSAPTGPLGPPGHGQTLGSTLIQLPSLPPEFMHAVAHQITHQAMVAAVASAAAGQQVPGFPTAPTRVVIARPTPPQARPSHPGGPPVSGTLQGAGLGTNASLAQMVSGLVGQLLMQPVLVAQGTPGMAPPPAPATASASAGTTNTATTAGPAPGGPAQPPPTPQPSMADLQFSQLLGNLLGPAGPGAGGPGVASPTITVAMPGVPAFLQGMTDFLQATQTAPPPPPPPPPPPPAPEQQTMPPPGSPSGGAGSPGGLGLESLSPEFFTSVVQGVLSSL

SEQ ID NO: 8595 - protein, 1126 aa, Homo sapiens; identical to SEQ ID NO: 8582
  Payload ID: 1783;
  Gene Symbol: BAG6;
  Gene Name: BCL2-associated athanogene 6;
  Uniprot ID:  P46379;
  ENSP ID: ENSP00000389121

SEQ ID NO: 8596 - protein, 258 aa, Homo sapiens
  Payload ID: 1783;
  Gene Symbol: BAG6;
  Gene Name: BCL2-associated athanogene 6;
  ENSP ID: ENSP00000389355
MEPNDSTSTAVEEPDSLEVLVKTLDSQTRTFIVGAQMNVKEFKEHIAASVSIPSEKQRLIYQGRVLQDDKKLQEYNVGGKVIHLVERAPPQTHLPSGASSGTGSASATHGGGSPPGTRGPGASVHDRNANSYVMVGTFNLPSDGSAVDVHINMEQAPIQSEPRVRLVMAQHMIRDIQTLLSRMECRGGPQPQHSQPPPQPPAVTPEPVALSSQTSEPVESEAPPREPMEAEEVEERAPAQNPELTPGPAPAGPTPAPE

SEQ ID NO: 8597 - protein, 206 aa, Homo sapiens
  Payload ID: 1783;
  Gene Symbol: BAG6;
  Gene Name: BCL2-associated athanogene 6;
  ENSP ID: ENSP00000389444
MEPNDSTSTAVEEPDSLEVLVKTLDSQTRTFIVGAQMNVKEFKEHIAASVSIPSEKQRLIYQGRVLQDDKKLQEYNVGGKVIHLVERAPPQTHLPSGASSGTGSASATHGGGSPPGTRGPGASVHDRNANSYVMVGTFNLPSEPRVRLVMAQHMIRDIQTLLSRMECRGGPQPQHSQPPPQPPAVTPEPVALSSQTSEPVESEAPP

SEQ ID NO: 8598 - protein, 158 aa, Homo sapiens
  Payload ID: 1783;
  Gene Symbol: BAG6;
  Gene Name: BCL2-associated athanogene 6;
  ENSP ID: ENSP00000389954
MEPNDSTSTAVEEPDSLEVLVKTLDSQTRTFIVGAQMNVKEFKEHIAASVSIPSEKQRLIYQGRVLQDDKKLQEYNVGGKVIHLVERAPPQTHLPSGASSGTGSASATHGGGSPPGTRGPGASVHDRNANSYVMVGTFNLPSDGSAVDVHINMEQAPI

SEQ ID NO: 8599 - protein, 742 aa, Homo sapiens
  Payload ID: 1783;
  Gene Symbol: BAG6;
  Gene Name: BCL2-associated athanogene 6;
  ENSP ID: ENSP00000390185
MEPNDSTSTAVEEPDSLEVLVKTLDSQTRTFIVGAQMNVKEFKEHIAASVSIPSEKQRLIYQGRVLQDDKKLQEYNVGGKVIHLVERAPPQTHLPSGASSGTGSASATHGGGSPPGTRGPGASVHDRNANSYVMVGTFNLPSDGSAVDVHINMEQAPIQSEPRVRLVMAQHMIRDIQTLLSRMECRGGPQPQHSQPPPQPPAVTPEPVALSSQTSEPVESEAPPREPMEAEEVEERAPAQNPELTPGPAPAGPTPAPETNAPNHPSPAEYVEVLQELQRLESRLQPFLQRYYEVLGAAATTDYNNNHEGREEDQRLINLVGESLRLLGNTFVALSDLRCNLACTPPRHLHVVRPMSHYTTPMVLQQAAIPIQINVGTTVTMTGNGTRPPPTPNAEAPPPGPGQASSVAPSSTNVESSAEGAPPPGPAPPPATSHPRVIRISHQSVEPVVMMHMNIQDSGTQPGGVPSAPTGPLGPPGHGQTLGSTLIQLPSLPPEFMHAVAHQITHQAMVAAVASAAAGQQVPGFPTAPTRVVIARPTPPQARPSHPGGPPVSGTLQGAGLGTNASLAQMVSGLVGQLLMQPVLVAQGTPGMAPPPAPATASASAGTTNTATTAGPAPGGPAQPPPTPQPSMADLQFSQLLGNLLGPAGPGAGGSGVASPTITVAMPGVPAFLQGMTDFLQATQTAPPPPPPPPPPPPAPEQQTMPPPGSPSGGAGSPGGLGLESLSPEFFTSVVQGVLSSL

SEQ ID NO: 8600 - protein, 258 aa, Homo sapiens; identical to SEQ ID NO: 8596
  Payload ID: 1783;
  Gene Symbol: BAG6;
  Gene Name: BCL2-associated athanogene 6;
  ENSP ID: ENSP00000390226

SEQ ID NO: 8601 - protein, 1132 aa, Homo sapiens; identical to SEQ ID NO: 8583
  Payload ID: 1783;
  Gene Symbol: BAG6;
  Gene Name: BCL2-associated athanogene 6;
  Uniprot ID:  P46379;
  ENSP ID: ENSP00000390966

SEQ ID NO: 8602 - protein, 158 aa, Homo sapiens; identical to SEQ ID NO: 8598
  Payload ID: 1783;
  Gene Symbol: BAG6;
  Gene Name: BCL2-associated athanogene 6;
  ENSP ID: ENSP00000391323

SEQ ID NO: 8603 - protein, 232 aa, Homo sapiens
  Payload ID: 1783;
  Gene Symbol: BAG6;
  Gene Name: BCL2-associated athanogene 6;
  ENSP ID: ENSP00000391355
MEPNDSTSTAVEEPDSLEVLVKTLDSQTRTFIVGAQMNVKEFKEHIAASVSIPSEKQRLIYQGRVLQDDKKLQEYNVGGKVIHLVERAPPQTHLPSGASSGTGSASATHGGGSPPGTRGPGASVHDRNANSYVMVGTFNLPSDGSAVDVHINMEQAPIQSEPRVRLVMAQHMIRDIQTLLSRMETLPYLQCRGGPQPQHSQPPPQPPAVTPEPVALSSQTSEPVESEAPPRE

SEQ ID NO: 8604 - protein, 185 aa, Homo sapiens
  Payload ID: 1783;
  Gene Symbol: BAG6;
  Gene Name: BCL2-associated athanogene 6;
  ENSP ID: ENSP00000391425
  MOD_RES (1)..(1): Any amino acid
XLACTPPRHLHVVRPMSHYTTPMVLQQAAIPIQINVGTTVTMTGNGTRPPPTPNAEAPPPGPGQASSVAPSSTNVESSAEGAPPPGPAPPPATSHPRVIRISHQSVEPVVMMHMNIQGQQVPGFPTAPTRVVIARPTPPQARPSHPGGPPVSGTLQGAGLGTNASLAQMVSGLVGQLLMQPVLVA

SEQ ID NO: 8605 - protein, 243 aa, Homo sapiens
  Payload ID: 1783;
  Gene Symbol: BAG6;
  Gene Name: BCL2-associated athanogene 6;
  ENSP ID: ENSP00000391613
MEPNDSTSTAVEEPDSLEVLVKTLDSQTRTFIVGAQMNVKEFKEHIAASVSIPSEKQRLIYQGRVLQDDKKLQEYNVGGKVIHLVERAPPQTHLPSGASSGTGSASATHGGGSPPGTRGPGASVHDRNANSYVMVGTFNLPSEPRVRLVMAQHMIRDIQTLLSRMECRGGPQPQHSQPPPQPPAVTPEPVALSSQTSEPVESEAPPREPMEAEEVEERAPAQNPELTPGPAPAGPTPAPETNA

SEQ ID NO: 8606 - protein, 226 aa, Homo sapiens
  Payload ID: 1783;
  Gene Symbol: BAG6;
  Gene Name: BCL2-associated athanogene 6;
  ENSP ID: ENSP00000391628
  MOD_RES (1)..(1): Any amino acid
XSGFGARLLELCNQGLFECLALNLHCLGGQQMELAAVINGRIRRMSRGVNPSLVSWLTTMMGLRLQVVLEHMPVGPDAILRYVRRVGDPPQPLPEEPMEVQGAERASPEPQRENASPAPGTTAEEAMSRGPPPAPEGGSRDEQDGASAETEPWAAAVPPEWVPIIQQDIQSQRKVKPQPPLSDAYLSGMPAKRRKLRSDIQKRLQEDPNYSPQRFPNAQRAFADDP

SEQ ID NO: 8607 - protein, 197 aa, Homo sapiens; identical to SEQ ID NO: 8592
  Payload ID: 1783;
  Gene Symbol: BAG6;
  Gene Name: BCL2-associated athanogene 6;
  ENSP ID: ENSP00000391693

SEQ ID NO: 8608 - protein, 215 aa, Homo sapiens
  Payload ID: 1783;
  Gene Symbol: BAG6;
  Gene Name: BCL2-associated athanogene 6;
  ENSP ID: ENSP00000391783
MEPNDSTSTAVEEPDSLEVLVKTLDSQTRTFIVGAQMNVKEFKEHIAASVSIPSEKQRLIYQGRVLQDDKKLQEYNVGGKVIHLVERAPPQTHLPSGASSGTGSASATHGGGSPPGTRGPGASVHDRNANSYVMVGTFNLPSEPRVRLVMAQHMIRDIQTLLSRMECRGGPQPQHSQPPPQPPAVTPEPVALSSQTSEPVESEAPPREPMEAEEV

SEQ ID NO: 8609 - protein, 136 aa, Homo sapiens
  Payload ID: 1783;
  Gene Symbol: BAG6;
  Gene Name: BCL2-associated athanogene 6;
  ENSP ID: ENSP00000391947
  MOD_RES (1)..(1): Any amino acid
XRMSRGVNPSLVSWLTTMMGLRLQVVLEHMPVGPDAILRYVRRVGDPPQPLPEEPMEVQGAERASPEPQEWVPIIQQDIQSQRKVKPQPPLSDAYLSGMPAKRRKLRSDIQKRLQEDPNYSPQRFPNAQRAFADDP

SEQ ID NO: 8610 - protein, 215 aa, Homo sapiens; identical to SEQ ID NO: 8608
  Payload ID: 1783;
  Gene Symbol: BAG6;
  Gene Name: BCL2-associated athanogene 6;
  ENSP ID: ENSP00000392110

SEQ ID NO: 8611 - protein, 232 aa, Homo sapiens; identical to SEQ ID NO: 8603
  Payload ID: 1783;
  Gene Symbol: BAG6;
  Gene Name: BCL2-associated athanogene 6;
  ENSP ID: ENSP00000392468

SEQ ID NO: 8612 - protein, 238 aa, Homo sapiens
  Payload ID: 1783;
  Gene Symbol: BAG6;
  Gene Name: BCL2-associated athanogene 6;
  ENSP ID: ENSP00000392563
SSAEGAPPPGPAPPPATSHPRVIRISHQSVEPVVMMHMNIQGPLSLSPCPDSGTQPGGVPSAPTGPLGPPGHGQTLGQQVPGFPTAPTRVVIARPTPPQARPSHPGGPPVSGTLQGAGLGTNASLAQMVSGLVGQLLMQPVLVAQGTPGMAPPPAPATASASAGTTNTATTAGPAPGGPAQPPPTPQPSMADLQFSQLLGNLLGPAGPGAGGSGVASPTITVAMPGVPAFLQGMTDFL

SEQ ID NO: 8613 - protein, 136 aa, Homo sapiens; identical to SEQ ID NO: 8609
  Payload ID: 1783;
  Gene Symbol: BAG6;
  Gene Name: BCL2-associated athanogene 6;
  ENSP ID: ENSP00000392630
  MOD_RES (1)..(1): Any amino acid

SEQ ID NO: 8614 - protein, 244 aa, Homo sapiens
  Payload ID: 1783;
  Gene Symbol: BAG6;
  Gene Name: BCL2-associated athanogene 6;
  ENSP ID: ENSP00000393280
MEPNDSTSTAVEEPDSLEVLVKTLDSQTRTFIVGAQMNVKEFKEHIAASVSIPSEKQRLIYQGRVLQDDKKLQEYNVGGKVIHLVERAPPQTHLPSGASSGTGSASATHGGGSPPGTRGPGASVHDRNANSYVMVGTFNLPSEPRVRLVMAQHMIRDIQTLLSRMECRGGPQPQHSQPPPQPPAVTPEPVALSSQTSEPVESEAPPREPMEAEEVEERAPAQNPELTPGPAPAGPTPAPETNAP

SEQ ID NO: 8615 - protein, 262 aa, Homo sapiens
  Payload ID: 1783;
  Gene Symbol: BAG6;
  Gene Name: BCL2-associated athanogene 6;
  ENSP ID: ENSP00000393367
MEPNDSTSTAVEEPDSLEVLVKTLDSQTRTFIVGAQMNVKEFKEHIAASVSIPSEKQRLIYQGRVLQDDKKLQEYNVGGKVIHLVERAPPQTHLPSGASSGTGSASATHGGGSPPGTRGPGASVHDRNANSYVMVGTFNLPSDGSAVDVHINMEQAPIQSEPRVRLVMAQHMIRDIQTLLSRMECRGGPQPQHSQPPPQPPAVTPEPVALSSQTSEPVESEAPPREPMEAEEVEERAPAQNPELTPGPAPAGPTPAPETNAP

SEQ ID NO: 8616 - protein, 259 aa, Homo sapiens; identical to SEQ ID NO: 8589
  Payload ID: 1783;
  Gene Symbol: BAG6;
  Gene Name: BCL2-associated athanogene 6;
  ENSP ID: ENSP00000393729

SEQ ID NO: 8617 - protein, 243 aa, Homo sapiens; identical to SEQ ID NO: 8605
  Payload ID: 1783;
  Gene Symbol: BAG6;
  Gene Name: BCL2-associated athanogene 6;
  ENSP ID: ENSP00000393877

SEQ ID NO: 8618 - protein, 259 aa, Homo sapiens; identical to SEQ ID NO: 8589
  Payload ID: 1783;
  Gene Symbol: BAG6;
  Gene Name: BCL2-associated athanogene 6;
  ENSP ID: ENSP00000394111

SEQ ID NO: 8619 - protein, 244 aa, Homo sapiens; identical to SEQ ID NO: 8614
  Payload ID: 1783;
  Gene Symbol: BAG6;
  Gene Name: BCL2-associated athanogene 6;
  ENSP ID: ENSP00000394240

SEQ ID NO: 8620 - protein, 243 aa, Homo sapiens; identical to SEQ ID NO: 8605
  Payload ID: 1783;
  Gene Symbol: BAG6;
  Gene Name: BCL2-associated athanogene 6;
  ENSP ID: ENSP00000394342

SEQ ID NO: 8621 - protein, 262 aa, Homo sapiens; identical to SEQ ID NO: 8615
  Payload ID: 1783;
  Gene Symbol: BAG6;
  Gene Name: BCL2-associated athanogene 6;
  ENSP ID: ENSP00000394608

SEQ ID NO: 8622 - protein, 244 aa, Homo sapiens; identical to SEQ ID NO: 8614
  Payload ID: 1783;
  Gene Symbol: BAG6;
  Gene Name: BCL2-associated athanogene 6;
  ENSP ID: ENSP00000394714

SEQ ID NO: 8623 - protein, 226 aa, Homo sapiens; identical to SEQ ID NO: 8606
  Payload ID: 1783;
  Gene Symbol: BAG6;
  Gene Name: BCL2-associated athanogene 6;
  ENSP ID: ENSP00000394801
  MOD_RES (1)..(1): Any amino acid

SEQ ID NO: 8624 - protein, 1126 aa, Homo sapiens
  Payload ID: 1783;
  Gene Symbol: BAG6;
  Gene Name: BCL2-associated athanogene 6;
  ENSP ID: ENSP00000394839
MEPNDSTSTAVEEPDSLEVLVKTLDSQTRTFIVGAQMNVKEFKEHIAASVSIPSEKQRLIYQGRVLQDDKKLQEYNVGGKVIHLVERAPPQTHLPSGASSGTGSASATHGGGSPPGTRGPGASVHDRNANSYVMVGTFNLPSDGSAVDVHINMEQAPIQSEPRVRLVMAQHMIRDIQTLLSRMECRGGPQPQHSQPPPQPPAVTPEPVALSSQTSEPVESEAPPREPMEAEEVEERAPAQNPELTPGPAPAGPTPAPETNAPNHPSPAEYVEVLQELQRLESRLQPFLQRYYEVLGAAATTDYNNNHEGREEDQRLINLVGESLRLLGNTFVALSDLRCNLACTPPRHLHVVRPMSHYTTPMVLQQAAIPIQINVGTTVTMTGNGTRPPPTPNAEAPPPGPGQASSVAPSSTNVESSAEGAPPPGPAPPPATSHPRVIRISHQSVEPVVMMHMNIQDSGTQPGGVPSAPTGPLGPPGHGQTLGQQVPGFPTAPTRVVIARPTPPQARPSHPGGPPVSGTLQGAGLGTNASLAQMVSGLVGQLLMQPVLVAQGTPGMAPPPAPATASASAGTTNTATTAGPAPGGPAQPPPTPQPSMADLQFSQLLGNLLGPAGPGAGGPGVASPTITVAMPGVPAFLQGMTDFLQATQTAPPPPPPPPPPPPAPEQQTMPPPGSPSGGAGSPGGLGLESLSPEFFTSVVQGVLSSLLGSLGARAGSSESIAAFIQRLSGSSNIFEPGADGALGFFGALLSLLCQNFSMVDVVMLLHGHFQPLQRLQPQLRSFFHQHYLGGQEPTPSNIRMATHTLITGLEEYVRESFSLVQVQPGVDIIRTNLEFLQEQFNSIAAHVLHCTDSGFGARLLELCNQGLFECLALNLHCLGGQQMELAAVINGRIRRMSRGVNPSLVSWLTTMMGLRLQVVLEHMPVGPDAILRYVRRVGDPPQPLPEEPMEVQGAERASPEPQRENASPAPGTTAEEAMSRGPPPAPEGGSRDEQDGASAETEPWAAAVPPEWVPIIQQDIQSQRKVKPQPPLSDAYLSGMPAKRRKTMQGEGPQLLLSEAVSRAAKAAGARPLTSPESLSRDLEAPEVQESYRQQLRSDIQKRLQEDPNYSPQRFPNAQRAFADDP

SEQ ID NO: 8625 - protein, 244 aa, Homo sapiens; identical to SEQ ID NO: 8614
  Payload ID: 1783;
  Gene Symbol: BAG6;
  Gene Name: BCL2-associated athanogene 6;
  ENSP ID: ENSP00000394856

SEQ ID NO: 8626 - protein, 215 aa, Homo sapiens; identical to SEQ ID NO: 8608
  Payload ID: 1783;
  Gene Symbol: BAG6;
  Gene Name: BCL2-associated athanogene 6;
  ENSP ID: ENSP00000395063

SEQ ID NO: 8627 - protein, 206 aa, Homo sapiens; identical to SEQ ID NO: 8597
  Payload ID: 1783;
  Gene Symbol: BAG6;
  Gene Name: BCL2-associated athanogene 6;
  ENSP ID: ENSP00000395856

SEQ ID NO: 8628 - protein, 238 aa, Homo sapiens; identical to SEQ ID NO: 8593
  Payload ID: 1783;
  Gene Symbol: BAG6;
  Gene Name: BCL2-associated athanogene 6;
  ENSP ID: ENSP00000396028

SEQ ID NO: 8629 - protein, 515 aa, Homo sapiens
  Payload ID: 1783;
  Gene Symbol: BAG6;
  Gene Name: BCL2-associated athanogene 6;
  ENSP ID: ENSP00000396036
MEPNDSTSTAVEEPDSLEVLVKTLDSQTRTFIVGAQMNVKEFKEHIAASVSIPSEKQRLIYQGRVLQDDKKLQEYNVGGKVIHLVERAPPQTHLPSGASSGTGSASATHGGGSPPGTRGPGASVHDRNANSYVMVGTFNLPSDGSAVDVHINMEQAPIQSEPRVRLVMAQHMIRDIQTLLSRMECRGGPQPQHSQPPPQPPAVTPEPVALSSQTSEPVESEAPPREPMEAEEVEERAPAQNPELTPGPAPAGPTPAPETNAPNHPSPAEYVEVLQELQRLESRLQPFLQRYYEVLGAAATTDYNNNHEGREEDQRLINLVGESLRLLGNTFVALSDLRCNLACTPPRHLHVVRPMSHYTTPMVLQQAAIPIQINVGTTVTMTGNGTRPPPTPNAEAPPPGPGQASSVAPSSTNVESSAEGAPPPGPAPPPATSHPRVIRISHQSVEPVVMMHMNIQDSGTQPGGVPSAPTGPLGPPGHGQTLGSTLIQLPSLPPEFMHAVAHQITHQAMVAAVAS

SEQ ID NO: 8630 - protein, 238 aa, Homo sapiens; identical to SEQ ID NO: 8612
  Payload ID: 1783;
  Gene Symbol: BAG6;
  Gene Name: BCL2-associated athanogene 6;
  ENSP ID: ENSP00000396284

SEQ ID NO: 8631 - protein, 158 aa, Homo sapiens; identical to SEQ ID NO: 8598
  Payload ID: 1783;
  Gene Symbol: BAG6;
  Gene Name: BCL2-associated athanogene 6;
  ENSP ID: ENSP00000396503

SEQ ID NO: 8632 - protein, 245 aa, Homo sapiens
  Payload ID: 1783;
  Gene Symbol: BAG6;
  Gene Name: BCL2-associated athanogene 6;
  ENSP ID: ENSP00000396893
PPRHLHVVRPMSHYTTPMVLQQAAIPIQINVGTTVTMTGPAPPPATSHPRVIRISHQSVEPVVMMHMNIQDSGTQPGGVPSAPTGPLGPPGHGQTLGQQVPGFPTAPTRVVIARPTPPQARPSHPGGPPVSGTLQGAGLGTNASLAQMVSGLVGQLLMQPVLVAQGTPGMAPPPAPATASASAGTTNTATTAGPAPGGPAQPPPTPQPSMADLQFSQLLGNLLGPAGPGAGGPGVASPTITVAMP

SEQ ID NO: 8633 - protein, 245 aa, Homo sapiens
  Payload ID: 1783;
  Gene Symbol: BAG6;
  Gene Name: BCL2-associated athanogene 6;
  ENSP ID: ENSP00000397008
PPRHLHVVRPMSHYTTPMVLQQAAIPIQINVGTTVTMTGPAPPPATSHPRVIRISHQSVEPVVMMHMNIQDSGTQPGGVPSAPTGPLGPPGHGQTLGQQVPGFPTAPTRVVIARPTPPQARPSHPGGPPVSGTLQGAGLGTNASLAQMVSGLVGQLLMQPVLVAQGTPGMAPPPAPATASASAGTTNTATTAGPAPGGPAQPPPTPQPSMADLQFSQLLGNLLGPAGPGAGGSGVASPTITVAMP

SEQ ID NO: 8634 - protein, 244 aa, Homo sapiens; identical to SEQ ID NO: 8614
  Payload ID: 1783;
  Gene Symbol: BAG6;
  Gene Name: BCL2-associated athanogene 6;
  ENSP ID: ENSP00000397639

SEQ ID NO: 8635 - protein, 185 aa, Homo sapiens; identical to SEQ ID NO: 8604
  Payload ID: 1783;
  Gene Symbol: BAG6;
  Gene Name: BCL2-associated athanogene 6;
  ENSP ID: ENSP00000397702
  MOD_RES (1)..(1): Any amino acid

SEQ ID NO: 8636 - protein, 1132 aa, Homo sapiens; identical to SEQ ID NO: 8583
  Payload ID: 1783;
  Gene Symbol: BAG6;
  Gene Name: BCL2-associated athanogene 6;
  Uniprot ID:  P46379;
  ENSP ID: ENSP00000397894

SEQ ID NO: 8637 - protein, 259 aa, Homo sapiens; identical to SEQ ID NO: 8589
  Payload ID: 1783;
  Gene Symbol: BAG6;
  Gene Name: BCL2-associated athanogene 6;
  ENSP ID: ENSP00000397909

SEQ ID NO: 8638 - protein, 742 aa, Homo sapiens; identical to SEQ ID NO: 8599
  Payload ID: 1783;
  Gene Symbol: BAG6;
  Gene Name: BCL2-associated athanogene 6;
  ENSP ID: ENSP00000397978

SEQ ID NO: 8639 - protein, 245 aa, Homo sapiens; identical to SEQ ID NO: 8632
  Payload ID: 1783;
  Gene Symbol: BAG6;
  Gene Name: BCL2-associated athanogene 6;
  ENSP ID: ENSP00000398389

SEQ ID NO: 8640 - protein, 226 aa, Homo sapiens; identical to SEQ ID NO: 8606
  Payload ID: 1783;
  Gene Symbol: BAG6;
  Gene Name: BCL2-associated athanogene 6;
  ENSP ID: ENSP00000398547
  MOD_RES (1)..(1): Any amino acid

SEQ ID NO: 8641 - protein, 262 aa, Homo sapiens; identical to SEQ ID NO: 8615
  Payload ID: 1783;
  Gene Symbol: BAG6;
  Gene Name: BCL2-associated athanogene 6;
  ENSP ID: ENSP00000399312

SEQ ID NO: 8642 - protein, 206 aa, Homo sapiens; identical to SEQ ID NO: 8597
  Payload ID: 1783;
  Gene Symbol: BAG6;
  Gene Name: BCL2-associated athanogene 6;
  ENSP ID: ENSP00000399508

SEQ ID NO: 8643 - protein, 185 aa, Homo sapiens; identical to SEQ ID NO: 8604
  Payload ID: 1783;
  Gene Symbol: BAG6;
  Gene Name: BCL2-associated athanogene 6;
  ENSP ID: ENSP00000399785
  MOD_RES (1)..(1): Any amino acid

SEQ ID NO: 8644 - protein, 515 aa, Homo sapiens; identical to SEQ ID NO: 8629
  Payload ID: 1783;
  Gene Symbol: BAG6;
  Gene Name: BCL2-associated athanogene 6;
  ENSP ID: ENSP00000399946

SEQ ID NO: 8645 - protein, 742 aa, Homo sapiens; identical to SEQ ID NO: 8599
  Payload ID: 1783;
  Gene Symbol: BAG6;
  Gene Name: BCL2-associated athanogene 6;
  ENSP ID: ENSP00000400275

SEQ ID NO: 8646 - protein, 262 aa, Homo sapiens; identical to SEQ ID NO: 8615
  Payload ID: 1783;
  Gene Symbol: BAG6;
  Gene Name: BCL2-associated athanogene 6;
  ENSP ID: ENSP00000400353

SEQ ID NO: 8647 - protein, 206 aa, Homo sapiens; identical to SEQ ID NO: 8597
  Payload ID: 1783;
  Gene Symbol: BAG6;
  Gene Name: BCL2-associated athanogene 6;
  ENSP ID: ENSP00000400611

SEQ ID NO: 8648 - protein, 244 aa, Homo sapiens; identical to SEQ ID NO: 8614
  Payload ID: 1783;
  Gene Symbol: BAG6;
  Gene Name: BCL2-associated athanogene 6;
  ENSP ID: ENSP00000400641

SEQ ID NO: 8649 - protein, 158 aa, Homo sapiens; identical to SEQ ID NO: 8598
  Payload ID: 1783;
  Gene Symbol: BAG6;
  Gene Name: BCL2-associated athanogene 6;
  ENSP ID: ENSP00000400877

SEQ ID NO: 8650 - protein, 158 aa, Homo sapiens; identical to SEQ ID NO: 8598
  Payload ID: 1783;
  Gene Symbol: BAG6;
  Gene Name: BCL2-associated athanogene 6;
  ENSP ID: ENSP00000400968

SEQ ID NO: 8651 - protein, 244 aa, Homo sapiens; identical to SEQ ID NO: 8614
  Payload ID: 1783;
  Gene Symbol: BAG6;
  Gene Name: BCL2-associated athanogene 6;
  ENSP ID: ENSP00000401031

SEQ ID NO: 8652 - protein, 206 aa, Homo sapiens; identical to SEQ ID NO: 8597
  Payload ID: 1783;
  Gene Symbol: BAG6;
  Gene Name: BCL2-associated athanogene 6;
  ENSP ID: ENSP00000401218

SEQ ID NO: 8653 - protein, 262 aa, Homo sapiens; identical to SEQ ID NO: 8615
  Payload ID: 1783;
  Gene Symbol: BAG6;
  Gene Name: BCL2-associated athanogene 6;
  ENSP ID: ENSP00000401440

SEQ ID NO: 8654 - protein, 245 aa, Homo sapiens; identical to SEQ ID NO: 8633
  Payload ID: 1783;
  Gene Symbol: BAG6;
  Gene Name: BCL2-associated athanogene 6;
  ENSP ID: ENSP00000402429

SEQ ID NO: 8655 - protein, 742 aa, Homo sapiens; identical to SEQ ID NO: 8594
  Payload ID: 1783;
  Gene Symbol: BAG6;
  Gene Name: BCL2-associated athanogene 6;
  ENSP ID: ENSP00000402441

SEQ ID NO: 8656 - protein, 258 aa, Homo sapiens; identical to SEQ ID NO: 8596
  Payload ID: 1783;
  Gene Symbol: BAG6;
  Gene Name: BCL2-associated athanogene 6;
  ENSP ID: ENSP00000402585

SEQ ID NO: 8657 - protein, 903 aa, Homo sapiens
  Payload ID: 1783;
  Gene Symbol: BAG6;
  Gene Name: BCL2-associated athanogene 6;
  Uniprot ID:  P46379;
  ENSP ID: ENSP00000402856
MEPNDSTSTAVEEPDSLEVLVKTLDSQTRTFIVGAQMNVKEFKEHIAASVSIPSEKQRLIYQGRVLQDDKKLQEYNVGGKVIHLVERAPPQTHLPSGASSGTGSASATHGGGSPPGTRGPGASVHDRNANSYVMVGTFNLPSDGSAVDVHINMEQAPIQSEPRVRLVMAQHMIRDIQTLLSRMECRGGPQPQHSQPPPQPPAVTPEPVALSSQTSEPVESEAPPREPMEAEEVEERAPAQNPELTPGPAPAGPTPAPETNAPNHPSPAEYVEVLQELQRLESRLQPFLQRYYEVLGAAATTDYNNNHEGREEDQRLINLVGESLRLLGNTFVALSDLRCNLACTPPRHLHVVRPMSHYTTPMVLQQAAIPIQINVGTTVTMTGNGTRPPPTPNAEAPPPGPGQASSVAPSSTNVESSAEGAPPPGPAPPPATSHPRVIRISHQSVEPVVMMHMNIQDSGTQPGGVPSAPTGPLGPPGHGQTLGQQVPGFPTAPTRVVIARPTPPQARPSHPGGPPVSGTLGAGLGTNASLAQMVSGLVGQLLMQPVLVAQGTPGSPGGLGLESLSPEFFTSVVQGVLSSLLGSLGARAGSSESIAAFIQRLSGSSNIFEPGADGALGFFGALLSLLCQNFSMVDVVMLLHGHFQPLQRLQPQLRSFFHQHYLGGQEPTPSNIRMATHTLITGLEEYVRESFSLVQVQPGVDIIRTNLEFLQEQFNSIAAHVLHCTDSGFGARLLELCNQGLFECLALNLHCLGGQQMELAAVINGRIRRMSRGVNPSLVSWLTTMMGLRLQVVLEHMPVGPDAILRYVRRVGDPPQPLPEEPMEVQGAERASPEPQEWVPIIQQDIQSQRKVKPQPPLSDAYLSGMPAKRRKLRSDIQKRLQEDPNYSPQRFPNAQRAFADDP

SEQ ID NO: 8658 - protein, 515 aa, Homo sapiens; identical to SEQ ID NO: 8629
  Payload ID: 1783;
  Gene Symbol: BAG6;
  Gene Name: BCL2-associated athanogene 6;
  ENSP ID: ENSP00000402863

SEQ ID NO: 8659 - protein, 244 aa, Homo sapiens; identical to SEQ ID NO: 8614
  Payload ID: 1783;
  Gene Symbol: BAG6;
  Gene Name: BCL2-associated athanogene 6;
  ENSP ID: ENSP00000403166

SEQ ID NO: 8660 - protein, 515 aa, Homo sapiens; identical to SEQ ID NO: 8629
  Payload ID: 1783;
  Gene Symbol: BAG6;
  Gene Name: BCL2-associated athanogene 6;
  ENSP ID: ENSP00000403275

SEQ ID NO: 8661 - protein, 258 aa, Homo sapiens; identical to SEQ ID NO: 8596
  Payload ID: 1783;
  Gene Symbol: BAG6;
  Gene Name: BCL2-associated athanogene 6;
  ENSP ID: ENSP00000403277

SEQ ID NO: 8662 - protein, 515 aa, Homo sapiens; identical to SEQ ID NO: 8629
  Payload ID: 1783;
  Gene Symbol: BAG6;
  Gene Name: BCL2-associated athanogene 6;
  ENSP ID: ENSP00000403292

SEQ ID NO: 8663 - protein, 262 aa, Homo sapiens; identical to SEQ ID NO: 8615
  Payload ID: 1783;
  Gene Symbol: BAG6;
  Gene Name: BCL2-associated athanogene 6;
  ENSP ID: ENSP00000403436

SEQ ID NO: 8664 - protein, 1126 aa, Homo sapiens; identical to SEQ ID NO: 8624
  Payload ID: 1783;
  Gene Symbol: BAG6;
  Gene Name: BCL2-associated athanogene 6;
  ENSP ID: ENSP00000403652

SEQ ID NO: 8665 - protein, 515 aa, Homo sapiens; identical to SEQ ID NO: 8629
  Payload ID: 1783;
  Gene Symbol: BAG6;
  Gene Name: BCL2-associated athanogene 6;
  ENSP ID: ENSP00000404299

SEQ ID NO: 8666 - protein, 158 aa, Homo sapiens; identical to SEQ ID NO: 8598
  Payload ID: 1783;
  Gene Symbol: BAG6;
  Gene Name: BCL2-associated athanogene 6;
  ENSP ID: ENSP00000404578

SEQ ID NO: 8667 - protein, 215 aa, Homo sapiens; identical to SEQ ID NO: 8608
  Payload ID: 1783;
  Gene Symbol: BAG6;
  Gene Name: BCL2-associated athanogene 6;
  ENSP ID: ENSP00000404703

SEQ ID NO: 8668 - protein, 262 aa, Homo sapiens; identical to SEQ ID NO: 8615
  Payload ID: 1783;
  Gene Symbol: BAG6;
  Gene Name: BCL2-associated athanogene 6;
  ENSP ID: ENSP00000404813

SEQ ID NO: 8669 - protein, 262 aa, Homo sapiens; identical to SEQ ID NO: 8615
  Payload ID: 1783;
  Gene Symbol: BAG6;
  Gene Name: BCL2-associated athanogene 6;
  ENSP ID: ENSP00000404971

SEQ ID NO: 8670 - protein, 197 aa, Homo sapiens; identical to SEQ ID NO: 8592
  Payload ID: 1783;
  Gene Symbol: BAG6;
  Gene Name: BCL2-associated athanogene 6;
  ENSP ID: ENSP00000405371

SEQ ID NO: 8671 - protein, 243 aa, Homo sapiens; identical to SEQ ID NO: 8605
  Payload ID: 1783;
  Gene Symbol: BAG6;
  Gene Name: BCL2-associated athanogene 6;
  ENSP ID: ENSP00000405607

SEQ ID NO: 8672 - protein, 185 aa, Homo sapiens; identical to SEQ ID NO: 8604
  Payload ID: 1783;
  Gene Symbol: BAG6;
  Gene Name: BCL2-associated athanogene 6;
  ENSP ID: ENSP00000405644
  MOD_RES (1)..(1): Any amino acid

SEQ ID NO: 8673 - protein, 742 aa, Homo sapiens; identical to SEQ ID NO: 8599
  Payload ID: 1783;
  Gene Symbol: BAG6;
  Gene Name: BCL2-associated athanogene 6;
  ENSP ID: ENSP00000405731

SEQ ID NO: 8674 - protein, 259 aa, Homo sapiens; identical to SEQ ID NO: 8589
  Payload ID: 1783;
  Gene Symbol: BAG6;
  Gene Name: BCL2-associated athanogene 6;
  ENSP ID: ENSP00000405744

SEQ ID NO: 8675 - protein, 238 aa, Homo sapiens; identical to SEQ ID NO: 8593
  Payload ID: 1783;
  Gene Symbol: BAG6;
  Gene Name: BCL2-associated athanogene 6;
  ENSP ID: ENSP00000406001

SEQ ID NO: 8676 - protein, 244 aa, Homo sapiens; identical to SEQ ID NO: 8614
  Payload ID: 1783;
  Gene Symbol: BAG6;
  Gene Name: BCL2-associated athanogene 6;
  ENSP ID: ENSP00000406111

SEQ ID NO: 8677 - protein, 262 aa, Homo sapiens; identical to SEQ ID NO: 8615
  Payload ID: 1783;
  Gene Symbol: BAG6;
  Gene Name: BCL2-associated athanogene 6;
  ENSP ID: ENSP00000406240

SEQ ID NO: 8678 - protein, 206 aa, Homo sapiens; identical to SEQ ID NO: 8597
  Payload ID: 1783;
  Gene Symbol: BAG6;
  Gene Name: BCL2-associated athanogene 6;
  ENSP ID: ENSP00000406302

SEQ ID NO: 8679 - protein, 243 aa, Homo sapiens; identical to SEQ ID NO: 8605
  Payload ID: 1783;
  Gene Symbol: BAG6;
  Gene Name: BCL2-associated athanogene 6;
  ENSP ID: ENSP00000406319

SEQ ID NO: 8680 - protein, 185 aa, Homo sapiens; identical to SEQ ID NO: 8604
  Payload ID: 1783;
  Gene Symbol: BAG6;
  Gene Name: BCL2-associated athanogene 6;
  ENSP ID: ENSP00000406434
  MOD_RES (1)..(1): Any amino acid

SEQ ID NO: 8681 - protein, 197 aa, Homo sapiens; identical to SEQ ID NO: 8592
  Payload ID: 1783;
  Gene Symbol: BAG6;
  Gene Name: BCL2-associated athanogene 6;
  ENSP ID: ENSP00000406436

SEQ ID NO: 8682 - protein, 215 aa, Homo sapiens; identical to SEQ ID NO: 8608
  Payload ID: 1783;
  Gene Symbol: BAG6;
  Gene Name: BCL2-associated athanogene 6;
  ENSP ID: ENSP00000406589

SEQ ID NO: 8683 - protein, 244 aa, Homo sapiens; identical to SEQ ID NO: 8614
  Payload ID: 1783;
  Gene Symbol: BAG6;
  Gene Name: BCL2-associated athanogene 6;
  ENSP ID: ENSP00000406766

SEQ ID NO: 8684 - protein, 258 aa, Homo sapiens; identical to SEQ ID NO: 8596
  Payload ID: 1783;
  Gene Symbol: BAG6;
  Gene Name: BCL2-associated athanogene 6;
  ENSP ID: ENSP00000406914

SEQ ID NO: 8685 - protein, 158 aa, Homo sapiens; identical to SEQ ID NO: 8598
  Payload ID: 1783;
  Gene Symbol: BAG6;
  Gene Name: BCL2-associated athanogene 6;
  ENSP ID: ENSP00000407060

SEQ ID NO: 8686 - protein, 232 aa, Homo sapiens; identical to SEQ ID NO: 8603
  Payload ID: 1783;
  Gene Symbol: BAG6;
  Gene Name: BCL2-associated athanogene 6;
  ENSP ID: ENSP00000407175

SEQ ID NO: 8687 - protein, 244 aa, Homo sapiens; identical to SEQ ID NO: 8614
  Payload ID: 1783;
  Gene Symbol: BAG6;
  Gene Name: BCL2-associated athanogene 6;
  ENSP ID: ENSP00000407212

SEQ ID NO: 8688 - protein, 232 aa, Homo sapiens; identical to SEQ ID NO: 8603
  Payload ID: 1783;
  Gene Symbol: BAG6;
  Gene Name: BCL2-associated athanogene 6;
  ENSP ID: ENSP00000407297

SEQ ID NO: 8689 - protein, 243 aa, Homo sapiens; identical to SEQ ID NO: 8605
  Payload ID: 1783;
  Gene Symbol: BAG6;
  Gene Name: BCL2-associated athanogene 6;
  ENSP ID: ENSP00000407500

SEQ ID NO: 8690 - protein, 197 aa, Homo sapiens; identical to SEQ ID NO: 8592
  Payload ID: 1783;
  Gene Symbol: BAG6;
  Gene Name: BCL2-associated athanogene 6;
  ENSP ID: ENSP00000407668

SEQ ID NO: 8691 - protein, 136 aa, Homo sapiens; identical to SEQ ID NO: 8609
  Payload ID: 1783;
  Gene Symbol: BAG6;
  Gene Name: BCL2-associated athanogene 6;
  ENSP ID: ENSP00000407701
  MOD_RES (1)..(1): Any amino acid

SEQ ID NO: 8692 - protein, 1126 aa, Homo sapiens; identical to SEQ ID NO: 8624
  Payload ID: 1783;
  Gene Symbol: BAG6;
  Gene Name: BCL2-associated athanogene 6;
  ENSP ID: ENSP00000407867

SEQ ID NO: 8693 - protein, 197 aa, Homo sapiens; identical to SEQ ID NO: 8592
  Payload ID: 1783;
  Gene Symbol: BAG6;
  Gene Name: BCL2-associated athanogene 6;
  ENSP ID: ENSP00000408125

SEQ ID NO: 8694 - protein, 215 aa, Homo sapiens; identical to SEQ ID NO: 8608
  Payload ID: 1783;
  Gene Symbol: BAG6;
  Gene Name: BCL2-associated athanogene 6;
  ENSP ID: ENSP00000408363

SEQ ID NO: 8695 - protein, 1126 aa, Homo sapiens; identical to SEQ ID NO: 8624
  Payload ID: 1783;
  Gene Symbol: BAG6;
  Gene Name: BCL2-associated athanogene 6;
  ENSP ID: ENSP00000408554

SEQ ID NO: 8696 - protein, 232 aa, Homo sapiens; identical to SEQ ID NO: 8603
  Payload ID: 1783;
  Gene Symbol: BAG6;
  Gene Name: BCL2-associated athanogene 6;
  ENSP ID: ENSP00000408565

SEQ ID NO: 8697 - protein, 136 aa, Homo sapiens; identical to SEQ ID NO: 8609
  Payload ID: 1783;
  Gene Symbol: BAG6;
  Gene Name: BCL2-associated athanogene 6;
  ENSP ID: ENSP00000408761
  MOD_RES (1)..(1): Any amino acid

SEQ ID NO: 8698 - protein, 136 aa, Homo sapiens; identical to SEQ ID NO: 8609
  Payload ID: 1783;
  Gene Symbol: BAG6;
  Gene Name: BCL2-associated athanogene 6;
  ENSP ID: ENSP00000408946
  MOD_RES (1)..(1): Any amino acid

SEQ ID NO: 8699 - protein, 742 aa, Homo sapiens; identical to SEQ ID NO: 8594
  Payload ID: 1783;
  Gene Symbol: BAG6;
  Gene Name: BCL2-associated athanogene 6;
  ENSP ID: ENSP00000409057

SEQ ID NO: 8700 - protein, 262 aa, Homo sapiens; identical to SEQ ID NO: 8615
  Payload ID: 1783;
  Gene Symbol: BAG6;
  Gene Name: BCL2-associated athanogene 6;
  ENSP ID: ENSP00000409196

SEQ ID NO: 8701 - protein, 226 aa, Homo sapiens; identical to SEQ ID NO: 8606
  Payload ID: 1783;
  Gene Symbol: BAG6;
  Gene Name: BCL2-associated athanogene 6;
  ENSP ID: ENSP00000409254
  MOD_RES (1)..(1): Any amino acid

SEQ ID NO: 8702 - protein, 244 aa, Homo sapiens; identical to SEQ ID NO: 8614
  Payload ID: 1783;
  Gene Symbol: BAG6;
  Gene Name: BCL2-associated athanogene 6;
  ENSP ID: ENSP00000409846

SEQ ID NO: 8703 - protein, 262 aa, Homo sapiens; identical to SEQ ID NO: 8615
  Payload ID: 1783;
  Gene Symbol: BAG6;
  Gene Name: BCL2-associated athanogene 6;
  ENSP ID: ENSP00000409947

SEQ ID NO: 8704 - protein, 1126 aa, Homo sapiens; identical to SEQ ID NO: 8582
  Payload ID: 1783;
  Gene Symbol: BAG6;
  Gene Name: BCL2-associated athanogene 6;
  Uniprot ID:  P46379;
  ENSP ID: ENSP00000410156

SEQ ID NO: 8705 - protein, 215 aa, Homo sapiens; identical to SEQ ID NO: 8608
  Payload ID: 1783;
  Gene Symbol: BAG6;
  Gene Name: BCL2-associated athanogene 6;
  ENSP ID: ENSP00000410232

SEQ ID NO: 8706 - protein, 238 aa, Homo sapiens; identical to SEQ ID NO: 8612
  Payload ID: 1783;
  Gene Symbol: BAG6;
  Gene Name: BCL2-associated athanogene 6;
  ENSP ID: ENSP00000410280

SEQ ID NO: 8707 - protein, 232 aa, Homo sapiens; identical to SEQ ID NO: 8603
  Payload ID: 1783;
  Gene Symbol: BAG6;
  Gene Name: BCL2-associated athanogene 6;
  ENSP ID: ENSP00000410308

SEQ ID NO: 8708 - protein, 244 aa, Homo sapiens; identical to SEQ ID NO: 8614
  Payload ID: 1783;
  Gene Symbol: BAG6;
  Gene Name: BCL2-associated athanogene 6;
  ENSP ID: ENSP00000410343

SEQ ID NO: 8709 - protein, 238 aa, Homo sapiens; identical to SEQ ID NO: 8612
  Payload ID: 1783;
  Gene Symbol: BAG6;
  Gene Name: BCL2-associated athanogene 6;
  ENSP ID: ENSP00000410644

SEQ ID NO: 8710 - protein, 258 aa, Homo sapiens; identical to SEQ ID NO: 8596
  Payload ID: 1783;
  Gene Symbol: BAG6;
  Gene Name: BCL2-associated athanogene 6;
  ENSP ID: ENSP00000411043

SEQ ID NO: 8711 - protein, 515 aa, Homo sapiens; identical to SEQ ID NO: 8629
  Payload ID: 1783;
  Gene Symbol: BAG6;
  Gene Name: BCL2-associated athanogene 6;
  ENSP ID: ENSP00000411083

SEQ ID NO: 8712 - protein, 197 aa, Homo sapiens; identical to SEQ ID NO: 8592
  Payload ID: 1783;
  Gene Symbol: BAG6;
  Gene Name: BCL2-associated athanogene 6;
  ENSP ID: ENSP00000411412

SEQ ID NO: 8713 - protein, 245 aa, Homo sapiens; identical to SEQ ID NO: 8633
  Payload ID: 1783;
  Gene Symbol: BAG6;
  Gene Name: BCL2-associated athanogene 6;
  ENSP ID: ENSP00000411460

SEQ ID NO: 8714 - protein, 1126 aa, Homo sapiens; identical to SEQ ID NO: 8582
  Payload ID: 1783;
  Gene Symbol: BAG6;
  Gene Name: BCL2-associated athanogene 6;
  Uniprot ID:  P46379;
  ENSP ID: ENSP00000412110

SEQ ID NO: 8715 - protein, 136 aa, Homo sapiens; identical to SEQ ID NO: 8609
  Payload ID: 1783;
  Gene Symbol: BAG6;
  Gene Name: BCL2-associated athanogene 6;
  ENSP ID: ENSP00000412274
  MOD_RES (1)..(1): Any amino acid

SEQ ID NO: 8716 - protein, 136 aa, Homo sapiens; identical to SEQ ID NO: 8609
  Payload ID: 1783;
  Gene Symbol: BAG6;
  Gene Name: BCL2-associated athanogene 6;
  ENSP ID: ENSP00000413225
  MOD_RES (1)..(1): Any amino acid

SEQ ID NO: 8717 - protein, 206 aa, Homo sapiens; identical to SEQ ID NO: 8597
  Payload ID: 1783;
  Gene Symbol: BAG6;
  Gene Name: BCL2-associated athanogene 6;
  ENSP ID: ENSP00000413317

SEQ ID NO: 8718 - protein, 1132 aa, Homo sapiens
  Payload ID: 1783;
  Gene Symbol: BAG6;
  Gene Name: BCL2-associated athanogene 6;
  ENSP ID: ENSP00000413327
MEPNDSTSTAVEEPDSLEVLVKTLDSQTRTFIVGAQMNVKEFKEHIAASVSIPSEKQRLIYQGRVLQDDKKLQEYNVGGKVIHLVERAPPQTHLPSGASSGTGSASATHGGGSPPGTRGPGASVHDRNANSYVMVGTFNLPSDGSAVDVHINMEQAPIQSEPRVRLVMAQHMIRDIQTLLSRMETLPYLQCRGGPQPQHSQPPPQPPAVTPEPVALSSQTSEPVESEAPPREPMEAEEVEERAPAQNPELTPGPAPAGPTPAPETNAPNHPSPAEYVEVLQELQRLESRLQPFLQRYYEVLGAAATTDYNNNHEGREEDQRLINLVGESLRLLGNTFVALSDLRCNLACTPPRHLHVVRPMSHYTTPMVLQQAAIPIQINVGTTVTMTGNGTRPPPTPNAEAPPPGPGQASSVAPSSTNVESSAEGAPPPGPAPPPATSHPRVIRISHQSVEPVVMMHMNIQDSGTQPGGVPSAPTGPLGPPGHGQTLGQQVPGFPTAPTRVVIARPTPPQARPSHPGGPPVSGTLQGAGLGTNASLAQMVSGLVGQLLMQPVLVAQGTPGMAPPPAPATASASAGTTNTATTAGPAPGGPAQPPPTPQPSMADLQFSQLLGNLLGPAGPGAGGPGVASPTITVAMPGVPAFLQGMTDFLQATQTAPPPPPPPPPPPPAPEQQTMPPPGSPSGGAGSPGGLGLESLSPEFFTSVVQGVLSSLLGSLGARAGSSESIAAFIQRLSGSSNIFEPGADGALGFFGALLSLLCQNFSMVDVVMLLHGHFQPLQRLQPQLRSFFHQHYLGGQEPTPSNIRMATHTLITGLEEYVRESFSLVQVQPGVDIIRTNLEFLQEQFNSIAAHVLHCTDSGFGARLLELCNQGLFECLALNLHCLGGQQMELAAVINGRIRRMSRGVNPSLVSWLTTMMGLRLQVVLEHMPVGPDAILRYVRRVGDPPQPLPEEPMEVQGAERASPEPQRENASPAPGTTAEEAMSRGPPPAPEGGSRDEQDGASAETEPWAAAVPPEWVPIIQQDIQSQRKVKPQPPLSDAYLSGMPAKRRKTMQGEGPQLLLSEAVSRAAKAAGARPLTSPESLSRDLEAPEVQESYRQQLRSDIQKRLQEDPNYSPQRFPNAQRAFADDP

SEQ ID NO: 8719 - protein, 1132 aa, Homo sapiens; identical to SEQ ID NO: 8718
  Payload ID: 1783;
  Gene Symbol: BAG6;
  Gene Name: BCL2-associated athanogene 6;
  ENSP ID: ENSP00000413341

SEQ ID NO: 8720 - protein, 185 aa, Homo sapiens; identical to SEQ ID NO: 8604
  Payload ID: 1783;
  Gene Symbol: BAG6;
  Gene Name: BCL2-associated athanogene 6;
  ENSP ID: ENSP00000413422
  MOD_RES (1)..(1): Any amino acid

SEQ ID NO: 8721 - protein, 245 aa, Homo sapiens; identical to SEQ ID NO: 8632
  Payload ID: 1783;
  Gene Symbol: BAG6;
  Gene Name: BCL2-associated athanogene 6;
  ENSP ID: ENSP00000413551

SEQ ID NO: 8722 - protein, 262 aa, Homo sapiens; identical to SEQ ID NO: 8615
  Payload ID: 1783;
  Gene Symbol: BAG6;
  Gene Name: BCL2-associated athanogene 6;
  ENSP ID: ENSP00000413561

SEQ ID NO: 8723 - protein, 1126 aa, Homo sapiens; identical to SEQ ID NO: 8582
  Payload ID: 1783;
  Gene Symbol: BAG6;
  Gene Name: BCL2-associated athanogene 6;
  Uniprot ID:  P46379;
  ENSP ID: ENSP00000413698

SEQ ID NO: 8724 - protein, 226 aa, Homo sapiens; identical to SEQ ID NO: 8606
  Payload ID: 1783;
  Gene Symbol: BAG6;
  Gene Name: BCL2-associated athanogene 6;
  ENSP ID: ENSP00000414148
  MOD_RES (1)..(1): Any amino acid

SEQ ID NO: 8725 - protein, 243 aa, Homo sapiens; identical to SEQ ID NO: 8605
  Payload ID: 1783;
  Gene Symbol: BAG6;
  Gene Name: BCL2-associated athanogene 6;
  ENSP ID: ENSP00000414697

SEQ ID NO: 8726 - protein, 258 aa, Homo sapiens; identical to SEQ ID NO: 8596
  Payload ID: 1783;
  Gene Symbol: BAG6;
  Gene Name: BCL2-associated athanogene 6;
  ENSP ID: ENSP00000414702

SEQ ID NO: 8727 - protein, 244 aa, Homo sapiens; identical to SEQ ID NO: 8614
  Payload ID: 1783;
  Gene Symbol: BAG6;
  Gene Name: BCL2-associated athanogene 6;
  ENSP ID: ENSP00000414815

SEQ ID NO: 8728 - protein, 1126 aa, Homo sapiens; identical to SEQ ID NO: 8624
  Payload ID: 1783;
  Gene Symbol: BAG6;
  Gene Name: BCL2-associated athanogene 6;
  ENSP ID: ENSP00000415330

SEQ ID NO: 8729 - protein, 1132 aa, Homo sapiens; identical to SEQ ID NO: 8718
  Payload ID: 1783;
  Gene Symbol: BAG6;
  Gene Name: BCL2-associated athanogene 6;
  ENSP ID: ENSP00000415427

SEQ ID NO: 8730 - protein, 262 aa, Homo sapiens; identical to SEQ ID NO: 8615
  Payload ID: 1783;
  Gene Symbol: BAG6;
  Gene Name: BCL2-associated athanogene 6;
  ENSP ID: ENSP00000416326

SEQ ID NO: 8731 - protein, 1126 aa, Homo sapiens; identical to SEQ ID NO: 8624
  Payload ID: 1783;
  Gene Symbol: BAG6;
  Gene Name: BCL2-associated athanogene 6;
  ENSP ID: ENSP00000416540

SEQ ID NO: 8732 - protein, 226 aa, Homo sapiens; identical to SEQ ID NO: 8606
  Payload ID: 1783;
  Gene Symbol: BAG6;
  Gene Name: BCL2-associated athanogene 6;
  ENSP ID: ENSP00000416633
  MOD_RES (1)..(1): Any amino acid

SEQ ID NO: 8733 - protein, 262 aa, Homo sapiens; identical to SEQ ID NO: 8615
  Payload ID: 1783;
  Gene Symbol: BAG6;
  Gene Name: BCL2-associated athanogene 6;
  ENSP ID: ENSP00000416652

SEQ ID NO: 8734 - protein, 185 aa, Homo sapiens; identical to SEQ ID NO: 8604
  Payload ID: 1783;
  Gene Symbol: BAG6;
  Gene Name: BCL2-associated athanogene 6;
  ENSP ID: ENSP00000416816
  MOD_RES (1)..(1): Any amino acid

SEQ ID NO: 8735 - protein, 226 aa, Homo sapiens; identical to SEQ ID NO: 8606
  Payload ID: 1783;
  Gene Symbol: BAG6;
  Gene Name: BCL2-associated athanogene 6;
  ENSP ID: ENSP00000416989
  MOD_RES (1)..(1): Any amino acid

SEQ ID NO: 8736 - protein, 1077 aa, Homo sapiens; identical to SEQ ID NO: 8584
  Payload ID: 1783;
  Gene Symbol: BAG6;
  Gene Name: BCL2-associated athanogene 6;
  Uniprot ID:  P46379;
  ENSP ID: ENSP00000446525

SEQ ID NO: 8737 - protein, 1077 aa, Homo sapiens; identical to SEQ ID NO: 8584
  Payload ID: 1783;
  Gene Symbol: BAG6;
  Gene Name: BCL2-associated athanogene 6;
  Uniprot ID:  P46379;
  ENSP ID: ENSP00000447546

SEQ ID NO: 8738 - protein, 1077 aa, Homo sapiens; identical to SEQ ID NO: 8584
  Payload ID: 1783;
  Gene Symbol: BAG6;
  Gene Name: BCL2-associated athanogene 6;
  Uniprot ID:  P46379;
  ENSP ID: ENSP00000447946

SEQ ID NO: 8739 - protein, 1077 aa, Homo sapiens
  Payload ID: 1783;
  Gene Symbol: BAG6;
  Gene Name: BCL2-associated athanogene 6;
  ENSP ID: ENSP00000449266
MEPNDSTSTAVEEPDSLEVLVKTLDSQTRTFIVGAQMNVKEFKEHIAASVSIPSEKQRLIYQGRVLQDDKKLQEYNVGGKVIHLVERAPPQTHLPSGASSGTGSASATHGGGSPPGTRGPGASVHDRNANSYVMVGTFNLPSDGSAVDVHINMEQAPIQSEPRVRLVMAQHMIRDIQTLLSRMECRGGPQPQHSQPPPQPPAVTPEPVALSSQTSEPVESEAPPREPMEAEEVEERAPAQNPELTPGPAPAGPTPAPETNAPNHPSPAEYVEVLQELQRLESRLQPFLQRYYEVLGAAATTDYNNNHEGREEDQRLINLVGESLRLLGNTFVALSDLRCNLACTPPRHLHVVRPMSHYTTPMVLQQAAIPIQINVGTTVTMTGNGTRPPPTPNAEAPPPGPGQASSVAPSSTNVESSAEGAPPPGPAPPPATSHPRVIRISHQSVEPVVMMHMNIQDSGTQPGGVPSAPTGPLGPPGHGQTLGQQVPGFPTAPTRVVIARPTPPQARPSHPGGPPVSGTLQGAGLGTNASLAQMVSGLVGQLLMQPVLVAQGTPGMAPPPAPATASASAGTTNTATTAGPAPGGPAQPPPTPQPSMADLQFSQLLGNLLGPAGPGAGGPGVASPTITVAMPGVPAFLQGMTDFLQATQTAPPPPPPPPPPPPAPEQQTMPPPGSPSGGAGSPGGLGLESLSPEFFTSVVQGVLSSLLGSLGARAGSSESIAAFIQRLSGSSNIFEPGADGALGFFGALLSLLCQNFSMVDVVMLLHGHFQPLQRLQPQLRSFFHQHYLGGQEPTPSNIRMATHTLITGLEEYVRESFSLVQVQPGVDIIRTNLEFLQEQFNSIAAHVLHCTDSGFGARLLELCNQGLFECLALNLHCLGGQQMELAAVINGRIRRMSRGVNPSLVSWLTTMMGLRLQVVLEHMPVGPDAILRYVRRVGDPPQPLPEEPMEVQGAERASPEPQRENASPAPGTTAEEAMSRGPPPAPEGGSRDEQDGASAETEPWAAAVPPEWVPIIQQDIQSQRKVKPQPPLSDAYLSGMPAKRRKLRSDIQKRLQEDPNYSPQRFPNAQRAFADDP

SEQ ID NO: 8740 - protein, 1077 aa, Homo sapiens; identical to SEQ ID NO: 8739
  Payload ID: 1783;
  Gene Symbol: BAG6;
  Gene Name: BCL2-associated athanogene 6;
  ENSP ID: ENSP00000449634

SEQ ID NO: 8741 - protein, 1077 aa, Homo sapiens; identical to SEQ ID NO: 8739
  Payload ID: 1783;
  Gene Symbol: BAG6;
  Gene Name: BCL2-associated athanogene 6;
  ENSP ID: ENSP00000449636

SEQ ID NO: 8742 - protein, 903 aa, Homo sapiens; identical to SEQ ID NO: 8657
  Payload ID: 1783;
  Gene Symbol: BAG6;
  Gene Name: BCL2-associated athanogene 6;
  Uniprot ID:  P46379;
  ENSP ID: ENSP00000477867

SEQ ID NO: 8743 - protein, 903 aa, Homo sapiens; identical to SEQ ID NO: 8657
  Payload ID: 1783;
  Gene Symbol: BAG6;
  Gene Name: BCL2-associated athanogene 6;
  Uniprot ID:  P46379;
  ENSP ID: ENSP00000477951

SEQ ID NO: 8744 - protein, 903 aa, Homo sapiens; identical to SEQ ID NO: 8657
  Payload ID: 1783;
  Gene Symbol: BAG6;
  Gene Name: BCL2-associated athanogene 6;
  Uniprot ID:  P46379;
  ENSP ID: ENSP00000478966

SEQ ID NO: 8745 - protein, 903 aa, Homo sapiens; identical to SEQ ID NO: 8657
  Payload ID: 1783;
  Gene Symbol: BAG6;
  Gene Name: BCL2-associated athanogene 6;
  Uniprot ID:  P46379;
  ENSP ID: ENSP00000479238

SEQ ID NO: 8746 - protein, 903 aa, Homo sapiens; identical to SEQ ID NO: 8657
  Payload ID: 1783;
  Gene Symbol: BAG6;
  Gene Name: BCL2-associated athanogene 6;
  Uniprot ID:  P46379;
  ENSP ID: ENSP00000482413

SEQ ID NO: 8747 - protein, 903 aa, Homo sapiens; identical to SEQ ID NO: 8657
  Payload ID: 1783;
  Gene Symbol: BAG6;
  Gene Name: BCL2-associated athanogene 6;
  Uniprot ID:  P46379;
  ENSP ID: ENSP00000484238

SEQ ID NO: 8748 - protein, 869 aa, Homo sapiens
  Payload ID: 1784;
  Gene Symbol: BCLAF1;
  Gene Name: BCL2-associated transcription factor 1;
  Uniprot ID:  Q9NYF8;
  ENSP ID: ENSP00000229446
MGRSNSRSHSSRSKSRSQSSSRSRSRSHSRKKRYRSRSRTYSRSRSRDRMYSRDYRRDYRNNRGMRRPYGYRGRGRGYYQGGGGRYHRGGYRPVWNRRHSRSPRRGRSRSRSPKRRSVSSQRSRSRSRRSYRSSRSPRSSSSRSSSPYSKSPVSKRRGSQEKQTKKAEGEPQEESPLKSKSQEEPKDTFEHDPSESIDEFNKSSATSGDIWPGLSAYDNSPRSPHSPSPIATPPSQSSSCSDAPMLSTVHSAKNTPSQHSHSIQHSPERSGSGSVGNGSSRYSPSQNSPIHHIPSRRSPAKTIAPQNAPRDESRGRSSFYPDGGDQETAKTGKFLKRFTDEESRVFLLDRGNTRDKEASKEKGSEKGRAEGEWEDQEALDYFSDKESGKQKFNDSEGDDTEETEDYRQFRKSVLADQGKSFATASHRNTEEEGLKYKSKVSLKGNRESDGFREEKNYKLKETGYVVERPSTTKDKHKEEDKNSERITVKKETQSPEQVKSEKLKDLFDYSPPLHKNLDAREKSTFREESPLRIKMIASDSHRPEVKLKMAPVPLDDSNRPASLTKDRLLASTLVHSVKKEQEFRSIFDHIKLPQASKSTSESFIQHIVSLVHHVKEQYFKSAAMTLNERFTSYQKATEEHSTRQKSPEIHRRIDISPSTLRKHTRLAGEERVFKEENQKGDKKLRCDSADLRHDIDRRRKERSKERGDSKGSRESSGSRKQEKTPKDYKEYKSYKDDSKHKREQDHSRSSSSSASPSSPSSREEKESKKEREEEFKTHHEMKEYSGFAGVSRPRGTFHDDRDDGVDYWAKRGRGRGTFQRGRGRFNFKKSGSSPKWTHDKYQGDGIVEDEEETMENNEEKKDRRKEEKE

SEQ ID NO: 8749 - protein, 869 aa, Homo sapiens; identical to SEQ ID NO: 8748
  Payload ID: 1784;
  Gene Symbol: BCLAF1;
  Gene Name: BCL2-associated transcription factor 1;
  Uniprot ID:  Q9NYF8;
  ENSP ID: ENSP00000376159

SEQ ID NO: 8750 - protein, 725 aa, Homo sapiens
  Payload ID: 1784;
  Gene Symbol: BCLAF1;
  Gene Name: BCL2-associated transcription factor 1;
  ENSP ID: ENSP00000431734
MGRSNSRSHSSRSKSRSQSSSRSRSRSHSRKKRYSSRSRSRTYSRSRSRDRMYSRDYRRDYRNNRGMRRPYGYRGRGRGYYQGGGGRYHRGGYRPVWNRRHSRSPRRGRSRSRSPKRRSVSSQRSRSRSRRSYRSSRSPRSSSSRSSSPYSKSPVSKRRGSQEKQTKKAEGEPQEESPLKSKSQEEPKDTFEHDPSESIDEFNKSSATSGDIWPGLSAYDNSPRSPHSPSPIATPPSQSSSCSDAPMLSTVHSAKNTPSQHSHSIQHSPERSGSGSVGNGSSRYSPSQNSPIHHIPSRRSPAKTIAPQNAPRDESRGRSSFYPDGGDQETAKTGKFLKRFTDEESRVFLLDRGNTRDKEASKEKGSEKGRAEGEWEDQEALDYFSDKESGKQKFNDSEGDDTEETEDYRQFRKSVLADQGKSFATASHRNTEEEGLKYKSKVSLKGNRESDGFREEKNYKLKETGYVVERPSTTKDKHKEEDKNSERITVKKETQSPEQVKSEKLKDLFDYSPPLHKNLDAREKSTFREESPLRIKMIASDSHRPEVKLKMAPVPLDDSNRPASLTKDRLLASTLVHSVKKEQEFRSIFDHIKLPQASKSTSESFIQHIVSLVHHVKEQYFKSAAMTLNERFTSYQKATEEHSTRQKSPEIHRIDISPSTLRKHTRLAGEERVFKEENQKGDKKLRCDSADLRHDIDRRRKERSKERGDSKGSRESSGSRKQEKT

SEQ ID NO: 8751 - protein, 752 aa, Homo sapiens
  Payload ID: 1784;
  Gene Symbol: BCLAF1;
  Gene Name: BCL2-associated transcription factor 1;
  ENSP ID: ENSP00000433505
MGRSNSRSHSSRSKSRSQSSSRSRSRSHSRKKRYSSRSRSRTYSRSRSRDRMYSRDYRRDYRNNRGMRRPYGYRGRGRGYYQGGGGRYHRGGYRPVWNRRHSRSPRRGRSRSRSPKRRSVSSQRSRSRSRRSYRSSRSPRSSSSRSSSPYSKSPVSKRRGSQEKQTKKAEGEPQEESPLKSKSQEEPKDTFEHDPSESIDEFNKSSATSGDIWPGLSAYDNSPRSPHSPSPIATPPSQSSSCSDAPMLSTVHSAKNTPSQHSHSIQHSPERSGSGSVGNGSSRYSPSQNSPIHHIPSRRSPAKTIAPQNAPRDESRGRSSFYPDGGDQETAKTGKFLKRFTDEESRVFLLDRGNTRDKEASKEKGSEKGRAEGEWEDQEALDYFSDKESGKQKFNDSEGDDTEETEDYRQFRKSVLADQGKSFATASHRNTEEEGLKYKSKVSLKGNRESDGFREEKNYKLKETGYVVERPSTTKDKHKEEDKNSERITVKKETQSPEQVKSEKLKDLFDYSPPLHKNLDAREKSTFREESPLRIKMIASDSHRPEVKLKMAPVPLDDSNRPASLTKDRLLASTLVHSVKKEQEFRSIFDHIKLPQASKSTSESFIQHIVSLVHHVKEQYFKSAAMTLNERFTSYQKATEEHSTRQKSPEIHRRIDISPSTLRKHTRLAGEERVFKEENQKGDKKLRCDSADLRHDIDRRRKERSKERGDSKGSRESSGSRKQEKTPKDYKEYKSYKDDSKNVFVFYTAYGG

SEQ ID NO: 8752 - protein, 467 aa, Homo sapiens
  Payload ID: 1784;
  Gene Symbol: BCLAF1;
  Gene Name: BCL2-associated transcription factor 1;
  ENSP ID: ENSP00000433822
MGRSNSRSHSSRSKSRSQSSSRSRSRSHSRKKRYRSRSRTYSRSRSRDRMYSRDYRRDYRNNRGMRRPYGYRGRGRGYYQGGGGRYHRGGYRPVWNRRHSRSPRRGRSRSRSPKRRSVSSQRSRSRSRRSYRSSRSPRSSSSRSSSPYSKSPVSKRRGSQEKQTKKAEGEPQEESPLKSKSQEEPKDTFEHDPSESIDEFNKSSATSGDIWPGLSAYDNSPRSPHSPSPIATPPSQSSSCSDAPMLSTVHSAKNTPSQHSHSIQHSPERSGSGSVGNGSSRYSPSQNSPIHHIPSRRSPAKTIAPQNAPRDESRGRSSFYPDGGDQETAKTGKFLKSPPLHKNLDAREKSTFREESPLRIKMIASDSHRPEVKLKMAPVPLDDSNRPASLTKDRLLASTLVHSVKKEQEFRSIFDHIKLPQASKSTSESFIQHIVSLVHHVKGPGICFEMAKSMFQSKIAVERYRQS

SEQ ID NO: 8753 - protein, 918 aa, Homo sapiens
  Payload ID: 1784;
  Gene Symbol: BCLAF1;
  Gene Name: BCL2-associated transcription factor 1;
  Uniprot ID:  Q9NYF8;
  ENSP ID: ENSP00000434826
MGRSNSRSHSSRSKSRSQSSSRSRSRSHSRKKRYRSRSRTYSRSRSRDRMYSRDYRRDYRNNRGMRRPYGYRGRGRGYYQGGGGRYHRGGYRPVWNRRHSRSPRRGRSRSRSPKRRSVSSQRSRSRSRRSYRSSRSPRSSSSRSSSPYSKSPVSKRRGSQEKQTKKAEGEPQEESPLKSKSQEEPKDTFEHDPSESIDEFNKSSATSGDIWPGLSAYDNSPRSPHSPSPIATPPSQSSSCSDAPMLSTVHSAKNTPSQHSHSIQHSPERSGSGSVGNGSSRYSPSQNSPIHHIPSRRSPAKTIAPQNAPRDESRGRSSFYPDGGDQETAKTGKFLKRFTDEESRVFLLDRGNTRDKEASKEKGSEKGRAEGEWEDQEALDYFSDKESGKQKFNDSEGDDTEETEDYRQFRKSVLADQGKSFATASHRNTEEEGLKYKSKVSLKGNRESDGFREEKNYKLKETGYVVERPSTTKDKHKEEDKNSERITVKKETQSPEQVKSEKLKDLFDYSPPLHKNLDAREKSTFREESPLRIKMIASDSHRPEVKLKMAPVPLDDSNRPASLTKDRLLASTLVHSVKKEQEFRSIFDHIKLPQASKSTSESFIQHIVSLVHHVKEQYFKSAAMTLNERFTSYQKATEEHSTRQKSPEIHRRIDISPSTLRKHTRLAGEERVFKEENQKGDKKLRCDSADLRHDIDRRRKERSKERGDSKGSRESSGSRKQEKTPKDYKEYKSYKDDSKHKREQDHSRSSSSSASPSSPSSREEKESKKEREEEFKTHHEMKEYSGFAGVSRPRGTFFRIRGRGRARGVFAGTNTGPNNSNTTFQKRPKEEEWDPEYTPKSKKYFLHDDRDDGVDYWAKRGRGRGTFQRGRGRFNFKKSGSSPKWTHDKYQGDGIVEDEEETMENNEEKKDRRKEEKE

SEQ ID NO: 8754 - protein, 920 aa, Homo sapiens
  Payload ID: 1784;
  Gene Symbol: BCLAF1;
  Gene Name: BCL2-associated transcription factor 1;
  Uniprot ID:  Q9NYF8;
  ENSP ID: ENSP00000435210
MGRSNSRSHSSRSKSRSQSSSRSRSRSHSRKKRYSSRSRSRTYSRSRSRDRMYSRDYRRDYRNNRGMRRPYGYRGRGRGYYQGGGGRYHRGGYRPVWNRRHSRSPRRGRSRSRSPKRRSVSSQRSRSRSRRSYRSSRSPRSSSSRSSSPYSKSPVSKRRGSQEKQTKKAEGEPQEESPLKSKSQEEPKDTFEHDPSESIDEFNKSSATSGDIWPGLSAYDNSPRSPHSPSPIATPPSQSSSCSDAPMLSTVHSAKNTPSQHSHSIQHSPERSGSGSVGNGSSRYSPSQNSPIHHIPSRRSPAKTIAPQNAPRDESRGRSSFYPDGGDQETAKTGKFLKRFTDEESRVFLLDRGNTRDKEASKEKGSEKGRAEGEWEDQEALDYFSDKESGKQKFNDSEGDDTEETEDYRQFRKSVLADQGKSFATASHRNTEEEGLKYKSKVSLKGNRESDGFREEKNYKLKETGYVVERPSTTKDKHKEEDKNSERITVKKETQSPEQVKSEKLKDLFDYSPPLHKNLDAREKSTFREESPLRIKMIASDSHRPEVKLKMAPVPLDDSNRPASLTKDRLLASTLVHSVKKEQEFRSIFDHIKLPQASKSTSESFIQHIVSLVHHVKEQYFKSAAMTLNERFTSYQKATEEHSTRQKSPEIHRRIDISPSTLRKHTRLAGEERVFKEENQKGDKKLRCDSADLRHDIDRRRKERSKERGDSKGSRESSGSRKQEKTPKDYKEYKSYKDDSKHKREQDHSRSSSSSASPSSPSSREEKESKKEREEEFKTHHEMKEYSGFAGVSRPRGTFFRIRGRGRARGVFAGTNTGPNNSNTTFQKRPKEEEWDPEYTPKSKKYFLHDDRDDGVDYWAKRGRGRGTFQRGRGRFNFKKSGSSPKWTHDKYQGDGIVEDEEETMENNEEKKDRRKEEKE

SEQ ID NO: 8755 - protein, 871 aa, Homo sapiens [sequence omitted]

SEQ ID NO: 8756 - protein, 750 aa, Homo sapiens
  Payload ID: 1784;
  Gene Symbol: BCLAF1;
  Gene Name: BCL2-associated transcription factor 1;
  ENSP ID: ENSP00000436142
MGRSNSRSHSSRSKSRSQSSSRSRSRSHSRKKRYRSRSRTYSRSRSRDRMYSRDYRRDYRNNRGMRRPYGYRGRGRGYYQGGGGRYHRGGYRPVWNRRHSRSPRRGRSRSRSPKRRSVSSQRSRSRSRRSYRSSRSPRSSSSRSSSPYSKSPVSKRRGSQEKQTKKAEGEPQEESPLKSKSQEEPKDTFEHDPSESIDEFNKSSATSGDIWPGLSAYDNSPRSPHSPSPIATPPSQSSSCSDAPMLSTVHSAKNTPSQHSHSIQHSPERSGSGSVGNGSSRYSPSQNSPIHHIPSRRSPAKTIAPQNAPRDESRGRSSFYPDGGDQETAKTGKFLKRFTDEESRVFLLDRGNTRDKEASKEKGSEKGRAEGEWEDQEALDYFSDKESGKQKFNDSEGDDTEETEDYRQFRKSVLADQGKSFATASHRNTEEEGLKYKSKVSLKGNRESDGFREEKNYKLKETGYVVERPSTTKDKHKEEDKNSERITVKKETQSPEQVKSEKLKDLFDYSPPLHKNLDAREKSTFREESPLRIKMIASDSHRPEVKLKMAPVPLDDSNRPASLTKDRLLASTLVHSVKKEQEFRSIFDHIKLPQASKSTSESFIQHIVSLVHHVKEQYFKSAAMTLNERFTSYQKATEEHSTRQKSPEIHRRIDISPSTLRKHTRLAGEERVFKEENQKGDKKLRCDSADLRHDIDRRRKERSKERGDSKGSRESSGSRKQEKTPKDYKEYKSYKDDSKNVFVFYTAYGG

SEQ ID NO: 8757 - protein, 752 aa, Homo sapiens; identical to SEQ ID NO: 8751
  Payload ID: 1784;
  Gene Symbol: BCLAF1;
  Gene Name: BCL2-associated transcription factor 1;
  ENSP ID: ENSP00000436216

SEQ ID NO: 8758 - protein, 747 aa, Homo sapiens
  Payload ID: 1784;
  Gene Symbol: BCLAF1;
  Gene Name: BCL2-associated transcription factor 1;
  Uniprot ID:  Q9NYF8;
  ENSP ID: ENSP00000436501
MGRSNSRSHSSRSKSRSQSSSRSRSRSHSRKKRYSSRSRSRTYSRSRSRDRMYSRDYRRDYRNNRGMRRPYGYRGRGRGYYQGGGGRYHRGGYRPVWNRRHSRSPRRGRSRSRSPKRRSVSSQRSRSRSRRSYRSSRSPRSSSSRSSSPYSKSPVSKRRGSQEKQTKKAEGEPQEESPLKSKSQEEPKDTFEHDPSESIDEFNKSSATSGDIWPGLSAYDNSPRSPHSPSPIATPPSQSSSCSDAPMLSTVHSAKNTPSQHSHSIQHSPERSGSGSVGNGSSRYSPSQNSPIHHIPSRRSPAKTIAPQNAPRDESRGRSSFYPDGGDQETAKTGKFLKSPPLHKNLDAREKSTFREESPLRIKMIASDSHRPEVKLKMAPVPLDDSNRPASLTKDRLLASTLVHSVKKEQEFRSIFDHIKLPQASKSTSESFIQHIVSLVHHVKEQYFKSAAMTLNERFTSYQKATEEHSTRQKSPEIHRRIDISPSTLRKHTRLAGEERVFKEENQKGDKKLRCDSADLRHDIDRRRKERSKERGDSKGSRESSGSRKQEKTPKDYKEYKSYKDDSKHKREQDHSRSSSSSASPSSPSSREEKESKKEREEEFKTHHEMKEYSGFAGVSRPRGTFFRIRGRGRARGVFAGTNTGPNNSNTTFQKRPKEEEWDPEYTPKSKKYFLHDDRDDGVDYWAKRGRGRGTFQRGRGRFNFKKSGSSPKWTHDKYQGDGIVEDEEETMENNEEKKDRRKEEKE

SEQ ID NO: 8759 - protein, 118 aa, Homo sapiens
  Payload ID: 1784;
  Gene Symbol: BCLAF1;
  Gene Name: BCL2-associated transcription factor 1;
  ENSP ID: ENSP00000436913
QHSHSIQHSPERSGSGSVGNGSSRYSPSQNSPIHHIPSRRSPAKTIAPQNAPRDESRGRSSFYPDGGDQETAKTGKFLKRFTDEESRVFLLDRVPLYTRIWMHEKSLPSERKAHLGSK

SEQ ID NO: 8760 - protein, 187 aa, Homo sapiens
  Payload ID: 1784;
  Gene Symbol: BCLAF1;
  Gene Name: BCL2-associated transcription factor 1;
  ENSP ID: ENSP00000437018
  MOD_RES (1)..(1): Any amino acid
XGSRESSGSRKQEKTPKDYKEYKSYKDDSSREEKESKKEREEEFKTHHEMKEYSGFAGVSRPRGTFFRIRGRGRARGVFAGTNTGPNNSNTTFQKRPKEEEWDPEYTPKSKKYFLHDDRDDGVDYWAKRGRGRGTFQRGRGRFNFKKSGSSPKWTHDKYQGDGIVEDEEETMENNEEKKDRRKEEKE

SEQ ID NO: 8761 - protein, 126 aa, Homo sapiens
  Payload ID: 1784;
  Gene Symbol: BCLAF1;
  Gene Name: BCL2-associated transcription factor 1;
  ENSP ID: ENSP00000437333
  MOD_RES (1)..(1): Any amino acid
XDHSRSSSSSASPSSPSSREEKESKKEREEEFKTHHEMKEYSGFAGVSRPRGTFHDDRDDGVDYWAKRGRGRGTFQRGRGRFNFKKSGSSPKWTHDKYQGDGIVEDEEETMENNEEKKDRRKEEKE

SEQ ID NO: 8762 - protein, 752 aa, Homo sapiens; identical to SEQ ID NO: 8751
  Payload ID: 1784;
  Gene Symbol: BCLAF1;
  Gene Name: BCL2-associated transcription factor 1;
  ENSP ID: ENSP00000487249

SEQ ID NO: 8763 - protein, 192 aa, Homo sapiens
  Payload ID: 1785;
  Gene Symbol: BAX;
  Gene Name: BCL2-associated X prt;
  Uniprot ID:  Q07812;
  ENSP ID: ENSP00000263262
MDGSGEQPRGGGPTSSEQIMKTGALLLQGFIQDRAGRMGGEAPELALDPVPQDASTKKLSECLKRIGDELDSNMELQRMIAAVDTDSPREVFFRVAADMFSDGNFNWGRVVALFYFASKLVLKALCTKVPELIRTIMGWTLDFLRERLLGWIQDQGGWDGLLSYFGTPTWQTVTIFVAGVLTASLTIWKKMG

SEQ ID NO: 8764 - protein, 218 aa, Homo sapiens
  Payload ID: 1785;
  Gene Symbol: BAX;
  Gene Name: BCL2-associated X prt;
  Uniprot ID:  Q07812;
  ENSP ID: ENSP00000293288
MDGSGEQPRGGGPTSSEQIMKTGALLLQGFIQDRAGRMGGEAPELALDPVPQDASTKKLSECLKRIGDELDSNMELQRMIAAVDTDSPREVFFRVAADMFSDGNFNWGRVVALFYFASKLVLKALCTKVPELIRTIMGWTLDFLRERLLGWIQDQGGWVRLLKPPHPHHRALTTAPAPPSLPPATPLGPWAFWSRSQWCPLPIFRSSDVVYNAFSLRV

SEQ ID NO: 8765 - protein, 143 aa, Homo sapiens
  Payload ID: 1785;
  Gene Symbol: BAX;
  Gene Name: BCL2-associated X prt;
  Uniprot ID:  Q07812;
  ENSP ID: ENSP00000346461
MDGSGEQPRGGGPTSSEQIMKTGALLLQGMIAAVDTDSPREVFFRVAADMFSDGNFNWGRVVALFYFASKLVLKALCTKVPELIRTIMGWTLDFLRERLLGWIQDQGGWDGLLSYFGTPTWQTVTIFVAGVLTASLTIWKKMG

SEQ ID NO: 8766 - protein, 164 aa, Homo sapiens
  Payload ID: 1785;
  Gene Symbol: BAX;
  Gene Name: BCL2-associated X prt;
  Uniprot ID:  Q07812;
  ENSP ID: ENSP00000348871
MDGSGEQPRGGGPTSSEQIMKTGALLLQGFIQDRAGRMGGEAPELALDPVPQDASTKKLSECLKRIGDELDSNMELQRMIAAVDTDSPREVFFRVAADMFSDGNFNWGRVVALFYFASKLVLKAGVKWRDLGSLQPLPPGFKRFTCLSIPRSWDYRPCAPRCRN

SEQ ID NO: 8767 - protein, 175 aa, Homo sapiens
  Payload ID: 1785;
  Gene Symbol: BAX;
  Gene Name: BCL2-associated X prt;
  ENSP ID: ENSP00000375744
MDGSGEQPRGGGFHPGSSRANGGEAPELALDPVPQDASTKKLSECLKRIGDELDSNMELQRMIAAVDTDSPREVFFRVAADMFSDGNFNWGRVVALFYFASKLVLKALCTKVPELIRTIMGWTLDFLRERLLGWIQDQGGWDGLLSYFGTPTWQTVTIFVAGVLTASLTIWKKMG

SEQ ID NO: 8768 - protein, 179 aa, Homo sapiens
  Payload ID: 1785;
  Gene Symbol: BAX;
  Gene Name: BCL2-associated X prt;
  Uniprot ID:  Q07812;
  ENSP ID: ENSP00000389971
MDGSGEQPRGGGPTSSEQIMKTGALLLQGFIQDRAGRMGGEAPELALDPVPQDASTKKLSECLKRIGDELDSNMELQRMIAAVDTDSPREVFFRVAADMFSDGNFNWGRVVALFYFASKLVLKALCTKVPELIRTIMGWTLDFLRERLLGWIQDQGGWTVTIFVAGVLTASLTIWKKMG

SEQ ID NO: 8769 - protein, 126 aa, Homo sapiens
  Payload ID: 1785;
  Gene Symbol: BAX;
  Gene Name: BCL2-associated X prt;
  ENSP ID: ENSP00000426184
  MOD_RES (1)..(1): Any amino acid
XGRVRGAAQRRGMIAAVDTDSPREVFFRVAADMFSDGNFNWGRVVALFYFASKLVLKALCTKVPELIRTIMGWTLDFLRERLLGWIQDQGGWDGLLSYFGTPTWQTVTIFVAGVLTASLTIWKKMG

SEQ ID NO: 8770 - protein, 41 aa, Homo sapiens
  Payload ID: 1785;
  Gene Symbol: BAX;
  Gene Name: BCL2-associated X prt;
  Uniprot ID:  Q07812;
  ENSP ID: ENSP00000426328
MDGSGEQPRGGVSSRIEQGEWGGRHPSWPWTRCLRMRPPRS

SEQ ID NO: 8771 - protein, 140 aa, Homo sapiens
  Payload ID: 1785;
  Gene Symbol: BAX;
  Gene Name: BCL2-associated X prt;
  ENSP ID: ENSP00000441413
MIAAVDTDSPREVFFRVAADMFSDGNFNWGRVVALFYFASKLVLKALCTKVPELIRTIMGWTLDFLRERLLGWIQDQGGWVRLLKPPHPHHRALTTAPAPPSLPPATPLGPWAFWSRSQWCPLPIFRSSDVVYNAFSLRV

SEQ ID NO: 8772 - protein, 160 aa, Homo sapiens
  Payload ID: 1786;
  Gene Symbol: BIK;
  Gene Name: BCL2-interacting killer (apoptosis-inducing);
  Uniprot ID:  Q13323;
  ENSP ID: ENSP00000216115
MSEVRPLSRDILMETLLYEQLLEPPTMEVLGMTDSEEDLDPMEDFDSLECMEGSDALALRLACIGDEMDVSLRAPRLAQLSEVAMHSLGLAFIYDQTEDIRDVLRSFMDGFTTLKENIMRFWRSPNPGSWVSCEQVLLALLLLLALLLPLLSGGLHLLLK

SEQ ID NO: 8773 - protein, 333 aa, Homo sapiens
  Payload ID: 1787;
  Gene Symbol: BCL2L2-PABPN1;
  Gene Name: BCL2L2-PABPN1 readthrough;
  Uniprot ID:  Q92843;
  ENSP ID: ENSP00000451320
MATPASAPDTRALVADFVGYKLRQKGYVCGAGPGEGPAADPLHQAMRAAGDEFETRFRRTFSDLAAQLHVTPGSAQQRFTQVSDELFQGGPNWGRLVAFFVFGAALCAESVNKEMEPLVGQVQEWMVAYLETQLADWIHSSGGWELEAIKARVREMEEEAEKLKELQNEVEKQMNMSPPPGNAGPVIMSIEEKMEADARSIYVGNVDYGATAEELEAHFHGCGSVNRVTILCDKFSGHPKGFAYIEFSDKESVRTSLALDESLFRGRQIKVIPKRTNRPGISTTDRGFPRARYRARTTNYNSSRSRFYSGFNSRPRGRVYRGRARATSWYSPY

SEQ ID NO: 8774 - protein, 333 aa, Homo sapiens; identical to SEQ ID NO: 8773
  Payload ID: 1787;
  Gene Symbol: BCL2L2-PABPN1;
  Gene Name: BCL2L2-PABPN1 readthrough;
  Uniprot ID:  Q92843;
  ENSP ID: ENSP00000452479

SEQ ID NO: 8775 - protein, 233 aa, Homo sapiens
  Payload ID: 1788;
  Gene Symbol: BCL2L1;
  Gene Name: BCL2-like 1;
  Uniprot ID:  Q07817;
  ENSP ID: ENSP00000302564
MSQSNRELVVDFLSYKLSQKGYSWSQFSDVEENRTEAPEGTESEMETPSAINGNPSWHLADSPAVNGATGHSSSLDAREVIPMAAVKQALREAGDEFELRYRRAFSDLTSQLHITPGTAYQSFEQVVNELFRDGVNWGRIVAFFSFGGALCVESVDKEMQVLVSRIAAWMATYLNDHLEPWIQENGGWDTFVELYGNNAAAESRKGQERFNRWFLTGMTVAGVVLLGSLFSRK

SEQ ID NO: 8776 - protein, 170 aa, Homo sapiens
  Payload ID: 1788;
  Gene Symbol: BCL2L1;
  Gene Name: BCL2-like 1;
  Uniprot ID:  Q07817;
  ENSP ID: ENSP00000365223
MSQSNRELVVDFLSYKLSQKGYSWSQFSDVEENRTEAPEGTESEMETPSAINGNPSWHLADSPAVNGATGHSSSLDAREVIPMAAVKQALREAGDEFELRYRRAFSDLTSQLHITPGTAYQSFEQDTFVELYGNNAAAESRKGQERFNRWFLTGMTVAGVVLLGSLFSRK

SEQ ID NO: 8777 - protein, 233 aa, Homo sapiens; identical to SEQ ID NO: 8775
  Payload ID: 1788;
  Gene Symbol: BCL2L1;
  Gene Name: BCL2-like 1;
  Uniprot ID:  Q07817;
  ENSP ID: ENSP00000365230

SEQ ID NO: 8778 - protein, 181 aa, Homo sapiens
  Payload ID: 1788;
  Gene Symbol: BCL2L1;
  Gene Name: BCL2-like 1;
  ENSP ID: ENSP00000389688
MSQSNRELVVDFLSYKLSQKGYSWSQFSDVEENRTEAPEGTESEMETPSAINGNPSWHLADSPAVNGATGHSSSLDAREVIPMAAVKQALREAGDEFELRYRRAFSDLTSQLHITPGTAYQSFEQVVNELFRDGVNWGRIVAFFSFGGALCVESVDKEMQVLVSRIAAWMATYLNDHLEPW

SEQ ID NO: 8779 - protein, 188 aa, Homo sapiens
  Payload ID: 1788;
  Gene Symbol: BCL2L1;
  Gene Name: BCL2-like 1;
  ENSP ID: ENSP00000390760
MSQSNRELVVDFLSYKLSQKGYSWSQFSDVEENRTEAPEGTESEMETPSAINGNPSWHLADSPAVNGATGHSSSLDAREVIPMAAVKQALREAGDEFELRYRRAFSDLTSQLHITPGTAYQSFEQVVNELFRDGVNWGRIVAFFSFGGALCVESVDKEMQVLVSRIAAWMATYLNDHLEPWIQENGGW

SEQ ID NO: 8780 - protein, 188 aa, Homo sapiens; identical to SEQ ID NO: 8779
  Payload ID: 1788;
  Gene Symbol: BCL2L1;
  Gene Name: BCL2-like 1;
  ENSP ID: ENSP00000395545

SEQ ID NO: 8781 - protein, 48 aa, Homo sapiens
  Payload ID: 1788;
  Gene Symbol: BCL2L1;
  Gene Name: BCL2-like 1;
  ENSP ID: ENSP00000401173
MSQSNRELVVDFLSYKLSQKGYSWSQFSDVEENRTEAPEGTESEMETP

SEQ ID NO: 8782 - protein, 205 aa, Homo sapiens
  Payload ID: 1788;
  Gene Symbol: BCL2L1;
  Gene Name: BCL2-like 1;
  ENSP ID: ENSP00000406203
MSQSNRELVVDFLSYKLSQKGYSWSQFSDVEENRTEAPEGTESEMETPSAINGNPSWHLADSPAVNGATGHSSSLDAREVIPMAAVKQALREAGDEFELRYRRAFSDLTSQLHITPGTAYQSFEQVVNELFRDGVNWGRIVAFFSFGGALCVESVDKEMQVLVSRIAAWMATYLNDHLEPWIQENGGWDTFVELYGNNAAAESRK

SEQ ID NO: 8783 - protein, 188 aa, Homo sapiens; identical to SEQ ID NO: 8779
  Payload ID: 1788;
  Gene Symbol: BCL2L1;
  Gene Name: BCL2-like 1;
  ENSP ID: ENSP00000411252

SEQ ID NO: 8784 - protein, 204 aa, Homo sapiens
  Payload ID: 1789;
  Gene Symbol: BCL2L10;
  Gene Name: BCL2-like 10 (apoptosis facilitator);
  Uniprot ID:  Q9HD36;
  ENSP ID: ENSP00000260442
MVDQLRERTTMADPLRERTELLLADYLGYCAREPGTPEPAPSTPEAAVLRSAAARLRQIHRSFFSAYLGYPGNRFELVALMADSVLSDSPGPTWGRVVTLVTFAGTLLERGPLVTARWKKWGFQPRLKEQEGDVARDCQRLVALLSSRLMGQHRAWLQAQGGWDGFCHFFRTPFPLAFWRKQLVQAFLSCLLTTAFIYLWTRLL

SEQ ID NO: 8785 - protein, 241 aa, Homo sapiens
  Payload ID: 1789;
  Gene Symbol: BCL2L10;
  Gene Name: BCL2-like 10 (apoptosis facilitator);
  ENSP ID: ENSP00000453562
MVDQLRERTTMADPLRERTELLLADYLGYCAREPGTPEPAPSTPEAAVLRSAAARLRQIHRSFFSAYLGYPGNRFELVALMADSVLSDSPGPTWGRVVTLVTFAGTLLERGPLVTARWKKWGFQPRLKEQEGDVARDCQRLVALLSSRLMGQHRAWLQAQGGWVSTRRTPGHGAGRAAGKRPRGWHGWLLSLLQDPLSTGFLEKTAGPGFSVMLVNNSLHLSLDTIIMSFKTFNPLLPAQL

SEQ ID NO: 8786 - protein, 138 aa, Homo sapiens
  Payload ID: 1790;
  Gene Symbol: BCL2L11;
  Gene Name: BCL2-like 11 (apoptosis facilitator);
  Uniprot ID:  O43521;
  ENSP ID: ENSP00000309226
MAKQPSDVSSECDREGRQLQPAERPPQLRPGAPTSLQTEPQDRSPAPMSCDKSTQTPSPPCQAFNHYLSAMASMRQAEPADMRPEIWIAQELRRIGDEFNAYYARRVFLNNYQAAEDHPRMVILRLLRYIVRLVWRMH

SEQ ID NO: 8787 - protein, 112 aa, Homo sapiens
  Payload ID: 1790;
  Gene Symbol: BCL2L11;
  Gene Name: BCL2-like 11 (apoptosis facilitator);
  Uniprot ID:  O43521;
  ENSP ID: ENSP00000338374
MAKQPSDVSSECDREGRQLQPAERPPQLRPGAPTSLQTEPQDRSPAPMSCDKSTQTPSPPCQAFNHYLSAMVVILEDIGDLSLCFGFIFTGLDLYGHHHSQDTEQLNHKDFS

SEQ ID NO: 8788 - protein, 98 aa, Homo sapiens
  Payload ID: 1790;
  Gene Symbol: BCL2L11;
  Gene Name: BCL2-like 11 (apoptosis facilitator);
  ENSP ID: ENSP00000350398
MAKQPSDVSSECDREGRQLQPAERPPQLRPGAPTSLQTEPQDRSPAPMSCDKSTQTPSPPCQAFNHYLSAMDDSAGSSLRIALHREVQWPLKWLAKSS

SEQ ID NO: 8789 - protein, 75 aa, Homo sapiens
  Payload ID: 1790;
  Gene Symbol: BCL2L11;
  Gene Name: BCL2-like 11 (apoptosis facilitator);
  ENSP ID: ENSP00000354879
MAKQPSDVSSECDREGRQLQPAERPPQLRPGAPTSLQTEPQVSLCHPGWSALVRSWLTATSNSQVQAVLLPQPPK

SEQ ID NO: 8790 - protein, 71 aa, Homo sapiens
  Payload ID: 1790;
  Gene Symbol: BCL2L11;
  Gene Name: BCL2-like 11 (apoptosis facilitator);
  ENSP ID: ENSP00000376941
MAKQPSDVSSECDREGRQLQPAERPPQLRPGAPTSLQTEPQGNPEGNHGGEGDSCPHGSPQGPLAPPASPG

SEQ ID NO: 8791 - protein, 198 aa, Homo sapiens
  Payload ID: 1790;
  Gene Symbol: BCL2L11;
  Gene Name: BCL2-like 11 (apoptosis facilitator);
  Uniprot ID:  O43521;
  ENSP ID: ENSP00000376943
MAKQPSDVSSECDREGRQLQPAERPPQLRPGAPTSLQTEPQGNPEGNHGGEGDSCPHGSPQGPLAPPASPGPFATRSPLFIFMRRSSLLSRSSSGYFSFDTDRSPAPMSCDKSTQTPSPPCQAFNHYLSAMASMRQAEPADMRPEIWIAQELRRIGDEFNAYYARRVFLNNYQAAEDHPRMVILRLLRYIVRLVWRMH

SEQ ID NO: 8792 - protein, 112 aa, Homo sapiens; identical to SEQ ID NO: 8787
  Payload ID: 1790;
  Gene Symbol: BCL2L11;
  Gene Name: BCL2-like 11 (apoptosis facilitator);
  Uniprot ID:  O43521;
  ENSP ID: ENSP00000384641

SEQ ID NO: 8793 - protein, 96 aa, Homo sapiens
  Payload ID: 1790;
  Gene Symbol: BCL2L11;
  Gene Name: BCL2-like 11 (apoptosis facilitator);
  ENSP ID: ENSP00000389225
KQPSDVSSECDREGRQLQPAERPPQLRPGAPTSLQTEPQDRSPAPMSCDKSTQTPSPPCQAFNHYLSAMDDSAGSSLRIALHREVQWPLKWLAKSS

SEQ ID NO: 8794 - protein, 82 aa, Homo sapiens
  Payload ID: 1790;
  Gene Symbol: BCL2L11;
  Gene Name: BCL2-like 11 (apoptosis facilitator);
  Uniprot ID:  O43521;
  ENSP ID: ENSP00000391292
MAKQPSDVSSECDREGRQLQPAERPPQLRPGAPTSLQTEPQASMRQAEPADMRPEIWIAQELRRIGDEFNAYYARRMPLPPD

SEQ ID NO: 8795 - protein, 80 aa, Homo sapiens
  Payload ID: 1790;
  Gene Symbol: BCL2L11;
  Gene Name: BCL2-like 11 (apoptosis facilitator);
  Uniprot ID:  O43521;
  ENSP ID: ENSP00000393781
MAKQPSDVSSECDREGRQLQPAERPPQLRPGAPTSLQTEPQDRSPAPMSCDKSTQTPSPPCQAFNHYLSAMVREIEEVVV

SEQ ID NO: 8796 - protein, 135 aa, Homo sapiens
  Payload ID: 1790;
  Gene Symbol: BCL2L11;
  Gene Name: BCL2-like 11 (apoptosis facilitator);
  Uniprot ID:  O43521;
  ENSP ID: ENSP00000394640
MAKQPSDVSSECDREGRQLQPAERPPQLRPGAPTSLQTEPQGNPEGNHGGEGDSCPHGSPQGPLAPPASPGPFATRSPLFIFMRRSSLLSRSSSGYFSFDTDRSPAPMSCDKSTQTPSPPCQAFNHYLSAMANWD

SEQ ID NO: 8797 - protein, 109 aa, Homo sapiens
  Payload ID: 1790;
  Gene Symbol: BCL2L11;
  Gene Name: BCL2-like 11 (apoptosis facilitator);
  Uniprot ID:  O43521;
  ENSP ID: ENSP00000401662
MAKQPSDVSSECDREGRQLQPAERPPQLRPGAPTSLQTEPQDRSPAPMSCDKSTQTPSPPCQAFNHYLSAMASMRQAEPADMRPEIWIAQELRRIGDEFNAYYARRLEK

SEQ ID NO: 8798 - protein, 140 aa, Homo sapiens
  Payload ID: 1790;
  Gene Symbol: BCL2L11;
  Gene Name: BCL2-like 11 (apoptosis facilitator);
  Uniprot ID:  O43521;
  ENSP ID: ENSP00000403727
MAKQPSDVSSECDREGRQLQPAERPPQLRPGAPTSLQTEPQGNPEGNHGGEGDSCPHGSPQGPLAPPASPGPFATRSPLFIFMRRSSLLSRSSSGYFSFDTDRSPAPMSCDKSTQTPSPPCQAFNHYLSAMVREIEEVVV

SEQ ID NO: 8799 - protein, 85 aa, Homo sapiens
  Payload ID: 1790;
  Gene Symbol: BCL2L11;
  Gene Name: BCL2-like 11 (apoptosis facilitator);
  Uniprot ID:  O43521;
  ENSP ID: ENSP00000411137
MAKQPSDVSSECDREGRQLQPAERPPQLRPGAPTSLQTEPQASMRQAEPADMRPEIWIAQELRRIGDEFNAYYARRLAKLLASST

SEQ ID NO: 8800 - protein, 122 aa, Homo sapiens
  Payload ID: 1790;
  Gene Symbol: BCL2L11;
  Gene Name: BCL2-like 11 (apoptosis facilitator);
  ENSP ID: ENSP00000411870
MAKQPSDVSSECDREGRQLQPAERPPQLRPGAPTSLQTEPQGNPEGNHGGEGDSCPHGSPQGPLAPPASPGPFATRSPLFIFMRRSSLLSRSSSGYFSFDTDRSPAPMSCDKSTQTPSPPCQ

SEQ ID NO: 8801 - protein, 172 aa, Homo sapiens
  Payload ID: 1790;
  Gene Symbol: BCL2L11;
  Gene Name: BCL2-like 11 (apoptosis facilitator);
  Uniprot ID:  O43521;
  ENSP ID: ENSP00000412892
MAKQPSDVSSECDREGRQLQPAERPPQLRPGAPTSLQTEPQGNPEGNHGGEGDSCPHGSPQGPLAPPASPGPFATRSPLFIFMRRSSLLSRSSSGYFSFDTDRSPAPMSCDKSTQTPSPPCQAFNHYLSAMASMRQAEPADMRPEIWIAQELRRIGDEFNAYYARRMPLPPD

SEQ ID NO: 8802 - protein, 109 aa, Homo sapiens; identical to SEQ ID NO: 8797
  Payload ID: 1790;
  Gene Symbol: BCL2L11;
  Gene Name: BCL2-like 11 (apoptosis facilitator);
  Uniprot ID:  O43521;
  ENSP ID: ENSP00000478133

SEQ ID NO: 8803 - protein, 135 aa, Homo sapiens; identical to SEQ ID NO: 8796
  Payload ID: 1790;
  Gene Symbol: BCL2L11;
  Gene Name: BCL2-like 11 (apoptosis facilitator);
  Uniprot ID:  O43521;
  ENSP ID: ENSP00000479714

SEQ ID NO: 8804 - protein, 140 aa, Homo sapiens; identical to SEQ ID NO: 8798
  Payload ID: 1790;
  Gene Symbol: BCL2L11;
  Gene Name: BCL2-like 11 (apoptosis facilitator);
  Uniprot ID:  O43521;
  ENSP ID: ENSP00000481030

SEQ ID NO: 8805 - protein, 85 aa, Homo sapiens; identical to SEQ ID NO: 8799
  Payload ID: 1790;
  Gene Symbol: BCL2L11;
  Gene Name: BCL2-like 11 (apoptosis facilitator);
  Uniprot ID:  O43521;
  ENSP ID: ENSP00000481423

SEQ ID NO: 8806 - protein, 169 aa, Homo sapiens
  Payload ID: 1790;
  Gene Symbol: BCL2L11;
  Gene Name: BCL2-like 11 (apoptosis facilitator);
  Uniprot ID:  O43521;
  ENSP ID: ENSP00000481652
MAKQPSDVSSECDREGRQLQPAERPPQLRPGAPTSLQTEPQGNPEGNHGGEGDSCPHGSPQGPLAPPASPGPFATRSPLFIFMRRSSLLSRSSSGYFSFDTDRSPAPMSCDKSTQTPSPPCQAFNHYLSAMASMRQAEPADMRPEIWIAQELRRIGDEFNAYYARRLEK

SEQ ID NO: 8807 - protein, 172 aa, Homo sapiens; identical to SEQ ID NO: 8801
  Payload ID: 1790;
  Gene Symbol: BCL2L11;
  Gene Name: BCL2-like 11 (apoptosis facilitator);
  Uniprot ID:  O43521;
  ENSP ID: ENSP00000482175

SEQ ID NO: 8808 - protein, 135 aa, Homo sapiens
  Payload ID: 1790;
  Gene Symbol: BCL2L11;
  Gene Name: BCL2-like 11 (apoptosis facilitator);
  Uniprot ID:  O43521;
  ENSP ID: ENSP00000484360
MAKQPSDVSSECDREGRQLQPAERPPQLRPGAPTSLQTEPQGNPEGNHGGEGDSCPHGSPQGPLAPPASPGPFATRSPLFIFMRRSSLLSRSSSGYFSFDTDRSPAPMSCDKSTQTPSPPCQAFNHYLSAMGIFE

SEQ ID NO: 8809 - protein, 250 aa, Homo sapiens
  Payload ID: 1791;
  Gene Symbol: BCL2L12;
  Gene Name: BCL2-like 12 (proline rich);
  ENSP ID: ENSP00000246784
MAGSEELGLREDTLRVLAAFLRRGEAAGSPVPTPPRSPAQEEPTDFLSRLRRCLPCSLGRGAAPSESPRPCSLPIRPCYGLEPGPATPDFYALVAQRLEQLVQEQLKSPPSPELQGPPSTEKEAILRRLVALLEEEAEVINQKLASDPALRSKLVRLSSDSFARLVELFCSRDDSSRPSRACPGPPPPSPEPLARLALAMELSRRVAGLGGTLAGLSVEHVHSFTPWIQAHGGWEGILAVSPVDLNLPLD

SEQ ID NO: 8810 - protein, 334 aa, Homo sapiens
  Payload ID: 1791;
  Gene Symbol: BCL2L12;
  Gene Name: BCL2-like 12 (proline rich);
  Uniprot ID:  Q9HB09;
  ENSP ID: ENSP00000246785
MGRPAGLFPPLCPFLGFRPEACWERHMQIERAPSVPPFLRWAGYRPGPVRRRGKVELIKFVRVQWRRPQVEWRRRRWGPGPGASMAGSEELGLREDTLRVLAAFLRRGEAAGSPVPTPPRSPAQEEPTDFLSRLRRCLPCSLGRGAAPSESPRPCSLPIRPCYGLEPGPATPDFYALVAQRLEQLVQEQLKSPPSPELQGPPSTEKEAILRRLVALLEEEAEVINQKLASDPALRSKLVRLSSDSFARLVELFCSRDDSSRPSRACPGPPPPSPEPLARLALAMELSRRVAGLGGTLAGLSVEHVHSFTPWIQAHGGWEGILAVSPVDLNLPLD

SEQ ID NO: 8811 - protein, 333 aa, Homo sapiens
  Payload ID: 1791;
  Gene Symbol: BCL2L12;
  Gene Name: BCL2-like 12 (proline rich);
  Uniprot ID:  Q9HB09;
  ENSP ID: ENSP00000393803
MGRPAGLFPPLCPFLGFRPEACWERHMQIERAPSVPPFLRWAGYRPGPVRRRGKVELIKFVRVQWRRPQVEWRRRRWGPGPGASMAGSEELGLREDTLRVLAAFLRRGEAAGSPVPTPPSPAQEEPTDFLSRLRRCLPCSLGRGAAPSESPRPCSLPIRPCYGLEPGPATPDFYALVAQRLEQLVQEQLKSPPSPELQGPPSTEKEAILRRLVALLEEEAEVINQKLASDPALRSKLVRLSSDSFARLVELFCSRDDSSRPSRACPGPPPPSPEPLARLALAMELSRRVAGLGGTLAGLSVEHVHSFTPWIQAHGGWEGILAVSPVDLNLPLD

SEQ ID NO: 8812 - protein, 92 aa, Homo sapiens
  Payload ID: 1791;
  Gene Symbol: BCL2L12;
  Gene Name: BCL2-like 12 (proline rich);
  ENSP ID: ENSP00000469216
MAGSEELGLREDTLRVLAAFLRRGEAAGSPVPTPPRPSYSRLLCFGGPAAGTAGPRAAEISAQPRITGSPIDREGSHTAEAGGPAGGGGRSH

SEQ ID NO: 8813 - protein, 138 aa, Homo sapiens
  Payload ID: 1791;
  Gene Symbol: BCL2L12;
  Gene Name: BCL2-like 12 (proline rich);
  ENSP ID: ENSP00000470644
MAGSEELGLREDTLRVLAAFLRRGEAAGSPVPTPPRSPAQEEPTDFLSRLRRCLPCSLGRGAAPSESPRPCSLPIRPCYGLEPGPATPDFYALVAQRLEQLVQEQLKSPPSPGGHPGCFTRGLELAIGLSSFSEAATR

SEQ ID NO: 8814 - protein, 92 aa, Homo sapiens; identical to SEQ ID NO: 8812
  Payload ID: 1791;
  Gene Symbol: BCL2L12;
  Gene Name: BCL2-like 12 (proline rich);
  ENSP ID: ENSP00000471919

SEQ ID NO: 8815 - protein, 92 aa, Homo sapiens
  Payload ID: 1791;
  Gene Symbol: BCL2L12;
  Gene Name: BCL2-like 12 (proline rich);
  ENSP ID: ENSP00000472214
MAGSEELGLREDTLRVLAAFLRRGEAAGSPVPTPPRSPAQEEPTDFLSRLRRCLPCSLGVEHVHSFTPWIQAHGGWEGILAVSPVDLNLPLD

SEQ ID NO: 8816 - protein, 130 aa, Homo sapiens
  Payload ID: 1791;
  Gene Symbol: BCL2L12;
  Gene Name: BCL2-like 12 (proline rich);
  ENSP ID: ENSP00000478415
MGRPAGLFPPLCPFLGFRPEACWERHMQIERAPSVPPFLRWAGYRPGPVRRRGKVELIKFVRVQWRRPQVEWRRRRWGPGPGASMAGSEELGLREDTLRVLAAFLRRGEAAGSPVPTPPRRASWLFHPWT

SEQ ID NO: 8817 - protein, 193 aa, Homo sapiens
  Payload ID: 1791;
  Gene Symbol: BCL2L12;
  Gene Name: BCL2-like 12 (proline rich);
  ENSP ID: ENSP00000482154
MGRPAGLFPPLCPFLGFRPEACWERHMQIERAPSVPPFLRWAGYRPGPVRRRGKVELIKFVRVQWRRPQVEWRRRRWGPGPGASMAGSEELGLREDTLRVLAAFLRRGEAAGSPVPTPPRSPAQEEPTDFLSRLRRCLPCSLGRGAAPSESPRPCSLPIRPCYGLEPGGHPGCFTRGLELAIGLSSFSEAATR

SEQ ID NO: 8818 - protein, 334 aa, Homo sapiens; identical to SEQ ID NO: 8810
  Payload ID: 1791;
  Gene Symbol: BCL2L12;
  Gene Name: BCL2-like 12 (proline rich);
  Uniprot ID:  Q9HB09;
  ENSP ID: ENSP00000482218

SEQ ID NO: 8819 - protein, 269 aa, Homo sapiens
  Payload ID: 1791;
  Gene Symbol: BCL2L12;
  Gene Name: BCL2-like 12 (proline rich);
  ENSP ID: ENSP00000483272
MGRPAGLFPPLCPFLGFRPEACWERHMQIERAPSVPPFLRWAGYRPGPVRRRGKVELIKFVRVQWRRPQVEWRRRRWGPGPGASMAGSEELGLREDTLRVLAAFLRRGEAAGSPVPTPPRSPAQEEPTDFLSRLRRCLPCSLGRGAAPSESPRPCSLPIRPCYGLEPGPATPDFYALVAQRLEQLVQEQLKSPPSPELQGPPSTEKEAILRRLVALLEEEAEVINQKVMGICPTPWQGQELRNGGHPGCFTRGLELAIGLSSFSEAATR

SEQ ID NO: 8820 - protein, 485 aa, Homo sapiens
  Payload ID: 1792;
  Gene Symbol: BCL2L13;
  Gene Name: BCL2-like 13 (apoptosis facilitator);
  Uniprot ID:  Q9BXK5;
  ENSP ID: ENSP00000318883
MASSSTVPLGFHYETKYVVLSYLGLLSQEKLQEQHLSSPQGVQLDIASQSLDQEILLKVKTEIEEELKSLDKEISEAFTSTGFDRHTSPVFSPANPESSMEDCLAHLGEKVSQELKEPLHKALQMLLSQPVTYQAFRECTLETTVHASGWNKILVPLVLLRQMLLELTRRGQEPLSALLQFGVTYLEDYSAEYIIQQGGWGTVFSLESEEEEYPGITAEDSNDIYILPSDNSGQVSPPESPTVTTSWQSESLPVSLSASQSWHTESLPVSLGPESWQQIAMDPEEVKSLDSNGAGEKSENNSSNSDIVHVEKEEVPEGMEEAAVASVVLPARELQEALPEAPAPLLPHITATSLLGTREPDTEVITVEKSSPATSLFVELDEEEVKAATTEPTEVEEVVPALEPTETLLSEKEINAREESLVEELSPASEKKPVPPSEGKSRLSPAGEMKPMPLSEGKSILLFGGAAAVAILAVAIGVALALRKK

SEQ ID NO: 8821 - protein, 128 aa, Homo sapiens
  Payload ID: 1792;
  Gene Symbol: BCL2L13;
  Gene Name: BCL2-like 13 (apoptosis facilitator);
  ENSP ID: ENSP00000338932
MASSSTVPLGFHYETKYVVLSYLGLLSQEKLQEQHLSSPQGVQLDIASQSLDQEILLKVKTEIEEELKSLDKEISEDFGASGFATTNAFGIDKTWSRTFERTAAVWRDIPGGLFGRVHHSARWLGHCV

SEQ ID NO: 8822 - protein, 171 aa, Homo sapiens
  Payload ID: 1792;
  Gene Symbol: BCL2L13;
  Gene Name: BCL2-like 13 (apoptosis facilitator);
  ENSP ID: ENSP00000347133
MASSSTVPLGFHYETKYVVLSYLGLLSQEKLQEQHLSSPQGVQLDIASQSLDQEILLKVKTEIEEELKSLDKEISEAFTSTGFDRHTSPVFSPANPESSMEDCLAHLGEKVSQELKEPLHKALQMLLSQALCLVLSQRRRNTLESLQKIAMTFTSCPATTLDKSVPQSLQL

SEQ ID NO: 8823 - protein, 38 aa, Homo sapiens
  Payload ID: 1792;
  Gene Symbol: BCL2L13;
  Gene Name: BCL2-like 13 (apoptosis facilitator);
  ENSP ID: ENSP00000382677
  MOD_RES (1)..(1): Any amino acid
XLGEKVSQELKEPLHKALQMLLSQFWCLWFCYDKCFWN

SEQ ID NO: 8824 - protein, 201 aa, Homo sapiens
  Payload ID: 1792;
  Gene Symbol: BCL2L13;
  Gene Name: BCL2-like 13 (apoptosis facilitator);
  Uniprot ID:  Q9BXK5;
  ENSP ID: ENSP00000382682
MASSSTVPLGFHYETKYVVLSYLGLLSQEKLQEQHLSSPQGVQLDIASQSLDQEILLKVKTEIEEELKSLDKEISEAFTSTGFDRHTSPVFSPANPESSMEDCLAHLGEKVSQELKEPLHKALQMLLSQPVTYQAFRECTLETTVHASGWNKILVPLVLLRQMLLELTRRGQEPLSALLQFGVTYLEDYSAEYIIQQGGWV

SEQ ID NO: 8825 - protein, 323 aa, Homo sapiens
  Payload ID: 1792;
  Gene Symbol: BCL2L13;
  Gene Name: BCL2-like 13 (apoptosis facilitator);
  Uniprot ID:  Q9BXK5;
  ENSP ID: ENSP00000410019
MLLELTRRGQEPLSALLQFGVTYLEDYSAEYIIQQGGWGTVFSLESEEEEYPGITAEDSNDIYILPSDNSGQVSPPESPTVTTSWQSESLPVSLSASQSWHTESLPVSLGPESWQQIAMDPEEVKSLDSNGAGEKSENNSSNSDIVHVEKEEVPEGMEEAAVASVVLPARELQEALPEAPAPLLPHITATSLLGTREPDTEVITVEKSSPATSLFVELDEEEVKAATTEPTEVEEVVPALEPTETLLSEKEINAREESLVEELSPASEKKPVPPSEGKSRLSPAGEMKPMPLSEGKSILLFGGAAAVAILAVAIGVALALRKK

SEQ ID NO: 8826 - protein, 201 aa, Homo sapiens; identical to SEQ ID NO: 8824
  Payload ID: 1792;
  Gene Symbol: BCL2L13;
  Gene Name: BCL2-like 13 (apoptosis facilitator);
  Uniprot ID:  Q9BXK5;
  ENSP ID: ENSP00000434764

SEQ ID NO: 8827 - protein, 78 aa, Homo sapiens
  Payload ID: 1792;
  Gene Symbol: BCL2L13;
  Gene Name: BCL2-like 13 (apoptosis facilitator);
  ENSP ID: ENSP00000436321
MASSSTVPLGFHYETKYVVLSYLGLLSQEKLQEQHLSSPQGVQLDIASQSLDQEILLKVKTEIEEELKSLDKEISEGQ

SEQ ID NO: 8828 - protein, 323 aa, Homo sapiens; identical to SEQ ID NO: 8825
  Payload ID: 1792;
  Gene Symbol: BCL2L13;
  Gene Name: BCL2-like 13 (apoptosis facilitator);
  Uniprot ID:  Q9BXK5;
  ENSP ID: ENSP00000437667

SEQ ID NO: 8829 - protein, 92 aa, Homo sapiens
  Payload ID: 1792;
  Gene Symbol: BCL2L13;
  Gene Name: BCL2-like 13 (apoptosis facilitator);
  ENSP ID: ENSP00000441344
MASSSTVPLGFHYETKYVVLSYLGLLSQEKLQEQHLSSPQDFGASGFATTNAFGIDKTWSRTFERTAAVWRDIPGGLFGRVHHSARWLGHCV

SEQ ID NO: 8830 - protein, 461 aa, Homo sapiens
  Payload ID: 1792;
  Gene Symbol: BCL2L13;
  Gene Name: BCL2-like 13 (apoptosis facilitator);
  ENSP ID: ENSP00000477967
MSGSSGPAPTPAVTKARRGDLTLQHGGGGRLGPRVGALTAAGGPCRKQLPPPPLSSLLGQGPGPGVQLDIASQSLDQEILLKVKTEIEEELKSLDKEISEAFTSTGFDRHTSPVFSPANPESSMEDCLAHLGEKVSQELKEPLHKALQMLLSQPVTYQAFRECTLETTVHASGWNKGTVFSLESEEEEYPGITAEDSNDIYILPSDNSGQVSPPESPTVTTSWQSESLPVSLSASQSWHTESLPVSLGPESWQQIAMDPEEVKSLDSNGAGEKSENNSSNSDIVHVEKEEVPEGMEEAAVASVVLPARELQEALPEAPAPLLPHITATSLLGTREPDTEVITVEKSSPATSLFVELDEEEVKAATTEPTEVEEVVPALEPTETLLSEKEINAREESLVEELSPASEKKPVPPSEGKSRLSPAGEMKPMPLSEGKSILLFGGAAAVAILAVAIGVALALRKK

SEQ ID NO: 8831 - protein, 80 aa, Homo sapiens
  Payload ID: 1792;
  Gene Symbol: BCL2L13;
  Gene Name: BCL2-like 13 (apoptosis facilitator);
  ENSP ID: ENSP00000480014
MASSSTVPLGFHYETKYVVLSYLGLLSQEKLQEQHLSSPQGVQLDIASQSLDQEILLKVKTEIEEELKSLDKEISEGHCV

SEQ ID NO: 8832 - protein, 509 aa, Homo sapiens
  Payload ID: 1792;
  Gene Symbol: BCL2L13;
  Gene Name: BCL2-like 13 (apoptosis facilitator);
  ENSP ID: ENSP00000480836
MSGSSGPAPTPAVTKARRGDLTLQHGGGGRLGPRVGALTAAGGPCRKQLPPPPLSSLLGQGPGPGVQLDIASQSLDQEILLKVKTEIEEELKSLDKEISEAFTSTGFDRHTSPVFSPANPESSMEDCLAHLGEKVSQELKEPLHKALQMLLSQPVTYQAFRECTLETTVHASGWNKILVPLVLLRQMLLELTRRGQEPLSALLQFGVTYLEDYSAEYIIQQGGWGTVFSLESEEEEYPGITAEDSNDIYILPSDNSGQVSPPESPTVTTSWQSESLPVSLSASQSWHTESLPVSLGPESWQQIAMDPEEVKSLDSNGAGEKSENNSSNSDIVHVEKEEVPEGMEEAAVASVVLPARELQEALPEAPAPLLPHITATSLLGTREPDTEVITVEKSSPATSLFVELDEEEVKAATTEPTEVEEVVPALEPTETLLSEKEINAREESLVEELSPASEKKPVPPSEGKSRLSPAGEMKPMPLSEGKSILLFGGAAAVAILAVAIGVALALRKK

SEQ ID NO: 8833 - protein, 252 aa, Homo sapiens
  Payload ID: 1793;
  Gene Symbol: BCL2L14;
  Gene Name: BCL2-like 14 (apoptosis facilitator);
  Uniprot ID:  Q9BZR8;
  ENSP ID: ENSP00000266434
MCSTSGCDLEEIPLDDDDLNTIEFKILAYYTRHHVFKSTPALFSPKLLRTRSLSQRGLGNCSANESWTEVSWPCRNSQSSEKAINLGKKKSSWKAFFGVVEKEDSQSTPAKVSAQGQRTLEYQDSHSQQWSRCLSNVEQCLEHEAVDPKVISIANRVAEIVYSWPPPQATQAGGFKSKEIFVTEGLSFQLQGHVPVASSSKKDEEEQILAKIVELLKYSGDQLERKDTAFIPIPLVDTSIQGFPQDGLMACI

SEQ ID NO: 8834 - protein, 276 aa, Homo sapiens
  Payload ID: 1793;
  Gene Symbol: BCL2L14;
  Gene Name: BCL2-like 14 (apoptosis facilitator);
  Uniprot ID:  Q9BZR8;
  ENSP ID: ENSP00000298566
MCSTSGCDLEEIPLDDDDLNTIEFKILAYYTRHHVFKSTPALFSPKLLRTRSLSQRGLGNCSANESWTEVSWPCRNSQSSEKAINLGKKKSSWKAFFGVVEKEDSQSTPAKVSAQGQRTLEYQDSHSQQWSRCLSNVEQCLEHEAVDPKVISIANRVAEIVYSWPPPQATQAGGFKSKEIFVTEGLSFQLQGHVPVASSSKKDEEEQILAKIVELLKYSGDQLERKEKEWEESAKTKIKMALLWRSSGGGPRVLSIPEAFMKNSFTLTPPGFSEHN

SEQ ID NO: 8835 - protein, 327 aa, Homo sapiens
  Payload ID: 1793;
  Gene Symbol: BCL2L14;
  Gene Name: BCL2-like 14 (apoptosis facilitator);
  Uniprot ID:  Q9BZR8;
  ENSP ID: ENSP00000309132
MCSTSGCDLEEIPLDDDDLNTIEFKILAYYTRHHVFKSTPALFSPKLLRTRSLSQRGLGNCSANESWTEVSWPCRNSQSSEKAINLGKKKSSWKAFFGVVEKEDSQSTPAKVSAQGQRTLEYQDSHSQQWSRCLSNVEQCLEHEAVDPKVISIANRVAEIVYSWPPPQATQAGGFKSKEIFVTEGLSFQLQGHVPVASSSKKDEEEQILAKIVELLKYSGDQLERKLKKDKALMGHFQDGLSYSVFKTITDQVLMGVDPRGESEVKAQGFKAALVIDVTAKLTAIDNHPMNRVLGFGTKYLKENFSPWIQQHGGWEKILGISHEEVD

SEQ ID NO: 8836 - protein, 327 aa, Homo sapiens; identical to SEQ ID NO: 8835
  Payload ID: 1793;
  Gene Symbol: BCL2L14;
  Gene Name: BCL2-like 14 (apoptosis facilitator);
  Uniprot ID:  Q9BZR8;
  ENSP ID: ENSP00000379653

SEQ ID NO: 8837 - protein, 57 aa, Homo sapiens
  Payload ID: 1793;
  Gene Symbol: BCL2L14;
  Gene Name: BCL2-like 14 (apoptosis facilitator);
  ENSP ID: ENSP00000417223
MCSTSGCDLEEIPLDDDDLNTIEFKILAYYTRHHVFKSTPALFSPKLLRTRSLSQRG

SEQ ID NO: 8838 - protein, 125 aa, Homo sapiens
  Payload ID: 1793;
  Gene Symbol: BCL2L14;
  Gene Name: BCL2-like 14 (apoptosis facilitator);
  ENSP ID: ENSP00000419617
MPNMCSTSGCDLEEIPLDDDDLNTIEFKILAYYTRHHVFKSTPALFSPKLLRTRSLSQRGLGNCSANESWTEVSWPCRNSQSSEKAINLGKKKSSWKAFFGVVEKEDSQSTPAKVSAQGQRTLEY

SEQ ID NO: 8839 - protein, 176 aa, Homo sapiens
  Payload ID: 1793;
  Gene Symbol: BCL2L14;
  Gene Name: BCL2-like 14 (apoptosis facilitator);
  ENSP ID: ENSP00000465663
MCSTSGCDLEEIPLDDDDLNTIEFKILAYYTRHHVFKSTPALFSPKLLRTRSLSQRGLGNCSANESWTEVSWPCRNSQSSEKAINLGKKKSSWKAFFGVVEKEDSQSTPAKVSAQGQRTLEYQDSHSQQWSRCLSNVEQCLEHEAVDPKVISIANRVAEIVYSWPPPQATQAGGFK

SEQ ID NO: 8840 - protein, 360 aa, Homo sapiens
  Payload ID: 1793;
  Gene Symbol: BCL2L14;
  Gene Name: BCL2-like 14 (apoptosis facilitator);
  ENSP ID: ENSP00000466693
MGLSPCCPGWFQTPGHSLSSCLSLPKRWDCRPNMCSTSGCDLEEIPLDDDDLNTIEFKILAYYTRHHVFKSTPALFSPKLLRTRSLSQRGLGNCSANESWTEVSWPCRNSQSSEKAINLGKKKSSWKAFFGVVEKEDSQSTPAKVSAQGQRTLEYQDSHSQQWSRCLSNVEQCLEHEAVDPKVISIANRVAEIVYSWPPPQATQAGGFKSKEIFVTEGLSFQLQGHVPVASSSKKDEEEQILAKIVELLKYSGDQLERKLKKDKALMGHFQDGLSYSVFKTITDQVLMGVDPRGESEVKAQGFKAALVIDVTAKLTAIDNHPMNRVLGFGTKYLKENFSPWIQQHGGWEKILGISHEEVD

SEQ ID NO: 8841 - protein, 327 aa, Homo sapiens; identical to SEQ ID NO: 8835
  Payload ID: 1793;
  Gene Symbol: BCL2L14;
  Gene Name: BCL2-like 14 (apoptosis facilitator);
  Uniprot ID:  Q9BZR8;
  ENSP ID: ENSP00000467086

SEQ ID NO: 8842 - protein, 276 aa, Homo sapiens; identical to SEQ ID NO: 8834
  Payload ID: 1793;
  Gene Symbol: BCL2L14;
  Gene Name: BCL2-like 14 (apoptosis facilitator);
  Uniprot ID:  Q9BZR8;
  ENSP ID: ENSP00000485980

SEQ ID NO: 8843 - protein, 327 aa, Homo sapiens; identical to SEQ ID NO: 8835
  Payload ID: 1793;
  Gene Symbol: BCL2L14;
  Gene Name: BCL2-like 14 (apoptosis facilitator);
  Uniprot ID:  Q9BZR8;
  ENSP ID: ENSP00000486050

SEQ ID NO: 8844 - protein, 176 aa, Homo sapiens; identical to SEQ ID NO: 8839
  Payload ID: 1793;
  Gene Symbol: BCL2L14;
  Gene Name: BCL2-like 14 (apoptosis facilitator);
  ENSP ID: ENSP00000486273

SEQ ID NO: 8845 - protein, 252 aa, Homo sapiens; identical to SEQ ID NO: 8833
  Payload ID: 1793;
  Gene Symbol: BCL2L14;
  Gene Name: BCL2-like 14 (apoptosis facilitator);
  Uniprot ID:  Q9BZR8;
  ENSP ID: ENSP00000486560

SEQ ID NO: 8846 - protein, 360 aa, Homo sapiens; identical to SEQ ID NO: 8840
  Payload ID: 1793;
  Gene Symbol: BCL2L14;
  Gene Name: BCL2-like 14 (apoptosis facilitator);
  ENSP ID: ENSP00000486791

SEQ ID NO: 8847 - protein, 327 aa, Homo sapiens; identical to SEQ ID NO: 8835
  Payload ID: 1793;
  Gene Symbol: BCL2L14;
  Gene Name: BCL2-like 14 (apoptosis facilitator);
  Uniprot ID:  Q9BZR8;
  ENSP ID: ENSP00000486796

SEQ ID NO: 8848 - protein, 125 aa, Homo sapiens; identical to SEQ ID NO: 8838
  Payload ID: 1793;
  Gene Symbol: BCL2L14;
  Gene Name: BCL2-like 14 (apoptosis facilitator);
  ENSP ID: ENSP00000486862

SEQ ID NO: 8849 - protein, 327 aa, Homo sapiens; identical to SEQ ID NO: 8835
  Payload ID: 1793;
  Gene Symbol: BCL2L14;
  Gene Name: BCL2-like 14 (apoptosis facilitator);
  Uniprot ID:  Q9BZR8;
  ENSP ID: ENSP00000487330

SEQ ID NO: 8850 - protein, 57 aa, Homo sapiens; identical to SEQ ID NO: 8837
  Payload ID: 1793;
  Gene Symbol: BCL2L14;
  Gene Name: BCL2-like 14 (apoptosis facilitator);
  ENSP ID: ENSP00000487566

SEQ ID NO: 8851 - protein, 163 aa, Homo sapiens
  Payload ID: 1794;
  Gene Symbol: BCL2L15;
  Gene Name: BCL2-like 15;
  Uniprot ID:  Q5TBC7;
  ENSP ID: ENSP00000376992
MKSSQTFEEQTECIVNTLLMDFLSPTLQVASRNLCCVDEVDSGEPCSFDVAIIAGRLRMLGDQFNGELEASAKNVIAETIKGQTGAILQDTVESLSKTWCAQDSSLAYERAFLAVSVKLLEYMAHIAPEVVGQVAIPMTGMINGNQAIREFIQGQGGWENLES

SEQ ID NO: 8852 - protein, 56 aa, Homo sapiens
  Payload ID: 1794;
  Gene Symbol: BCL2L15;
  Gene Name: BCL2-like 15;
  Uniprot ID:  Q5TBC7;
  ENSP ID: ENSP00000376995
MKSSQTFEEQTECIVNTLLMDFLSPTLQVASRNLCCVDEVDSGKSGELKSWSYSRD

SEQ ID NO: 8853 - protein, 88 aa, Homo sapiens
  Payload ID: 1794;
  Gene Symbol: BCL2L15;
  Gene Name: BCL2-like 15;
  ENSP ID: ENSP00000417458
MKSSQTFEEQTECIVNTLLMDFLSPTLQVASRNLCCVDEVDSGEPCSFDVAIIAGRLRMLGDQFNGELEASAKNVIAETIKGQENLES

SEQ ID NO: 8854 - protein, 193 aa, Homo sapiens
  Payload ID: 1795;
  Gene Symbol: BCL2L2;
  Gene Name: BCL2-like 2;
  Uniprot ID:  Q92843;
  ENSP ID: ENSP00000250405
MATPASAPDTRALVADFVGYKLRQKGYVCGAGPGEGPAADPLHQAMRAAGDEFETRFRRTFSDLAAQLHVTPGSAQQRFTQVSDELFQGGPNWGRLVAFFVFGAALCAESVNKEMEPLVGQVQEWMVAYLETQLADWIHSSGGWAEFTALYGDGALEEARRLREGNWASVRTVLTGAVALGALVTVGAFFASK

SEQ ID NO: 8855 - protein, 51 aa, Homo sapiens
  Payload ID: 1795;
  Gene Symbol: BCL2L2;
  Gene Name: BCL2-like 2;
  ENSP ID: ENSP00000451148
MATPASAPDTRALVADFVGYKLRQKGYVCGAGPGEGPAADPLHQAMRAAGD

SEQ ID NO: 8856 - protein, 167 aa, Homo sapiens
  Payload ID: 1795;
  Gene Symbol: BCL2L2;
  Gene Name: BCL2-like 2;
  ENSP ID: ENSP00000451197
  MOD_RES (1)..(1): Any amino acid
XRTFSDLAAQLHVTPGSAQQRFTQVSDELFQGGPNWGRLVAFFVFGAALCAESVNKEMEPLVGQVQEWMVAYLETQLADWIHSSGGWAEFTALYGDGALEEARRLREGNWASVRTVLTGAVALGALVWSTLFTLPSTTGHISLLAFPGTFSQEELQGPWPGYQNALL

SEQ ID NO: 8857 - protein, 71 aa, Homo sapiens
  Payload ID: 1795;
  Gene Symbol: BCL2L2;
  Gene Name: BCL2-like 2;
  ENSP ID: ENSP00000451234
MATPASAPDTRALVADFVGYKLRQKGYVCGAGPGEGPAADPLHQAMRAAGDEFETRFRRTFSDLAAQLHVT

SEQ ID NO: 8858 - protein, 149 aa, Homo sapiens
  Payload ID: 1795;
  Gene Symbol: BCL2L2;
  Gene Name: BCL2-like 2;
  ENSP ID: ENSP00000451701
MATPASAPDTRALVADFVGYKLRQKGYVCGAGPGEGPAADPLHQAMRAAGDEFETRFRRTFSDLAAQLHVTPGSAQQRFTQVSDELFQGGPNWGRLVAFFVFGAALCAESVNKEMEPLVGQVQEWMVAYLETQLADWIHSSGGWAEFTA

SEQ ID NO: 8859 - protein, 144 aa, Homo sapiens
  Payload ID: 1795;
  Gene Symbol: BCL2L2;
  Gene Name: BCL2-like 2;
  ENSP ID: ENSP00000452265
MATPASAPDTRALVADFVGYKLRQKGYVCGAGPGEGPAADPLHQAMRAAGDEFETRFRRTFSDLAAQLHVTPGSAQQRFTQVSDELFQGGPNWGRLVAFFVFGAALCAESVNKEMEPLVGQVQEWMVAYLETQLADWIHSSGGW

SEQ ID NO: 8860 - protein, 212 aa, Homo sapiens
  Payload ID: 1796;
  Gene Symbol: BOK;
  Gene Name: BCL2-related ovarian killer;
  Uniprot ID:  Q9UMX3;
  ENSP ID: ENSP00000314132
MEVLRRSSVFAAEIMDAFDRSPTDKELVAQAKALGREYVHARLLRAGLSWSAPERAAPVPGRLAEVCAVLLRLGDELEMIRPSVYRNVARQLHISLQSEPVVTDAFLAVAGHIFSAGITWGKVVSLYAVAAGLAVDCVRQAQPAMVHALVDCLGEFVRKTLATWLRRRGGWTDVLKCVVSTDPGLRSHWLVAALCSFGRFLKAAFFVLLPER

SEQ ID NO: 8861 - protein, 175 aa, Homo sapiens
  Payload ID: 1797;
  Gene Symbol: BCL2A1;
  Gene Name: BCL2-related prt A1;
  Uniprot ID:  Q16548;
  ENSP ID: ENSP00000267953
MTDCEFGYIYRLAQDYLQCVLQIPQPGSGPSKTSRVLQNVAFSVQKEVEKNLKSCLDNVNVVSVDTARTLFNQVMEKEFEDGIINWGRIVTIFAFEGILIKKLLRQQIAPDVDTYKEISYFVAEFIMNNTGEWIRQNGGWENGFVKKFEPKSGWMTFLEVTGKICEMLSLLKQYC

SEQ ID NO: 8862 - protein, 163 aa, Homo sapiens
  Payload ID: 1797;
  Gene Symbol: BCL2A1;
  Gene Name: BCL2-related prt A1;
  Uniprot ID:  Q16548;
  ENSP ID: ENSP00000335250
MTDCEFGYIYRLAQDYLQCVLQIPQPGSGPSKTSRVLQNVAFSVQKEVEKNLKSCLDNVNVVSVDTARTLFNQVMEKEFEDGIINWGRIVTIFAFEGILIKKLLRQQIAPDVDTYKEISYFVAEFIMNNTGEWIRQNGGWGKWHNHTPMLVESVAHKKRKMAL

SEQ ID NO: 8863 - protein, 1721 aa, Homo sapiens
  Payload ID: 1798;
  Gene Symbol: BCOR;
  Gene Name: BCL6 corepressor;
  Uniprot ID:  Q6W2J9;
  ENSP ID: ENSP00000345923
MLSATPLYGNVHSWMNSERVRMCGASEDRKILVNDGDASKARLELREENPLNHNVVDASTAHRIDGLAALSMDRTGLIREGLRVPGNIVYSSLCGLGSEKGREAATSTLGGLGFSSERNPEMQFKPNTPETVEASAVSGKPPNGFSAIYKTPPGIQKSAVATAEALGLDRPASDKQSPLNINGASYLRLPWVNPYMEGATPAIYPFLDSPNKYSLNMYKALLPQQSYSLAQPLYSPVCTNGERFLYLPPPHYVGPHIPSSLASPMRLSTPSASPAIPPLVHCADKSLPWKMGVSPGNPVDSHAYPHIQNSKQPRVPSAKAVTSGLPGDTALLLPPSPRPSPRVHLPTQPAADTYSEFHKHYARISTSPSVALSKPYMTVSSEFPAARLSNGKYPKAPEGGEGAQPVPGHARKTAVQDRKDGSSPPLLEKQTVTKDVTDKPLDLSSKVVDVDASKADHMKKMAPTVLVHSRAGSGLVLSGSEIPKETLSPPGNGCAIYRSEIISTAPSSWVVPGPSPNEENNGKSMSLKNKALDWAIPQQRSSSCPRMGGTDAVITNVSGSVSSAGRPASASPAPNANADGTKTSRSSVETTPSVIQHVGQPPATPAKHSSSTSSKGAKASNPEPSFKANENGLPPSSIFLSPNEAFRSPPIPYPRSYLPYPAPEGIAVSPLSLHGKGPVYPHPVLLPNGSLFPGHLAPKPGLPYGLPTGRPEFVTYQDALGLGMVHPMLIPHTPIEITKEEKPERRSRSHERARYEDPTLRNRFSEILETSSTKLHPDVPTDKNLKPNPNWNQGKTVVKSDKLVYVDLLREEPDAKTDTNVSKPSFAAESVGQSAEPPKPSVEPALQQHRDFIALREELGRISDFHETYTFKQPVFTVSKDSVLAGTNKENLGLPVSTPFLEPPLGSDGPAVTFGKTQEDPKPFCVGSAPPSVDVTPTYTKDGADEAESNDGKVLKPKPSKLAKRIANSAGYVGDRFKCVTTELYADSSQLSREQRALQMEGLQEDSILCLPAAYCERAMMRFSELEMKEREGGHPATKDSEMCKFSPADWERLKGNQDKKPKSVTLEEAIAEQNESERCEYSVGNKHRDPFEAPEDKDLPVEKYFVERQPVSEPPADQVASDMPHSPTLRVDRKRKVSGDSSHTETTAEEVPEDPLLKAKRRRVSKGLHPKKQRHLLHLRERWEQQVSAADGKPGRQSRKEVTQATQPEAIPQGTNITEEKPGRKRAEAKGNRSWSEESLKPSDNEQGLPVFSGSPPMKSLSSTSAGGKKQAQPSCAPASRPPAKQQKIKENQKTDVLCADEEEDCQAASLLQKYTDNSEKPSGKRLCKTKHLIPQESRRGLPLTGEYYVENADGKVTVRRFRKRPEPSSDYDLSPAKQEPKPFDRLQQLLPASQSTQLPCSSSPQETTQSRPMPPEARRLIVNKNAGETLLQRAARLGYEEVVLYCLENKICDVNHRDNAGYCALHEACARGWLNIVRHLLEYGADVNCSAQDGTRPLHDAVENDHLEIVRLLLSYGADPTLATYSGRTIMKMTHSELMEKFLTDYLNDLQGRNDDDASGTWDFYGSSVCEPDDESGYDVLANPPGPEDQDDDDDAYSDVFEFEFSETPLLPCYNIQVSVAQGPRNWLLLSDVLKKLKMSSRIFRCNFPNVEIVTIAEAEFYRQVSASLLFSCSKDLEAFNPESKELLDLVEFTNEIQTLLGSSVEWLHPSDLASDNYW

SEQ ID NO: 8864 - protein, 1755 aa, Homo sapiens
  Payload ID: 1798;
  Gene Symbol: BCOR;
  Gene Name: BCL6 corepressor;
  Uniprot ID:  Q6W2J9;
  ENSP ID: ENSP00000367705
MLSATPLYGNVHSWMNSERVRMCGASEDRKILVNDGDASKARLELREENPLNHNVVDASTAHRIDGLAALSMDRTGLIREGLRVPGNIVYSSLCGLGSEKGREAATSTLGGLGFSSERNPEMQFKPNTPETVEASAVSGKPPNGFSAIYKTPPGIQKSAVATAEALGLDRPASDKQSPLNINGASYLRLPWVNPYMEGATPAIYPFLDSPNKYSLNMYKALLPQQSYSLAQPLYSPVCTNGERFLYLPPPHYVGPHIPSSLASPMRLSTPSASPAIPPLVHCADKSLPWKMGVSPGNPVDSHAYPHIQNSKQPRVPSAKAVTSGLPGDTALLLPPSPRPSPRVHLPTQPAADTYSEFHKHYARISTSPSVALSKPYMTVSSEFPAARLSNGKYPKAPEGGEGAQPVPGHARKTAVQDRKDGSSPPLLEKQTVTKDVTDKPLDLSSKVVDVDASKADHMKKMAPTVLVHSRAGSGLVLSGSEIPKETLSPPGNGCAIYRSEIISTAPSSWVVPGPSPNEENNGKSMSLKNKALDWAIPQQRSSSCPRMGGTDAVITNVSGSVSSAGRPASASPAPNANADGTKTSRSSVETTPSVIQHVGQPPATPAKHSSSTSSKGAKASNPEPSFKANENGLPPSSIFLSPNEAFRSPPIPYPRSYLPYPAPEGIAVSPLSLHGKGPVYPHPVLLPNGSLFPGHLAPKPGLPYGLPTGRPEFVTYQDALGLGMVHPMLIPHTPIEITKEEKPERRSRSHERARYEDPTLRNRFSEILETSSTKLHPDVPTDKNLKPNPNWNQGKTVVKSDKLVYVDLLREEPDAKTDTNVSKPSFAAESVGQSAEPPKPSVEPALQQHRDFIALREELGRISDFHETYTFKQPVFTVSKDSVLAGTNKENLGLPVSTPFLEPPLGSDGPAVTFGKTQEDPKPFCVGSAPPSVDVTPTYTKDGADEAESNDGKVLKPKPSKLAKRIANSAGYVGDRFKCVTTELYADSSQLSREQRALQMEGLQEDSILCLPAAYCERAMMRFSELEMKEREGGHPATKDSEMCKFSPADWERLKGNQDKKPKSVTLEEAIAEQNESERCEYSVGNKHRDPFEAPEDKDLPVEKYFVERQPVSEPPADQVASDMPHSPTLRVDRKRKVSGDSSHTETTAEEVPEDPLLKAKRRRVSKDDWPEREMTNSSSNHLEDPHYSELTNLKVCIELTGLHPKKQRHLLHLRERWEQQVSAADGKPGRQSRKEVTQATQPEAIPQGTNITEEKPGRKRAEAKGNRSWSEESLKPSDNEQGLPVFSGSPPMKSLSSTSAGGKKQAQPSCAPASRPPAKQQKIKENQKTDVLCADEEEDCQAASLLQKYTDNSEKPSGKRLCKTKHLIPQESRRGLPLTGEYYVENADGKVTVRRFRKRPEPSSDYDLSPAKQEPKPFDRLQQLLPASQSTQLPCSSSPQETTQSRPMPPEARRLIVNKNAGETLLQRAARLGYEEVVLYCLENKICDVNHRDNAGYCALHEACARGWLNIVRHLLEYGADVNCSAQDGTRPLHDAVENDHLEIVRLLLSYGADPTLATYSGRTIMKMTHSELMEKFLTDYLNDLQGRNDDDASGTWDFYGSSVCEPDDESGYDVLANPPGPEDQDDDDDAYSDVFEFEFSETPLLPCYNIQVSVAQGPRNWLLLSDVLKKLKMSSRIFRCNFPNVEIVTIAEAEFYRQVSASLLFSCSKDLEAFNPESKELLDLVEFTNEIQTLLGSSVEWLHPSDLASDNYW

SEQ ID NO: 8865 - protein, 1703 aa, Homo sapiens
  Payload ID: 1798;
  Gene Symbol: BCOR;
  Gene Name: BCL6 corepressor;
  Uniprot ID:  Q6W2J9;
  ENSP ID: ENSP00000367716
MLSATPLYGNVHSWMNSERVRMCGASEDRKILVNDGDASKARLELREENPLNHNVVDASTAHRIDGLAALSMDRTGLIREGLRVPGNIVYSSLCGLGSEKGREAATSTLGGLGFSSERNPEMQFKPNTPETVEASAVSGKPPNGFSAIYKTPPGIQKSAVATAEALGLDRPASDKQSPLNINGASYLRLPWVNPYMEGATPAIYPFLDSPNKYSLNMYKALLPQQSYSLAQPLYSPVCTNGERFLYLPPPHYVGPHIPSSLASPMRLSTPSASPAIPPLVHCADKSLPWKMGVSPGNPVDSHAYPHIQNSKQPRVPSAKAVTSGLPGDTALLLPPSPRPSPRVHLPTQPAADTYSEFHKHYARISTSPSVALSKPYMTVSSEFPAARLSNGKYPKAPEGGEGAQPVPGHARKTAVQDRKDGSSPPLLEKQTVTKDVTDKPLDLSSKVVDVDASKADHMKKMAPTVLVHSRAGSGLVLSGSEIPKETLSPPGNGCAIYRSEIISTAPSSWVVPGPSPNEENNGKSMSLKNKALDWAIPQQRSSSCPRMGGTDAVITNVSGSVSSAGRPASASPAPNANADGTKTSRSSVETTPSVIQHVGQPPATPAKHSSSTSSKGAKASNPEPSFKANENGLPPSSIFLSPNEAFRSPPIPYPRSYLPYPAPEGIAVSPLSLHGKGPVYPHPVLLPNGSLFPGHLAPKPGLPYGLPTGRPEFVTYQDALGLGMVHPMLIPHTPIEITKEEKPERRSRSHERARYEDPTLRNRFSEILETSSTKLHPDVPTDKNLKPNPNWNQGKTVVKSDKLVYVDLLREEPDAKTDTNVSKPSFAAESVGQSAEPPKPSVEPALQQHRDFIALREELGRISDFHETYTFKQPVFTVSKDSVLAGTNKENLGLPVSTPFLEPPLGSDGPAVTFGKTQEDPKPFCVGSAPPSVDVTPTYTKDGADEAESNDGKVLKPKPSKLAKRIANSAGYVGDRFKCVTTELYADSSQLSREQRALQRAMMRFSELEMKEREGGHPATKDSEMCKFSPADWERLKGNQDKKPKSVTLEEAIAEQNESERCEYSVGNKHRDPFEAPEDKDLPVEKYFVERQPVSEPPADQVASDMPHSPTLRVDRKRKVSGDSSHTETTAEEVPEDPLLKAKRRRVSKGLHPKKQRHLLHLRERWEQQVSAADGKPGRQSRKEVTQATQPEAIPQGTNITEEKPGRKRAEAKGNRSWSEESLKPSDNEQGLPVFSGSPPMKSLSSTSAGGKKQAQPSCAPASRPPAKQQKIKENQKTDVLCADEEEDCQAASLLQKYTDNSEKPSGKRLCKTKHLIPQESRRGLPLTGEYYVENADGKVTVRRFRKRPEPSSDYDLSPAKQEPKPFDRLQQLLPASQSTQLPCSSSPQETTQSRPMPPEARRLIVNKNAGETLLQRAARLGYEEVVLYCLENKICDVNHRDNAGYCALHEACARGWLNIVRHLLEYGADVNCSAQDGTRPLHDAVENDHLEIVRLLLSYGADPTLATYSGRTIMKMTHSELMEKFLTDYLNDLQGRNDDDASGTWDFYGSSVCEPDDESGYDVLANPPGPEDQDDDDDAYSDVFEFEFSETPLLPCYNIQVSVAQGPRNWLLLSDVLKKLKMSSRIFRCNFPNVEIVTIAEAEFYRQVSASLLFSCSKDLEAFNPESKELLDLVEFTNEIQTLLGSSVEWLHPSDLASDNYW

SEQ ID NO: 8866 - protein, 622 aa, Homo sapiens
  Payload ID: 1798;
  Gene Symbol: BCOR;
  Gene Name: BCL6 corepressor;
  ENSP ID: ENSP00000367724
MPHSPTLRVDRKRKVSGDSSHTETTAEEVPEDPLLKAKRRRVSKGLHPKKQRHLLHLRERWEQQVSAADGKPGRQSRKEVTQATQPEAIPQGTNITEEKPGRKRAEAKGNRSWSEESLKPSDNEQGLPVFSGSPPMKSLSSTSAGGKKQAQPSCAPASRPPAKQQKIKENQKTDVLCADEEEDCQAASLLQKYTDNSEKPSGKRLCKTKHLIPQESRRGLPLTGEYYVENADGKVTVRRFRKRPEPSSDYDLSPAKQEPKPFDRLQQLLPASQSTQLPCSSSPQETTQSRPMPPEARRLIVNKNAGETLLQRAARLGYEEVVLYCLENKICDVNHRDNAGYCALHEACARGWLNIVRHLLEYGADVNCSAQDGTRPLHDAVENDHLEIVRLLLSYGADPTLATYSGRTIMKMTHSELMEKFLTDYLNDLQGRNDDDASGTWDFYGSSVCEPDDESGYDVLANPPGPEDQDDDDDAYSDVFEFEFSETPLLPCYNIQVSVAQGPRNWLLLSDVLKKLKMSSRIFRCNFPNVEIVTIAEAEFYRQVSASLLFSCSKDLEAFNPESKELLDLVEFTNEIQTLLGSSVEWLHPSDLASDNYWKSPQIARGSVEGKKTDDKTSKTDL

SEQ ID NO: 8867 - protein, 1721 aa, Homo sapiens; identical to SEQ ID NO: 8863
  Payload ID: 1798;
  Gene Symbol: BCOR;
  Gene Name: BCL6 corepressor;
  Uniprot ID:  Q6W2J9;
  ENSP ID: ENSP00000380512

SEQ ID NO: 8868 - protein, 1287 aa, Homo sapiens
  Payload ID: 1798;
  Gene Symbol: BCOR;
  Gene Name: BCL6 corepressor;
  ENSP ID: ENSP00000384485
MLSATPLYGNVHSWMNSERVRMCGASEDRKILVNDGDASKARLELREENPLNHNVVDASTAHRIDGLAALSMDRTGLIREGLRVPGNIVYSSLCGLGSEKGREAATSTLGGLGFSSERNPEMQFKPNTPETVEASAVSGKPPNGFSAIYKTPPGIQKSAVATAEALGLDRPASDKQSPLNINGASYLRLPWVNPYMEGATPAIYPFLDSPNKYSLNMYKALLPQQSYSLAQPLYSPVCTNGERFLYLPPPHYVGPHIPSSLASPMRLSTPSASPAIPPLVHCADKSLPWKMGVSPGNPVDSHAYPHIQNSKQPRVPSAKAVTSGLPGDTALLLPPSPRPSPRVHLPTQPAADTYSEFHKHYARISTSPSVALSKPYMTVSSEFPAARLSNGKYPKAPEGGEGAQPVPGHARKTAVQDRKDGSSPPLLEKQTVTKDVTDKPLDLSSKVVDVDASKADHMKKMAPTVLVHSRAGSGLVLSGSEIPKETLSPPGNGCAIYRSEIISTAPSSWVVPGPSPNEENNGKSMSLKNKALDWAIPQQRSSSCPRMGGTDAVITNVSGSVSSAGRPASASPAPNANADGTKTSRSSVETTPSVIQHVGQPPATPAKHSSSTSSKGAKASNPEPSFKANENGLPPSSIFLSPNEAFRSPPIPYPRSYLPYPAPEGIAVSPLSLHGKGPVYPHPVLLPNGSLFPGHLAPKPGLPYGLPTGRPEFVTYQDALGLGMVHPMLIPHTPIEITKEEKPERRSRSHERARYEDPTLRNRFSEILETSSTKLHPDVPTDKNLKPNPNWNQGKTVVKSDKLVYVDLLREEPDAKTDTNVSKPSFAAESVGQSAEPPKPSVEPALQQHRDFIALREELGRISDFHETYTFKQPVFTVSKDSVLAGTNKENLGLPVSTPFLEPPLGSDGPAVTFGKTQEDPKPFCVGSAPPSVDVTPTYTKDGADEAESNDGKVLKPKPSKLAKRIANSAGYVGDRFKCVTTELYADSSQLSREQRALQMEGLQEDSILCLPAAYCERAMMRFSELEMKEREGGHPATKDSEMCKFSPADWERLKGNQDKKPKSVTLEEAIAEQNESERCEYSVGNKHRDPFEAPEDKDLPVEKYFVERQPVSEPPADQVASDMPHSPTLRVDRKRKVSGDSSHTETTAEEVPEDPLLKAKRRRVSKGLHPKKQRHLLHLRERWEQQVSAADGKPGRQSRKEVTQATQPEAIPQGTNITEEKPGRKRAEAKGNRSWSEESLKPSDNEQGLPVFSGSPPMKSLSSTSAGGKKQAQPSCAPASRPPAKQ

SEQ ID NO: 8869 - protein, 332 aa, Homo sapiens
  Payload ID: 1798;
  Gene Symbol: BCOR;
  Gene Name: BCL6 corepressor;
  ENSP ID: ENSP00000387552
QKTDVLCADEEEDCQAASLLQKYTDNSEKPSGKRLCKTKHLIPQESRRGLPLTGEYYVENADGKVTVRRFRKRPEPSSDYDLSPAKQEPKPFDRLQQLLPASQSTQLPCSSSPQETTQSRPMPPEARRLIVNKNAGETLLQRAARLGYEEVVLYCLENKICDVNHRDNAGYCALHEACARGWLNIVRHLLEYGADVNCSAQDGTRPLHDAVENDHLEIVRLLLSYGADPTLATYSGRTIMKMTHSELMEKFLTDYLNDLQGRNDDDASGTWDFYGSSVCEPDDESGYDVLANPPGPEDQDDDDDAYSDVFEFEFSETPLLPCYNIQVSVAQG

SEQ ID NO: 8870 - protein, 28 aa, Homo sapiens
  Payload ID: 1798;
  Gene Symbol: BCOR;
  Gene Name: BCL6 corepressor;
  ENSP ID: ENSP00000390273
MLSATPLYGNVHSWMNSERVRMCGASED

SEQ ID NO: 8871 - protein, 289 aa, Homo sapiens
  Payload ID: 1798;
  Gene Symbol: BCOR;
  Gene Name: BCL6 corepressor;
  ENSP ID: ENSP00000403823
  MOD_RES (1)..(1): Any amino acid
XAQPSCAPASRPPAKQQKIKENQKTDVLCADEEEDCQAASLLQKYTDNSEKPSGKRLCKTKHLIPQESRRGLPLTGEYYVENADGKVTVRRFRKRPEPSSDYDLSPAKQEPKPFDRLQQLLPASQSTQLPCSSSPQETTQSRPMPPEARRLIVNKNAGETLLQRAARLGYEEVVLYCLENKICDVNHRDNAGYCALHEACARGWLNIVRHLLEYGADVNCSAQDGTRPLHDAVENDHLEIVRLLLSYGADPTLATYSGRTIMKMTHSELMEKFLTGHETGYCFRMSLRN

SEQ ID NO: 8872 - protein, 594 aa, Homo sapiens
  Payload ID: 1798;
  Gene Symbol: BCOR;
  Gene Name: BCL6 corepressor;
  ENSP ID: ENSP00000408006
DKDLPVEKYFVERQPVSEPPADQVASDMPHSPTLRVDRKRKVSGDSSHTETTAEEVPEDPLLKAKRRRVSKGLHPKKQRHLLHLRERWEQQVSAADGKPGRQSRKEVTQATQPEAIPQGTNITEEKPGRKRAEAKGNRSWSEESLKPSDNEQGLPVFSGSPPMKSLSSTSAGGKKQAQPSCAPASRPPAKQQKIKENQKTDVLCADEEEDCQAASLLQKYTDNSEKPSGKRLCKTKHLIPQESRRGLPLTGEYYVENADGKVTVRRFRKRPEPSSDYDLSPAKQEPKPFDRLQQLLPASQSTQLPCSSSPQETTQSRPMPPEARRLIVNKNAGETLLQRAARLGYEEVVLYCLENKICDVNHRDNAGYCALHEACARGWLNIVRHLLEYGADVNCSAQDGTRPLHDAVENDHLEIVRLLLSYGADPTLATYSGRTIMKMTHSELMEKFLTDYLNDLQGRNDDDASGTWDFYGSSVCEPDDESGYDVLANPPGPEDQDDDDDAYSDVFEFEFSETPLLPCYNIQVSVAQGPRNWLLLSDVLKKLKMSSRIFRCNFPNVEIVTIAEAEFYRQVSASLLFSCSKDLEAFNPERSPLK

SEQ ID NO: 8873 - protein, 411 aa, Homo sapiens
  Payload ID: 1798;
  Gene Symbol: BCOR;
  Gene Name: BCL6 corepressor;
  ENSP ID: ENSP00000483217
MTRPAFQPPATPAKHSSSTSSKGAKASNPEPSFKANENGLPPSSIFLSPNEAFRSPPIPYPRSYLPYPAPEGIAVSPLSLHGKGPVYPHPVLLPNGSLFPGHLAPKPGLPYGLPTGRPEFVTYQDALGLGMVHPMLIPHTPIEITKEEKPERRSRSHERARYEDPTLRNRFSEILETSSTKLHPDVPTDKNLKPNPNWNQGKTVVKSDKLVYVDLLREEPDAKTDTNVSKPSFAAESVGQSAEPPKPSVEPALQQHRDFIALREELGRISDFHETYTFKQPVFTVSKDSVLAGTNKENLGLPVSTPFLEPPLGSDGPAVTFGKTQEDPKPFCVGSAPPSVDVTPTYTKDGADEAESNDGKVLKPKPSKLAKRIANSAGYVGDRFKCVTTELYADSSQLSREQRALQVSPPT

SEQ ID NO: 8874 - protein, 1711 aa, Homo sapiens
  Payload ID: 1799;
  Gene Symbol: BCORL1;
  Gene Name: BCL6 corepressor-like 1;
  Uniprot ID:  Q5H9F3;
  ENSP ID: ENSP00000218147
MISTAPLYSGVHNWTSSDRIRMCGINEERRAPLSDEESTTGDCQHFGSQEFCVSSSFSKVELTAVGSGSNARGADPDGSATEKLGHKSEDKPDDPQPKMDYAGNVAEAEGLLVPLSSPGDGLKLPASDSAEASNSRADCSWTPLNTQMSKQVDCSPAGVKALDSRQGVGEKNTFILATLGTGVPVEGTLPLVTTNFSPLPAPICPPAPGSASVPHSVPDAFQVPLSVPAPVPHSGLVPVQVATSVPAPSPPLAPVPALAPAPPSVPTLISDSNPLSVSASVLVPVPASAPPSGPVPLSAPAPAPLSVPVSAPPLALIQAPVPPSAPTLVLAPVPTPVLAPMPASTPPAAPAPPSVPMPTPTPSSGPPSTPTLIPAFAPTPVPAPTPAPIFTPAPTPMPAATPAAIPTSAPIPASFSLSRVCFPAAQAPAMQKVPLSFQPGTVLTPSQPLVYIPPPSCGQPLSVATLPTTLGVSSTLTLPVLPSYLQDRCLPGVLASPELRSYPYAFSVARPLTSDSKLVSLEVNRLPCTSPSGSTTTQPAPDGVPGPLADTSLVTASAKVLPTPQPLLPAPSGSSAPPHPAKMPSGTEQQTEGTSVTFSPLKSPPQLEREMASPPECSEMPLDLSSKSNRQKLPLPNQRKTPPMPVLTPVHTSSKALLSTVLSRSQRTTQAAGGNVTSCLGSTSSPFVIFPEIVRNGDPSTWVKNSTALISTIPGTYVGVANPVPASLLLNKDPNLGLNRDPRHLPKQEPISIIDQGEPKGTGATCGKKGSQAGAEGQPSTVKRYTPARIAPGLPGCQTKELSLWKPTGPANIYPRCSVNGKPTSTQVLPVGWSPYHQASLLSIGISSAGQLTPSQGAPIRPTSVVSEFSGVPSLSSSEAVHGLPEGQPRPGGSFVPEQDPVTKNKTCRIAAKPYEEQVNPVLLTLSPQTGTLALSVQPSGGDIRMNQGPEESESHLCSDSTPKMEGPQGACGLKLAGDTKPKNQVLATYMSHELVLATPQNLPKMPELPLLPHDSHPKELILDVVPSSRRGSSTERPQLGSQVDLGRVKMEKVDGDVVFNLATCFRADGLPVAPQRGQAEVRAKAGQARVKQESVGVFACKNKWQPDDVTESLPPKKMKCGKEKDSEEQQLQPQAKAVVRSSHRPKCRKLPSDPQESTKKSPRGASDSGKEHNGVRGKHKHRKPTKPESQSPGKRADSHEEGSLEKKAKSSFRDFIPVVLSTRTRSQSGSICSSFAGMADSDMGSQEVFPTEEEEEVTPTPAKRRKVRKTQRDTQYRSHHAQDKSLLSQGRRHLWRAREMPWRTEAARQMWDTNEEEEEEEEEGLLKRKKRRRQKSRKYQTGEYLTEQEDEQRRKGRADLKARKQKTSSSQSLEHRLRNRNLLLPNKVQGISDSPNGFLPNNLEEPACLENSEKPSGKRKCKTKHMATVSEEAKDVVLYCLQKDSEDVNHRDNAGYTALHEACSRGWTDILNILLEHGANVNCSAQDGTRPVHDAVVNDNLETIWLLLSYGADPTLATYSGQTAMKLASSDTMKRFLSDHLSDLQGRAEGDPGVSWDFYSSSVLEEKDGFACDLLHNPPGSSDQEGDDPMEEDDFMFELSDKPLLPCYNLQVSVSRGPCNWFLFSDVLKRLKLSSRIFQARFPHFEITTMPKAEFYRQVASSQLLTPAERPGGLDDRSPPGSSETVELVRYEPDLLRLLGSEVEFQSCNS

SEQ ID NO: 8875 - protein, 1385 aa, Homo sapiens
  Payload ID: 1799;
  Gene Symbol: BCORL1;
  Gene Name: BCL6 corepressor-like 1;
  ENSP ID: ENSP00000399483
TPAAIPTSAPIPASFSLSRVCFPAAQAPAMQKVPLSFQPGTVLTPSQPLVYIPPPSCGQPLSVATLPTTLGVSSTLTLPVLPSYLQDRCLPGVLASPELRSYPYAFSVARPLTSDSKLVSLEVNRLPCTSPSGSTTTQPAPDGVPGPLADTSLVTASAKVLPTPQPLLPAPSGSSAPPHPAKMPSGTEQQTEGTSVTFSPLKSPPQLEREMASPPECSEMPLDLSSKSNRQKLPLPNQRKTPPMPVLTPVHTSSKALLSTVLSRSQRTTQAAGGNVTSCLGSTSSPFVIFPEIVRNGDPSTWVKNSTALISTIPGTYVGVANPVPASLLLNKDPNLGLNRDPRHLPKQEPISIIDQGEPKGTGATCGKKGSQAGAEGQPSTVKRYTPARIAPGLPGCQTKELSLWKPTGPANIYPRCSVNGKPTSTQVLPVGWSPYHQASLLSIGISSAGQLTPSQGAPIRPTSVVSEFSGVPSLSSSEAVHGLPEGQPRPGGSFVPEQDPVTKNKTCRIAAKPYEEQVNPVLLTLSPQTGTLALSVQPSGGDIRMNQGPEESESHLCSDSTPKMEGPQGACGLKLAGDTKPKNQVLATYMSHELVLATPQNLPKMPELPLLPHDSHPKELILDVVPSSRRGSSTERPQLGSQVDLGRVKMEKVDGDVVFNLATCFRADGLPVAPQRGQAEVRAKAGQARVKQESVGVFACKNKWQPDDVTESLPPKKMKCGKEKDSEEQQLQPQAKAVVRSSHRPKCRKLPSDPQESTKKSPRGASDSGKEHNGVRGKHKHRKPTKPESQSPGKRADSHEEGSLEKKAKSSFRDFIPVVLSTRTRSQSGSICSSFAGMADSDMGSQEVFPTEEEEEVTPTPAKRRKVRKTQRDTQYRSHHAQDKSLLSQGRRHLWRAREMPWRTEAARQMWDTNEEEEEEEEEGLLKRKKRRRQKSRKYQTGEYLTEQEDEQRRKGRADLKARKQKTSSSQSLEHRLRNRNLLLPNKVQGISDSPNGFLPNNLEEPACLENSEKPSGKRKCKTKHMATVSEEAKGKGRWSQQKTRSPKSPTPVKPTEPCTPSKSRSASSEEASESPTARQIPPEARRLIVNKNAGETLLQRAARLGYKDVVLYCLQKDSEDVNHRDNAGYTALHEACSRGWTDILNILLEHGANVNCSAQDGTRPVHDAVVNDNLETIWLLLSYGADPTLATYSGQTAMKLASSDTMKRFLSDHLSDLQGRAEGDPGVSWDFYSSSVLEEKDGFACDLLHNPPGSSDQEGDDPMEEDDFMFELSDKPLLPCYNLQVSVSRGPCNWFLFSDVLKRLKLSSRIFQARFPHFEITTMPKAEFYRQVASSQLLTPAERPGGLDDRSPPGSSETVELVRYEPDLLRLLGSEVEFQSCNS

SEQ ID NO: 8876 - protein, 741 aa, Homo sapiens
  Payload ID: 1799;
  Gene Symbol: BCORL1;
  Gene Name: BCL6 corepressor-like 1;
  ENSP ID: ENSP00000416520
  MOD_RES (1)..(1): Any amino acid
XPLLPAPSGSSAPPHPAKMPSGTEQQTEGTSVTFSPLKSPPQLEREMASPPECSEMPLDLSSKSNRQKLPLPNQRKTPPMPVLTPVHTSSKALLSTVLSRSQRTTQAAGGNVTSCLGSTSSPFVIFPEIVRNGDPSTWVKNSTALISTIPGTYVGVANPVPASLLLNKDPNLGLNRDPRHLPKQEPISIIDQGEPKGTGATCGKKGSQAGAEGQPSTVKRYTPARIAPGLPGCQTKELSLWKPTGPANIYPRCSVNGKPTSTQVLPVGWSPYHQASLLSIGISSAGQLTPSQGAPIRPTSVVSEFSGVPSLSSSEAVHGLPEGQPRPGGSFVPEQDPVTKNKTCRIAAKPYEEQVNPVLLTLSPQTGTLALSVQPSGGDIRMNQGPEESESHLCSDSTPKMEGPQGACGLKLAGDTKPKNQVLATYMSHELVLATPQNLPKMPELPLLPHDSHPKELILDVVPSSRRGSSTERPQLGSQVDLGRVKMEKVDGDVVFNLATCFRADGLPVAPQRGQAEVRAKAGQARVKQESVGVFACKNKWQPDDVTESLPPKKMKCGKEKDSEEQQLQPQAKAVVRSSHRPKCRKLPSDPQESTKKSPRGASDSGKEHNGVRGKHKHRKPTKPESQSPGKRADSHEEGSLEKKAKSSFRDFIPVVLSTRTRSQSDLKARKQKTSSSQSLEHRLRNRNLLLPNKVQGISDSPNGFLPNNLEEPACLENSEKPSGKRKCKTKHMATVSEEAK

SEQ ID NO: 8877 - protein, 1711 aa, Homo sapiens; identical to SEQ ID NO: 8874
  Payload ID: 1799;
  Gene Symbol: BCORL1;
  Gene Name: BCL6 corepressor-like 1;
  Uniprot ID:  Q5H9F3;
  ENSP ID: ENSP00000437775

SEQ ID NO: 8878 - protein, 45 aa, Homo sapiens
  Payload ID: 1799;
  Gene Symbol: BCORL1;
  Gene Name: BCL6 corepressor-like 1;
  ENSP ID: ENSP00000476643
MISTAPLYSGVHNWTSSDRIRMCGINEESHFQQWSPPTSASPTAF

SEQ ID NO: 8879 - protein, 28 aa, Homo sapiens
  Payload ID: 1799;
  Gene Symbol: BCORL1;
  Gene Name: BCL6 corepressor-like 1;
  ENSP ID: ENSP00000484149
MISTAPLYSGVHNWTSSDRIRMCGINEE

SEQ ID NO: 8880 - protein, 540 aa, Homo sapiens
  Payload ID: 1800;
  Gene Symbol: BFSP1;
  Gene Name: beaded filament structural prt 1, filensin;
  Uniprot ID:  Q12934;
  ENSP ID: ENSP00000367099
MYENECECQLLLKEMLERLNKEADEALLHNLRLQLEAQFLQDDISAAKDRHKKNLLEVQTYISILQQIIHTTPPASIVTSGMREEKLLTEREVAALRSQLEEGREVLSHLQAQRVELQAQTTTLEQAIKSAHECYDDEIQLYNEQIETLRKEIEETERVLEKSSYDCRQLAVAQQTLKNELDRYHRIIEIEGNRLTSAFIETPIPLFTQSHGVSLSTGSGGKDLTRALQDITAAKPRQKALPKNVPRRKEIITKDKTNGALEDAPLKGLEDTKLVQVVLKEESESKFESESKEVSPLTQEGAPEDVPDGGQISKGFGKLYRKVKEKVRSPKEPETPTELYTKERHVLVTGDANYVDPRFYVSSITAKGGVAVSVAEDSVLYDGQVEPSPESPKPPLENGQVGLQEKEDGQPIDQQPIDKEIEPDGAELEGPEEKREGEERDEESRRPCAMVTPGAEEPSIPEPPKPAADQDGAEVLGTRSRSLPEKGPPKALAYKTVEVVESIEKISTESIQTYEETAVIVETMIGKTKSDKKKSGEKSS

SEQ ID NO: 8881 - protein, 665 aa, Homo sapiens
  Payload ID: 1800;
  Gene Symbol: BFSP1;
  Gene Name: beaded filament structural prt 1, filensin;
  Uniprot ID:  Q12934;
  ENSP ID: ENSP00000367104
MYRRSYVFQTRKEQYEHADEASRAAEPERPADEGWAGATSLAALQGLGERVAAHVQRARALEQRHAGLRRQLDAFQRLGELAGPEDALARQVESNRQRVRDLEAERARLERQGTEAQRALDEFRSKYENECECQLLLKEMLERLNKEADEALLHNLRLQLEAQFLQDDISAAKDRHKKNLLEVQTYISILQQIIHTTPPASIVTSGMREEKLLTEREVAALRSQLEEGREVLSHLQAQRVELQAQTTTLEQAIKSAHECYDDEIQLYNEQIETLRKEIEETERVLEKSSYDCRQLAVAQQTLKNELDRYHRIIEIEGNRLTSAFIETPIPLFTQSHGVSLSTGSGGKDLTRALQDITAAKPRQKALPKNVPRRKEIITKDKTNGALEDAPLKGLEDTKLVQVVLKEESESKFESESKEVSPLTQEGAPEDVPDGGQISKGFGKLYRKVKEKVRSPKEPETPTELYTKERHVLVTGDANYVDPRFYVSSITAKGGVAVSVAEDSVLYDGQVEPSPESPKPPLENGQVGLQEKEDGQPIDQQPIDKEIEPDGAELEGPEEKREGEERDEESRRPCAMVTPGAEEPSIPEPPKPAADQDGAEVLGTRSRSLPEKGPPKALAYKTVEVVESIEKISTESIQTYEETAVIVETMIGKTKSDKKKSGEKSS

SEQ ID NO: 8882 - protein, 526 aa, Homo sapiens
  Payload ID: 1800;
  Gene Symbol: BFSP1;
  Gene Name: beaded filament structural prt 1, filensin;
  Uniprot ID:  Q12934;
  ENSP ID: ENSP00000442522
MLERLNKEADEALLHNLRLQLEAQFLQDDISAAKDRHKKNLLEVQTYISILQQIIHTTPPASIVTSGMREEKLLTEREVAALRSQLEEGREVLSHLQAQRVELQAQTTTLEQAIKSAHECYDDEIQLYNEQIETLRKEIEETERVLEKSSYDCRQLAVAQQTLKNELDRYHRIIEIEGNRLTSAFIETPIPLFTQSHGVSLSTGSGGKDLTRALQDITAAKPRQKALPKNVPRRKEIITKDKTNGALEDAPLKGLEDTKLVQVVLKEESESKFESESKEVSPLTQEGAPEDVPDGGQISKGFGKLYRKVKEKVRSPKEPETPTELYTKERHVLVTGDANYVDPRFYVSSITAKGGVAVSVAEDSVLYDGQVEPSPESPKPPLENGQVGLQEKEDGQPIDQQPIDKEIEPDGAELEGPEEKREGEERDEESRRPCAMVTPGAEEPSIPEPPKPAADQDGAEVLGTRSRSLPEKGPPKALAYKTVEVVESIEKISTESIQTYEETAVIVETMIGKTKSDKKKSGEKSS

SEQ ID NO: 8883 - protein, 415 aa, Homo sapiens
  Payload ID: 1801;
  Gene Symbol: BFSP2;
  Gene Name: beaded filament structural prt 2, phakinin;
  Uniprot ID:  Q13515;
  ENSP ID: ENSP00000304987
MSERRVVVDLPTSASSSMPLQRRRASFRGPRSSSSLESPPASRTNAMSGLVRAPGVYVGTAPSGCIGGLGARVTRRALGISSVFLQGLRSSGLATVPAPGLERDHGAVEDLGGCLVEYMAKVHALEQVSQELETQLRMHLESKATRSGNWGALRASWASSCQQVGEAVLENARLMLQTETIQAGADDFKERYENEQPFRKAAEEEINSLYKVIDEANLTKMDLESQIESLKEELGSLSRNYEEDVKLLHKQLAGCELEQMDAPIGTGLDDILETIRIQWERDVEKNRVEAGALLQAKQQAEVAHMSQTQEEKLAAALRVELHNTSCQVQSLQAETESLRALKRGLENTLHDAKHWHDMELQNLGAVVGRLEAELREIRAEAEQQQQERAHLLARKCQLQKDVASYHALLDREESG

SEQ ID NO: 8884 - protein, 450 aa, Homo sapiens
  Payload ID: 1802;
  Gene Symbol: BECN1;
  Gene Name: beclin 1, autophagy related;
  Uniprot ID:  Q14457;
  ENSP ID: ENSP00000355231
MEGSKTSNNSTMQVSFVCQRCSQPLKLDTSFKILDRVTIQELTAPLLTTAQAKPGETQEEETNSGEEPFIETPRQDGVSRRFIPPARMMSTESANSFTLIGEASDGGTMENLSRRLKVTGDLFDIMSGQTDVDHPLCEECTDTLLDQLDTQLNVTENECQNYKRCLEILEQMNEDDSEQLQMELKELALEEERLIQELEDVEKNRKIVAENLEKVQAEAERLDQEEAQYQREYSEFKRQQLELDDELKSVENQMRYAQTQLDKLKKTNVFNATFHIWHSGQFGTINNFRLGRLPSVPVEWNEINAAWGQTVLLLHALANKMGLKFQRYRLVPYGNHSYLESLTDKSKELPLYCSGGLRFFWDNKFDHAMVAFLDCVQQFKEEVEKGETRFCLPYRMDVEKGKIEDTGGSGGSYSIKTQFNSEEQWTKALKFMLTNLKWGLAWVSSQFYNK

SEQ ID NO: 8885 - protein, 279 aa, Homo sapiens
  Payload ID: 1802;
  Gene Symbol: BECN1;
  Gene Name: beclin 1, autophagy related;
  ENSP ID: ENSP00000416173
MEGSKTSNNSTMQVSFVCQRCSQPLKLDTSFKILDRVTIQELTAPLLTTAQAKPGETQEEETNSGEEPFIETPRQDGVSRRFIPPARRCLEILEQMNEDDSEQLQMELKELALEEERLIQELEDVEKNRKIVAENLEKVQAEAERLDQEEAQYQREYSEFKRQQLELDDELKSVENQMRYAQTQLDKLKKTNVFNATFHIWHSGQFGTINNFRLGRLPSVPVEWNEINAAWGQTVLLLHALANKMGLKFQRYRLVPYGNHSYLESLTDKSKDGCGERQD

SEQ ID NO: 8886 - protein, 450 aa, Homo sapiens; identical to SEQ ID NO: 8884
  Payload ID: 1802;
  Gene Symbol: BECN1;
  Gene Name: beclin 1, autophagy related;
  Uniprot ID:  Q14457;
  ENSP ID: ENSP00000465364

SEQ ID NO: 8887 - protein, 76 aa, Homo sapiens
  Payload ID: 1802;
  Gene Symbol: BECN1;
  Gene Name: beclin 1, autophagy related;
  ENSP ID: ENSP00000465658
MEGSKTSNNSTMQVSFVCQRCSQPLKLDTSFKILDRVTIQELTGQRDPWKEGGQECGSSITYHSPGETRRDPGGRD

SEQ ID NO: 8888 - protein, 55 aa, Homo sapiens
  Payload ID: 1802;
  Gene Symbol: BECN1;
  Gene Name: beclin 1, autophagy related;
  ENSP ID: ENSP00000465964
GNHSYLESLTDKSKAEVQWHDLGLLQPPPPGFKQFPCLSLLSIWDYRHAPPRPAN

SEQ ID NO: 8889 - protein, 229 aa, Homo sapiens
  Payload ID: 1802;
  Gene Symbol: BECN1;
  Gene Name: beclin 1, autophagy related;
  ENSP ID: ENSP00000466281
  MOD_RES (1)..(1): Any amino acid
XGQTDVDHPLCEECTDTLLDQLDTQLNVTENECQNYKRCLEILEQMNEDDSEQLQMELKELALEEERLIQELEDVEKNRKIVAENLEKVQAEAERLDQEEAQYQREYSEFKRQQLELDDELKSVENQMRYAQTQLDKLKKTNVFNATFHIWHSGQFGTINNFRLGRLPSVPVEWNEINAAWGQTVLLLHALANKMGLKFQRYRLVPYGNHSYLESLTDKSKDGCGERQD

SEQ ID NO: 8890 - protein, 106 aa, Homo sapiens
  Payload ID: 1802;
  Gene Symbol: BECN1;
  Gene Name: beclin 1, autophagy related;
  ENSP ID: ENSP00000466419
  MOD_RES (1)..(1): Any amino acid
XHSGQFGTINNFRLGRLPSVPVEWNEINAAWGQTVLLLHALANKMGLKFQRMDVEKGKIEDTGGSGGSYSIKTQFNSEEQWTKALKFMLTNLKWGLAWVSSQFYNK

SEQ ID NO: 8891 - protein, 176 aa, Homo sapiens
  Payload ID: 1802;
  Gene Symbol: BECN1;
  Gene Name: beclin 1, autophagy related;
  ENSP ID: ENSP00000466766
MEGSKTSNNSTMQVSFVCQRCSQPLKLDTSFKILDRVTIQELTAPLLTTAQAKPGETQEEETNSGEEPFIETPRQDGVSRRFIPPARRCLEILEQMNEDDSEQLQMELKELALEEERLIQELEDVEKNRKIVAENLEKVQAEAERLDQEEAQHSGQFGTINNFRLGRLPSVPVEWN

SEQ ID NO: 8892 - protein, 59 aa, Homo sapiens
  Payload ID: 1802;
  Gene Symbol: BECN1;
  Gene Name: beclin 1, autophagy related;
  ENSP ID: ENSP00000467937
MEGSKTSNNSTMQVSFVCQRCSQPLKLDTSFKILDRVTIQELTAPLLTTAQAKPGETQE

SEQ ID NO: 8893 - protein, 132 aa, Homo sapiens
  Payload ID: 1802;
  Gene Symbol: BECN1;
  Gene Name: beclin 1, autophagy related;
  ENSP ID: ENSP00000468104
LNVTENECQNYKRCLEILEQMNEDDSEQLQMELKELALEEERLIQELEDVEKNRKIVAENLEKVQAEAERLDQEEAQMDVEKGKIEDTGGSGGSYSIKTQFNSEEQWTKALKFMLTNLKWGLAWVSSQFYNK

SEQ ID NO: 8894 - protein, 72 aa, Homo sapiens
  Payload ID: 1802;
  Gene Symbol: BECN1;
  Gene Name: beclin 1, autophagy related;
  ENSP ID: ENSP00000468461
  MOD_RES (1)..(1): Any amino acid
XAQTQLDKLKKTNVFNATFHIWHSGQFGTINNFRLGRLPSVPVEWNEINAAWGQTVLLLHALANKMGLKFQR

SEQ ID NO: 8895 - protein, 109 aa, Homo sapiens
  Payload ID: 1802;
  Gene Symbol: BECN1;
  Gene Name: beclin 1, autophagy related;
  ENSP ID: ENSP00000468597
  MOD_RES (1)..(1): Any amino acid
XAAWGQTVLLLHALANKMGLKFQRSCRYTVLGGCGFSGTTSLTMQWWLSWTVCSSSKKRLRKARHVFVFPTGWMWRKARLKTQEAVAAPIPSKPSLTLRSSGQKLSSSC

SEQ ID NO: 8896 - protein, 20 aa, Homo sapiens
  Payload ID: 1802;
  Gene Symbol: BECN1;
  Gene Name: beclin 1, autophagy related;
  ENSP ID: ENSP00000479791
MEGSKTSNNSTMQVSFVCQR

SEQ ID NO: 8897 - protein, 431 aa, Homo sapiens
  Payload ID: 1803;
  Gene Symbol: BECN2;
  Gene Name: beclin 2;
  Uniprot ID:  A8MW95;
  ENSP ID: ENSP00000488361
MSSIRFLCQRCHQALKLSGSSESRSLPAAPAPTSGQAEPGDTREPGVTTREVTDAEEQQDGASSRSPPGDGSVSKGHANIFTLLGELGAMHMLSSIQKAAGDIFDIVSGQAVVDHPLCEECTDSLLEQLDIQLALTEADSQNYQRCLETGELATSEDEAAALRAELRDLELEEARLVQELEDVDRNNARAAADLQAAQAEAAELDQQERQHYRDYSALKRQQLELLDQLGNVENQLQYARVQRDRLKEINCFTATFEIWVEGPLGVINNFRLGRLPTVRVGWNEINTAWGQAALLLLTLANTIGLQFQRYRLIPCGNHSYLKSLTDDRTELPLFCYGGQDVFLNNKYDRAMVAFLDCMQQFKEEAEKGELGLSLPYGIQVETGLMEDVGGRGECYSIRTHLNTQELWTKALKFMLINFKWSLIWVASRYQK

SEQ ID NO: 8898 - protein, 645 aa, Homo sapiens
  Payload ID: 1804;
  Gene Symbol: BEND2;
  Gene Name: BEN domain containing 2;
  Uniprot ID:  Q8NDZ0;
  ENSP ID: ENSP00000369369
MSERTQEQDFVIITVDDSDDNNDCSIEMVEVSETADNSTNDIADDSTYVTADNPTDDTATQPNFPGGNDGHHRPLQMSYGSGSVTQAGVQWHDHSSLQPQPLGLKQFFHLSLPSSWDDRRTPPCPVAHGDQIVSQINHPVHLRRYSYNSEEVDFPKRGRFYTPEVQSSISPPAERQETHAWASPAVTSLESAACHELQEADLSESLSYPRIVSSSSLQQYVAQGGSFPCFGMPWNFISGGAESTNAVISFANATTAVPMAVLSRRESSLANNPGVVNYSALPENENVGPGRALSSFCFHPNLESGPQMSYGTMSYSTEMKNNCDQDDASASACLTPDFALLPLNILVKVDTNTENSVNTMNRSTLLDSDSGQDSSSSSVCIPPKYGYLGDPKRNVRVLKIHLLAVQNMAKPKQAACYLVRILFSKEILISSSVDIHLKDSQSLDPNKMAALREYLATTFPTCDLHEHGKDWQDCISGINSMIYCLCSEGKSTPKTVRKNKKRTNRVASASADRNDQRGRDGGEGCSWMFQPMNNSKMREKRNLQPNSNAIPEGMREPSTDNPEEPGEAWSYFGRPWRNIRMPCSVLTLAKTKSCASLSARYLIQKLFTKDVLVQSNVYGNLKHGLCALDPNKISALRGLLHIEYV

SEQ ID NO: 8899 - protein, 799 aa, Homo sapiens
  Payload ID: 1804;
  Gene Symbol: BEND2;
  Gene Name: BEN domain containing 2;
  Uniprot ID:  Q8NDZ0;
  ENSP ID: ENSP00000369372
MSERTQEQDFVIITVDDSDDNNDCSIEMVEVSETADNSTNDIADDSTYVTADNPTDDTATQPNFPGGNDGHHRPLQMSYGSGSVTQAGVQWHDHSSLQPQPLGLKQFFHLSLPSSWDDRRTPPCPVAHGDQIVSQINHPVHLRRYSYNSEEVDFPKRGRFYTPEVQSSISPPAERQETHAWASPAVTSLESAACHELQEADLSESLSYPRIVSSSSLQQYVAQGGSFPCFGMPWNFISGGAESTNAVISFANATTAVPMAVLSRRESSLANNPGVVNYSALPENENVGPGRALSSFCFHPNLEMPERPANSSKNSTETANYPTLMGNYNGQNTASLSVFIPPYFAEKIILTEMPGTTETNVENNSQTVYYPALSGNTSAPYPASSYLPITSNFESGPQMSYGTMSYSTEMKNNCDQDDASASACLTPDFALLPLNILVKVDTNTENSVNTMNRSTLLDSDSGQDSSSSSVCIPPKYGYLGDPKRNVRVLKIHLLAVQNMAKPKQAACYLVRILFSKEILISSSVDIHLKDSQSLDPNKMAALREYLATTFPTCDLHEHGKDWQDCISGINSMIYCLCSEGKSTPKTVRKNKKRTNRVASASADRNDQRGRDGGEGCSWMFQPMNNSKMREKRNLQPNSNAIPEGMREPSTDNPEEPGEAWSYFGRPWRNIRMPCSVLTLAKTKSCASLSARYLIQKLFTKDVLVQSNVYGNLKHGLCALDPNKISALREFLQENYPICDLSENGRDWKSCVTSINSGIRSLRHDVRRAEARSQSLPAVTPPELEQESKPGDPDATDPST

SEQ ID NO: 8900 - protein, 828 aa, Homo sapiens
  Payload ID: 1805;
  Gene Symbol: BEND3;
  Gene Name: BEN domain containing 3;
  Uniprot ID:  Q5T5X7;
  ENSP ID: ENSP00000358038
MNSTEFTEDVEEVLKSITVKVETEAEDAALDCSVNSRTSEKHSVDSVLTALQDSSKRKQLVSDGLLDSVPGVKRRRLIPEALLAGMRNRENSSPCQGNGEQAGRGRSLGNVWPGEEEPCNDATTPSYKKPLYGISHKIMEKKNPPSGDLLNVYELFEKANASNSPSSLRLLNEPQKRDCGSTGAGTDNDPNIYFLIQKMFYMLNTLTSNMSQLHSKVDLLSLEVSRIKKQVSPTEMVAKFQPPPEYQLTAAELKQIVDQSLSGGDLACRLLVQLFPELFSDVDFSRGCSACGFAAKRKLESLHLQLIRNYVEVYYPSVKDTAVWQAECLPQLNDFFSRFWAQREMEDSQPSGQVASFFEAEQVDPGHFLDNKDQEEALSLDRSSTIASDHVVDTQDLTEFLDEASSPGEFAVFLLHRLFPELFDHRKLGEQYSCYGDGGKQELDPQRLQIIRNYTEIYFPDMQEEEAWLQQCAQRINDELEGLGLDAGSEGDPPRDDCYDSSSLPDDISVVKVEDSFEGERPGRRSKKIWLVPIDFDKLEIPQPDFEVPGADCLLSKEQLRSIYESSLSIGNFASRLLVHLFPELFTHENLRKQYNCSGSLGKKQLDPSRIKLIRHYVQLLYPRAKNDRVWTLEFVGKLDERCRRRDTEQRRSYQQQRKVHVPGPECRDLTSYAINPERFREEFEGPPLPPERSSKDFCKIPLDELVVPSPDFPVPSPYLLSDKEVREIVQQSLSVGNFAARLLVRLFPELFTAENLRLQYNHSGACNKKQLDPTRLRLIRHYVEAVYPVEKMEEVWHYECIPSIDERCRRPNRKKCDILKKAKKVEK

SEQ ID NO: 8901 - protein, 828 aa, Homo sapiens; identical to SEQ ID NO: 8900
  Payload ID: 1805;
  Gene Symbol: BEND3;
  Gene Name: BEN domain containing 3;
  Uniprot ID:  Q5T5X7;
  ENSP ID: ENSP00000411268

SEQ ID NO: 8902 - protein, 437 aa, Homo sapiens
  Payload ID: 1806;
  Gene Symbol: BEND4;
  Gene Name: BEN domain containing 4;
  ENSP ID: ENSP00000421160
MQPAEEGPSVPKIYKQRSPYSVLKTFPSKRPALAKRYERPTLVELPHVRAPPPPPPPFAPHAAVSISSSEPPPQQFQAQSSYPPGPGRAAAAASSSSPSCTPATSQGHLRTPAQPPPASPAASSSSSFAAVVRYGPGAAAAAGTGGTGSDSASLELSAESRMILDAFAQQCSRVLSLLNCGGKLLDSNHSQSMISCVKQEGSSYNERQEHCHIGKGVHSQTSDNVDIEMQYMQRKQQTSAFLRVFTDSLQNYLLSGSFPTPNPSSASEYGHLADVDPLSTSPVHTLGGWTSPATSESHGHPSSSTLPEEEEEEDEEGYCPRCQELEQEVISLQQENEELRRKLESIPVPCQTVLDYLKMVLQHHNQLLIPQPADQPTEGSKQLLNNYPVYITSKQWDEAVNSSKKDGRRLLRYLIRFVFTTDELKYSCGLGKRKRIH

SEQ ID NO: 8903 - protein, 534 aa, Homo sapiens
  Payload ID: 1806;
  Gene Symbol: BEND4;
  Gene Name: BEN domain containing 4;
  Uniprot ID:  Q6ZU67;
  ENSP ID: ENSP00000421169
MEEEMQPAEEGPSVPKIYKQRSPYSVLKTFPSKRPALAKRYERPTLVELPHVRAPPPPPPPFAPHAAVSISSSEPPPQQFQAQSSYPPGPGRAAAAASSSSPSCTPATSQGHLRTPAQPPPASPAASSSSSFAAVVRYGPGAAAAAGTGGTGSDSASLELSAESRMILDAFAQQCSRVLSLLNCGGKLLDSNHSQSMISCVKQEGSSYNERQEHCHIGKGVHSQTSDNVDIEMQYMQRKQQTSAFLRVFTDSLQNYLLSGSFPTPNPSSASEYGHLADVDPLSTSPVHTLGGWTSPATSESHGHPSSSTLPEEEEEEDEEGYCPRCQELEQEVISLQQENEELRRKLESIPVPCQTVLDYLKMVLQHHNQLLIPQPADQPTEGSKQLLNNYPVYITSKQWDEAVNSSKKDGRRLLRYLIRFVFTTDELKYSCGLGKRKRSVQSGETGPERRPLDPVKVTCLREFIRMHCTSNPDWWMPSEEQINKVFSDAVGHARQGRAVGTFLHNGGSFYEGIDHQASQDEVFNKSSQDGSGD

SEQ ID NO: 8904 - protein, 405 aa, Homo sapiens
  Payload ID: 1806;
  Gene Symbol: BEND4;
  Gene Name: BEN domain containing 4;
  ENSP ID: ENSP00000478660
MQPAEEGPSVPKIYKQRSPYSVLKTFPSLELSAESRMILDAFAQQCSRVLSLLNCGGKLLDSNHSQSMISCVKQEGSSYNERQEHCHIGKGVHSQTSDNVDIEMQYMQRKQQTSAFLRVFTDSLQNYLLSGSFPTPNPSSASEYGHLADVDPLSTSPVHTLGGWTSPATSESHGHPSSSTLPEEEEEEDEEGYCPRCQELEQEVISLQQENEELRRKLESIPVPCQTVLDYLKMVLQHHNQLLIPQPADQPTEGSKQLLNNYPVYITSKQWDEAVNSSKKDGRRLLRYLIRFVFTTDELKYSCGLGKRKRSVQSGETGPERRPLDPVKVTCLREFIRMHCTSNPDWWMPSEEQINKVFSDAVGHARQGRAVGTFLHNGGSFYEGIDHQASQDEVFNKSSQDGSGD

SEQ ID NO: 8905 - protein, 421 aa, Homo sapiens
  Payload ID: 1807;
  Gene Symbol: BEND5;
  Gene Name: BEN domain containing 5;
  Uniprot ID:  Q7L4P6;
  ENSP ID: ENSP00000360899
MYAFVRFLEDNVCYALPVSCVRDFSPRSRLDFDNQKVYAVYRGPEELGAGPESPPRAPRDWGALLLHKAQILALAEDKSDLENSVMQKKIKIPKLSLNHVEEDGEVKDYGEEDLQLRHIKRPEGRKPSEVAHKSIEAVVARLEKQNGLSLGHSTCPEEVFVEASPGTEDMDSLEDAVVPRALYEELLRNYQQQQEEMRHLQQELERTRRQLVQQAKKLKEYGALVSEMKELRDLNRRLQDVLLLRLGSGPAIDLEKVKSECLEPEPELRSTFSEEANTSSYYPAPAPVMDKYILDNGKVHLGSGIWVDEEKWHQLQVTQGDSKYTKNLAVMIWGTDVLKNRSVTGVATKKKKDAVPKPPLSPHKLSIVRECLYDRIAQETVDETEIAQRLSKVNKYICEKIMDINKSCKNEERREAKYNLQ

SEQ ID NO: 8906 - protein, 129 aa, Homo sapiens
  Payload ID: 1808;
  Gene Symbol: BEND6;
  Gene Name: BEN domain containing 6;
  ENSP ID: ENSP00000359781
MQKIVQTDEITNTQAFRKGKRKRTETMDSENANSDMDKGQRDPYSGNAFLPGESSSEDEEPLAELSKEELCAKIKSLKEKLTNTRKENSRLRQSLVMLQGNKLDITTEKTILHGGMKTLNVVTTSSHPV

SEQ ID NO: 8907 - protein, 279 aa, Homo sapiens
  Payload ID: 1808;
  Gene Symbol: BEND6;
  Gene Name: BEN domain containing 6;
  Uniprot ID:  Q5SZJ8;
  ENSP ID: ENSP00000359782
MQKIVQTDEITNTQAFRKGKRKRTETMDSENANSDMDKGQRDPYSGNAFLPGESSSEDEEPLAELSKEELCAKIKSLKEKLTNTRKENSRLRQSLVMLQVLPQAVTQFEELVGMAEALLKGGGTMSTSASTLWRATNNSSPDSFASTCSNSNSNSSSPVSLKPEEEHQTDEKQFQIEKWQIARCNKSKPQKFINDLMQVLYTNEYMATHSLTGAKSSTSRDKAVKPAMNQNEVQEIIGVTKQLFPNTDDVSIRRMIGQKLNNCTKKPNLSKNLNSQDIK

SEQ ID NO: 8908 - protein, 106 aa, Homo sapiens
  Payload ID: 1808;
  Gene Symbol: BEND6;
  Gene Name: BEN domain containing 6;
  Uniprot ID:  Q5SZJ8;
  ENSP ID: ENSP00000359784
MQKIVQTDEITNTQAFRKGKRKRTETMDSENANSDMDKGQRDPYSGNAFLPGESSSEDEEPLAELSKEELCAKIKSLKEKLTNTRKENSRLRQSLVMLQAWSRELP

SEQ ID NO: 8909 - protein, 468 aa, Homo sapiens
  Payload ID: 1809;
  Gene Symbol: BEND7;
  Gene Name: BEN domain containing 7;
  Uniprot ID:  Q8N7W2;
  ENSP ID: ENSP00000345773
MEIKKQITGMRRLLNDSTGRIYQRVGKEGEKLKEEPQDLDLVWPPRLNSSAEAPQSLHPSSRGVWNELPPQSGQFSGQYGTRSRTFQSQPHPTTSSNGELPVVNSSAGSNCCTCNCQSTLQAILQELKTMRKLMQIQAVGTQNRQQPPISLICSQRTAVSRKRNKKKKVPPKTVEPLTVKQKPSGSEMEKKSVVASELSALQAAEHTSPEESRVLGFGIVLESPSSDPEVQLAEGFDVFMPKSQLDSILSNYTRSGSLLFRKLVCAFFDDKTLANSLPNGKRKRGLNDNRKGLDQNIVGAIKVFTEKYCTANHVDKLPGPRDWVQILQDQIKLARRRLKRGSAEIADSDERLDGIALPPTGACGGPCTVLPGGSAAVTLVLQSSPQTMSQEKGQMAEPWEEQHLVLLNNLTRDRAETGALSQTSQDFKHHSFLITQVSATLHHQRGIRNFPTPGSAKSLTLHISCLSL

SEQ ID NO: 8910 - protein, 374 aa, Homo sapiens
  Payload ID: 1809;
  Gene Symbol: BEND7;
  Gene Name: BEN domain containing 7;
  Uniprot ID:  Q8N7W2;
  ENSP ID: ENSP00000367868
MEIKKQITGMRRLLNDSTGRIYQRVGKEGEKLKEEPQDLDLVWPPRLNSSAEAPQSLHPSSRGVWNELPPQSGQFSGQYGTRSRTFQSQPHPTTSSNGMVVNKHSEGSHGGELPVVNSSAGSNCCTCNCQSTLQAILQELKTMRKLMQIQAVGTQNRQQPPISLICSQRTAVSRKRNKKKKVPPKTVEPLTVKQKPSGSEMEKKSVVASELSALQAAEHTSPEESRVLGFGIVLESPSSDPEVQLAEGFDVFMPKSQLDSILSNYTRSGSLLFRKLVCAFFDDKTLANSLPNGKRKRGLNDNRKGLDQNIVGAIKVFTEKYCTANHVDKLPGPRDWVQILQDQIKLARRRLKRGSEIADSDERLDGIALPPTVV

SEQ ID NO: 8911 - protein, 117 aa, Homo sapiens
  Payload ID: 1809;
  Gene Symbol: BEND7;
  Gene Name: BEN domain containing 7;
  ENSP ID: ENSP00000401256
LDSILSNYTRSGSLLFRKLVCAFFDDKTLANSLPNGKRKRGLNDNRKGLDQNIVGAIKVFTEKYCTANHVDKLPGPRDWVQILQDQIKLARRRLKRGSEIADSDERLDGIALPPTGK

SEQ ID NO: 8912 - protein, 1797 aa, Homo sapiens
  Payload ID: 1810;
  Gene Symbol: BZRAP1;
  Gene Name: benzodiazepine receptor (peripheral) associated prt 1;
  Uniprot ID:  O95153;
  ENSP ID: ENSP00000268893
MEQLTTLPRPGDPGAMEPWALPTWHSWTPGRGGEPSSAAPSIADTPPAALQLQELRSEESSKPKGDGSSRPVGGTDPEGAEACLPSLGQQASSSGPACQRPEDEEVEAFLKAKLNMSFGDRPNLELLRALGELRQRCAILKEENQMLRKSSFPETEEKVRRLKRKNAELAVIAKRLEERARKLQETNLRVEGPQWLHVRDFDRLLRESQREVLRLQRQIALRNQRETLPLPPSWPPGPALQARAGAPAPGAPGEATPQEDADNLPVILGEPEKEQRVQQLESELSKKRKKCESLEQEARKKQRRCEELELQLRQAQNENARLVEENSRLSGRATEKEQVEWENAELRGQLLGVTQERDSALRKSQGLQSKLESLEQVLKHMREVAQRRQQLEVEHEQARLSLREKQEEVRRLQQAQAEAQREHEGAVQLLESTLDSMQARVRELEEQCRSQTEQFSLLAQELQAFRLHPGPLDLLTSALDCGSLGDCPPPPCCCSIPQPCRGSGPKDLDLPPGSPGRCTPKSSEPAPATLTGVPRRTAKKAESLSNSSHSESIHNSPKSCPTPEVDTASEVEELEADSVSLLPAAPEGSRGGARIQVFLARYSYNPFEGPNENPEAELPLTAGEYIYIYGNMDEDGFFEGELMDGRRGLVPSNFVERVSDDDLLTSLPPELADLSHSSGPELSFLSVGGGGSSSGGQSSVGRSQPRPEEEDAGDELSLSPSPEGLGEPPAVPYPRRLVVLKQLAHSVVLAWEPPPEQVELHGFHICVNGELRQALGPGAPPKAVLENLDLWAGPLHISVQALTSRGSSDPLRCCLAVGARAGVVPSQLRVHRLTATSAEITWVPGNSNLAHAIYLNGEECPPASPSTYWATFCHLRPGTPYQAQVEAQLPPQGPWEPGWERLEQRAATLQFTTLPAGPPDAPLDVQIEPGPSPGILIISWLPVTIDAAGTSNGVRVTGYAIYADGQKIMEVASPTAGSVLVELSQLQLLQVCREVVVRTMSPHGESADSIPAPITPALAPASLPARVSCPSPHPSPEARAPLASASPGPGDPSSPLQHPAPLGTQEPPGAPPASPSREMAKGSHEDPPAPCSQEEAGAAVLGTSEERTASTSTLGEKDPGPAAPSLAKQEAEWTAGEACPASSSTQGARAQQAPNTEMCQGGDPGSGLRPRAEKEDTAELGVHLVNSLVDHGRNSDLSDIQEEEEEEEEEEEEELGSRTCSFQKQVAGNSIRENGAKSQPDPFCETDSDEEILEQILELPLQQFCSKKLFSIPEEEEEEEEDEEEEKSGAGCSSRDPGPPEPALLGLGCDSGQPRRPGQCPLSPESSRAGDCLEDMPGLVGGSSRRRGGGSPEKPPSRRRPPDPREHCSRLLSNNGPQASGRLGPTRERGGLPVIEGPRTGLEASGRGRLGPSRRCSRGRALEPGLASCLSPKCLEISIEYDSEDEQEAGSGGISITSSCYPGDGEAWGTATVGRPRGPPKANSGPKPYPRLPAWEKGEPERRGRSATGRAKEPLSRATETGEARGQDGSGRRGPQKRGVRVLRPSTAELVPARSPSETLAYQHLPVRIFVALFDYDPVSMSPNPDAGEEELPFREGQILKVFGDKDADGFYQGEGGGRTGYIPCNMVAEVAVDSPAGRQQLLQRGYLSPDILLEGSGNGPFVYSTAHTTGPPPKPRRSKKAESEGPAQPCPGPPKLVPSADLKAPHSMVAAFDYNPQESSPNMDVEAELPFRAGDVITVFGGMDDDGFYYGELNGQRGLVPSNFLEGPGPEAGGLDREPRTPQAESQRTRRRRVQC

SEQ ID NO: 8913 - protein, 1857 aa, Homo sapiens
  Payload ID: 1810;
  Gene Symbol: BZRAP1;
  Gene Name: benzodiazepine receptor (peripheral) associated prt 1;
  Uniprot ID:  O95153;
  ENSP ID: ENSP00000345824
MEQLTTLPRPGDPGAMEPWALPTWHSWTPGRGGEPSSAAPSIADTPPAALQLQELRSEESSKPKGDGSSRPVGGTDPEGAEACLPSLGQQASSSGPACQRPEDEEVEAFLKAKLNMSFGDRPNLELLRALGELRQRCAILKEENQMLRKSSFPETEEKVRRLKRKNAELAVIAKRLEERARKLQETNLRVVSAPLPRPGTSLELCRKALARQRARDLSETASALLAKDKQIAALQRECRELQARLTLVGKEGPQWLHVRDFDRLLRESQREVLRLQRQIALRNQRETLPLPPSWPPGPALQARAGAPAPGAPGEATPQEDADNLPVILGEPEKEQRVQQLESELSKKRKKCESLEQEARKKQRRCEELELQLRQAQNENARLVEENSRLSGRATEKEQVEWENAELRGQLLGVTQERDSALRKSQGLQSKLESLEQVLKHMREVAQRRQQLEVEHEQARLSLREKQEEVRRLQQAQAEAQREHEGAVQLLESTLDSMQARVRELEEQCRSQTEQFSLLAQELQAFRLHPGPLDLLTSALDCGSLGDCPPPPCCCSIPQPCRGSGPKDLDLPPGSPGRCTPKSSEPAPATLTGVPRRTAKKAESLSNSSHSESIHNSPKSCPTPEVDTASEVEELEADSVSLLPAAPEGSRGGARIQVFLARYSYNPFEGPNENPEAELPLTAGEYIYIYGNMDEDGFFEGELMDGRRGLVPSNFVERVSDDDLLTSLPPELADLSHSSGPELSFLSVGGGGSSSGGQSSVGRSQPRPEEEDAGDELSLSPSPEGLGEPPAVPYPRRLVVLKQLAHSVVLAWEPPPEQVELHGFHICVNGELRQALGPGAPPKAVLENLDLWAGPLHISVQALTSRGSSDPLRCCLAVGARAGVVPSQLRVHRLTATSAEITWVPGNSNLAHAIYLNGEECPPASPSTYWATFCHLRPGTPYQAQVEAQLPPQGPWEPGWERLEQRAATLQFTTLPAGPPDAPLDVQIEPGPSPGILIISWLPVTIDAAGTSNGVRVTGYAIYADGQKIMEVASPTAGSVLVELSQLQLLQVCREVVVRTMSPHGESADSIPAPITPALAPASLPARVSCPSPHPSPEARAPLASASPGPGDPSSPLQHPAPLGTQEPPGAPPASPSREMAKGSHEDPPAPCSQEEAGAAVLGTSEERTASTSTLGEKDPGPAAPSLAKQEAEWTAGEACPASSSTQGARAQQAPNTEMCQGGDPGSGLRPRAEKEDTAELGVHLVNSLVDHGRNSDLSDIQEEEEEEEEEEEEELGSRTCSFQKQVAGNSIRENGAKSQPDPFCETDSDEEILEQILELPLQQFCSKKLFSIPEEEEEEEEDEEEEKSGAGCSSRDPGPPEPALLGLGCDSGQPRRPGQCPLSPESSRAGDCLEDMPGLVGGSSRRRGGGSPEKPPSRRRPPDPREHCSRLLSNNGPQASGRLGPTRERGGLPVIEGPRTGLEASGRGRLGPSRRCSRGRALEPGLASCLSPKCLEISIEYDSEDEQEAGSGGISITSSCYPGDGEAWGTATVGRPRGPPKANSGPKPYPRLPAWEKGEPERRGRSATGRAKEPLSRATETGEARGQDGSGRRGPQKRGVRVLRPSTAELVPARSPSETLAYQHLPVRIFVALFDYDPVSMSPNPDAGEEELPFREGQILKVFGDKDADGFYQGEGGGRTGYIPCNMVAEVAVDSPAGRQQLLQRGYLSPDILLEGSGNGPFVYSTAHTTGPPPKPRRSKKAESEGPAQPCPGPPKLVPSADLKAPHSMVAAFDYNPQESSPNMDVEAELPFRAGDVITVFGGMDDDGFYYGELNGQRGLVPSNFLEGPGPEAGGLDREPRTPQAESQRTRRRRVQC

SEQ ID NO: 8914 - protein, 171 aa, Homo sapiens
  Payload ID: 1810;
  Gene Symbol: BZRAP1;
  Gene Name: benzodiazepine receptor (peripheral) associated prt 1;
  ENSP ID: ENSP00000462518
RRSKKAESEGPAQPCPGPPKLVPSADLKAPHSMVAAFDYNPQESSPNMDVEAELPFRAGDVITVFGGMDDDGFYYGELNGQRGLVPSNFLEGPGPEAGGLDREPRTPQAESQDWGCTTQGSPGPPGGPCTPSSGSAPRIERGEPQGRSEKVWGFFSKGKQLLRRLGSGKKE

SEQ ID NO: 8915 - protein, 296 aa, Homo sapiens
  Payload ID: 1810;
  Gene Symbol: BZRAP1;
  Gene Name: benzodiazepine receptor (peripheral) associated prt 1;
  ENSP ID: ENSP00000462710
  MOD_RES (1)..(1): Any amino acid
XAAVLGTSEERTASTSTLGEKDPGPAAPSLAKQEAEWTAGEACPASSSTQGARAQQAPNTEMCQGGDPGSGLRPRAEKEDTAELGVHLVNSLVDHGRNSDLSDIQEEEEEEEEEEEEELGSRTCSFQKQVAGNSIRENGAKATETGEARGQDGSGRRGPQKRGVRVLRPSTAELVPARSPSETLAYQHLPVRIFVALFDYDPVSMSPNPDAGEEELPFREGQILKVFGDKDADGFYQGEGGGRTGYIPCNMVAEVAVDSPAGRQQLLQRGYLSPDILLEGSAHTTGPPPKPRRSKK

SEQ ID NO: 8916 - protein, 270 aa, Homo sapiens
  Payload ID: 1810;
  Gene Symbol: BZRAP1;
  Gene Name: benzodiazepine receptor (peripheral) associated prt 1;
  ENSP ID: ENSP00000462822
  MOD_RES (1)..(1): Any amino acid
XAKEPLSRATETGEARGQDGSGRRGPQKRGVRVLRPSTAELVPARSPSETLAYQHLPVRIFVALFDYDPVSMSPNPDAGEEELPFREGQILKVFGDKDADGFYQGEGGGRTGYIPCNMVAEVAVDSPAGRQQLLQRGYLSPDILLEGSAHTTGPPPKPRRSKKAESEGPAQPCPGPPKLVPSADLKAPHSMVAAFDYNPQESSPNMDVEAELPFRAGDVITVFGGMDDDGFYYGELNGQRGLVPSNFLEGPGPEAGGLDREPRTPQAESQ

SEQ ID NO: 8917 - protein, 287 aa, Homo sapiens
  Payload ID: 1811;
  Gene Symbol: BSCL2;
  Gene Name: Berardinelli-Seip congenital lipodystrophy 2 (seipin);
  Uniprot ID:  Q96G97;
  ENSP ID: ENSP00000278893
MVNDPPVPALLWAQEVGQVLAGRARRLLLQFGVLFCTILLLLWVSVFLYGSFYYSYMPTVSHLSPVHFYYRTDCDSSTTSLCSFPVANVSLTKGGRDRVLMYGQPYRVTLELELPESPVNQDLGMFLVTISCYTRGGRIISTSSRSVMLHYRSDLLQMLDTLVFSSLLLFGFAEQKQLLEVELYADYRENSYVPTTGAIIEIHSKRIQLYGAYLRIHAHFTGLRLTSEKETIPGRKSNEGSLLISQGLKARRSQLRNQMLQRMVRALKIPQGQRVSCPRRRNQISSP

SEQ ID NO: 8918 - protein, 277 aa, Homo sapiens
  Payload ID: 1811;
  Gene Symbol: BSCL2;
  Gene Name: Berardinelli-Seip congenital lipodystrophy 2 (seipin);
  ENSP ID: ENSP00000301781
MSTEKVDQKEEAGEKEVCGDQIKGPDKEEEPPAAASHGQGWRPGGRAARNARPEPGARHPALPAMVNDPPVPALLWAQEVGQVLAGRARRLLLQFGVLFCTILLLLWVSVFLYGSFYYSYMPTVSHLSPVHFYYRTDCDSSTTSLCSFPVANVSLTKGGRDRVLMYGQPYRVTLELELPESPVNQDLGMFLVTISCYTRGGRIISTSSRSVTSCYLALQSRSSCWRWNSTQTIERTRTCRPLERSLRSTASASSCMEPTSASTRTSLGSDTCYTTSR

SEQ ID NO: 8919 - protein, 462 aa, Homo sapiens
  Payload ID: 1811;
  Gene Symbol: BSCL2;
  Gene Name: Berardinelli-Seip congenital lipodystrophy 2 (seipin);
  Uniprot ID:  Q96G97;
  ENSP ID: ENSP00000354032
MSTEKVDQKEEAGEKEVCGDQIKGPDKEEEPPAAASHGQGWRPGGRAARNARPEPGARHPALPAMVNDPPVPALLWAQEVGQVLAGRARRLLLQFGVLFCTILLLLWVSVFLYGSFYYSYMPTVSHLSPVHFYYRTDCDSSTTSLCSFPVANVSLTKGGRDRVLMYGQPYRVTLELELPESPVNQDLGMFLVTISCYTRGGRIISTSSRSVMLHYRSDLLQMLDTLVFSSLLLFGFAEQKQLLEVELYADYRENSYVPTTGAIIEIHSKRIQLYGAYLRIHAHFTGLRYLLYNFPMTCAFIGVASNFTFLSVIVLFSYMQWVWGGIWPRHRFSLQVNIRKRDNSRKEVQRRISAHQPGPEGQEESTPQSDVTEDGESPEDPSGTEGQLSEEEKPDQQPLSGEEELEPEASDGSGSWEDAALLTEANLPAPAPASASAPVLETLGSSEPAGGALRQRPTCSSS

SEQ ID NO: 8920 - protein, 398 aa, Homo sapiens
  Payload ID: 1811;
  Gene Symbol: BSCL2;
  Gene Name: Berardinelli-Seip congenital lipodystrophy 2 (seipin);
  Uniprot ID:  Q96G97;
  ENSP ID: ENSP00000384080
MVNDPPVPALLWAQEVGQVLAGRARRLLLQFGVLFCTILLLLWVSVFLYGSFYYSYMPTVSHLSPVHFYYRTDCDSSTTSLCSFPVANVSLTKGGRDRVLMYGQPYRVTLELELPESPVNQDLGMFLVTISCYTRGGRIISTSSRSVMLHYRSDLLQMLDTLVFSSLLLFGFAEQKQLLEVELYADYRENSYVPTTGAIIEIHSKRIQLYGAYLRIHAHFTGLRYLLYNFPMTCAFIGVASNFTFLSVIVLFSYMQWVWGGIWPRHRFSLQVNIRKRDNSRKEVQRRISAHQPGPEGQEESTPQSDVTEDGESPEDPSGTEGQLSEEEKPDQQPLSGEEELEPEASDGSGSWEDAALLTEANLPAPAPASASAPVLETLGSSEPAGGALRQRPTCSSS

SEQ ID NO: 8921 - protein, 79 aa, Homo sapiens
  Payload ID: 1811;
  Gene Symbol: BSCL2;
  Gene Name: Berardinelli-Seip congenital lipodystrophy 2 (seipin);
  ENSP ID: ENSP00000384258
VFSSLLLFGFAEQKQLLEVELYADYRENSYVPTTGAIIEIHSKRIQLYGAYLRIHAHFTGLSSEPAGGALRQRPTCSSS

SEQ ID NO: 8922 - protein, 464 aa, Homo sapiens
  Payload ID: 1811;
  Gene Symbol: BSCL2;
  Gene Name: Berardinelli-Seip congenital lipodystrophy 2 (seipin);
  ENSP ID: ENSP00000385332
MSTEKVDQKEEAGEKEVCGDQIKGPDKEEEPPAAASHGQGWRPGGRAARNARPEPGARHPALPAMVNDPPVPALLWAQEVGQVLAGRARRLLLQFGVLFCTILLLLWVSVFLYGSFYYSYMPTVSHLSPVHFYYRTDCDSSTTSLCSFPVANVSLTKGGRDRVLMYGQPYRVTLELELPESPVNQDLGMFLVTISCYTRGGRIISTSSRSVMLHYRSDLLQMLDTLVFSSLLLFGFAEQKQLLEVELYADYRENSYVPTTGAIIEIHSKRIQLYGAYLRIHAHFTGLRYLLYNFPMTCAFIGVASNFTFLSVIVLFSYMQWVWGGIWPRHRFSLQVNIRKRDNSRKEVQRRISAHQPGAGPEGQEESTPQSDVTEDGESPEDPSGTEGQLSEEEKPDQQPLSGEEELEPEASDGSGSWEDAALLTEANLPAPAPASASAPVLETLGSSEPAGGALRQRPTCSSS

SEQ ID NO: 8923 - protein, 398 aa, Homo sapiens; identical to SEQ ID NO: 8920
  Payload ID: 1811;
  Gene Symbol: BSCL2;
  Gene Name: Berardinelli-Seip congenital lipodystrophy 2 (seipin);
  Uniprot ID:  Q96G97;
  ENSP ID: ENSP00000385561

SEQ ID NO: 8924 - protein, 39 aa, Homo sapiens
  Payload ID: 1811;
  Gene Symbol: BSCL2;
  Gene Name: Berardinelli-Seip congenital lipodystrophy 2 (seipin);
  ENSP ID: ENSP00000393728
MSTEKVDQKEEAGEKEVCGDQIKGPDKEEMPTGPRSCGR

SEQ ID NO: 8925 - protein, 150 aa, Homo sapiens
  Payload ID: 1811;
  Gene Symbol: BSCL2;
  Gene Name: Berardinelli-Seip congenital lipodystrophy 2 (seipin);
  ENSP ID: ENSP00000405265
FSYMQWVWGGIWPRHRFSLQVNIRKRDNSRKEVQRRISAHQPGPEGQEESTPQSDVTEDVSGSDPCIPLLAAEGQLSEEEKPDQQPLSGEEELEPEASDGSGSWEDAALLTEANLPAPAPASASAPVLETLGSSEPAGGALRQRPTCSSS

SEQ ID NO: 8926 - protein, 398 aa, Homo sapiens; identical to SEQ ID NO: 8920
  Payload ID: 1811;
  Gene Symbol: BSCL2;
  Gene Name: Berardinelli-Seip congenital lipodystrophy 2 (seipin);
  Uniprot ID:  Q96G97;
  ENSP ID: ENSP00000413209

SEQ ID NO: 8927 - protein, 223 aa, Homo sapiens
  Payload ID: 1811;
  Gene Symbol: BSCL2;
  Gene Name: Berardinelli-Seip congenital lipodystrophy 2 (seipin);
  ENSP ID: ENSP00000413340
MVNDPPVPALLWAQEVGQVLAGRARRLLLQFGVLFCTILLLLWVSVFLYGSFYYSYMPTVSHLSPVHFYYRTDCDSSTTSLCSFPVANVSLTKGGRDRVLMYGQPYRVTLELELPESPVNQDLGMFLVTISCYTRGGRIISTSSRSVMLHYRSDLLQMLDTLVFSSLLLFGFAEQKQLLEVELYADYRENSYVPTTGAIIEIHSKRIQLYGAYLRIHAHFTGL

SEQ ID NO: 8928 - protein, 93 aa, Homo sapiens
  Payload ID: 1811;
  Gene Symbol: BSCL2;
  Gene Name: Berardinelli-Seip congenital lipodystrophy 2 (seipin);
  ENSP ID: ENSP00000431782
MSTEKVDQKEEAGEKEVCGDQIKGPDKEEEPPAAASHGQGWRPGGRAARNARPEPGARHPALPAMVNDPPVPALLWAQEVGQVLAGRARRLLL

SEQ ID NO: 8929 - protein, 226 aa, Homo sapiens
  Payload ID: 1811;
  Gene Symbol: BSCL2;
  Gene Name: Berardinelli-Seip congenital lipodystrophy 2 (seipin);
  ENSP ID: ENSP00000433888
MSTEKVDQKEEAGEKEVCGDQIKGPDKEEEPPAAASHGQGWRPGGRAARNARPEPGARHPALPAMVNDPPVPALLWAQEVGQVLAGRARRLLLQFGVLFCTILLLLWVSVFLYGSFYYSYMPTVSHLSPVHFYYRTDCDSSTTSLCSFPVANVSLTKGGRDRVLMYGQPYRVTLELELPESPVNQDLGMFLVTISCYTRGGRIISTSSRSVMLHYRSDLLQMLDTL

SEQ ID NO: 8930 - protein, 99 aa, Homo sapiens
  Payload ID: 1811;
  Gene Symbol: BSCL2;
  Gene Name: Berardinelli-Seip congenital lipodystrophy 2 (seipin);
  ENSP ID: ENSP00000434149
MVNDPPVPALLWAQEVGQVLAGRARRLLLQFGVLFCTILLLLWVSVFLYGSFYYSYMPTVSHLSPVHFYYRTDCDSSTTSLCSFPVANVSLTKGGRDRV

SEQ ID NO: 8931 - protein, 28 aa, Homo sapiens
  Payload ID: 1811;
  Gene Symbol: BSCL2;
  Gene Name: Berardinelli-Seip congenital lipodystrophy 2 (seipin);
  ENSP ID: ENSP00000435500
MSTEKVDQKEEAGEKEVCGDQIKGPDKE

SEQ ID NO: 8932 - protein, 123 aa, Homo sapiens
  Payload ID: 1811;
  Gene Symbol: BSCL2;
  Gene Name: Berardinelli-Seip congenital lipodystrophy 2 (seipin);
  ENSP ID: ENSP00000435831
MSTEKVDQKEEAGEKEVCGDQIKGPDKEEEPPAAASHGQGWRPGGRAARNARPEPGARHPALPAMVNDPPVPALLWAQEVGQVLAGRARRLLLQFGVLFCTILLLLWVSVFLYGSFYYSYMPT

SEQ ID NO: 8933 - protein, 111 aa, Homo sapiens
  Payload ID: 1811;
  Gene Symbol: BSCL2;
  Gene Name: Berardinelli-Seip congenital lipodystrophy 2 (seipin);
  ENSP ID: ENSP00000436026
MSTEKVDQKEEAGEKEVCGDQIKGPDKEEVLMYGQPYRVTLELELPESPVNQDLGMFLVTISCYTRGGRIISTSSRSVMLHYRSDLLQMLDTLVFSSLLLFGFAEQKQLLE

SEQ ID NO: 8934 - protein, 23 aa, Homo sapiens
  Payload ID: 1811;
  Gene Symbol: BSCL2;
  Gene Name: Berardinelli-Seip congenital lipodystrophy 2 (seipin);
  ENSP ID: ENSP00000436991
MSTEKVDQKEEAGEKEVCGDQIK

SEQ ID NO: 8935 - protein, 52 aa, Homo sapiens
  Payload ID: 1811;
  Gene Symbol: BSCL2;
  Gene Name: Berardinelli-Seip congenital lipodystrophy 2 (seipin);
  ENSP ID: ENSP00000437044
  MOD_RES (1)..(1): Any amino acid
XAETRSKDRTKRRTDCDSSTTSLCSFPVANVSLTKGGRDRVLMYGQPYRVTL

SEQ ID NO: 8936 - protein, 585 aa, Homo sapiens
  Payload ID: 1812;
  Gene Symbol: BEST1;
  Gene Name: bestrophin 1;
  Uniprot ID:  O76090;
  ENSP ID: ENSP00000367282
MTITYTSQVANARLGSFSRLLLCWRGSIYKLLYGEFLIFLLCYYIIRFIYRLALTEEQQLMFEKLTLYCDSYIQLIPISFVLGFYVTLVVTRWWNQYENLPWPDRLMSLVSGFVEGKDEQGRLLRRTLIRYANLGNVLILRSVSTAVYKRFPSAQHLVQAGFMTPAEHKQLEKLSLPHNMFWVPWVWFANLSMKAWLGGRIRDPILLQSLLNEMNTLRTQCGHLYAYDWISIPLVYTQVVTVAVYSFFLTCLVGRQFLNPAKAYPGHELDLVVPVFTFLQFFFYVGWLKVAEQLINPFGEDDDDFETNWIVDRNLQVSLLAVDEMHQDLPRMEPDMYWNKPEPQPPYTAASAQFRRASFMGSTFNISLNKEEMEFQPNQEDEEDAHAGIIGRFLGLQSHDHHPPRANSRTKLLWPKRESLLHEGLPKNHKAAKQNVRGQEDNKAWKLKAVDAFKSAPLYQRPGYYSAPQTPLSPTPMFFPLEPSAPSKLHSVTGIDTKDKSLKTVSSGAKKSFELLSESDGALMEHPEVSQVRRKTVEFNLTDMPEIPENHLKEPLEQSPTNIHTTLKDHMDPYWALENRDEAHS

SEQ ID NO: 8937 - protein, 604 aa, Homo sapiens
  Payload ID: 1812;
  Gene Symbol: BEST1;
  Gene Name: bestrophin 1;
  Uniprot ID:  O76090;
  ENSP ID: ENSP00000399709
MFEKLTLYCDSYIQLIPISFVLGFYVTLVVTRWWNQYENLPWPDRLMSLVSGFVEGKDEQGRLLRRTLIRYANLGNVLILRSVSTAVYKRFPSAQHLVQAGFMTPAEHKQLEKLSLPHNMFWVPWVWFANLSMKAWLGGRIRDPILLQSLLNEMNTLRTQCGHLYAYDWISIPLVYTQVVTVAVYSFFLTCLVGRQFLNPAKAYPGHELDLVVPVFTFLQFFFYVGWLKVAEQLINPFGEDDDDFETNWIVDRNLQVSLLAVDEMHQDLPRMEPDMYWNKPEPQPPYTAASAQFRRASFMGSTFNISLNKEEMEFQPNQEDEEDAHAGIIGRFLGLQSHDHHPPRANSRTKLLWPKRESLLHEGLPKNHKAAKQNVRGQEDNKAWKLKAVDAFKSAPLYQRPGYYSAPQTPLSPTPMFFPLEPSAPSKLHSVTGIDTKDKSLKTVSSGAKKSFELLSESDGALMEHPEVSQVRRKTVEFNLTDMPEIPENHLKEPLEQSPTNIHTTLKDHMDPYWALENRSVLHLNQGHCIALCPTPASLALSLPFLHNFLGFHHCQSTLDLRPALAWGIYLATFTGILGKCSGPFLTSPWYHPEDFLGPGEGR

SEQ ID NO: 8938 - protein, 55 aa, Homo sapiens
  Payload ID: 1812;
  Gene Symbol: BEST1;
  Gene Name: bestrophin 1;
  ENSP ID: ENSP00000431189
MSLVSGFVEGKDEQGRLLRRTLIRYANLGNVLILRSVSTAVYKRFPSAQHLVQAA

SEQ ID NO: 8939 - protein, 435 aa, Homo sapiens
  Payload ID: 1812;
  Gene Symbol: BEST1;
  Gene Name: bestrophin 1;
  ENSP ID: ENSP00000432681
MTITYTSQVANARLGSFSRLLLCWRGSIYKLLYGEFLIFLLCYYIIRFIYRLALTEEQQLMFEKLTLYCDSYIQLIPISFVLGFYVTLVVTRWWNQYENLPWPDRLMSLVSGFVEGKDEQGRLLRRTLIRYANLGNVLILRSVSTAVYKRFPSAQHLVQAGFMTPAEHKQLEKLSLPHNMFWVPWVWFANLSMKAWLGGRIRDPILLQSLLNEMNTLRTQCGHLYAYDWISIPLVYTQVVTVAVYSFFLTCLVGRQFLNPAKAYPGHELDLVVPVFTFLQFFFYVGWLKVGLSRALLGWRHGQRGHGQQLPETRMQCQERKVSRVESSQAWWRTPVIPATREAEAGESLEPGRRRLWWQSSSSTPLERMMMILRPTGLSTGICRCPCWLWMRCTRTCLGWSRTCTGISPSHSPPTQLLPPSSVEPPLWAPPSTSA

SEQ ID NO: 8940 - protein, 329 aa, Homo sapiens
  Payload ID: 1812;
  Gene Symbol: BEST1;
  Gene Name: bestrophin 1;
  ENSP ID: ENSP00000433195
MSLVSGFVEGKDEQGRLLRRTLIRYANLGNVLILRSVSTAVYKRFPSAQHLVQAGFMTPAEHKQLEKLSLPHNMFWVPWVWFANLSMKAWLGGRIRDPILLQSLLNEMNTLRTQCGHLYAYDWISIPLVYTQVVTVAVYSFFLTCLVGRQFLNPAKAYPGHELDLVVPVFTFLQFFFYVGWLKVGLSRALLGWRHGQRGHGQQLPETRMQCQERKVSRVESSQAWWRTPVIPATREAEAGESLEPGRRRLWWQSSSSTPLERMMMILRPTGLSTGICRCPCWLWMRCTRTCLGWSRTCTGISPSHSPPTQLLPPSSVEPPLWAPPSTSA

SEQ ID NO: 8941 - protein, 509 aa, Homo sapiens
  Payload ID: 1813;
  Gene Symbol: BEST2;
  Gene Name: bestrophin 2;
  Uniprot ID:  Q8NFU1;
  ENSP ID: ENSP00000042931
MTVTYTARVANARFGGFSQLLLLWRGSIYKLLWRELLCFLGFYMALSAAYRFVLTEGQKRYFEKLVIYCDQYASLIPVSFVLGFYVTLVVNRWWSQYLCMPLPDALMCVVAGTVHGRDDRGRLYRRTLMRYAGLSAVLILRSVSTAVFKRFPTIDHVVEAGFMTREERKKFENLNSSYNKYWVPCVWFSNLAAQARREGRIRDNSALKLLLEELNVFRGKCGMLFHYDWISVPLVYTQVVTIALYSYFLACLIGRQFLDPAQGYKDHDLDLCVPIFTLLQFFFYAGWLKVAEQLINPFGEDDDDFETNFLIDRNFQVSMLAVDEMYDDLAVLEKDLYWDAAEARAPYTAATVFQLRQPSFQGSTFDITLAKEDMQFQRLDGLDGPMGEAPGDFLQRLLPAGAGMVAGGPLGRRLSFLLRKNSCVSEASTGASCSCAVVPEGAAPECSCGDPLLDPGLPEPEAPPPAGPEPLTLIPGPVEPFSIVTMPGPRGPAPPWLPSPIGEEEENLA

SEQ ID NO: 8942 - protein, 509 aa, Homo sapiens; identical to SEQ ID NO: 8941
  Payload ID: 1813;
  Gene Symbol: BEST2;
  Gene Name: bestrophin 2;
  Uniprot ID:  Q8NFU1;
  ENSP ID: ENSP00000447203

SEQ ID NO: 8943 - protein, 509 aa, Homo sapiens; identical to SEQ ID NO: 8941
  Payload ID: 1813;
  Gene Symbol: BEST2;
  Gene Name: bestrophin 2;
  Uniprot ID:  Q8NFU1;
  ENSP ID: ENSP00000448310

SEQ ID NO: 8944 - protein, 78 aa, Homo sapiens
  Payload ID: 1813;
  Gene Symbol: BEST2;
  Gene Name: bestrophin 2;
  ENSP ID: ENSP00000449403
  MOD_RES (1)..(1): Any amino acid
XEQLINPFGEDDDDFETNFLIDRNFQVSMLAVDEMYDDLAVLEKDLYWDAAEARAPYTAATVFQLRQPSFQGSTFDIT

SEQ ID NO: 8945 - protein, 72 aa, Homo sapiens
  Payload ID: 1814;
  Gene Symbol: BEST3;
  Gene Name: bestrophin 3;
  Uniprot ID:  Q8N1M1;
  ENSP ID: ENSP00000266661
MFLISSSVHGSDEHGRLLRRTLMRYVNLTSLLIFRSVSTAVYKRFPTMDHVVEAERTGMKPILPSSFEMQSF

SEQ ID NO: 8946 - protein, 398 aa, Homo sapiens
  Payload ID: 1814;
  Gene Symbol: BEST3;
  Gene Name: bestrophin 3;
  Uniprot ID:  Q8N1M1;
  ENSP ID: ENSP00000329064
MTVTYSSKVANATFFGFHRLLLKWRGSIYKLLYREFIVFAVLYTAISLVYRLLLTGVQKRYFEKLSIYCDRYAEQIPVTFVLGFYVTLVVNRWWNQFVNLPWPDRLMFLISSSVHGSDEHGRLLRRTLMRYVNLTSLLIFRSVSTAVYKRFPTMDHVVEAGFMTTDERKLFNHLKSPHLKYWVPFIWFGNLATKARNEGRIRDSVDLQSLMTEMNRYRSWCSLLFGYDWVGIPLVYTQVVTLAVYTFFFACLIGRQFLDPTKGYAGHDLDLYIPIFTLLQFFFYAGWLKVAEQLINPFGEDDDDFETNWCIDRNLQVSLLAVDEMHMSLPKMKKDIYWDDSAARPPYTLAAADYCIPSFLGSTVQMGKQMPKNEWKMEDIKIPLPQPQFQCAKSDPGG

SEQ ID NO: 8947 - protein, 668 aa, Homo sapiens
  Payload ID: 1814;
  Gene Symbol: BEST3;
  Gene Name: bestrophin 3;
  Uniprot ID:  Q8N1M1;
  ENSP ID: ENSP00000332413
MTVTYSSKVANATFFGFHRLLLKWRGSIYKLLYREFIVFAVLYTAISLVYRLLLTGVQKRYFEKLSIYCDRYAEQIPVTFVLGFYVTLVVNRWWNQFVNLPWPDRLMFLISSSVHGSDEHGRLLRRTLMRYVNLTSLLIFRSVSTAVYKRFPTMDHVVEAGFMTTDERKLFNHLKSPHLKYWVPFIWFGNLATKARNEGRIRDSVDLQSLMTEMNRYRSWCSLLFGYDWVGIPLVYTQVVTLAVYTFFFACLIGRQFLDPTKGYAGHDLDLYIPIFTLLQFFFYAGWLKVAEQLINPFGEDDDDFETNWCIDRNLQVSLLAVDEMHMSLPKMKKDIYWDDSAARPPYTLAAADYCIPSFLGSTVQMGLSGSDFPDEEWLWDYEKHGHRHSMIRRVKRFLSAHEHPSSPRRRSYRRQTSDSSMFLPRDDLSPARDLLDVPSRNPPRASPTWKKSCFPEGSPTLHFSMGELSTIRETSQTSTLQSLTPQSSVRTSPIKMPLVPEVLITAAEAPVPTSGGYHHDSATSILSSEFTGVQPSKTEQQQGPMGSILSPSEKETPPGGPSPQTVSASAEENIFNCEEDPGDTFLKRWSLPGFLGSSHTSLGNLSPDPMSSQPALLIDTETSSEISGINIVAGSRVSSDMLYLMENLDTKETDIIELNKETEESPK

SEQ ID NO: 8948 - protein, 455 aa, Homo sapiens
  Payload ID: 1814;
  Gene Symbol: BEST3;
  Gene Name: bestrophin 3;
  Uniprot ID:  Q8N1M1;
  ENSP ID: ENSP00000433213
MTTDERKLFNHLKSPHLKYWVPFIWFGNLATKARNEGRIRDSVDLQSLMTEMNRYRSWCSLLFGYDWVGIPLVYTQVAEQLINPFGEDDDDFETNWCIDRNLQVSLLAVDEMHMSLPKMKKDIYWDDSAARPPYTLAAADYCIPSFLGSTVQMGLSGSDFPDEEWLWDYEKHGHRHSMIRRVKRFLSAHEHPSSPRRRSYRRQTSDSSMFLPRDDLSPARDLLDVPSRNPPRASPTWKKSCFPEGSPTLHFSMGELSTIRETSQTSTLQSLTPQSSVRTSPIKMPLVPEVLITAAEAPVPTSGGYHHDSATSILSSEFTGVQPSKTEQQQGPMGSILSPSEKETPPGGPSPQTVSASAEENIFNCEEDPGDTFLKRWSLPGFLGSSHTSLGNLSPDPMSSQPALLIDTETSSEISGINIVAGSRVSSDMLYLMENLDTKETDIIELNKETEESPK

SEQ ID NO: 8949 - protein, 197 aa, Homo sapiens
  Payload ID: 1814;
  Gene Symbol: BEST3;
  Gene Name: bestrophin 3;
  ENSP ID: ENSP00000434713
MTTDERKLFNHLKSPHLKYWVPFIWFGNLATKARNEGRIRDSVDLQSLMTEMNRYRSWCSLLFGYDWVGIPLVYTQVAEQLINPFGEDDDDFETNWCIDRNLQVSLLAVDEMHMSLPKMKKDIYWDDSAARPPYTLAAADYCIPSFLGSTVQMGRSRFNPVPFAECLLIPISDGLWHFSSKGASEAENLSRPKEKED

SEQ ID NO: 8950 - protein, 142 aa, Homo sapiens
  Payload ID: 1814;
  Gene Symbol: BEST3;
  Gene Name: bestrophin 3;
  ENSP ID: ENSP00000446575
MTVTYSSKVANATFFGFHRLLLKWRGSIYKLLYREFIVFAVLYTAISLVYRLLLTGVQKRYFEKLSIYCDRYAEQIPVTFVLGFMTTDERKLFNHLKSPHLKYWVPFIWFGNLATKARNEGRIRDSVDLQSLMTEMNRYRSW

SEQ ID NO: 8951 - protein, 161 aa, Homo sapiens
  Payload ID: 1814;
  Gene Symbol: BEST3;
  Gene Name: bestrophin 3;
  ENSP ID: ENSP00000447689
MFLISSSVHGSDEHGRLLRRTLMRYVNLTSLLIFRSVSTAVYKRFPTMDHVVEAGFMTTDERKLFNHLKSPHLKYWVPFIWFGNLATKARNEGRIRDSVDLQSLMTEMNRYRSWCSLLFGYDWVGIPLVYTQVAEQLINPFGEDDDDFETNWCIDRNLQVS

SEQ ID NO: 8952 - protein, 72 aa, Homo sapiens; identical to SEQ ID NO: 8945
  Payload ID: 1814;
  Gene Symbol: BEST3;
  Gene Name: bestrophin 3;
  Uniprot ID:  Q8N1M1;
  ENSP ID: ENSP00000449377

SEQ ID NO: 8953 - protein, 562 aa, Homo sapiens
  Payload ID: 1814;
  Gene Symbol: BEST3;
  Gene Name: bestrophin 3;
  Uniprot ID:  Q8N1M1;
  ENSP ID: ENSP00000449548
MFLISSSVHGSDEHGRLLRRTLMRYVNLTSLLIFRSVSTAVYKRFPTMDHVVEAGFMTTDERKLFNHLKSPHLKYWVPFIWFGNLATKARNEGRIRDSVDLQSLMTEMNRYRSWCSLLFGYDWVGIPLVYTQVVTLAVYTFFFACLIGRQFLDPTKGYAGHDLDLYIPIFTLLQFFFYAGWLKVAEQLINPFGEDDDDFETNWCIDRNLQVSLLAVDEMHMSLPKMKKDIYWDDSAARPPYTLAAADYCIPSFLGSTVQMGLSGSDFPDEEWLWDYEKHGHRHSMIRRVKRFLSAHEHPSSPRRRSYRRQTSDSSMFLPRDDLSPARDLLDVPSRNPPRASPTWKKSCFPEGSPTLHFSMGELSTIRETSQTSTLQSLTPQSSVRTSPIKMPLVPEVLITAAEAPVPTSGGYHHDSATSILSSEFTGVQPSKTEQQQGPMGSILSPSEKETPPGGPSPQTVSASAEENIFNCEEDPGDTFLKRWSLPGFLGSSHTSLGNLSPDPMSSQPALLIDTETSSEISGINIVAGSRVSSDMLYLMENLDTKETDIIELNKETEESPK

SEQ ID NO: 8954 - protein, 143 aa, Homo sapiens
  Payload ID: 1814;
  Gene Symbol: BEST3;
  Gene Name: bestrophin 3;
  ENSP ID: ENSP00000449868
MRYVNLTSLLIFRSVSTAVYKRFPTMDHVVEAGFMTTDERKLFNHLKSPHLKYWVPFIWFGNLATKARNEGRIRDSVDLQSLMTEMNRYRSWCSLLFGYDWVGIPLVYTQVAEQLINPFGEDDDDFETNWCIDRNLQLWTKCT

SEQ ID NO: 8955 - protein, 473 aa, Homo sapiens
  Payload ID: 1815;
  Gene Symbol: BEST4;
  Gene Name: bestrophin 4;
  Uniprot ID:  Q8NFU0;
  ENSP ID: ENSP00000361281
MTVSYTLKVAEARFGGFSGLLLRWRGSIYKLLYKEFLLFGALYAVLSITYRLLLTQEQRYVYAQVARYCNRSADLIPLSFVLGFYVTLVVNRWWSQYTSIPLPDQLMCVISASVHGVDQRGRLLRRTLIRYANLASVLVLRSVSTRVLKRFPTMEHVVDAGFMSQEERKKFESLKSDFNKYWVPCVWFTNLAAQARRDGRIRDDIALCLLLEELNKYRAKCSMLFHYDWISIPLVYTQVVTIAVYSFFALSLVGRQFVEPEAGAAKPQKLLKPGQEPAPALGDPDMYVPLTTLLQFFFYAGWLKVAEQIINPFGEDDDDFETNQLIDRNLQVSLLSVDEMYQNLPPAEKDQYWDEDQPQPPYTVATAAESLRPSFLGSTFNLRMSDDPEQSLQVEASPGSGRPAPAAQTPLLGRFLGVGAPSPAISLRNFGRVRGTPRPPHLLRFRAEEGGDPEAAARIEEESAESGDEALEP

SEQ ID NO: 8956 - protein, 118 aa, Homo sapiens
  Payload ID: 1816;
  Gene Symbol: BET1;
  Gene Name: Bet1 golgi vesicular membrane trafficking prt;
  Uniprot ID:  O15155;
  ENSP ID: ENSP00000222547
MRRAGLGEGVPPGNYGNYGYANSGYSACEEENERLTESLRSKVTAIKSLSIEIGHEVKTQNKLLAEMDSQFDSTTGFLGKTMGKLKILSRGSQTKLLCYMMLFSLFVFFIIYWIIKLR

SEQ ID NO: 8957 - protein, 127 aa, Homo sapiens
  Payload ID: 1816;
  Gene Symbol: BET1;
  Gene Name: Bet1 golgi vesicular membrane trafficking prt;
  ENSP ID: ENSP00000350125
MRRAGLGEGVPPGNYGNYGYANSGYSACEEENERLTESLRSKVTAIKSLSIEIGHEVKTQNKLLAEMDSQFDSTTGFLVDPSGSRDFTSSSESLLLLILTVPQHLSRSLKRRRLTFSAIYHSCRIIS

SEQ ID NO: 8958 - protein, 83 aa, Homo sapiens
  Payload ID: 1816;
  Gene Symbol: BET1;
  Gene Name: Bet1 golgi vesicular membrane trafficking prt;
  Uniprot ID:  O15155;
  ENSP ID: ENSP00000391228
MRRAGLGEGVPPGNYGNYGYANSGYSACEEENERLTESLRSKVTAIKSLSIEIGHEVKTQNKLLAEMDSQFDSTTGFLGLCPM

SEQ ID NO: 8959 - protein, 133 aa, Homo sapiens
  Payload ID: 1816;
  Gene Symbol: BET1;
  Gene Name: Bet1 golgi vesicular membrane trafficking prt;
  ENSP ID: ENSP00000401260
  MOD_RES (1)..(1): Any amino acid
XLPSFCINHFSLPLHSHAFSMGEGVPPGNYGNYGYANSGYSACEEENERLTESLRSKVTAIKSLSIEIGHEVKTQNKLLAEMDSQFDSTTGFLGKTMGKLKILSRGSQTKLLCYMMLFSLFVFFIIYWIIKLR

SEQ ID NO: 8960 - protein, 98 aa, Homo sapiens
  Payload ID: 1816;
  Gene Symbol: BET1;
  Gene Name: Bet1 golgi vesicular membrane trafficking prt;
  ENSP ID: ENSP00000413063
MRRAGLGEGVPPGNYGNYGYANSGYSACEEENERLTESLRSKVTAIKSLSIEIGHEVKTQNKLLAEMVSGYDFNFKKFDLIFANNRISTFIHFEIQRS

SEQ ID NO: 8961 - protein, 58 aa, Homo sapiens
  Payload ID: 1817;
  Gene Symbol: BET1L;
  Gene Name: Bet1 golgi vesicular membrane trafficking prt-like;
  ENSP ID: ENSP00000333470
MADWARAQSPGAVEEILDRENKRMADSLASKVTRLKSLALDIDRDAEDQNRYLDGMGA

SEQ ID NO: 8962 - protein, 102 aa, Homo sapiens
  Payload ID: 1817;
  Gene Symbol: BET1L;
  Gene Name: Bet1 golgi vesicular membrane trafficking prt-like;
  ENSP ID: ENSP00000339093
MADWARAQSPGAVEEILDRENKRMADSLASKVTRLKSLALDIDRDAEDQNRYLDGMVRAHGVRVSVPCPSTTCCRACSVSFSTGAGGWSNHHFCVILLGFLP

SEQ ID NO: 8963 - protein, 111 aa, Homo sapiens
  Payload ID: 1817;
  Gene Symbol: BET1L;
  Gene Name: Bet1 golgi vesicular membrane trafficking prt-like;
  Uniprot ID:  Q9NYM9;
  ENSP ID: ENSP00000372210
MADWARAQSPGAVEEILDRENKRMADSLASKVTRLKSLALDIDRDAEDQNRYLDGMDSDFTSMTSLLTGSVKRFSTMARSGQDNRKLLCGMAVGLIVAFFILSYFLSRART

SEQ ID NO: 8964 - protein, 152 aa, Homo sapiens
  Payload ID: 1817;
  Gene Symbol: BET1L;
  Gene Name: Bet1 golgi vesicular membrane trafficking prt-like;
  ENSP ID: ENSP00000386558
MADWARAQSPGAVEEILDRENKRMADSLASKVTRLKSLALDIDRDAEDQNRYLDGMVFQDSQEGAHIRRETVSKSVCAEPWRHQRARDPAPTNFPLKCQKQRGASTSSGQHGGRVNLVFFIDDDYSPPSKRQRPTSHHSHQSQNPPMLGNGK

SEQ ID NO: 8965 - protein, 88 aa, Homo sapiens
  Payload ID: 1817;
  Gene Symbol: BET1L;
  Gene Name: Bet1 golgi vesicular membrane trafficking prt-like;
  ENSP ID: ENSP00000436205
MADSLASKVTRLKSLALDIDRDAEDQNRYLDGMDSDFTSMTSLLTGSVKRFSTMARSGQDNRKLLCGMAVGLIVAFFILSYFLSRART

SEQ ID NO: 8966 - protein, 92 aa, Homo sapiens
  Payload ID: 1817;
  Gene Symbol: BET1L;
  Gene Name: Bet1 golgi vesicular membrane trafficking prt-like;
  ENSP ID: ENSP00000436643
MADWARAQSPGAVEEILDRENKRMADSLASKVTRLKSDSDFTSMTSLLTGSVKRFSTMARSGQDNRKLLCGMAVGLIVAFFILSYFLSRART

SEQ ID NO: 8967 - protein, 498 aa, Homo sapiens
  Payload ID: 1818;
  Gene Symbol: B3GLCT;
  Gene Name: beta 3-glucosyltransferase;
  Uniprot ID:  Q6Y288;
  ENSP ID: ENSP00000343002
MRPPACWWLLAPPALLALLTCSLAFGLASEDTKKEVKQSQDLEKSGISRKNDIDLKGIVFVIQSQSNSFHAKRAEQLKKSILKQAADLTQELPSVLLLHQLAKQEGAWTILPLLPHFSVTYSRNSSWIFFCEEETRIQIPKLLETLRRYDPSKEWFLGKALHDEEATIIHHYAFSENPTVFKYPDFAAGWALSIPLVNKLTKRLKSESLKSDFTIDLKHEIALYIWDKGGGPPLTPVPEFCTNDVDFYCATTFHSFLPLCRKPVKKKDIFVAVKTCKKFHGDRIPIVKQTWESQASLIEYYSDYTENSIPTVDLGIPNTDRGHCGKTFAILERFLNRSQDKTAWLVIVDDDTLISISRLQHLLSCYDSGEPVFLGERYGYGLGTGGYSYITGGGGMVFSREAVRRLLASKCRCYSNDAPDDMVLGMCFSGLGIPVTHSPLFHQARPVDYPKDYLSHQVPISFHKHWNIDPVKVYFTWLAPSDEDKARQETQKGFREEL

SEQ ID NO: 8968 - protein, 334 aa, Homo sapiens
  Payload ID: 1819;
  Gene Symbol: B3GAT1;
  Gene Name: beta-1,3-glucuronyltransferase 1;
  Uniprot ID:  Q9P2W7;
  ENSP ID: ENSP00000307875
MPKRRDILAIVLIVLPWTLLITVWHQSTLAPLLAVHKDEGSDPRRETPPGADPREYCTSDRDIVEVVRTEYVYTRPPPWSDTLPTIHVVTPTYSRPVQKAELTRMANTLLHVPNLHWLVVEDAPRRTPLTARLLRDTGLNYTHLHVETPRNYKLRGDARDPRIPRGTMQRNLALRWLRETFPRNSSQPGVVYFADDDNTYSLELFEEMRSTRRVSVWPVAFVGGLRYEAPRVNGAGKVVGWKTVFDPHRPFAIDMAGFAVNLRLILQRSQAYFKLRGVKGGYQESSLLRELVTLNDLEPKAANCTKILVWHTRTEKPVLVNEGKKGFTDPSVEI

SEQ ID NO: 8969 - protein, 334 aa, Homo sapiens; identical to SEQ ID NO: 8968
  Payload ID: 1819;
  Gene Symbol: B3GAT1;
  Gene Name: beta-1,3-glucuronyltransferase 1;
  Uniprot ID:  Q9P2W7;
  ENSP ID: ENSP00000376359

SEQ ID NO: 8970 - protein, 334 aa, Homo sapiens; identical to SEQ ID NO: 8968
  Payload ID: 1819;
  Gene Symbol: B3GAT1;
  Gene Name: beta-1,3-glucuronyltransferase 1;
  Uniprot ID:  Q9P2W7;
  ENSP ID: ENSP00000433847

SEQ ID NO: 8971 - protein, 323 aa, Homo sapiens
  Payload ID: 1820;
  Gene Symbol: B3GAT2;
  Gene Name: beta-1,3-glucuronyltransferase 2;
  Uniprot ID:  Q9NPZ5;
  ENSP ID: ENSP00000230053
MKSALFTRFFILLPWILIVIIMLDVDTRRPVPPLTPRPYFSPYAVGRGGARLPLRRGGPAHGTQKRNQSRPQPQPEPQLPTIYAITPTYSRPVQKAELTRLANTFRQVAQLHWILVEDAAARSELVSRFLARAGLPSTHLHVPTPRRYKRPGLPRATEQRNAGLAWLRQRHQHQRAQPGVLFFADDDNTYSLELFQEMRTTRKVSVWPVGLVGGRRYERPLVENGKVVGWYTGWRADRPFAIDMAGFAVSLQVILSNPKAVFKRRGSQPGMQESDFLKQITTVEELEPKANNCTKVLVWHTRTEKVNLANEPKYHLDTVKIEV

SEQ ID NO: 8972 - protein, 251 aa, Homo sapiens
  Payload ID: 1820;
  Gene Symbol: B3GAT2;
  Gene Name: beta-1,3-glucuronyltransferase 2;
  ENSP ID: ENSP00000481320
MKSALFTRFFILLPWILIVIIMLDVDTRRPVPPLTPRPYFSPYAVGRGGARLPLRRGGPAHGTQKRNQSRPQPQPEPQLPTIYAITPTYSRPVQKAELTRLANTFRQVAQLHWILVEDAAARSELMRTTRKVSVWPVGLVGGRRYERPLVENGKVVGWYTGWRADRPFAIDMAGFAVSLQVILSNPKAVFKRRGSQPGMQESDFLKQITTVEELEPKANNCTKVLVWHTRTEKVNLANEPKYHLDTVKIEV

SEQ ID NO: 8973 - protein, 335 aa, Homo sapiens
  Payload ID: 1821;
  Gene Symbol: B3GAT3;
  Gene Name: beta-1,3-glucuronyltransferase 3;
  Uniprot ID:  O94766;
  ENSP ID: ENSP00000265471
MKLKLKNVFLAYFLVSIAGLLYALVQLGQPCDCLPPLRAAAEQLRQKDLRISQLQAELRRPPPAPAQPPEPEALPTIYVVTPTYARLVQKAELVRLSQTLSLVPRLHWLLVEDAEGPTPLVSGLLAASGLLFTHLVVLTPKAQRLREGEPGWVHPRGVEQRNKALDWLRGRGGAVGGEKDPPPPGTQGVVYFADDDNTYSRELFEEMRWTRGVSVWPVGLVGGLRFEGPQVQDGRVVGFHTAWEPSRPFPVDMAGFAVALPLLLDKPNAQFDSTAPRGHLESSLLSHLVDPKDLEPRAANCTRVLVWHTRTEKPKMKQEEQLQRQGRGSDPAIEV

SEQ ID NO: 8974 - protein, 319 aa, Homo sapiens
  Payload ID: 1821;
  Gene Symbol: B3GAT3;
  Gene Name: beta-1,3-glucuronyltransferase 3;
  ENSP ID: ENSP00000431359
MKLKLKNVFLAYFLVSIAGLLYALVQLGQPCDCLPPLRAAAEQLRQKDLRISQLQAELRRPPPAPAQPPEPEALPTIYVVTPTYARLVQKAELVRLSQTLSLVPRLHWLLVEDAEGPTPLVSGLLAASGLLFTHLVVLTPKAQRLREGEPGWVHPRGVEQRNKALDWLRGRGGAVGGEKDPPPPGTQGVVYFADDDNTYSRELFEEMRWTRGVSVWPVGLVGGLRFEGPQVQDGRVVGFHTAWEPSRPFPVDMAGFAVALPLLLDKPNAQFDSTAPRGHLESSLLSHLVDPKDLEPRAANCTRSLAVSPRLECSSAILA

SEQ ID NO: 8975 - protein, 315 aa, Homo sapiens
  Payload ID: 1821;
  Gene Symbol: B3GAT3;
  Gene Name: beta-1,3-glucuronyltransferase 3;
  Uniprot ID:  O94766;
  ENSP ID: ENSP00000432474
MKLKLKNVFLAYFLVSIAGLLYALVQLGQPCDCLPPLRAAAEQLRQKDLRISQLQAELRRPPPAPAQPPEPEALPTIYVVTPTYARLVQKAELVRLSQTLSLVPRLHWLLVEDAEGPTPLVSGLLAASGLLFTHLVVLTPKAQRLREGEPGWVHPRGVEQRNKALDWLRGRGGAVGGEKDPPPPGTQGVVYFADDDNTYSRELFEEMRWTRGVSVWPVGLVGGLRFEGPQVQDGRVVGFHTAWEPSRPFPVDMAGFAVALPLLLDKPNAQFDSTAPRGHLESSLLSHLVDPKDLEPRAANCTRTESRCVTQAGVQ

SEQ ID NO: 8976 - protein, 38 aa, Homo sapiens
  Payload ID: 1821;
  Gene Symbol: B3GAT3;
  Gene Name: beta-1,3-glucuronyltransferase 3;
  ENSP ID: ENSP00000432604
MKLKLKNVFLAYFLVSIAGLLYALVQLVSASSTKQKAR

SEQ ID NO: 8977 - protein, 223 aa, Homo sapiens
  Payload ID: 1821;
  Gene Symbol: B3GAT3;
  Gene Name: beta-1,3-glucuronyltransferase 3;
  ENSP ID: ENSP00000432854
MKLKLKNVFLAYFLVSIAGLLYALVQLAKGMDRTLPLMQRFRDSATALSSGQPCDCLPPLRAAAEQLRQKDLRISQLQAELRRPPPAPAQPPEPEALPTIYVVTPTYARLVQKAELVRLSQTLSLVPRLHWLLVEDAEGPTPLVSGLLAASGLLFTHLVVLTPKAQRLREGEPGWVHPRGVEQRNKALDWLRGRGGAVGGEKDPPPPGTQGVVYFADDDNTYS

SEQ ID NO: 8978 - protein, 331 aa, Homo sapiens
  Payload ID: 1822;
  Gene Symbol: B3GALNT1;
  Gene Name: beta-1,3-N-acetylgalactosaminyltransferase 1 (globoside blood group);
  Uniprot ID:  O75752;
  ENSP ID: ENSP00000323479
MASALWTVLPSRMSLRSLKWSLLLLSLLSFFVMWYLSLPHYNVIERVNWMYFYEYEPIYRQDFHFTLREHSNCSHQNPFLVILVTSHPSDVKARQAIRVTWGEKKSWWGYEVLTFFLLGQEAEKEDKMLALSLEDEHLLYGDIIRQDFLDTYNNLTLKTIMAFRWVTEFCPNAKYVMKTDTDVFINTGNLVKYLLNLNHSEKFFTGYPLIDNYSYRGFYQKTHISYQEYPFKVFPPYCSGLGYIMSRDLVPRIYEMMGHVKPIKFEDVYVGICLNLLKVNIHIPEDTNLFFLYRIHLDVCQLRRVIAAHGFSSKEIITFWQVMLRNTTCHY

SEQ ID NO: 8979 - protein, 331 aa, Homo sapiens; identical to SEQ ID NO: 8978
  Payload ID: 1822;
  Gene Symbol: B3GALNT1;
  Gene Name: beta-1,3-N-acetylgalactosaminyltransferase 1 (globoside blood group);
  Uniprot ID:  O75752;
  ENSP ID: ENSP00000376530

SEQ ID NO: 8980 - protein, 331 aa, Homo sapiens; identical to SEQ ID NO: 8978
  Payload ID: 1822;
  Gene Symbol: B3GALNT1;
  Gene Name: beta-1,3-N-acetylgalactosaminyltransferase 1 (globoside blood group);
  Uniprot ID:  O75752;
  ENSP ID: ENSP00000376532

SEQ ID NO: 8981 - protein, 91 aa, Homo sapiens
  Payload ID: 1822;
  Gene Symbol: B3GALNT1;
  Gene Name: beta-1,3-N-acetylgalactosaminyltransferase 1 (globoside blood group);
  ENSP ID: ENSP00000407027
MASALWTVLPSRMSLRSLKWSLLLLSLLSFFVMWYLSLPHYNVIERVNWMYFYEIHLDVCQLRRVIAAHGFSSKEIITFWQVMLRNTTCHY

SEQ ID NO: 8982 - protein, 150 aa, Homo sapiens
  Payload ID: 1822;
  Gene Symbol: B3GALNT1;
  Gene Name: beta-1,3-N-acetylgalactosaminyltransferase 1 (globoside blood group);
  ENSP ID: ENSP00000417053
MSFFLFSEFTTDLSVLIKHGIQKTTKNLSFNFIWNSTVFLAPWTRLTCWLFPLAALSRGALRLLTPSVKSCCSVAQAGVQWQDLSSLQSPSLRFKQFSCLSLPSRWDYRTFGSRASELLWMASALWTVLPSRMSLRSLKWSLLLLSLLSF

SEQ ID NO: 8983 - protein, 54 aa, Homo sapiens
  Payload ID: 1822;
  Gene Symbol: B3GALNT1;
  Gene Name: beta-1,3-N-acetylgalactosaminyltransferase 1 (globoside blood group);
  ENSP ID: ENSP00000417643
MASALWTVLPSRMSLRSLKWSLLLLSLLSFFVMWYLSLPHYNVIERVNWMYFYE

SEQ ID NO: 8984 - protein, 331 aa, Homo sapiens; identical to SEQ ID NO: 8978
  Payload ID: 1822;
  Gene Symbol: B3GALNT1;
  Gene Name: beta-1,3-N-acetylgalactosaminyltransferase 1 (globoside blood group);
  Uniprot ID:  O75752;
  ENSP ID: ENSP00000418226

SEQ ID NO: 8985 - protein, 65 aa, Homo sapiens
  Payload ID: 1822;
  Gene Symbol: B3GALNT1;
  Gene Name: beta-1,3-N-acetylgalactosaminyltransferase 1 (globoside blood group);
  ENSP ID: ENSP00000418567
MASALWTVLPSRMSLRSLKWSLLLLSLLSFFVMWYLSLPHYNVIERVNWMYFYEYEPIYRQDFHF

SEQ ID NO: 8986 - protein, 29 aa, Homo sapiens
  Payload ID: 1822;
  Gene Symbol: B3GALNT1;
  Gene Name: beta-1,3-N-acetylgalactosaminyltransferase 1 (globoside blood group);
  ENSP ID: ENSP00000419127
MASALWTVLPSRMSLRSLKWSLLLLSLLS

SEQ ID NO: 8987 - protein, 111 aa, Homo sapiens
  Payload ID: 1822;
  Gene Symbol: B3GALNT1;
  Gene Name: beta-1,3-N-acetylgalactosaminyltransferase 1 (globoside blood group);
  ENSP ID: ENSP00000419476
MASALWTVLPSRMSLRSLKWSLLLLSLLSFFVMWYLSLPHYNVIERVNWMYFYEYEPIYRQDFHFTLREHSNCSHQNPFLVILVTSHPSDVKARQAIRVTWGEKKSWWGYE

SEQ ID NO: 8988 - protein, 41 aa, Homo sapiens
  Payload ID: 1822;
  Gene Symbol: B3GALNT1;
  Gene Name: beta-1,3-N-acetylgalactosaminyltransferase 1 (globoside blood group);
  ENSP ID: ENSP00000420059
MASALWTVLPSRMSLRSLKWSLLLLSLLSFFVMWYLSLPHY

SEQ ID NO: 8989 - protein, 331 aa, Homo sapiens; identical to SEQ ID NO: 8978
  Payload ID: 1822;
  Gene Symbol: B3GALNT1;
  Gene Name: beta-1,3-N-acetylgalactosaminyltransferase 1 (globoside blood group);
  Uniprot ID:  O75752;
  ENSP ID: ENSP00000420163

SEQ ID NO: 8990 - protein, 58 aa, Homo sapiens
  Payload ID: 1822;
  Gene Symbol: B3GALNT1;
  Gene Name: beta-1,3-N-acetylgalactosaminyltransferase 1 (globoside blood group);
  ENSP ID: ENSP00000420604
MASALWTVLPSRMSLRSLKWSLLLLSLLSFFVMWYLSLPHYNVIERVNWMYFYEYEPI

SEQ ID NO: 8991 - protein, 326 aa, Homo sapiens
  Payload ID: 1823;
  Gene Symbol: B3GALNT2;
  Gene Name: beta-1,3-N-acetylgalactosaminyltransferase 2;
  Uniprot ID:  Q8NCR0;
  ENSP ID: ENSP00000315678
MRNWLVLLCPCVLGAALHLWLRLRSPPPACASGAGPAGGVSLLLPRLECNGAVSAHPNLHLPGSRDSPASASQVAGITDQLALFPQWKSTHYDVVVGVLSARNNHELRNVIRSTWMRHLLQHPTLSQRVLVKFIIGAHGCEVPVEDREDPYSCKLLNITNPVLNQEIEAFSLSEDTSSGLPEDRVVSVSFRVLYPIVITSLGVFYDANDVGFQRNITVKLYQAEQEEALFIARFSPPSCGVQVNKLWYKPVEQFILPESFEGTIVWESQDLHGLVSRNLHKVTVNDGGGVLRVITAGEGALPHEFLEGVEGVAGGFIYTIQGKFAS

SEQ ID NO: 8992 - protein, 500 aa, Homo sapiens
  Payload ID: 1823;
  Gene Symbol: B3GALNT2;
  Gene Name: beta-1,3-N-acetylgalactosaminyltransferase 2;
  Uniprot ID:  Q8NCR0;
  ENSP ID: ENSP00000355559
MRNWLVLLCPCVLGAALHLWLRLRSPPPACASGAGPADQLALFPQWKSTHYDVVVGVLSARNNHELRNVIRSTWMRHLLQHPTLSQRVLVKFIIGAHGCEVPVEDREDPYSCKLLNITNPVLNQEIEAFSLSEDTSSGLPEDRVVSVSFRVLYPIVITSLGVFYDANDVGFQRNITVKLYQAEQEEALFIARFSPPSCGVQVNKLWYKPVEQFILPESFEGTIVWESQDLHGLVSRNLHKVTVNDGGGVLRVITAGEGALPHEFLEGVEGVAGGFIYTIQEGDALLHNLHSRPQRLIDHIRNLHEEDALLKEESSIYDDIVFVDVVDTYRNVPAKLLNFYRWTVETTSFNLLLKTDDDCYIDLEAVFNRIVQKNLDGPNFWWGNFRLNWAVDRTGKWQELEYPSPAYPAFACGSGYVISKDIVKWLASNSGRLKTYQGEDVSMGIWMAAIGPKRYQDSLWLCEKTCETGMLSSPQYSPWELTELWKLKERCGDPCRCQAR

SEQ ID NO: 8993 - protein, 92 aa, Homo sapiens
  Payload ID: 1823;
  Gene Symbol: B3GALNT2;
  Gene Name: beta-1,3-N-acetylgalactosaminyltransferase 2;
  ENSP ID: ENSP00000481548
MRNWLVLLCPCVLGAALHLWLRLRSPPPACASGAGPADQLALFPQWKSTHYDVVVGVLSARNNHELRNVIRSTWMRHLLQHPTLSQRFESGN

SEQ ID NO: 8994 - protein, 326 aa, Homo sapiens; identical to SEQ ID NO: 8991
  Payload ID: 1823;
  Gene Symbol: B3GALNT2;
  Gene Name: Beta-1,3-N-acetylgalactosaminyltransferase 2;
  ENSP ID: ENSP00000489219

SEQ ID NO: 8995 - protein, 92 aa, Homo sapiens; identical to SEQ ID NO: 8993
  Payload ID: 1823;
  Gene Symbol: B3GALNT2;
  Gene Name: Beta-1,3-N-acetylgalactosaminyltransferase 2;
  ENSP ID: ENSP00000489249

SEQ ID NO: 8996 - protein, 500 aa, Homo sapiens; identical to SEQ ID NO: 8992
  Payload ID: 1823;
  Gene Symbol: B3GALNT2;
  Gene Name: Beta-1,3-N-acetylgalactosaminyltransferase 2;
  ENSP ID: ENSP00000489342

SEQ ID NO: 8997 - protein, 415 aa, Homo sapiens
  Payload ID: 1824;
  Gene Symbol: B4GAT1;
  Gene Name: beta-1,4-glucuronyltransferase 1;
  Uniprot ID:  O43505;
  ENSP ID: ENSP00000309096
MQMSYAIRCAFYQLLLAALMLVAMLQLLYLSLLSGLHGQEEQDQYFEFFPPSPRSVDQVKAQLRTALASGGVLDASGDYRVYRGLLKTTMDPNDVILATHASVDNLLHLSGLLERWEGPLSVSVFAATKEEAQLATVLAYALSSHCPDMRARVAMHLVCPSRYEAAVPDPREPGEFALLRSCQEVFDKLARVAQPGINYALGTNVSYPNNLLRNLAREGANYALVIDVDMVPSEGLWRGLREMLDQSNQWGGTALVVPAFEIRRARRMPMNKNELVQLYQVGEVRPFYYGLCTPCQAPTNYSRWVNLPEESLLRPAYVVPWQDPWEPFYVAGGKVPTFDERFRQYGFNRISQACELHVAGFDFEVLNEGFLVHKGFKEALKFHPQKEAENQHNKILYRQFKQELKAKYPNSPRRC

SEQ ID NO: 8998 - protein, 533 aa, Homo sapiens
  Payload ID: 1825;
  Gene Symbol: B4GALNT1;
  Gene Name: beta-1,4-N-acetyl-galactosaminyl transferase 1;
  Uniprot ID:  Q00973;
  ENSP ID: ENSP00000341562
MWLGRRALCALVLLLACASLGLLYASTRDAPGLRLPLAPWAPPQSPRRPELPDLAPEPRYAHIPVRIKEQVVGLLAWNNCSCESSGGGLPLPFQKQVRAIDLTKAFDPAELRAASATREQEFQAFLSRSQSPADQLLIAPANSPLQYPLQGVEVQPLRSILVPGLSLQAASGQEVYQVNLTASLGTWDVAGEVTGVTLTGEGQADLTLVSPGLDQLNRQLQLVTYSSRSYQTNTADTVRFSTEGHEAAFTIRIRHPPNPRLYPPGSLPQGAQYNISALVTIATKTFLRYDRLRALITSIRRFYPTVTVVIADDSDKPERVSGPYVEHYLMPFGKGWFAGRNLAVSQVTTKYVLWVDDDFVFTARTRLERLVDVLERTPLDLVGGAVREISGFATTYRQLLSVEPGAPGLGNCLRQRRGFHHELVGFPGCVVTDGVVNFFLARTDKVREVGFDPRLSRVAHLEFFLDGLGSLRVGSCSDVVVDHASKLKLPWTSRDAGAETYARYRYPGSLDESQMAKHRLLFFKHRLQCMTSQ

SEQ ID NO: 8999 - protein, 478 aa, Homo sapiens
  Payload ID: 1825;
  Gene Symbol: B4GALNT1;
  Gene Name: beta-1,4-N-acetyl-galactosaminyl transferase 1;
  Uniprot ID:  Q00973;
  ENSP ID: ENSP00000401601
MWLGRRALCALVLLLACASLGLLYASTRDAPGLRLPLAPWAPPQSPRRPELPDLAPEPRYAHIPVRIKEQVVGSQSPADQLLIAPANSPLQYPLQGVEVQPLRSILVPGLSLQAASGQEVYQVNLTASLGTWDVAGEVTGVTLTGEGQADLTLVSPGLDQLNRQLQLVTYSSRSYQTNTADTVRFSTEGHEAAFTIRIRHPPNPRLYPPGSLPQGAQYNISALVTIATKTFLRYDRLRALITSIRRFYPTVTVVIADDSDKPERVSGPYVEHYLMPFGKGWFAGRNLAVSQVTTKYVLWVDDDFVFTARTRLERLVDVLERTPLDLVGGAVREISGFATTYRQLLSVEPGAPGLGNCLRQRRGFHHELVGFPGCVVTDGVVNFFLARTDKVREVGFDPRLSRVAHLEFFLDGLGSLRVGSCSDVVVDHASKLKLPWTSRDAGAETYARYRYPGSLDESQMAKHRLLFFKHRLQCMTSQ

SEQ ID NO: 9000 - protein, 120 aa, Homo sapiens
  Payload ID: 1825;
  Gene Symbol: B4GALNT1;
  Gene Name: beta-1,4-N-acetyl-galactosaminyl transferase 1;
  ENSP ID: ENSP00000446566
MWLGRRALCALVLLLACASLGLLYASTRDAPGLRLPLAPWAPPQSPRRPELPDLAPEPRYAHIPVRIKEQVVGLLAWNNCSCESSGGGLPLPFQKQVRAIDLTKAFDPAELRAASATREQ

SEQ ID NO: 9001 - protein, 231 aa, Homo sapiens
  Payload ID: 1825;
  Gene Symbol: B4GALNT1;
  Gene Name: beta-1,4-N-acetyl-galactosaminyl transferase 1;
  ENSP ID: ENSP00000447076
MWLGRRALCALVLLLACASLGLLYASTRDAPGLRLPLAPWAPPQSPRRPELPDLAPEPRYAHIPVRIKEQVVGLLAWNNCSCESSGGGLPLPFQKQVRAIDLTKAFDPAELRAASATREQEFQAFLSRSQSPADQLLIAPANSPLQYPLQGVEVQPLRSILVPGEPDCLPRHLGRGRGSDWSYSHWRGSGRSHPCQPRAGPTQQATTTGHLQQPKLPDQHSRHSPVLHRGT

SEQ ID NO: 9002 - protein, 127 aa, Homo sapiens
  Payload ID: 1825;
  Gene Symbol: B4GALNT1;
  Gene Name: beta-1,4-N-acetyl-galactosaminyl transferase 1;
  ENSP ID: ENSP00000447750
  MOD_RES (1)..(1): Any amino acid
XSQSPADQLLIAPANSPLQYPLQGVEVQPLRSILVPGLSLQAASGQEVYQVNLTASLGTWDVAGEVTGVTLTGEGQADLTLVSPGLDQLNRQLQLVTYSSRSYQTNTADTGSNAMSFLPSPVLHRGT

SEQ ID NO: 9003 - protein, 237 aa, Homo sapiens
  Payload ID: 1825;
  Gene Symbol: B4GALNT1;
  Gene Name: beta-1,4-N-acetyl-galactosaminyl transferase 1;
  ENSP ID: ENSP00000447945
MWLGRRALCALVLLLACASLGLLYASTRDAPGLRLPLAPWAPPQSPRRPELPDLAPEPRYAHIPVRIKEQVVGLLAWNNCSCESSGGGLPLPFQKQVRAIDLTKAFDPAELRAASATREQEFQAFLSRSQSPADQLLIAPANSPLQYPLQGVEVQPLRSILVPGLSLQAASGQEVYQVNLTASLGTWDVAGEVTGVTLTGEGQADLTLVSPGLDQLNRQLQLVTYSSRSYQTNTADT

SEQ ID NO: 9004 - protein, 96 aa, Homo sapiens
  Payload ID: 1825;
  Gene Symbol: B4GALNT1;
  Gene Name: beta-1,4-N-acetyl-galactosaminyl transferase 1;
  ENSP ID: ENSP00000448340
MWLGRRALCALVLLLACASLGLLYASTRDAPGLRLPLAPWAPPQSPRRPELPDLAPEPRYAHIPVRIKEQVVGAEGCLCHKRAGVPGLSVEEPVPS

SEQ ID NO: 9005 - protein, 328 aa, Homo sapiens
  Payload ID: 1825;
  Gene Symbol: B4GALNT1;
  Gene Name: beta-1,4-N-acetyl-galactosaminyl transferase 1;
  Uniprot ID:  Q00973;
  ENSP ID: ENSP00000448500
MWLGRRALCALVLLLACASLGLLYASTRDAPGLRLPLAPWAPPQSPRRPELPDLAPEPRYAHIPVRIKEQVVGLLAWNNCSCESSGGGLPLPFQKQVRAIDLTKAFDPAELRAASATREQEFQAFLSRSQSPADQLLIAPANSPLQYPLQGVEVQPLRSILVPGLSLQAASGQEVYQVNLTASLGTWDVAGEVTGVTLTGEGQADLTLVSPGLDQLNRQLQLVTYSSRSYQTNTADTGARPGWRDGQAGQTEKNQKGWSGQMAEGMGGIWAMARAVQPHNGCFNWTSRARGRKGAFVHLGLEQARGKPEPWVCLPFRPTVGGPRKRLV

SEQ ID NO: 9006 - protein, 151 aa, Homo sapiens
  Payload ID: 1825;
  Gene Symbol: B4GALNT1;
  Gene Name: beta-1,4-N-acetyl-galactosaminyl transferase 1;
  ENSP ID: ENSP00000448577
  MOD_RES (1)..(1): Any amino acid
XMPFGKGWFAGRNLAVSQVTTKYVLWVDDDFVFTARTRLERLVDVLERTPLDLARLEATSLSLQVGGAVREISGFATTYRQLLSVEPGAPGLGNCLRQRRGFHHELVGFPGCVVTDGVVNFFLARTDKVREVGFDPRLSRVAHLEFFLDGL

SEQ ID NO: 9007 - protein, 81 aa, Homo sapiens
  Payload ID: 1825;
  Gene Symbol: B4GALNT1;
  Gene Name: beta-1,4-N-acetyl-galactosaminyl transferase 1;
  ENSP ID: ENSP00000449534
MWLGRRALCALVLLLACASLGLLYASTRDAPGLRLPLAPWAPPQSPRRPELPDLAPEPRYAHIPVRIKEQVVGLLAWNNCS

SEQ ID NO: 9008 - protein, 328 aa, Homo sapiens; identical to SEQ ID NO: 9005
  Payload ID: 1825;
  Gene Symbol: B4GALNT1;
  Gene Name: beta-1,4-N-acetyl-galactosaminyl transferase 1;
  Uniprot ID:  Q00973;
  ENSP ID: ENSP00000450303

SEQ ID NO: 9009 - protein, 304 aa, Homo sapiens
  Payload ID: 1825;
  Gene Symbol: B4GALNT1;
  Gene Name: beta-1,4-N-acetyl-galactosaminyl transferase 1;
  ENSP ID: ENSP00000473533
MWLGRRALCALVLLLACASLGLLYASTRDAPGLRLPLAPWAPPQSPRRPELPDLAPEPRYAHIPVRIKEQVVGLLAWNNCSCESSGGGLPLPFQKQVRAIDLTKAFDPAELRAASATREQEFQAFLSRSQSPADQLLIAPANSPLQYPLQGVEVQPLRSILVPGLSLQAASGQEVYQVNLTASLGTWDVAGEVTGVTLTGEGQADLTLVSPGLDQLNRQLQLVTYSSRSYQTNTADTAQYNISALVTIATKTFLRYDRLRALITSIRRFYPTVTVVIADDSDKPERVSGPYVEHYLMPFGKVCS

SEQ ID NO: 9010 - protein, 566 aa, Homo sapiens
  Payload ID: 1826;
  Gene Symbol: B4GALNT2;
  Gene Name: beta-1,4-N-acetyl-galactosaminyl transferase 2;
  Uniprot ID:  Q8NHY0;
  ENSP ID: ENSP00000300404
MGSAGFSVGKFHVEVASRGRECVSGTPECGNRLGSAGFGALCLELRGADPAWGPFAAHGRSRRQGSRFLWLLKILVIILVLGIVGFMFGSMFLQAVFSSPKPELPSPAPGVQKLKLLPEERLRNLFSYDGIWLFPKNQCKCEANKEQGGYNFQDAYGQSDLPAVKARRQAEFEHFQRREGLPRPLPLLVQPNLPFGYPVHGVEVMPLHTVPIPGLQFEGPDAPVYEVTLTASLGTLNTLADVPDSVVQGRGQKQLIISTSDRKLLKFILQHVTYTSTGYQHQKVDIVSLESRSSVAKFPVTIRHPVIPKLYDPGPERKLRNLVTIATKTFLRPHKLMIMLRSIREYYPDLTVIVADDSQKPLEIKDNHVEYYTMPFGKGWFAGRNLAISQVTTKYVLWVDDDFLFNEETKIEVLVDVLEKTELDVVGGSVLGNVFQFKLLLEQSENGACLHKRMGFFQPLDGFPSCVVTSGVVNFFLAHTERLQRVGFDPRLQRVAHSEFFIDGLGTLLVGSCPEVIIGHQSRSPVVDSELAALEKTYNTYRSNTLTRVQFKLALHYFKNHLQCAA

SEQ ID NO: 9011 - protein, 506 aa, Homo sapiens
  Payload ID: 1826;
  Gene Symbol: B4GALNT2;
  Gene Name: beta-1,4-N-acetyl-galactosaminyl transferase 2;
  Uniprot ID:  Q8NHY0;
  ENSP ID: ENSP00000377022
MTSGGSRFLWLLKILVIILVLGIVGFMFGSMFLQAVFSSPKPELPSPAPGVQKLKLLPEERLRNLFSYDGIWLFPKNQCKCEANKEQGGYNFQDAYGQSDLPAVKARRQAEFEHFQRREGLPRPLPLLVQPNLPFGYPVHGVEVMPLHTVPIPGLQFEGPDAPVYEVTLTASLGTLNTLADVPDSVVQGRGQKQLIISTSDRKLLKFILQHVTYTSTGYQHQKVDIVSLESRSSVAKFPVTIRHPVIPKLYDPGPERKLRNLVTIATKTFLRPHKLMIMLRSIREYYPDLTVIVADDSQKPLEIKDNHVEYYTMPFGKGWFAGRNLAISQVTTKYVLWVDDDFLFNEETKIEVLVDVLEKTELDVVGGSVLGNVFQFKLLLEQSENGACLHKRMGFFQPLDGFPSCVVTSGVVNFFLAHTERLQRVGFDPRLQRVAHSEFFIDGLGTLLVGSCPEVIIGHQSRSPVVDSELAALEKTYNTYRSNTLTRVQFKLALHYFKNHLQCAA

SEQ ID NO: 9012 - protein, 480 aa, Homo sapiens
  Payload ID: 1826;
  Gene Symbol: B4GALNT2;
  Gene Name: beta-1,4-N-acetyl-galactosaminyl transferase 2;
  Uniprot ID:  Q8NHY0;
  ENSP ID: ENSP00000425510
MFGSMFLQAVFSSPKPELPSPAPGVQKLKLLPEERLRNLFSYDGIWLFPKNQCKCEANKEQGGYNFQDAYGQSDLPAVKARRQAEFEHFQRREGLPRPLPLLVQPNLPFGYPVHGVEVMPLHTVPIPGLQFEGPDAPVYEVTLTASLGTLNTLADVPDSVVQGRGQKQLIISTSDRKLLKFILQHVTYTSTGYQHQKVDIVSLESRSSVAKFPVTIRHPVIPKLYDPGPERKLRNLVTIATKTFLRPHKLMIMLRSIREYYPDLTVIVADDSQKPLEIKDNHVEYYTMPFGKGWFAGRNLAISQVTTKYVLWVDDDFLFNEETKIEVLVDVLEKTELDVVGGSVLGNVFQFKLLLEQSENGACLHKRMGFFQPLDGFPSCVVTSGVVNFFLAHTERLQRVGFDPRLQRVAHSEFFIDGLGTLLVGSCPEVIIGHQSRSPVVDSELAALEKTYNTYRSNTLTRVQFKLALHYFKNHLQCAA

SEQ ID NO: 9013 - protein, 998 aa, Homo sapiens [sequence omitted]

SEQ ID NO: 9014 - protein, 636 aa, Homo sapiens
  Payload ID: 1827;
  Gene Symbol: B4GALNT3;
  Gene Name: beta-1,4-N-acetyl-galactosaminyl transferase 3;
  ENSP ID: ENSP00000322953
MARADLVPKARPWGEHQHQFRGRANLHVFEDWCGSSIQQLRRNLHFPLYPHIRTTLRKLAVSPKWTNYGLRIFGYLHPFTDGKIQFAIAADDNAEFWLSLDDQVSGLQLLASVGKTGKEWTAPGEFGKFRSQISKPVSLSASHRYYFEVLHKQNEEGTDHVEVAWRRNDPGAKFTIIDSLSLSLFTNETFLQMDEVGHIPQTAASHVDSSNALPRDEQPPADMLRPDPRDTLYRVPLIPKSHLRHVLPDCPYKPSYLVDGLPLQRYQGLRFVHLSFVYPNDYTRLSHMETHNKCFYQENAYYQDRFSFQEYIKIDQPEKQGLEQPAGFEENLLEESQYGEVAEETPASNNQNARMLEGRQTPASTLEQDATDYRLRSLRKLLAQPREGLLAPFSKRNSTASFPGRTSHIPVQQPEKRKQKPSPEPSQDSPHSDKWPPGHPVKNLPQMRGPRPRPAGDSPRKTQWLNQVESYIAEQRRGDRMRPQAPGRGWHGEEEVVAAAGQEGQVEGEEEGEEEEEEEDMSEVFEYVPVFDPVVNWDQTFSARNLDFQALRTDWIDLSCNTSGNLLLPEQEALEVTRVFLKKLNQRSRGSVDFPIPDILCKWNHVMCGLYIGLFAEYSLSTSFIRVVESIKHFIP

SEQ ID NO: 9015 - protein, 1039 aa, Homo sapiens
  Payload ID: 1828;
  Gene Symbol: B4GALNT4;
  Gene Name: beta-1,4-N-acetyl-galactosaminyl transferase 4;
  Uniprot ID:  Q76KP1;
  ENSP ID: ENSP00000328277
MPRLPVKKIRKQMKLLLLLLLLSCAAWLTYVHLGLVRQGRALRQRLGYGRDGEKLTSETDGRGVHAAPSTQRAEDSSESREEEQAPEGRDLDMLFPGGAGRLPLNFTHQTPPWREEYKGQVNLHVFEDWCGGAVGHLRRNLHFPLFPHTRTTVKKLAVSPKWKNYGLRIFGFIHPARDGDVQFSVASDDNSEFWLSLDESPAAAQLVAFVGKTGSEWTAPGEFTKFSSQVSKPRRLMASRRYYFELLHKQDDRGSDHVEVGWRAFLPGLKFEVISSAHISLYTDESALKMDHVAHVPQSPASHVGGRPPQEETSADMLRPDPRDTFFLTPRMESSSLENVLEPCAYAPTYVVKDFPIARYQGLQFVYLSFVYPNDYTRLTHMETDNKCFYRESPLYLERFGFYKYMKMDKEEGDEDEEDEVQRRAFLFLNPDDFLDDEDEGELLDSLEPTEAAPPRSGPQSPAPAAPAQPGATLAPPTPPRPRDGGTPRHSRALSWAARAARPLPLFLGRAPPPRPAVEQPPPKVYVTRVRPGQRASPRAPAPRAPWPPFPGVFLHPRPLPRVQLRAPPRPPRPHGRRTGGPQATQPRPPARAQATQGGREGQARTLGPAAPTVDSNLSSEARPVTSFLSLSQVSGPQLPGEGEEEEEGEDDGAPGDEAASEDSEEAAGPALGRWREDAIDWQRTFSVGAVDFELLRSDWNDLRCNVSGNLQLPEAEAVDVTAQYMERLNARHGGRFALLRIVNVEKRRDSARGSRFLLELELQERGGGRLRLSEYVFLRLPGARVGDADGESPEPAPAASVRPDGRPELCRPLRLAWRQDVMVHFIVPVKNQARWVAQFLADMAALHARTGDSRFSVVLVDFESEDMDVERALRAARLPRYQYLRRTGNFERSAGLQAGVDAVEDASSIVFLCDLHIHFPPNILDGIRKHCVEGRLAFAPVVMRLSCGSSPRDPHGYWEVNGFGLFGIYKSDFDRVGGMNTEEFRDQWGGEDWELLDRVLQAGLEVERLRLRNFYHHYHSKRGMWSVRSRKGSRTGAS

SEQ ID NO: 9016 - protein, 53 aa, Homo sapiens
  Payload ID: 1828;
  Gene Symbol: B4GALNT4;
  Gene Name: beta-1,4-N-acetyl-galactosaminyl transferase 4;
  ENSP ID: ENSP00000432372
DASSIVFLCDLHIHFPPNILDGIRKHCVEGRLAFAPVVMRLSCGSSPRDPHGS

SEQ ID NO: 9017 - protein, 26 aa, Homo sapiens
  Payload ID: 1828;
  Gene Symbol: B4GALNT4;
  Gene Name: beta-1,4-N-acetyl-galactosaminyl transferase 4;
  ENSP ID: ENSP00000434463
DVERALRAARLPRDRACDSPSPGTST

SEQ ID NO: 9018 - protein, 57 aa, Homo sapiens
  Payload ID: 1829;
  Gene Symbol: B2M;
  Gene Name: beta-2-microglobulin;
  ENSP ID: ENSP00000340858
MSRSVALAVLALLSLSGLERELKKWSIQTCLSARTGLSISCTTLNSPPLKKMSMPAV

SEQ ID NO: 9019 - protein, 101 aa, Homo sapiens
  Payload ID: 1829;
  Gene Symbol: B2M;
  Gene Name: beta-2-microglobulin;
  ENSP ID: ENSP00000437604
MSRSVALAVLALLSLSGLEAIQRTPKIQVYSRHPADIEVDLLKNGERIEKVEHSDLSFSKDWSFYLLYYTEFTPTEKDEYACRVNHVTLSQPKIVKWDRDM

SEQ ID NO: 9020 - protein, 119 aa, Homo sapiens
  Payload ID: 1829;
  Gene Symbol: B2M;
  Gene Name: beta-2-microglobulin;
  Uniprot ID:  P61769;
  ENSP ID: ENSP00000452780
MSRSVALAVLALLSLSGLEAIQRTPKIQVYSRHPAENGKSNFLNCYVSGFHPSDIEVDLLKNGERIEKVEHSDLSFSKDWSFYLLYYTEFTPTEKDEYACRVNHVTLSQPKIVKWDRDM

SEQ ID NO: 9021 - protein, 51 aa, Homo sapiens
  Payload ID: 1829;
  Gene Symbol: B2M;
  Gene Name: beta-2-microglobulin;
  ENSP ID: ENSP00000452861
MSRSVALAVLALLSLSGLEAIQHSGLLTSSSREWKVKFPELLCVWVSSIRH

SEQ ID NO: 9022 - protein, 71 aa, Homo sapiens
  Payload ID: 1829;
  Gene Symbol: B2M;
  Gene Name: beta-2-microglobulin;
  ENSP ID: ENSP00000453186
GFHPSDIEVDLLKNGERIEKVEHSDLSFSKDWSFYLLYYTEFTPTEKDEYACRVNHVTLSQPKIVKWDRDM

SEQ ID NO: 9023 - protein, 119 aa, Homo sapiens; identical to SEQ ID NO: 9020
  Payload ID: 1829;
  Gene Symbol: B2M;
  Gene Name: beta-2-microglobulin;
  Uniprot ID:  P61769;
  ENSP ID: ENSP00000453191

SEQ ID NO: 9024 - protein, 119 aa, Homo sapiens; identical to SEQ ID NO: 9020
  Payload ID: 1829;
  Gene Symbol: B2M;
  Gene Name: beta-2-microglobulin;
  Uniprot ID:  P61769;
  ENSP ID: ENSP00000453350

SEQ ID NO: 9025 - protein, 119 aa, Homo sapiens; identical to SEQ ID NO: 9020
  Payload ID: 1829;
  Gene Symbol: B2M;
  Gene Name: beta-2-microglobulin;
  Uniprot ID:  P61769;
  ENSP ID: ENSP00000481426

SEQ ID NO: 9026 - protein, 101 aa, Homo sapiens; identical to SEQ ID NO: 9019
  Payload ID: 1829;
  Gene Symbol: B2M;
  Gene Name: beta-2-microglobulin;
  ENSP ID: ENSP00000483449

SEQ ID NO: 9027 - protein, 51 aa, Homo sapiens; identical to SEQ ID NO: 9021
  Payload ID: 1829;
  Gene Symbol: B2M;
  Gene Name: beta-2-microglobulin;
  ENSP ID: ENSP00000488042

SEQ ID NO: 9028 - protein, 71 aa, Homo sapiens; identical to SEQ ID NO: 9022
  Payload ID: 1829;
  Gene Symbol: B2M;
  Gene Name: beta-2-microglobulin;
  ENSP ID: ENSP00000488177

SEQ ID NO: 9029 - protein, 119 aa, Homo sapiens; identical to SEQ ID NO: 9020
  Payload ID: 1829;
  Gene Symbol: B2M;
  Gene Name: beta-2-microglobulin;
  Uniprot ID:  P61769;
  ENSP ID: ENSP00000488321

SEQ ID NO: 9030 - protein, 57 aa, Homo sapiens; identical to SEQ ID NO: 9018
  Payload ID: 1829;
  Gene Symbol: B2M;
  Gene Name: beta-2-microglobulin;
  ENSP ID: ENSP00000488360

SEQ ID NO: 9031 - protein, 119 aa, Homo sapiens; identical to SEQ ID NO: 9020
  Payload ID: 1829;
  Gene Symbol: B2M;
  Gene Name: beta-2-microglobulin;
  Uniprot ID:  P61769;
  ENSP ID: ENSP00000488548

SEQ ID NO: 9032 - protein, 547 aa, Homo sapiens
  Payload ID: 1830;
  Gene Symbol: BCO1;
  Gene Name: beta-carotene oxygenase 1;
  Uniprot ID:  Q9HAY6;
  ENSP ID: ENSP00000258168
MDIIFGRNRKEQLEPVRAKVTGKIPAWLQGTLLRNGPGMHTVGESRYNHWFDGLALLHSFTIRDGEVYYRSKYLRSDTYNTNIEANRIVVSEFGTMAYPDPCKNIFSKAFSYLSHTIPDFTDNCLINIMKCGEDFYATSETNYIRKINPQTLETLEKVDYRKYVAVNLATSHPHYDEAGNVLNMGTSIVEKGKTKYVIFKIPATVPEGKKQGKSPWKHTEVFCSIPSRSLLSPSYYHSFGVTENYVIFLEQPFRLDILKMATAYIRRMSWASCLAFHREEKTYIHIIDQRTRQPVQTKFYTDAMVVFHHVNAYEEDGCIVFDVIAYEDNSLYQLFYLANLNQDFKENSRLTSVPTLRRFAVPLHVDKNAEVGTNLIKVASTTATALKEEDGQVYCQPEFLYEGLELPRVNYAHNGKQYRYVFATGVQWSPIPTKIIKYDILTKSSLKWREDDCWPAEPLFVPAPGAKDEDDGVILSAIVSTDPQKLPFLLILDAKSFTELARASVDVDMHMDLHGLFITDMDWDTKKQAASEEQRDRASDCHGAPLT

SEQ ID NO: 9033 - protein, 162 aa, Homo sapiens
  Payload ID: 1830;
  Gene Symbol: BCO1;
  Gene Name: beta-carotene oxygenase 1;
  ENSP ID: ENSP00000455219
MDIIFGRNRKEQLEPVRAKVTGKIPAWLQGTLLRNGPGMHTVGESRYNHWFDGLALLHSFTIRDGEVYYRSKYLRSDTYNTNIEANRIVVSEFGTMAYPDPCKNIFSKAFSYLSHTIPDFTDNCLINIMKCGEDFYATSETNYIRKINPQTLETLEKVSTHM

SEQ ID NO: 9034 - protein, 81 aa, Homo sapiens
  Payload ID: 1830;
  Gene Symbol: BCO1;
  Gene Name: beta-carotene oxygenase 1;
  ENSP ID: ENSP00000457910
MDIIFGRNRKEQLEPVRAKVTGKIPAWLQGTLLRNGPGMHTVGESRYNHWFDGLALLHSFTIRDELSPTCLTPSPISPTTA

SEQ ID NO: 9035 - protein, 579 aa, Homo sapiens
  Payload ID: 1831;
  Gene Symbol: BCO2;
  Gene Name: beta-carotene oxygenase 2;
  Uniprot ID:  Q9BYV7;
  ENSP ID: ENSP00000350314
MFFRVFLHFIRSHSATAVDFLPVMVHRLPVFKRYMGNTPQKKAVFGQCRGLPCVAPLLTTVEEAPRGISARVWGHFPKWLNGSLLRIGPGKFEFGKDKYNHWFDGMALLHQFRMAKGTVTYRSKFLQSDTYKANSAKNRIVISEFGTLALPDPCKNVFERFMSRFELPGKAAAMTDNTNVNYVRYKGDYYLCTETNFMNKVDIETLEKTEKVDWSKFIAVNGATAHPHYDLDGTAYNMGNSFGPYGFSYKVIRVPPEKVDLGETIHGVQVICSIASTEKGKPSYYHSFGMTRNYIIFIEQPLKMNLWKIATSKIRGKAFSDGISWEPQCNTRFHVVEKRTGQLLPGRYYSKPFVTFHQINAFEDQGCVIIDLCCQDNGRTLEVYQLQNLRKAGEGLDQVHNSAAKSFPRRFVLPLNVSLNAPEGDNLSPLSYTSASAVKQADGTIWCSHENLHQEDLEKEGGIEFPQIYYDRFSGKKYHFFYGCGFRHLVGDSLIKVDVVNKTLKVWREDGFYPSEPVFVPAPGTNEEDGGVILSVVITPNQNESNFILVLDAKNFEELGRAEVPVQMPYGFHGTFIPI

SEQ ID NO: 9036 - protein, 506 aa, Homo sapiens
  Payload ID: 1831;
  Gene Symbol: BCO2;
  Gene Name: beta-carotene oxygenase 2;
  Uniprot ID:  Q9BYV7;
  ENSP ID: ENSP00000354338
MFFRVFLHFIRSHSATAVDFLPVMVHRLPVFKRYMGNTPQKKAVFGQCRGLPCVAPLLTTVEEAPRGISARVWGHFPKWLNGSLLRIGPGKFEFGKDKYNHWFDGMALLHQFRMAKGTVTYRSKFLQSDTYKANSAKNRIVISEFGTLALPDPCKNVFERFMSRFELPGKAAGFSYKVIRVPPEKVDLGETIHGVQVICSIASTEKGKPSYYHSFGMTRNYIIFIEQPLKMNLWKIATSKIRGKAFSDGISWEPQCNTRFHVVEKRTGQLLPGRYYSKPFVTFHQINAFEDQGCVIIDLCCQDNGRTLEVYQLQNLRKAGEGLDQVHNSAAKSFPRRFVLPLNVSLNAPEGDNLSPLSYTSASAVKQADGTIWCSHENLHQEDLEKEGGIEFPQIYYDRFSGKKYHFFYGCGFRHLVGDSLIKVDVVNKTLKVWREDGFYPSEPVFVPAPGTNEEDGGVILSVVITPNQNESNFILVLDAKNFEELGRAEVPVQMPYGFHGTFIPI

SEQ ID NO: 9037 - protein, 545 aa, Homo sapiens
  Payload ID: 1831;
  Gene Symbol: BCO2;
  Gene Name: beta-carotene oxygenase 2;
  Uniprot ID:  Q9BYV7;
  ENSP ID: ENSP00000414843
MGNTPQKKAVFGQCRGLPCVAPLLTTVEEAPRGISARVWGHFPKWLNGSLLRIGPGKFEFGKDKYNHWFDGMALLHQFRMAKGTVTYRSKFLQSDTYKANSAKNRIVISEFGTLALPDPCKNVFERFMSRFELPGKAAAMTDNTNVNYVRYKGDYYLCTETNFMNKVDIETLEKTEKVDWSKFIAVNGATAHPHYDLDGTAYNMGNSFGPYGFSYKVIRVPPEKVDLGETIHGVQVICSIASTEKGKPSYYHSFGMTRNYIIFIEQPLKMNLWKIATSKIRGKAFSDGISWEPQCNTRFHVVEKRTGQLLPGRYYSKPFVTFHQINAFEDQGCVIIDLCCQDNGRTLEVYQLQNLRKAGEGLDQVHNSAAKSFPRRFVLPLNVSLNAPEGDNLSPLSYTSASAVKQADGTIWCSHENLHQEDLEKEGGIEFPQIYYDRFSGKKYHFFYGCGFRHLVGDSLIKVDVVNKTLKVWREDGFYPSEPVFVPAPGTNEEDGGVILSVVITPNQNESNFILVLDAKNFEELGRAEVPVQMPYGFHGTFIPI

SEQ ID NO: 9038 - protein, 474 aa, Homo sapiens
  Payload ID: 1831;
  Gene Symbol: BCO2;
  Gene Name: beta-carotene oxygenase 2;
  Uniprot ID:  Q9BYV7;
  ENSP ID: ENSP00000431802
MALLHQFRMAKGTVTYRSKFLQSDTYKANSAKNRIVISEFGTLALPDPCKNVFERFMSRFELPGKAAAMTDNTNVNYVRYKGDYYLCTETNFMNKVDIETLEKTEKVDWSKFIAVNGATAHPHYDLDGTAYNMGNSFGPYGFSYKVIRVPPEKVDLGETIHGVQVICSIASTEKGKPSYYHSFGMTRNYIIFIEQPLKMNLWKIATSKIRGKAFSDGISWEPQCNTRFHVVEKRTGQLLPGRYYSKPFVTFHQINAFEDQGCVIIDLCCQDNGRTLEVYQLQNLRKAGEGLDQVHNSAAKSFPRRFVLPLNVSLNAPEGDNLSPLSYTSASAVKQADGTIWCSHENLHQEDLEKEGGIEFPQIYYDRFSGKKYHFFYGCGFRHLVGDSLIKVDVVNKTLKVWREDGFYPSEPVFVPAPGTNEEDGGVILSVVITPNQNESNFILVLDAKNFEELGRAEVPVQMPYGFHGTFIPI

SEQ ID NO: 9039 - protein, 71 aa, Homo sapiens
  Payload ID: 1831;
  Gene Symbol: BCO2;
  Gene Name: beta-carotene oxygenase 2;
  ENSP ID: ENSP00000431882
  MOD_RES (1)..(1): Any amino acid
XKQADGTIWCSHENLHQEDLEKEGGIEFPQIYYDRFSGKKFGEKMAFIPQNLFLFQHQEPMKKMVGLFFLW

SEQ ID NO: 9040 - protein, 273 aa, Homo sapiens
  Payload ID: 1831;
  Gene Symbol: BCO2;
  Gene Name: beta-carotene oxygenase 2;
  ENSP ID: ENSP00000432045
  MOD_RES (1)..(1): Any amino acid
XYNHWFDGMALLHQFRMAKGTVTYRSKFLQSDTYKANSAKNRIVISEFGTLALPDPCKNVFERFMSRFELPAMTDNTNVNYVRYKGDYYLCTETNFMNKVDIETLEKTEKLLPGRYYSKPFVTFHQINAFEDQGCVIIDLCCQDNGRTLEVYQLQNLRKAGEGLDQVHNSAAKSFPRRFVLPLNVSLNAPEGDNLSPLSYTSASAVKQADGTIWCSHENLHQEDLEKEGGIEFPQIYYDRFSGKKYHFFYGCGFRHLVGDSLIKVDVVNKTLK

SEQ ID NO: 9041 - protein, 50 aa, Homo sapiens
  Payload ID: 1831;
  Gene Symbol: BCO2;
  Gene Name: beta-carotene oxygenase 2;
  ENSP ID: ENSP00000434488
MFFRVFLHFIRSHSATAVDFLPVMVHRLPGTIIGLMGWRCFTSSEWQRAQ

SEQ ID NO: 9042 - protein, 98 aa, Homo sapiens
  Payload ID: 1831;
  Gene Symbol: BCO2;
  Gene Name: beta-carotene oxygenase 2;
  ENSP ID: ENSP00000435869
MFFRVFLHFIRSHSATAVDFLPVMVHRLPVFKRYMGNTPQKKAVFGQCRGLPCVAPLLTTVEEAPRGISARVWGHFPKWLNGSLLRIGPGKFEFGKDK

SEQ ID NO: 9043 - protein, 539 aa, Homo sapiens
  Payload ID: 1831;
  Gene Symbol: BCO2;
  Gene Name: beta-carotene oxygenase 2;
  Uniprot ID:  Q9BYV7;
  ENSP ID: ENSP00000436615
MGNTPQKKAVFGQCRGLPCVAPLLTTVEEAPRGISARVWGHFPKWLNGSLLRIGPGKFEFGKDKYNHWFDGMALLHQFRMAKGTVTYRSKFLQSDTYKANSAKNRIVISEFGTLALPDPCKNVFERFMSRFELPGKAAAMTDNTNVNYVRYKGDYYLCTETNFMNKVDIETLEKTEKVDWSKFIAVNGATAHPHYDLDGTAYNMGNSFGPYGFSYKVIRVPPEKVDLGETIHGVQVICSIASTEKGKPSYYHSFGMTRNYIIFIEQPLKMNLWKIATSKIRGKAFSDGISWEPQCNTRFHVVEKRTGQLLPGRYYSKPFVTFHQINAFEDQGCVIIDLCCQDNGRTLEVYQLQNLRKAGEGLDQVHNSAAKSFPRRFVLPLNVSLNAPEGDNLSPLSYTSASAVKQADGTIWCSHENLHQEDLEKEGGIEFPQIYYDRFSGKKYHFFYGCGFRHLVGDSLIKVDVVWREDGFYPSEPVFVPAPGTNEEDGGVILSVVITPNQNESNFILVLDAKNFEELGRAEVPVQMPYGFHGTFIPI

SEQ ID NO: 9044 - protein, 50 aa, Homo sapiens; identical to SEQ ID NO: 9041
  Payload ID: 1831;
  Gene Symbol: BCO2;
  Gene Name: beta-carotene oxygenase 2;
  ENSP ID: ENSP00000436956

SEQ ID NO: 9045 - protein, 545 aa, Homo sapiens; identical to SEQ ID NO: 9037
  Payload ID: 1831;
  Gene Symbol: BCO2;
  Gene Name: beta-carotene oxygenase 2;
  Uniprot ID:  Q9BYV7;
  ENSP ID: ENSP00000437053

SEQ ID NO: 9046 - protein, 212 aa, Homo sapiens
  Payload ID: 1831;
  Gene Symbol: BCO2;
  Gene Name: beta-carotene oxygenase 2;
  ENSP ID: ENSP00000476560
  MOD_RES (1)..(1): Any amino acid
XVHRLPVFKRYMGNTPQKKAVFGQCRGLPCVAPLLTTVEEAPRGISARVWGHFPKWLNGSLLRIGPGKFEFGKDKYNHWFDGMALLHQFRMAKGTVTYRSKFLQSDTYKANSAKNRIVISEFGTLALPDPCKNVFERFMSRFELPGKAAGFSYKVIRVPPEKVDLGETIHGVQVICSIASTEKGKPSYYHSFGMTRNYIIFIEQPLKMNLWK

SEQ ID NO: 9047 - protein, 178 aa, Homo sapiens
  Payload ID: 1832;
  Gene Symbol: BTC;
  Gene Name: betacellulin;
  Uniprot ID:  P35070;
  ENSP ID: ENSP00000379092
MDRAARCSGASSLPLLLALALGLVILHCVVADGNSTRSPETNGLLCGDPEENCAATTTQSKRKGHFSRCPKQYKHYCIKGRCRFVVAEQTPSCVCDEGYIGARCERVDLFYLRGDRGQILVICLIAVMVVFIILVIGVCTCCHPLRKRRKRKKKEEEMETLGKDITPINEDIEETNIA

SEQ ID NO: 9048 - protein, 108 aa, Homo sapiens
  Payload ID: 1832;
  Gene Symbol: BTC;
  Gene Name: betacellulin;
  ENSP ID: ENSP00000421747
  MOD_RES (1)..(1): Any amino acid
XLVILHCVVADGNSTRSPETNGLLCGDPEENCAATTTQSKRKGHFSRCPKQYKHYCIKGRCRFVVAEQTPSCVPLRKRRKRKKKEEEMETLGKDITPINEDIEETNIA

SEQ ID NO: 9049 - protein, 2970 aa, Homo sapiens
  Payload ID: 1833;
  Gene Symbol: CRYBG3;
  Gene Name: beta-gamma crystallin domain containing 3;
  Uniprot ID:  Q68DQ2;
  ENSP ID: ENSP00000374273
MSSGRRRGSAPWHSFSRFFAPRSPSRDKEEEEEERPGTSPPPAPGRSAASVENEPMSTSQKKENVLSSEAVKIRQSEDKRNHAEKPVTLPVQEDPKKAYDLSSSTSDTKIGESDRQPKESFFQFLGNLFNISGKSSLGEAKQSSFKDDQDKTEKDLQNPSDHHEDGIKREREIFSGSLRTQTHPTEEQDSNSSELSDAFSLDTTQDSDQETTNLLKQIDGKPEKPSVTYATYRGPRHIGKYLKQQTGLATVNTLDRENESSDSSTNRHIDPGSEIEAGVLPLLLSASTDSSMKGNLLEGPLEDSDCSKTSFNKENSLTNNPELQNIASSNNLLNKNAWGSIERNRSSPSSVTNSSYDGESDSQHHLSCEPVSQTNRNLVCSALLTGSNHRKVPCSPDFQRVTTTENTIKENSTVMSNRTLVQREELVEPQGPAISDFSCSKSDGSDTTEQESTNLPSPNKSIRHEHLQLPESECSDKQTIDSSSKQAATHTNIIALQRHAVTDTEFVNEGKRLSAQDSQKNVAVREIRRETESASAGESIASSHVKAPEDKIESLPKDTDQYFETKAKKLDFRSHDKIPHIRMNKKDLASLNYISESAVVASLGNENAPELKFELNRSHISETPLDSESPQQAEVSPDAKTSLSLDCKKLNFSISPPTFVSGVGMLSKLDIPDLMNEGSPVPIETGNVNIVGISYQPRKCKEENVKNHVEAAGRKSPPPSFCLEYTSAIFEFKEVLSNSEKCQVLPGSEASGPHLTGLELLSFDSGNLSKDCSSILSQDPNRVELVSSNTKANMSIIEKSDSLSLEAKTANIVSKAEIDGQNNVLVESHSGRGKTISLSKVSLSKVEPRNISQDKMSSFPLKITHVPEKPILSELTFLEVEQGKRFQSINHNEIGEKCSDAGLKENCQAELSPAASKYEDKPEPEVDALGSPPALLKSNISWILPPIHDEKISRQMAQNCEAHTCVFHQSLDICGTKKISGHSEMAELSLTNISPKFQETGSMKVNSPFLDSDSSLEKNSSASEDSSFLKVPSVLKLEKKSSSYRKKENIHFLNGGIDSVSSSSSYPEEVSMIVNSHKPQNNLDSIQVTKDLTHEGTSVTNLLYPTTSYLEFETSVSIGTEVTPFQEHFGIYTGKISIDFPTAAQFDNLVEAETGAVAGPAASVNSSGQQCSEASAEHIEARRRAHDQLLDLKSSLLKKADTLIGEIFNSVREELKFKHTVSTCQEHIAIEGIMNLGTLKEDISEKNPSEVTLTEIQQTEGLEEQGMENMSEVKEKPCVSPTVGEKNLLVDPNSMNVSCLLEDKARELVNEIIYVAQEKLRNDTFEDTEDTWDSELQANTSKILNSDSVKPHDVVREFLVSEQPVNQSTQISENKVLNEFFSLSNLASGTESIKGGEIVLYQKSLFSGNGSGLSDSINLQESDTVLLAEDMSHKRLDDRVKTHLFRSEDCNETMEIENVDNNKTETEDRRTLVLNFKWPPLVNDDIHAPGTSKSSLSDSLVCISEKNLPGHSKNTPLAMSDVGKVHKKDNEINIGKIELIPSMLETGKTNKKDAELNILKYEAVPPMIEMGRIHKMDAELNVTKTEPKANVFKMGEVYQMDAESCIEKTEGSAVILGMEKAYKMKDTEGDIGKIEVIPMMPEVKNIHQKDAEGDIVKTEMTPVTVDMENIYQTHAEGDIGKTGTIALSEVENIHQKGGEGISEKAEVIPVTLAMENTYQKDAEGDIGKAEVMPVRLEMENTYPKDTERDGGKTEVMPLALEVVNTYQKNAKGFTGNTEGSVLKMEATYRKTAEEVIKNTEIVPCVLKVKEAHETAPAPLEMEKACKRDVKETIGATVSTPSVIEMEKISPEDRGENIGKHKVLPAVVDIEKIHGTGLELTTKQGEAMLPAFESKTPQEYAEGSVEETKEEPTEIKEGLIAHENRLPTYFRGYESPTLSKDYEGYPAPAMPDFQPGDTTVRLDKRMSLTAIYDKRRETDYSDKGYNLAFVSQDEQENSSFTILYEEPLQEEDKYASAEARQTQSVLFHDTSADSMPVLACERSESRTDLVHHFEKGTKLGETFDSDSSEMFLSVEAKRYKIYPLALSPIYEDDSSQEDILSSEVSPGHHGPRKSRDSENQSSSVLSLLQSVSERLKMNFDEDDREAADEEEEEEEAAVLHKGDLRAGSGERVTFQLPDPSITFYPDDQESVGISKNSYVMPNEPTTSNLQVGLWPEKTSFLQKSDLTSKLHSSLKSAYHQYLQTSQSHSSEKGARFGGIFQEPVSKYFRVQDSPGRLSPFIENVDKQTLRCNPRPGKMVIYDLHESTYKQEVYCNIPDATSWSFPNGVLIKVVRGCWILYEKPHFRGQKCVLEEGEKVLNRDWILQNRRHPQRNFILGSLKRVLKDCSIPEIELFPQSDPACCPVYIQRAVPNLEELNISKSVSFTVKSGVWLAYPDINFKGQATVLEEDHGLFEISTAEMKSLHPLQMGGLKVEMPMNLKVIIYEKPHFHGQAKEFSEHIDSVPNFLKNNGDFHRIGSIRVIGGVWVAYEKEHFKGQQFLLEEGDFEDSNACGALSSPILSFRYLQANFIESSVTLFESDLESGKFIDITNQEISDLEEIGFGSKTRSIHVKSGVWVAYQQKFFCGEQYILEKGKYKCFFDWGGSNNIIMSIRPIQLEPLGINEPPHLLKAFSKPGFQGECIDFTEETSDLTSLMPCSFKVLRGCWLLYYQEDMFVNHCVLEEGLYADLTSCGCPASKVKSLKPIDYVFEEPSISLFALEHCEGRELHLEEAVNSVLNKDLHFYTQSVWVKSGLWIAYEGSNFLGRQILLRPNEIPNWTAFSRWKTIGSLRPMKQPAVYIRIKNRAQGEYLTVTGSLADTRATSVCISPYSGKNTQIWYYCRGLFKSKASDTCLDVIGGRDTPGAKVALWTEHGQFRQKWRLNKNGTISSYLSDQLVLDVKGGNYCDKTHVIVNQPLEGEETQKWDIEIL

SEQ ID NO: 9050 - protein, 131 aa, Homo sapiens
  Payload ID: 1833;
  Gene Symbol: CRYBG3;
  Gene Name: beta-gamma crystallin domain containing 3;
  ENSP ID: ENSP00000418420
MNKKKVFEEPSISLFALEHCEGRELHLEEAVNSVLNKDLHFYTQSVWVKSGLWIAYEGSNFLGRQILLRPNEIPNWTAFSRWKTIGSLRPMKQPAVYIRIKNRAQGEYLTVTGSLADTRATSVCISPYSGK

SEQ ID NO: 9051 - protein, 406 aa, Homo sapiens
  Payload ID: 1834;
  Gene Symbol: BHMT;
  Gene Name: betaine--homocysteine S- methyltransferase;
  Uniprot ID:  Q93088;
  ENSP ID: ENSP00000274353
MPPVGGKKAKKGILERLNAGEIVIGDGGFVFALEKRGYVKAGPWTPEAAVEHPEAVRQLHREFLRAGSNVMQTFTFYASEDKLENRGNYVLEKISGQEVNEAACDIARQVADEGDALVAGGVSQTPSYLSCKSETEVKKVFLQQLEVFMKKNVDFLIAEYFEHVEEAVWAVETLIASGKPVAATMCIGPEGDLHGVPPGECAVRLVKAGASIIGVNCHFDPTISLKTVKLMKEGLEAARLKAHLMSQPLAYHTPDCNKQGFIDLPEFPFGLEPRVATRWDIQKYAREAYNLGVRYIGGCCGFEPYHIRAIAEELAPERGFLPPASEKHGSWGSGLDMHTKPWVRARARKEYWENLRIASGRPYNPSMSKPDGWGVTKGTAELMQQKEATTEQQLKELFEKQKFKSQ

SEQ ID NO: 9052 - protein, 253 aa, Homo sapiens
  Payload ID: 1834;
  Gene Symbol: BHMT;
  Gene Name: betaine--homocysteine S- methyltransferase;
  ENSP ID: ENSP00000428240
MPPVGGKKAKKGILERLNAGEIVIGDGGFVFALEKRGYVKAGPWTPEAAVEHPEAGASIIGVNCHFDPTISLKTVKLMKEGLEAARLKAHLMSQPLAYHTPDCNKQGFIDLPEFPFGLEPRVATRWDIQKYAREAYNLGVRYIGGCCGFEPYHIRAIAEELAPERGFLPPASEKHGSWGSGLDMHTKPWVRARARKEYWENLRIASGRPYNPSMSKPDGWGVTKGTAELMQQKEATTEQQLKELFEKQKFKSQ

SEQ ID NO: 9053 - protein, 363 aa, Homo sapiens
  Payload ID: 1835;
  Gene Symbol: BHMT2;
  Gene Name: betaine--homocysteine S-methyltransferase 2;
  Uniprot ID:  Q9H2M3;
  ENSP ID: ENSP00000255192
MAPAGRPGAKKGILERLESGEVVIGDGSFLITLEKRGYVKAGLWTPEAVIEHPDAVRQLHMEFLRAGSNVMQTFTFSASEDNMESKWEDVNAAACDLAREVAGKGDALVAGGICQTSIYKYQKDEARIKKLFRQQLEVFAWKNVDFLIAEYFEHVEEAVWAVEVLKESDRPVAVTMCIGPEGDMHDITPGECAVRLVKAGASIVGVNCRFGPDTSLKTMELMKEGLEWAGLKAHLMVQPLGFHAPDCGKEGFVDLPEYPFGLESRVATRWDIQKYAREAYNLGVRYIGGCCGFEPYHIRAIAEELAPERGFLPPASEKHGSWGSGLDMHTKPWIRARARREYWENLLPASGRPFCPSLSKPDF

SEQ ID NO: 9054 - protein, 68 aa, Homo sapiens
  Payload ID: 1835;
  Gene Symbol: BHMT2;
  Gene Name: betaine--homocysteine S-methyltransferase 2;
  ENSP ID: ENSP00000428640
MEFLRAGSNVMQTFTFSASEDNMESKWEDVNAAACDLAREVAGKGDALVAGGICQTSIYKYQKDEARI

SEQ ID NO: 9055 - protein, 58 aa, Homo sapiens
  Payload ID: 1835;
  Gene Symbol: BHMT2;
  Gene Name: betaine--homocysteine S-methyltransferase 2;
  ENSP ID: ENSP00000430155
MAPAGRPGAKKGILERLESGEVVIGDGSDRTPRRSSSTSHGILESRIKCHADFYLFCQ

SEQ ID NO: 9056 - protein, 299 aa, Homo sapiens
  Payload ID: 1835;
  Gene Symbol: BHMT2;
  Gene Name: betaine--homocysteine S-methyltransferase 2;
  Uniprot ID:  Q9H2M3;
  ENSP ID: ENSP00000430278
MAPAGRPGAKKGILERLESGEVVIGDGSFLITLEKRGYVKAGLWTPEAVIEHPDAVRQLHMEFLRAGSNVMQTFTFSASEDNMESKYFEHVEEAVWAVEVLKESDRPVAVTMCIGPEGDMHDITPGECAVRLVKAGASIVGVNCRFGPDTSLKTMELMKEGLEWAGLKAHLMVQPLGFHAPDCGKEGFVDLPEYPFGLESRVATRWDIQKYAREAYNLGVRYIGGCCGFEPYHIRAIAEELAPERGFLPPASEKHGSWGSGLDMHTKPWIRARARREYWENLLPASGRPFCPSLSKPDF

SEQ ID NO: 9057 - protein, 501 aa, Homo sapiens
  Payload ID: 1836;
  Gene Symbol: BACE1;
  Gene Name: beta-site APP-cleaving enzyme 1;
  Uniprot ID:  P56817;
  ENSP ID: ENSP00000318585
MAQALPWLLLWMGAGVLPAHGTQHGIRLPLRSGLGGAPLGLRLPRETDEEPEEPGRRGSFVEMVDNLRGKSGQGYYVEMTVGSPPQTLNILVDTGSSNFAVGAAPHPFLHRYYQRQLSSTYRDLRKGVYVPYTQGKWEGELGTDLVSIPHGPNVTVRANIAAITESDKFFINGSNWEGILGLAYAEIARPDDSLEPFFDSLVKQTHVPNLFSLQLCGAGFPLNQSEVLASVGGSMIIGGIDHSLYTGSLWYTPIRREWYYEVIIVRVEINGQDLKMDCKEYNYDKSIVDSGTTNLRLPKKVFEAAVKSIKAASSTEKFPDGFWLGEQLVCWQAGTTPWNIFPVISLYLMGEVTNQSFRITILPQQYLRPVEDVATSQDDCYKFAISQSSTGTVMGAVIMEGFYVVFDRARKRIGFAVSACHVHDEFRTAAVEGPFVTLDMEDCGYNIPQTDESTLMTIAYVMAAICALFMLPLCLMVCQWRCLRCLRQQHDDFADDISLLK

SEQ ID NO: 9058 - protein, 432 aa, Homo sapiens
  Payload ID: 1836;
  Gene Symbol: BACE1;
  Gene Name: beta-site APP-cleaving enzyme 1;
  Uniprot ID:  P56817;
  ENSP ID: ENSP00000402228
MAQALPWLLLWMGAGVLPAHGTQHGIRLPLRSGLGGAPLGLRLPRETDEEPEEPGRRGSFVEMVDNLRGKSGQGYYVEMTVGSPPQTLNILVDTGSSNFAVGAAPHPFLHRYYQRQLSSTYRDLRKGVYVPYTQGKWEGELGTDLLCGAGFPLNQSEVLASVGGSMIIGGIDHSLYTGSLWYTPIRREWYYEVIIVRVEINGQDLKMDCKEYNYDKSIVDSGTTNLRLPKKVFEAAVKSIKAASSTEKFPDGFWLGEQLVCWQAGTTPWNIFPVISLYLMGEVTNQSFRITILPQQYLRPVEDVATSQDDCYKFAISQSSTGTVMGAVIMEGFYVVFDRARKRIGFAVSACHVHDEFRTAAVEGPFVTLDMEDCGYNIPQTDESTLMTIAYVMAAICALFMLPLCLMVCQWRCLRCLRQQHDDFADDISLLK

SEQ ID NO: 9059 - protein, 457 aa, Homo sapiens
  Payload ID: 1836;
  Gene Symbol: BACE1;
  Gene Name: beta-site APP-cleaving enzyme 1;
  Uniprot ID:  P56817;
  ENSP ID: ENSP00000403685
MAQALPWLLLWMGAGVLPAHGTQHGIRLPLRSGLGGAPLGLRLPRETDEEPEEPGRRGSFVEMVDNLRGKSGQGYYVEMTVGSPPQTLNILVDTGSSNFAVGAAPHPFLHRYYQRQLSSTYRDLRKGVYVPYTQGKWEGELGTDLPDDSLEPFFDSLVKQTHVPNLFSLQLCGAGFPLNQSEVLASVGGSMIIGGIDHSLYTGSLWYTPIRREWYYEVIIVRVEINGQDLKMDCKEYNYDKSIVDSGTTNLRLPKKVFEAAVKSIKAASSTEKFPDGFWLGEQLVCWQAGTTPWNIFPVISLYLMGEVTNQSFRITILPQQYLRPVEDVATSQDDCYKFAISQSSTGTVMGAVIMEGFYVVFDRARKRIGFAVSACHVHDEFRTAAVEGPFVTLDMEDCGYNIPQTDESTLMTIAYVMAAICALFMLPLCLMVCQWRCLRCLRQQHDDFADDISLLK

SEQ ID NO: 9060 - protein, 376 aa, Homo sapiens
  Payload ID: 1836;
  Gene Symbol: BACE1;
  Gene Name: beta-site APP-cleaving enzyme 1;
  Uniprot ID:  P56817;
  ENSP ID: ENSP00000422461
MVPFIYLQAHFTLCSGWSSTYRDLRKGVYVPYTQGKWEGELGTDLVSIPHGPNVTVRANIAAITESDKFFINGSNWEGILGLAYAEIARLCGAGFPLNQSEVLASVGGSMIIGGIDHSLYTGSLWYTPIRREWYYEVIIVRVEINGQDLKMDCKEYNYDKSIVDSGTTNLRLPKKVFEAAVKSIKAASSTEKFPDGFWLGEQLVCWQAGTTPWNIFPVISLYLMGEVTNQSFRITILPQQYLRPVEDVATSQDDCYKFAISQSSTGTVMGAVIMEGFYVVFDRARKRIGFAVSACHVHDEFRTAAVEGPFVTLDMEDCGYNIPQTDESTLMTIAYVMAAICALFMLPLCLMVCQWRCLRCLRQQHDDFADDISLLK

SEQ ID NO: 9061 - protein, 476 aa, Homo sapiens
  Payload ID: 1836;
  Gene Symbol: BACE1;
  Gene Name: beta-site APP-cleaving enzyme 1;
  Uniprot ID:  P56817;
  ENSP ID: ENSP00000424536
MAQALPWLLLWMGAGVLPAHGTQHGIRLPLRSGLGGAPLGLRLPRETDEEPEEPGRRGSFVEMVDNLRGKSGQGYYVEMTVGSPPQTLNILVDTGSSNFAVGAAPHPFLHRYYQRQLSSTYRDLRKGVYVPYTQGKWEGELGTDLVSIPHGPNVTVRANIAAITESDKFFINGSNWEGILGLAYAEIARLCGAGFPLNQSEVLASVGGSMIIGGIDHSLYTGSLWYTPIRREWYYEVIIVRVEINGQDLKMDCKEYNYDKSIVDSGTTNLRLPKKVFEAAVKSIKAASSTEKFPDGFWLGEQLVCWQAGTTPWNIFPVISLYLMGEVTNQSFRITILPQQYLRPVEDVATSQDDCYKFAISQSSTGTVMGAVIMEGFYVVFDRARKRIGFAVSACHVHDEFRTAAVEGPFVTLDMEDCGYNIPQTDESTLMTIAYVMAAICALFMLPLCLMVCQWRCLRCLRQQHDDFADDISLLK

SEQ ID NO: 9062 - protein, 467 aa, Homo sapiens
  Payload ID: 1836;
  Gene Symbol: BACE1;
  Gene Name: beta-site APP-cleaving enzyme 1;
  ENSP ID: ENSP00000431848
MAQALPWLLLWMGAGVLPAHGTQHGIRLPLRSGLGGAPLGLRLPRETDEEPEEPGRRGSFVEMVDNLRGKSGQGYYVEMTVGSPPQTLNILVDTGSSNFAVGAAPHPFLHRYYQRQLSSTYRDLRKGVYVPYTQGKWEGELGTDLVSIPHGPNVTVRANIAAITESDKFFINGSNWEGILGLAYAEIARPDDSLEPFFDSLVKQTHVPNLFSLQLCGAGFPLNQSEVLASVGGSMIIGGIDHSLYTGSLWYTPIRREWYYEVIIVRVEINGQDLKMDCKETEKFPDGFWLGEQLVCWQAGTTPWNIFPVISLYLMGEVTNQSFRITILPQQYLRPVEDVATSQDDCYKFAISQSSTGTVMGAVIMEGFYVVFDRARKRIGFAVSACHVHDEFRTAAVEGPFVTLDMEDCGYNIPQTDESTLMTIAYVMAAICALFMLPLCLMVCQWRCLRCLRQQHDDFADDISLLK

SEQ ID NO: 9063 - protein, 40 aa, Homo sapiens
  Payload ID: 1836;
  Gene Symbol: BACE1;
  Gene Name: beta-site APP-cleaving enzyme 1;
  ENSP ID: ENSP00000434486
MIIGGIDHSLYTGSLWYTPIRREWYYEVIIVRVEINGQDL

SEQ ID NO: 9064 - protein, 51 aa, Homo sapiens
  Payload ID: 1836;
  Gene Symbol: BACE1;
  Gene Name: beta-site APP-cleaving enzyme 1;
  ENSP ID: ENSP00000475171
MIIGGIDHSLYTGSLWYTPIRREWYYEVIIVRVEINGQDLKMDCKEYNYDK

SEQ ID NO: 9065 - protein, 401 aa, Homo sapiens
  Payload ID: 1836;
  Gene Symbol: BACE1;
  Gene Name: beta-site APP-cleaving enzyme 1;
  Uniprot ID:  P56817;
  ENSP ID: ENSP00000475405
MVPFIYLQAHFTLCSGWSSTYRDLRKGVYVPYTQGKWEGELGTDLVSIPHGPNVTVRANIAAITESDKFFINGSNWEGILGLAYAEIARPDDSLEPFFDSLVKQTHVPNLFSLQLCGAGFPLNQSEVLASVGGSMIIGGIDHSLYTGSLWYTPIRREWYYEVIIVRVEINGQDLKMDCKEYNYDKSIVDSGTTNLRLPKKVFEAAVKSIKAASSTEKFPDGFWLGEQLVCWQAGTTPWNIFPVISLYLMGEVTNQSFRITILPQQYLRPVEDVATSQDDCYKFAISQSSTGTVMGAVIMEGFYVVFDRARKRIGFAVSACHVHDEFRTAAVEGPFVTLDMEDCGYNIPQTDESTLMTIAYVMAAICALFMLPLCLMVCQWRCLRCLRQQHDDFADDISLLK

SEQ ID NO: 9066 - protein, 468 aa, Homo sapiens
  Payload ID: 1837;
  Gene Symbol: BACE2;
  Gene Name: beta-site APP-cleaving enzyme 2;
  Uniprot ID:  Q9Y5Z0;
  ENSP ID: ENSP00000327528
MGALARALLLPLLAQWLLRAAPELAPAPFTLPLRVAAATNRVVAPTPGPGTPAERHADGLALALEPALASPAGAANFLAMVDNLQGDSGRGYYLEMLIGTPPQKLQILVDTGSSNFAVAGTPHSYIDTYFDTERSSTYRSKGFDVTVKYTQGSWTGFVGEDLVTIPKGFNTSFLVNIATIFESENFFLPGIKWNGILGLAYATLAKPSSSLETFFDSLVTQANIPNVFSMQMCGAGLPVAGSGTNGGSLVLGGIEPSLYKGDIWYTPIKEEWYYQIEILKLEIGGQSLNLDCREYNADKAIVDSGTTLLRLPQKVFDAVVEAVARASLLYIQPMMGAGLNYECYRFGISPSTNALVIGATVMEGFYVIFDRAQKRVGFAASPCAEIAGAAVSEISGPFSTEDVASNCVPAQSLSEPILWIVSYALMSVCGAILLVLIVLLLLPFRCQRRPRDPEVVNDESSLVRHRWK

SEQ ID NO: 9067 - protein, 518 aa, Homo sapiens
  Payload ID: 1837;
  Gene Symbol: BACE2;
  Gene Name: beta-site APP-cleaving enzyme 2;
  Uniprot ID:  Q9Y5Z0;
  ENSP ID: ENSP00000332979
MGALARALLLPLLAQWLLRAAPELAPAPFTLPLRVAAATNRVVAPTPGPGTPAERHADGLALALEPALASPAGAANFLAMVDNLQGDSGRGYYLEMLIGTPPQKLQILVDTGSSNFAVAGTPHSYIDTYFDTERSSTYRSKGFDVTVKYTQGSWTGFVGEDLVTIPKGFNTSFLVNIATIFESENFFLPGIKWNGILGLAYATLAKPSSSLETFFDSLVTQANIPNVFSMQMCGAGLPVAGSGTNGGSLVLGGIEPSLYKGDIWYTPIKEEWYYQIEILKLEIGGQSLNLDCREYNADKAIVDSGTTLLRLPQKVFDAVVEAVARASLIPEFSDGFWTGSQLACWTNSETPWSYFPKISIYLRDENSSRSFRITILPQLYIQPMMGAGLNYECYRFGISPSTNALVIGATVMEGFYVIFDRAQKRVGFAASPCAEIAGAAVSEISGPFSTEDVASNCVPAQSLSEPILWIVSYALMSVCGAILLVLIVLLLLPFRCQRRPRDPEVVNDESSLVRHRWK

SEQ ID NO: 9068 - protein, 396 aa, Homo sapiens
  Payload ID: 1837;
  Gene Symbol: BACE2;
  Gene Name: beta-site APP-cleaving enzyme 2;
  Uniprot ID:  Q9Y5Z0;
  ENSP ID: ENSP00000333854
MGALARALLLPLLAQWLLRAAPELAPAPFTLPLRVAAATNRVVAPTPGPGTPAERHADGLALALEPALASPAGAANFLAMVDNLQGDSGRGYYLEMLIGTPPQKLQILVDTGSSNFAVAGTPHSYIDTYFDTERSSTYRSKGFDVTVKYTQGSWTGFVGEDLVTIPKGFNTSFLVNIATIFESENFFLPGIKWNGILGLAYATLAKPSSSLETFFDSLVTQANIPNVFSMQMCGAGLPVAGSGTNGGSLVLGGIEPSLYKGDIWYTPIKEEWYYQIEILKLEIGGQSLNLDCREYNADKAIVDSGTTLLRLPQKVFDAVVEAVARASLIPEFSDGFWTGSQLACWTNSETPWSYFPKISIYLRDENSSRSFRITILPQKLQVLQCLKFPGLSQQRM

SEQ ID NO: 9069 - protein, 191 aa, Homo sapiens
  Payload ID: 1838;
  Gene Symbol: BTRC;
  Gene Name: beta-transducin repeat containing E3 ubiquitin prt ligase;
  ENSP ID: ENSP00000359202
MPRSLWLGCSSLADSMPSLRCLYNPGTGALTAFQNSSEREDCNNGEPPRKIIPEKNSLRQTYNSCARLCLNQETVCLASTAMKTENCVAKTKLANGTSSMIVPKQRKLSASYEKEKELCVKYFEQWSESDQVEFVEHLISQMCHYQHGHINSYLKPMLQRDFITALPARGLDHIAENILSYLDAKSLCAAE

SEQ ID NO: 9070 - protein, 605 aa, Homo sapiens
  Payload ID: 1838;
  Gene Symbol: BTRC;
  Gene Name: beta-transducin repeat containing E3 ubiquitin prt ligase;
  Uniprot ID:  Q9Y297;
  ENSP ID: ENSP00000359206
MDPAEAVLQEKALKFMCSMPRSLWLGCSSLADSMPSLRCLYNPGTGALTAFQNSSEREDCNNGEPPRKIIPEKNSLRQTYNSCARLCLNQETVCLASTAMKTENCVAKTKLANGTSSMIVPKQRKLSASYEKEKELCVKYFEQWSESDQVEFVEHLISQMCHYQHGHINSYLKPMLQRDFITALPARGLDHIAENILSYLDAKSLCAAELVCKEWYRVTSDGMLWKKLIERMVRTDSLWRGLAERRGWGQYLFKNKPPDGNAPPNSFYRALYPKIIQDIETIESNWRCGRHSLQRIHCRSETSKGVYCLQYDDQKIVSGLRDNTIKIWDKNTLECKRILTGHTGSVLCLQYDERVIITGSSDSTVRVWDVNTGEMLNTLIHHCEAVLHLRFNNGMMVTCSKDRSIAVWDMASPTDITLRRVLVGHRAAVNVVDFDDKYIVSASGDRTIKVWNTSTCEFVRTLNGHKRGIACLQYRDRLVVSGSSDNTIRLWDIECGACLRVLEGHEELVRCIRFDNKRIVSGAYDGKIKVWDLVAALDPRAPAGTLCLRTLVEHSGRVFRLQFDEFQIVSSSHDDTILIWDFLNDPAAQAEPPRSPSRTYTYISR

SEQ ID NO: 9071 - protein, 579 aa, Homo sapiens
  Payload ID: 1838;
  Gene Symbol: BTRC;
  Gene Name: beta-transducin repeat containing E3 ubiquitin prt ligase;
  ENSP ID: ENSP00000377088
MDPAEAVLQEKALKFMCSMPRSLWLGCSSLADSMPSLRCLYNPGTGALTAFQTYNSCARLCLNQETVCLASTAMKTENCVAKTKLANGTSSMIVPKQRKLSASYEKEKELCVKYFEQWSESDQVEFVEHLISQMCHYQHGHINSYLKPMLQRDFITALPARGLDHIAENILSYLDAKSLCAAELVCKEWYRVTSDGMLWKKLIERMVRTDSLWRGLAERRGWGQYLFKNKPPDGNAPPNSFYRALYPKIIQDIETIESNWRCGRHSLQRIHCRSETSKGVYCLQYDDQKIVSGLRDNTIKIWDKNTLECKRILTGHTGSVLCLQYDERVIITGSSDSTVRVWDVNTGEMLNTLIHHCEAVLHLRFNNGMMVTCSKDRSIAVWDMASPTDITLRRVLVGHRAAVNVVDFDDKYIVSASGDRTIKVWNTSTCEFVRTLNGHKRGIACLQYRDRLVVSGSSDNTIRLWDIECGACLRVLEGHEELVRCIRFDNKRIVSGAYDGKIKVWDLVAALDPRAPAGTLCLRTLVEHSGRVFRLQFDEFQIVSSSHDDTILIWDFLNDPAAQAEPPRSPSRTYTYISR

SEQ ID NO: 9072 - protein, 569 aa, Homo sapiens
  Payload ID: 1838;
  Gene Symbol: BTRC;
  Gene Name: beta-transducin repeat containing E3 ubiquitin prt ligase;
  Uniprot ID:  Q9Y297;
  ENSP ID: ENSP00000385339
MDPAEAVLQEKALKFMNSSEREDCNNGEPPRKIIPEKNSLRQTYNSCARLCLNQETVCLASTAMKTENCVAKTKLANGTSSMIVPKQRKLSASYEKEKELCVKYFEQWSESDQVEFVEHLISQMCHYQHGHINSYLKPMLQRDFITALPARGLDHIAENILSYLDAKSLCAAELVCKEWYRVTSDGMLWKKLIERMVRTDSLWRGLAERRGWGQYLFKNKPPDGNAPPNSFYRALYPKIIQDIETIESNWRCGRHSLQRIHCRSETSKGVYCLQYDDQKIVSGLRDNTIKIWDKNTLECKRILTGHTGSVLCLQYDERVIITGSSDSTVRVWDVNTGEMLNTLIHHCEAVLHLRFNNGMMVTCSKDRSIAVWDMASPTDITLRRVLVGHRAAVNVVDFDDKYIVSASGDRTIKVWNTSTCEFVRTLNGHKRGIACLQYRDRLVVSGSSDNTIRLWDIECGACLRVLEGHEELVRCIRFDNKRIVSGAYDGKIKVWDLVAALDPRAPAGTLCLRTLVEHSGRVFRLQFDEFQIVSSSHDDTILIWDFLNDPAAQAEPPRSPSRTYTYISR

SEQ ID NO: 9073 - protein, 241 aa, Homo sapiens
  Payload ID: 1839;
  Gene Symbol: BID;
  Gene Name: BH3 interacting domain death agonist;
  Uniprot ID:  P55957;
  ENSP ID: ENSP00000318822
MCSGAGVMMARWAARGRAGWRSTVRILSPLGHCEPGVSRSCRAAQAMDCEVNNGSSLRDECITNLLVFGFLQSCSDNSFRRELDALGHELPVLAPQWEGYDELQTDGNRSSHSRLGRIEADSESQEDIIRNIARHLAQVGDSMDRSIPPGLVNGLALQLRNTSRSEEDRNRDLATALEQLLQAYPRDMEKEKTMLVLALLLAKKVASHTPSLLRDVFHTTVNFINQNLRTYVRSLARNGMD

SEQ ID NO: 9074 - protein, 137 aa, Homo sapiens
  Payload ID: 1839;
  Gene Symbol: BID;
  Gene Name: BH3 interacting domain death agonist;
  Uniprot ID:  P55957;
  ENSP ID: ENSP00000344594
MDCEVNNGSSLRDECITNLLVFGFLQSCSDNSFRRELDALGHELPVLAPQWEGYDELQTDGNRSSHSRLGRIEAGASDNNTASAEEETEAAGSVAVERGLHGAATVILKVKKTSSGILPGTSPRSGTAWTVASLRAW

SEQ ID NO: 9075 - protein, 99 aa, Homo sapiens
  Payload ID: 1839;
  Gene Symbol: BID;
  Gene Name: BH3 interacting domain death agonist;
  Uniprot ID:  P55957;
  ENSP ID: ENSP00000382667
MDRSIPPGLVNGLALQLRNTSRSEEDRNRDLATALEQLLQAYPRDMEKEKTMLVLALLLAKKVASHTPSLLRDVFHTTVNFINQNLRTYVRSLARNGMD

SEQ ID NO: 9076 - protein, 99 aa, Homo sapiens; identical to SEQ ID NO: 9075
  Payload ID: 1839;
  Gene Symbol: BID;
  Gene Name: BH3 interacting domain death agonist;
  Uniprot ID:  P55957;
  ENSP ID: ENSP00000382669

SEQ ID NO: 9077 - protein, 195 aa, Homo sapiens
  Payload ID: 1839;
  Gene Symbol: BID;
  Gene Name: BH3 interacting domain death agonist;
  Uniprot ID:  P55957;
  ENSP ID: ENSP00000382674
MDCEVNNGSSLRDECITNLLVFGFLQSCSDNSFRRELDALGHELPVLAPQWEGYDELQTDGNRSSHSRLGRIEADSESQEDIIRNIARHLAQVGDSMDRSIPPGLVNGLALQLRNTSRSEEDRNRDLATALEQLLQAYPRDMEKEKTMLVLALLLAKKVASHTPSLLRDVFHTTVNFINQNLRTYVRSLARNGMD

SEQ ID NO: 9078 - protein, 195 aa, Homo sapiens; identical to SEQ ID NO: 9077
  Payload ID: 1839;
  Gene Symbol: BID;
  Gene Name: BH3 interacting domain death agonist;
  Uniprot ID:  P55957;
  ENSP ID: ENSP00000449236

SEQ ID NO: 9079 - protein, 99 aa, Homo sapiens; identical to SEQ ID NO: 9075
  Payload ID: 1839;
  Gene Symbol: BID;
  Gene Name: BH3 interacting domain death agonist;
  Uniprot ID:  P55957;
  ENSP ID: ENSP00000477773

SEQ ID NO: 9080 - protein, 195 aa, Homo sapiens; identical to SEQ ID NO: 9077
  Payload ID: 1839;
  Gene Symbol: BID;
  Gene Name: BH3 interacting domain death agonist;
  Uniprot ID:  P55957;
  ENSP ID: ENSP00000480414

SEQ ID NO: 9081 - protein, 122 aa, Homo sapiens
  Payload ID: 1839;
  Gene Symbol: BID;
  Gene Name: BH3 interacting domain death agonist;
  ENSP ID: ENSP00000481991
MDCEVNNGSSLRDECITNLLVFGFLQSCSDNSFRRELDALGHELPVLAPQWEGYDELQTDGNRSSHSRLGRIEAGASDNNTASAEEETEAAGSVAVERGLHGAATVVLGQGQHGGCAPEEED

SEQ ID NO: 9082 - protein, 99 aa, Homo sapiens; identical to SEQ ID NO: 9075
  Payload ID: 1839;
  Gene Symbol: BID;
  Gene Name: BH3 interacting domain death agonist;
  Uniprot ID:  P55957;
  ENSP ID: ENSP00000483534

SEQ ID NO: 9083 - protein, 99 aa, Homo sapiens; identical to SEQ ID NO: 9075
  Payload ID: 1839;
  Gene Symbol: BID;
  Gene Name: BH3 interacting domain death agonist;
  Uniprot ID:  P55957;
  ENSP ID: ENSP00000483709

SEQ ID NO: 9084 - protein, 108 aa, Homo sapiens
  Payload ID: 1840;
  Gene Symbol: BLID;
  Gene Name: BH3-like motif containing, cell death inducer;
  Uniprot ID:  Q8IZY5;
  ENSP ID: ENSP00000453153
MVTLLPIEGQEIHFFEILESECVLYTGWIERASGSSIYPEAKARLPLEALLGSNKEPMLPKETVLSLKRYNLGSSAMKRNVPGHVLQRPSYLTRIQVTLLCNSSAEAL

SEQ ID NO: 9085 - protein, 975 aa, Homo sapiens
  Payload ID: 1841;
  Gene Symbol: BICD1;
  Gene Name: bicaudal D homolog 1 (Drosophila);
  Uniprot ID:  Q96G01;
  ENSP ID: ENSP00000281474
MAAEEVLQTVDHYKTEIERLTKELTETTHEKIQAAEYGLVVLEEKLTLKQQYDELEAEYDSLKQELEQLKEAFGQSFSIHRKVAEDGETREETLLQESASKEAYYLGKILEMQNELKQSRAVVTNVQAENERLTAVVQDLKENNEMVELQRIRMKDEIREYKFREARLLQDYTELEEENITLQKLVSTLKQNQVEYEGLKHEIKRFEEETVLLNSQLEDAIRLKEIAEHQLEEALETLKNEREQKNNLRKELSQYISLNDNHISISVDGLKFAEDGSEPNNDDKMNGHIHGPLVKLNGDYRTPTLRKGESLNPVSDLFSELNISEIQKLKQQLMQVEREKAILLANLQESQTQLEHTKGALTEQHERVHRLTEHVNAMRGLQSSKELKAELDGEKGRDSGEEAHDYEVDINGLEILECKYRVAVTEVIDLKAEIKALKEKYNKSVENYTDEKAKYESKIQMYDEQVTSLEKTTKESGEKMAHMEKELQKMTSIANENHSTLNTAQDELVTFSEELAQLYHHVCLCNNETPNRVMLDYYRQSRVTRSGSLKGPDDPRGLLSPRLARRGVSSPVETRTSSEPVAKESTEASKEPSPTKTPTISPVITAPPSSPVLDTSDIRKEPMNIYNLNAIIRDQIKHLQKAVDRSLQLSRQRAAARELAPMIDKDKEALMEEILKLKSLLSTKREQIATLRAVLKANKQTAEVALANLKNKYENEKAMVTETMTKLRNELKALKEDAATFSSLRAMFATRCDEYVTQLDEMQRQLAAAEDEKKTLNTLLRMAIQQKLALTQRLEDLEFDHEQSRRSKGKLGKSKIGSPKVSGEASVTVPTIDTYLLHSQGPQTPNIRVSSGTQRKRQFSPSLCDQSRPRTSGASYLQNLLRVPPDPTSTESFLLKGPPSMSEFIQGHRLSKEKRLTVAPPDCQQPAASVPPQCSQLAGRQDCPTVSPDTALPEEQPHSSSQCAPLHCLSKPPHP

SEQ ID NO: 9086 - protein, 827 aa, Homo sapiens
  Payload ID: 1841;
  Gene Symbol: BICD1;
  Gene Name: bicaudal D homolog 1 (Drosophila);
  ENSP ID: ENSP00000379107
MAAEEVLQTVDHYKTEIERLTKELTETTHEKIQAAEYGLVVLEEKLTLKQQYDELEAEYDSLKQELEQLKEAFGQSFSIHRKVAEDGETREETLLQESASKEAYYLGKILEMQNELKQSRAVVTNVQAENERLTAVVQDLKENNEMVELQRIRMKDEIREYKFREARLLQDYTELEEENITLQKLVSTLKQNQVEYEGLKHEIKRFEEETVLLNSQLEDAIRLKEIAEHQLEEALETLKNEREQKNNLRKELSQYISLNDNHISISVDGLKFAEDGSEPNNDDKMNGHIHGPLVKLNGDYRTPTLRKGESLNPVSDLFSELNISEIQKLKQQLMQVEREKAILLANLQESQTQLEHTKGALTEQHERVHRLTEHVNAMRGLQSSKELKAELDGEKGRDSGEEAHDYEVDINGLEILECKYRVAVTEVIDLKAEIKALKEKYNKSVENYTDEKAKYESKIQMYDEQVTSLEKTTKESGEKMAHMEKELQKMTSIANENHSTLNTAQDELVTFSEELAQLYHHVCLCNNETPNRVMLDYYRQSRVTRSGSLKGPDDPRGLLSPRLARRGVSSPVETRTSSEPVAKESTEASKEPSPTKTPTISPVITAPPSSPVLDTSDIRKEPMNIYNLNAIIRDQIKHLQKAVDRSLQLSRQRAAARELAPMIDKDKEALMEEILKLKSLLSTKREQIATLRAVLKANKQTAEVALANLKNKYENEKAMVTETMTKLRNELKALKEDAATFSSLRAMFATRCDEYVTQLDEMQRQLAAAEDEKKTLNTLLRMAIQQKLALTQRLEDLEFDHEQSRRSKGKLGKSKIGSPKTIFTFPL

SEQ ID NO: 9087 - protein, 835 aa, Homo sapiens
  Payload ID: 1841;
  Gene Symbol: BICD1;
  Gene Name: bicaudal D homolog 1 (Drosophila);
  Uniprot ID:  Q96G01;
  ENSP ID: ENSP00000446793
MAAEEVLQTVDHYKTEIERLTKELTETTHEKIQAAEYGLVVLEEKLTLKQQYDELEAEYDSLKQELEQLKEAFGQSFSIHRKVAEDGETREETLLQESASKEAYYLGKILEMQNELKQSRAVVTNVQAENERLTAVVQDLKENNEMVELQRIRMKDEIREYKFREARLLQDYTELEEENITLQKLVSTLKQNQVEYEGLKHEIKRFEEETVLLNSQLEDAIRLKEIAEHQLEEALETLKNEREQKNNLRKELSQYISLNDNHISISVDGLKFAEDGSEPNNDDKMNGHIHGPLVKLNGDYRTPTLRKGESLNPVSDLFSELNISEIQKLKQQLMQVEREKAILLANLQESQTQLEHTKGALTEQHERVHRLTEHVNAMRGLQSSKELKAELDGEKGRDSGEEAHDYEVDINGLEILECKYRVAVTEVIDLKAEIKALKEKYNKSVENYTDEKAKYESKIQMYDEQVTSLEKTTKESGEKMAHMEKELQKMTSIANENHSTLNTAQDELVTFSEELAQLYHHVCLCNNETPNRVMLDYYRQSRVTRSGSLKGPDDPRGLLSPRLARRGVSSPVETRTSSEPVAKESTEASKEPSPTKTPTISPVITAPPSSPVLDTSDIRKEPMNIYNLNAIIRDQIKHLQKAVDRSLQLSRQRAAARELAPMIDKDKEALMEEILKLKSLLSTKREQIATLRAVLKANKQTAEVALANLKNKYENEKAMVTETMTKLRNELKALKEDAATFSSLRAMFATRCDEYVTQLDEMQRQLAAAEDEKKTLNTLLRMAIQQKLALTQRLEDLEFDHEQSRRSKGKLGKSKIGSPKIVSSLLPPYRHSAHN

SEQ ID NO: 9088 - protein, 93 aa, Homo sapiens
  Payload ID: 1841;
  Gene Symbol: BICD1;
  Gene Name: bicaudal D homolog 1 (Drosophila);
  ENSP ID: ENSP00000447238
MAAEEVLQTVDHYKTEIERLTKELTETTHEKIQAAEYGLVVLEEKLTLKQQYDELEAEYDSLKQELEQLKEGPLLLKDVIYDILNQLAFQFSV

SEQ ID NO: 9089 - protein, 79 aa, Homo sapiens
  Payload ID: 1841;
  Gene Symbol: BICD1;
  Gene Name: bicaudal D homolog 1 (Drosophila);
  ENSP ID: ENSP00000447663
MAAEEVLQTVDHYKTEIERLTKELTETTHEKIQAAEYGLVVLEEKLTLKQQYDELEAEYDSLKQELEQLKEGPLLVRED

SEQ ID NO: 9090 - protein, 93 aa, Homo sapiens
  Payload ID: 1841;
  Gene Symbol: BICD1;
  Gene Name: bicaudal D homolog 1 (Drosophila);
  Uniprot ID:  Q96G01;
  ENSP ID: ENSP00000448933
MAAEEVLQTVDHYKTEIERLTKELTETTHEKIQAAEYGLVVLEEKLTLKQQYDELEAEYDSLKQELEQLKEVSCLSPLPFLALTPPTRKAHSS

SEQ ID NO: 9091 - protein, 69 aa, Homo sapiens
  Payload ID: 1841;
  Gene Symbol: BICD1;
  Gene Name: bicaudal D homolog 1 (Drosophila);
  ENSP ID: ENSP00000475837
  MOD_RES (1)..(1): Any amino acid
XSRQRAAARELAPMIDKDKEALMEEILKLKSLLSTKREQIATLRAVLKANKQAQCLLMKSVNAYEAPSI

SEQ ID NO: 9092 - protein, 173 aa, Homo sapiens
  Payload ID: 1841;
  Gene Symbol: BICD1;
  Gene Name: bicaudal D homolog 1 (Drosophila);
  ENSP ID: ENSP00000481877
  MOD_RES (1)..(1): Any amino acid
XAEVALANLKNKYENEKAMVTETMTKLRNELKALKEDAATFSSLRAMFATRCDEYVTQLDEMQRQLAAAEDEKKTLNTLLRMAIQQKLALTQRLEDLEFDHEQSRRSKGKLGKSKIGSPKVSGEASVTVPTIDTYLLHSQGPQTPNIRVSSGTQRKRYACSDLHSTVQWPDFS

SEQ ID NO: 9093 - protein, 855 aa, Homo sapiens
  Payload ID: 1842;
  Gene Symbol: BICD2;
  Gene Name: bicaudal D homolog 2 (Drosophila);
  Uniprot ID:  Q8TD16;
  ENSP ID: ENSP00000349351
MSAPSEEEEYARLVMEAQPEWLRAEVKRLSHELAETTREKIQAAEYGLAVLEEKHQLKLQFEELEVDYEAIRSEMEQLKEAFGQAHTNHKKVAADGESREESLIQESASKEQYYVRKVLELQTELKQLRNVLTNTQSENERLASVAQELKEINQNVEIQRGRLRDDIKEYKFREARLLQDYSELEEENISLQKQVSVLRQNQVEFEGLKHEIKRLEEETEYLNSQLEDAIRLKEISERQLEEALETLKTEREQKNSLRKELSHYMSINDSFYTSHLHVSLDGLKFSDDAAEPNNDAEALVNGFEHGGLAKLPLDNKTSTPKKEGLAPPSPSLVSDLLSELNISEIQKLKQQLMQMEREKAGLLATLQDTQKQLEHTRGSLSEQQEKVTRLTENLSALRRLQASKERQTALDNEKDRDSHEDGDYYEVDINGPEILACKYHVAVAEAGELREQLKALRSTHEAREAQHAEEKGRYEAEGQALTEKVSLLEKASRQDRELLARLEKELKKVSDVAGETQGSLSVAQDELVTFSEELANLYHHVCMCNNETPNRVMLDYYREGQGGAGRTSPGGRTSPEARGRRSPILLPKGLLAPEAGRADGGTGDSSPSPGSSLPSPLSDPRREPMNIYNLIAIIRDQIKHLQAAVDRTTELSRQRIASQELGPAVDKDKEALMEEILKLKSLLSTKREQITTLRTVLKANKQTAEVALANLKSKYENEKAMVTETMMKLRNELKALKEDAATFSSLRAMFATRCDEYITQLDEMQRQLAAAEDEKKTLNSLLRMAIQQKLALTQRLELLELDHEQTRRGRAKAAPKTKPATPSVSHTCACASDRAEGTGLANQVFCSEKHSIYCD

SEQ ID NO: 9094 - protein, 824 aa, Homo sapiens
  Payload ID: 1842;
  Gene Symbol: BICD2;
  Gene Name: bicaudal D homolog 2 (Drosophila);
  Uniprot ID:  Q8TD16;
  ENSP ID: ENSP00000364662
MSAPSEEEEYARLVMEAQPEWLRAEVKRLSHELAETTREKIQAAEYGLAVLEEKHQLKLQFEELEVDYEAIRSEMEQLKEAFGQAHTNHKKVAADGESREESLIQESASKEQYYVRKVLELQTELKQLRNVLTNTQSENERLASVAQELKEINQNVEIQRGRLRDDIKEYKFREARLLQDYSELEEENISLQKQVSVLRQNQVEFEGLKHEIKRLEEETEYLNSQLEDAIRLKEISERQLEEALETLKTEREQKNSLRKELSHYMSINDSFYTSHLHVSLDGLKFSDDAAEPNNDAEALVNGFEHGGLAKLPLDNKTSTPKKEGLAPPSPSLVSDLLSELNISEIQKLKQQLMQMEREKAGLLATLQDTQKQLEHTRGSLSEQQEKVTRLTENLSALRRLQASKERQTALDNEKDRDSHEDGDYYEVDINGPEILACKYHVAVAEAGELREQLKALRSTHEAREAQHAEEKGRYEAEGQALTEKVSLLEKASRQDRELLARLEKELKKVSDVAGETQGSLSVAQDELVTFSEELANLYHHVCMCNNETPNRVMLDYYREGQGGAGRTSPGGRTSPEARGRRSPILLPKGLLAPEAGRADGGTGDSSPSPGSSLPSPLSDPRREPMNIYNLIAIIRDQIKHLQAAVDRTTELSRQRIASQELGPAVDKDKEALMEEILKLKSLLSTKREQITTLRTVLKANKQTAEVALANLKSKYENEKAMVTETMMKLRNELKALKEDAATFSSLRAMFATRCDEYITQLDEMQRQLAAAEDEKKTLNSLLRMAIQQKLALTQRLELLELDHEQTRRGRAKAAPKTKPATPSL

SEQ ID NO: 9095 - protein, 506 aa, Homo sapiens
  Payload ID: 1843;
  Gene Symbol: BICC1;
  Gene Name: BicC family RNA binding prt 1;
  ENSP ID: ENSP00000263103
MEQLDVFISIKPKPKQPSKSVIVKSVERNALNMYEARKCLLGLESSGVTIATSPSPASCPAGLACPSLDILASAGLGLTGLGLLGPTTLSLNTSTTPNSLLNALNSSVSPLQSPSSGTPSPTLWAPPLANTSSATGFSAIPHLMIPSTAQATLTNILLSGVPTYGHTAPSPPPGLTPVDVHINSMQTEGKKISAALNGHAQSPDIKYGAISTSSLGEKVLSANHGDPSIQTSGSEQTSPKSSPTEGCNDAFVEVGMPRSPSHSGNAGDLKQMMCPSKVSCAKRQTVELLQGTKNSHLHSTDRLLSDPELSATESPLADKKAPGSERAAERAAAAQQNSERAHLAPRSSYVNMQAFDYEQKKLLATKAMLKKPVVTEVRTPTNTWSGLGFSKSMPAETIKELRRANHVSYKPTMTTTYEGSSMSLSRSNSREHLGGGSESDNWRDRNGIGPGSHSEFAASIGSPKRKQNKSSERCVLCTLLGIPRLECVYLGWSITDCGLSDFKCLV

SEQ ID NO: 9096 - protein, 974 aa, Homo sapiens
  Payload ID: 1843;
  Gene Symbol: BICC1;
  Gene Name: BicC family RNA binding prt 1;
  Uniprot ID:  Q9H694;
  ENSP ID: ENSP00000362993
MAAQGEPGYLAAQSDPGSNSERSTDSPVPGSEDDLVAGATLHSPEWSEERFRVDRKKLEAMLQAAAEGKGRSGEDFFQKIMEETNTQIAWPSKLKIGAKSKKDPHIKVSGKKEDVKEAKEMIMSVLDTKSNRVTLKMDVSHTEHSHVIGKGGNNIKKVMEETGCHIHFPDSNRNNQAEKSNQVSIAGQPAGVESARVRIRELLPLVLMFELPIAGILQPVPDPNSPSIQHISQTYNISVSFKQRSRMYGATVIVRGSQNNTSAVKEGTAMLLEHLAGSLASAIPVSTQLDIAAQHHLFMMGRNGSNIKHIMQRTGAQIHFPDPSNPQKKSTVYLQGTIESVCLARQYLMGCLPLVLMFDMKEEIEVDPQFIAQLMEQLDVFISIKPKPKQPSKSVIVKSVERNALNMYEARKCLLGLESSGVTIATSPSPASCPAGLACPSLDILASAGLGLTGLGLLGPTTLSLNTSTTPNSLLNALNSSVSPLQSPSSGTPSPTLWAPPLANTSSATGFSAIPHLMIPSTAQATLTNILLSGVPTYGHTAPSPPPGLTPVDVHINSMQTEGKKISAALNGHAQSPDIKYGAISTSSLGEKVLSANHGDPSIQTSGSEQTSPKSSPTEGCNDAFVEVGMPRSPSHSGNAGDLKQMMCPSKVSCAKRQTVELLQGTKNSHLHSTDRLLSDPELSATESPLADKKAPGSERAAERAAAAQQNSERAHLAPRSSYVNMQAFDYEQKKLLATKAMLKKPVVTEVRTPTNTWSGLGFSKSMPAETIKELRRANHVSYKPTMTTTYEGSSMSLSRSNSREHLGGGSESDNWRDRNGIGPGSHSEFAASIGSPKRKQNKSTEHYLSSSNYMDCISSLTGSNGCNLNSSFKGSDLPELFSKLGLGKYTDVFQQQEIDLQTFLTLTDQDLKELGITTFGARRKMLLAISELNKNRRKLFESPNARTSFLEGGASGRLPRQYHSDIASVSGRW

SEQ ID NO: 9097 - protein, 450 aa, Homo sapiens
  Payload ID: 1844;
  Gene Symbol: BFAR;
  Gene Name: bifunctional apoptosis regulator;
  Uniprot ID:  Q9NZS9;
  ENSP ID: ENSP00000261658
MEEPQKSYVNTMDLERDEPLKSTGPQISVSEFSCHCCYDILVNPTTLNCGHSFCRHCLALWWASSKKTECPECREKWEGFPKVSILLRDAIEKLFPDAIRLRFEDIQQNNDIVQSLAAFQKYGNDQIPLAPNTGRANQQMGGGFFSGVLTALTGVAVVLLVYHWSSRESEHDLLVHKAVAKWTAEEVVLWLEQLGPWASLYRERFLSERVNGRLLLTLTEEEFSKTPYTIENSSHRRAILMELERVKALGVKPPQNLWEYKAVNPGRSLFLLYALKSSPRLSLLYLYLFDYTDTFLPFIHTICPLQEDSSGEDIVTKLLDLKEPTWKQWREFLVKYSFLPYQLIAEFAWDWLEVHYWTSRFLIINAMLLSVLELFSFWRIWSRSELKTVPQRMWSHFWKVSTQGLFVAMFWPLIPQFVCNCLFYWALYFNPIINIDLVVKELRRLETQVL

SEQ ID NO: 9098 - protein, 325 aa, Homo sapiens
  Payload ID: 1844;
  Gene Symbol: BFAR;
  Gene Name: bifunctional apoptosis regulator;
  ENSP ID: ENSP00000454476
MEEPQKSYVNTMDLERDEPLKSTGPQISVSEFSCHCCYDILVNPTTLNCGHSFCRHCLALWWASSKKTECPECREKWEGFPKVSILLRLLLTLTEEEFSKTPYTIENSSHRRAILMELERVKALGVKPPQNLWEYKAVNPGRSLFLLYALKSSPRLSLLYLYLFDYTDTFLPFIHTICPLQEDSSGEDIVTKLLDLKEPTWKQWREFLVKYSFLPYQLIAEFAWDWLEVHYWTSRFLIINAMLLSVLELFSFWRIWSRSELKTVPQRMWSHFWKVSTQGLFVAMFWPLIPQFVCNCLFYWALYFNPIINIDLVVKELRRLETQVL

SEQ ID NO: 9099 - protein, 102 aa, Homo sapiens
  Payload ID: 1844;
  Gene Symbol: BFAR;
  Gene Name: bifunctional apoptosis regulator;
  ENSP ID: ENSP00000454606
LYLFDYTDTFLPFIHTICPLQEDSSGEDIVTKLLDLKEPTWKQWREFLVKYSFLPYQLIAEFAWDWLEVHYWTSRFLIINAMLLSVLELFSFWRIWSRSELK

SEQ ID NO: 9100 - protein, 89 aa, Homo sapiens
  Payload ID: 1844;
  Gene Symbol: BFAR;
  Gene Name: bifunctional apoptosis regulator;
  ENSP ID: ENSP00000455428
MEEPQKSYVNTMDLERDEPLKSTGPQISVSEFSCHCCYDILVNPTTLNCGHSFCRHCLALWWASSKKTECPECREKWEGFPKVSILLRL

SEQ ID NO: 9101 - protein, 109 aa, Homo sapiens
  Payload ID: 1844;
  Gene Symbol: BFAR;
  Gene Name: bifunctional apoptosis regulator;
  ENSP ID: ENSP00000456358
MEEPQKSYVNTMDLERDEPLKSTGPQISVSEFSCHCCYDILVNPTTLNCGHSFCRHCLALWWASSKKTECPECREKWEGFPKVSILLRDAIEKLFPDAIRLRFEDIQQN

SEQ ID NO: 9102 - protein, 206 aa, Homo sapiens
  Payload ID: 1844;
  Gene Symbol: BFAR;
  Gene Name: bifunctional apoptosis regulator;
  ENSP ID: ENSP00000456869
  MOD_RES (1)..(1): Any amino acid
XGGGFFSGVLTALTGVAAVNPGRSLFLLYALKSSPRLSLLYLYLFDYTDTFLPFIHTICPLQEDSSGEDIVTKLLDLKEPTWKQWREFLVKYSFLPYQLIAEFAWDWLEVHYWTSRFLIINAMLLSVLELFSFWRIWSRSELKTVPQRMWSHFWKVSTQGLFVAMFWPLIPQFVCNCLFYWALYFNPIINIDLVVKELRRLETQVL

SEQ ID NO: 9103 - protein, 97 aa, Homo sapiens
  Payload ID: 1844;
  Gene Symbol: BFAR;
  Gene Name: bifunctional apoptosis regulator;
  ENSP ID: ENSP00000457165
DSSGEDIVTKLLDLKEPTWKQWREFLVKYSFLPYQLIAEFAWDWLEVHYWTSRFLIINAMLLSVLELFSFWRIWSRSELNVNTAGVRCHLGRQALQK

SEQ ID NO: 9104 - protein, 141 aa, Homo sapiens
  Payload ID: 1844;
  Gene Symbol: BFAR;
  Gene Name: bifunctional apoptosis regulator;
  ENSP ID: ENSP00000457561
MEEPQKSYVNTMDLERDEPLKSTGPQISVSEFSCHCCYDILVNPTTLNCGHSFCRHCLALWWASSKKTECPECREKWEGFPKVSILLRWSCSSITGAAGNLNTTSWSTRLWPNGRRKKLSSGWSSWALGHLFTGKGFYLNE

SEQ ID NO: 9105 - protein, 450 aa, Homo sapiens; identical to SEQ ID NO: 9097
  Payload ID: 1844;
  Gene Symbol: BFAR;
  Gene Name: bifunctional apoptosis regulator;
  Uniprot ID:  Q9NZS9;
  ENSP ID: ENSP00000478190

SEQ ID NO: 9106 - protein, 213 aa, Homo sapiens
  Payload ID: 1844;
  Gene Symbol: BFAR;
  Gene Name: bifunctional apoptosis regulator;
  ENSP ID: ENSP00000481225
MEEPQKSYVNTMDLERDEPLKSTGPQISVSEFSCHCCYDILVNPTTLNCGHSFCRHCLALWWASSKKTECPECREKWEGFPKVSILLRDAIEKLFPDAIRLRFEDIQQNNDIVQSLAAFQKYGNDQIPLAPNTGRANQQMGGGFFSGVLTALTGVAVVLLVYHWSSRESEHDLLVHKAVAKWTAEEVVLWLEQLGPWASLYRERFLSERVNGR

SEQ ID NO: 9107 - protein, 325 aa, Homo sapiens; identical to SEQ ID NO: 9098
  Payload ID: 1844;
  Gene Symbol: BFAR;
  Gene Name: bifunctional apoptosis regulator;
  ENSP ID: ENSP00000487878

SEQ ID NO: 9108 - protein, 89 aa, Homo sapiens; identical to SEQ ID NO: 9100
  Payload ID: 1844;
  Gene Symbol: BFAR;
  Gene Name: bifunctional apoptosis regulator;
  ENSP ID: ENSP00000487995

SEQ ID NO: 9109 - protein, 213 aa, Homo sapiens; identical to SEQ ID NO: 9106
  Payload ID: 1844;
  Gene Symbol: BFAR;
  Gene Name: bifunctional apoptosis regulator;
  ENSP ID: ENSP00000488076

SEQ ID NO: 9110 - protein, 141 aa, Homo sapiens; identical to SEQ ID NO: 9104
  Payload ID: 1844;
  Gene Symbol: BFAR;
  Gene Name: bifunctional apoptosis regulator;
  ENSP ID: ENSP00000488143

SEQ ID NO: 9111 - protein, 206 aa, Homo sapiens; identical to SEQ ID NO: 9102
  Payload ID: 1844;
  Gene Symbol: BFAR;
  Gene Name: bifunctional apoptosis regulator;
  ENSP ID: ENSP00000488487
  MOD_RES (1)..(1): Any amino acid

SEQ ID NO: 9112 - protein, 97 aa, Homo sapiens; identical to SEQ ID NO: 9103
  Payload ID: 1844;
  Gene Symbol: BFAR;
  Gene Name: bifunctional apoptosis regulator;
  ENSP ID: ENSP00000488492

SEQ ID NO: 9113 - protein, 102 aa, Homo sapiens; identical to SEQ ID NO: 9099
  Payload ID: 1844;
  Gene Symbol: BFAR;
  Gene Name: bifunctional apoptosis regulator;
  ENSP ID: ENSP00000488540

SEQ ID NO: 9114 - protein, 109 aa, Homo sapiens; identical to SEQ ID NO: 9101
  Payload ID: 1844;
  Gene Symbol: BFAR;
  Gene Name: bifunctional apoptosis regulator;
  ENSP ID: ENSP00000488837

SEQ ID NO: 9115 - protein, 368 aa, Homo sapiens
  Payload ID: 1845;
  Gene Symbol: BGN;
  Gene Name: biglycan;
  Uniprot ID:  P21810;
  ENSP ID: ENSP00000327336
MWPLWRLVSLLALSQALPFEQRGFWDFTLDDGPFMMNDEEASGADTSGVLDPDSVTPTYSAMCPFGCHCHLRVVQCSDLGLKSVPKEISPDTTLLDLQNNDISELRKDDFKGLQHLYALVLVNNKISKIHEKAFSPLRKLQKLYISKNHLVEIPPNLPSSLVELRIHDNRIRKVPKGVFSGLRNMNCIEMGGNPLENSGFEPGAFDGLKLNYLRISEAKLTGIPKDLPETLNELHLDHNKIQAIELEDLLRYSKLYRLGLGHNQIRMIENGSLSFLPTLRELHLDNNKLARVPSGLPDLKLLQVVYLHSNNITKVGVNDFCPMGFGVKRAYYNGISLFNNPVPYWEVQPATFRCVTDRLAIQFGNYKK

SEQ ID NO: 9116 - protein, 238 aa, Homo sapiens
  Payload ID: 1845;
  Gene Symbol: BGN;
  Gene Name: biglycan;
  ENSP ID: ENSP00000402525
MWPLWRLVSLLALSQALPFEQRGFWDFTLDDGPFMMNDEEASGADTSGVLDPDSVTPTYSAMCPFGCHCHLRVVQCSDLGLKSVPKEISPDTTLLDLQNNDISELRKDDFKGLQHLYVRSWEEPAGLQQRAGVRALVLVNNKISKIHEKAFSPLRKLQKLYISKNHLVEIPPNLPSSLVELRIHDNRIRKVPKGVFSGLRNMNCIEMGGNPLENSGFEPGAFDGLKLNYLRISEAKLT

SEQ ID NO: 9117 - protein, 418 aa, Homo sapiens
  Payload ID: 1846;
  Gene Symbol: BAAT;
  Gene Name: bile acid CoA:amino acid N-acyltransferase;
  Uniprot ID:  Q14032;
  ENSP ID: ENSP00000259407
MIQLTATPVSALVDEPVHIRATGLIPFQMVSFQASLEDENGDMFYSQAHYRANEFGEVDLNHASSLGGDYMGVHPMGLFWSLKPEKLLTRLLKRDVMNRPFQVQVKLYDLELIVNNKVASAPKASLTLERWYVAPGVTRIKVREGRLRGALFLPPGEGLFPGVIDLFGGLGGLLEFRASLLASRGFASLALAYHNYEDLPRKPEVTDLEYFEEAANFLLRHPKVFGSGVGVVSVCQGVQIGLSMAIYLKQVTATVLINGTNFPFGIPQVYHGQIHQPLPHSAQLISTNALGLLELYRTFETTQVGASQYLFPIEEAQGQFLFIVGEGDKTINSKAHAEQAIGQLKRHGKNNWTLLSYPGAGHLIEPPYSPLCCASTTHDLRLHWGGEVIPHAAAQEHAWKEIQRFLRKHLIPDVTSQL

SEQ ID NO: 9118 - protein, 418 aa, Homo sapiens; identical to SEQ ID NO: 9117
  Payload ID: 1846;
  Gene Symbol: BAAT;
  Gene Name: bile acid CoA:amino acid N-acyltransferase;
  Uniprot ID:  Q14032;
  ENSP ID: ENSP00000378491

SEQ ID NO: 9119 - protein, 418 aa, Homo sapiens; identical to SEQ ID NO: 9117
  Payload ID: 1846;
  Gene Symbol: BAAT;
  Gene Name: bile acid CoA:amino acid N-acyltransferase;
  Uniprot ID:  Q14032;
  ENSP ID: ENSP00000484063

SEQ ID NO: 9120 - protein, 296 aa, Homo sapiens
  Payload ID: 1847;
  Gene Symbol: BLVRA;
  Gene Name: biliverdin reductase A;
  Uniprot ID:  P53004;
  ENSP ID: ENSP00000265523
MNAEPERKFGVVVVGVGRAGSVRMRDLRNPHPSSAFLNLIGFVSRRELGSIDGVQQISLEDALSSQEVEVAYICSESSSHEDYIRQFLNAGKHVLVEYPMTLSLAAAQELWELAEQKGKVLHEEHVELLMEEFAFLKKEVVGKDLLKGSLLFTAGPLEEERFGFPAFSGISRLTWLVSLFGELSLVSATLEERKEDQYMKMTVCLETEKKSPLSWIEEKGPGLKRNRYLSFHFKSGSLENVPNVGVNKNIFLKDQNIFVQKLLGQFSEKELAAEKKRILHCLGLAEEIQKYCCSRK

SEQ ID NO: 9121 - protein, 296 aa, Homo sapiens; identical to SEQ ID NO: 9120
  Payload ID: 1847;
  Gene Symbol: BLVRA;
  Gene Name: biliverdin reductase A;
  Uniprot ID:  P53004;
  ENSP ID: ENSP00000385757

SEQ ID NO: 9122 - protein, 102 aa, Homo sapiens
  Payload ID: 1847;
  Gene Symbol: BLVRA;
  Gene Name: biliverdin reductase A;
  ENSP ID: ENSP00000412005
MNAEPERKFGVVVVGVGRAGSVRMRDLRNPHPSSAFLNLIGFVSRRELGSIDGVQQISLEDALSSQEVEVAYICSESSSHEDYIRQFLNAGKHVLVEYPMTL

SEQ ID NO: 9123 - protein, 206 aa, Homo sapiens
  Payload ID: 1848;
  Gene Symbol: BLVRB;
  Gene Name: biliverdin reductase B;
  Uniprot ID:  P30043;
  ENSP ID: ENSP00000263368
MAVKKIAIFGATGQTGLTTLAQAVQAGYEVTVLVRDSSRLPSEGPRPAHVVVGDVLQAADVDKTVAGQDAVIVLLGTRNDLSPTTVMSEGARNIVAAMKAHGVDKVVACTSAFLLWDPTKVPPRLQAVTDDHIRMHKVLRESGLKYVAVMPPHIGDQPLTGAYTVTLDGRGPSRVISKHDLGHFMLRCLTTDEYDGHSTYPSHQYQ

SEQ ID NO: 9124 - protein, 154 aa, Homo sapiens
  Payload ID: 1848;
  Gene Symbol: BLVRB;
  Gene Name: biliverdin reductase B;
  ENSP ID: ENSP00000470619
MAVKKIAIFGATGQTGLTTLAQAVQAGYEVTVLVRDSSRLPSEGPRPAHVVVGDVLQAADVDKTVAGQDAVIVLLGTRNDLSPTTVMSEGARNIVAAMKAHGVDKVVACTSGGWWDHGGGAELGGTGEAAQGPLKGDAEAIPCYCAFTEHQLCA

SEQ ID NO: 9125 - protein, 163 aa, Homo sapiens
  Payload ID: 1848;
  Gene Symbol: BLVRB;
  Gene Name: biliverdin reductase B;
  ENSP ID: ENSP00000471720
MAVKKIAIFGATGQTGLTTLAQAVQAGYEVTVLVRDSSRLPSEGPRPAHVVVGDVLQAADVDKTVAGQDAVIVLLGTRNDLSPTTVMSEGARNIVAAMKAHGVDKVVACTSGDQPLTGAYTVTLDGRGPSRVISKHDLGHFMLRCLTTDEYDGHSTYPSHQYQ

SEQ ID NO: 9126 - protein, 132 aa, Homo sapiens
  Payload ID: 1849;
  Gene Symbol: BSPH1;
  Gene Name: binder of sperm prt homolog 1;
  Uniprot ID:  Q075Z2;
  ENSP ID: ENSP00000341762
MGSLMLLFVETTRNSSACIFPVILNELSSTVETITHFPEVTDGECVFPFHYKNGTYYDCIKSKARHKWCSLNKTYEGYWKFCSAEDFANCVFPFWYRRLIYWECTDDGEAFGKKWCSLTKNFNKDRIWKYCE

SEQ ID NO: 9127 - protein, 45 aa, Homo sapiens
  Payload ID: 1850;
  Gene Symbol: BLOC1S1;
  Gene Name: biogenesis of lysosomal organelles complex-1, subunit 1;
  ENSP ID: ENSP00000446619
  MOD_RES (1)..(1): Any amino acid
XSFRSRRGPGVPSPQPDVTMLSRLLKEHQAKQNERKELQVWPRPT

SEQ ID NO: 9128 - protein, 153 aa, Homo sapiens
  Payload ID: 1850;
  Gene Symbol: BLOC1S1;
  Gene Name: biogenesis of lysosomal organelles complex-1, subunit 1;
  Uniprot ID:  P78537;
  ENSP ID: ENSP00000447537
MAPGSRGERSSFRSRRGPGVPSPQPDVTMLSRLLKEHQAKQNERKELQEKRRREAITAATCLTEALVDHLNVGVAQAYMNQRKLDHEVKTLQVQAAQFAKQTGQWIGMVENFNQALKEIGDVENWARSIELDMRTIATALEYVYKGQLQSAPS

SEQ ID NO: 9129 - protein, 64 aa, Homo sapiens
  Payload ID: 1850;
  Gene Symbol: BLOC1S1;
  Gene Name: biogenesis of lysosomal organelles complex-1, subunit 1;
  ENSP ID: ENSP00000448171
MNQRKLDHEVKTLQVQAAQFAKQTGQWIGMVENFNQALKVGHTPYLTTPILGPHWLPPVRLPQV

SEQ ID NO: 9130 - protein, 75 aa, Homo sapiens
  Payload ID: 1850;
  Gene Symbol: BLOC1S1;
  Gene Name: biogenesis of lysosomal organelles complex-1, subunit 1;
  ENSP ID: ENSP00000448605
MNQRKLDHEVKTLQVQAAQFAKQTGQWIGMVENFNQALKEIGDVENWARSIELDMRTIATALEYVYKGQLQSAPS

SEQ ID NO: 9131 - protein, 75 aa, Homo sapiens; identical to SEQ ID NO: 9130
  Payload ID: 1850;
  Gene Symbol: BLOC1S1;
  Gene Name: biogenesis of lysosomal organelles complex-1, subunit 1;
  ENSP ID: ENSP00000450218

SEQ ID NO: 9132 - protein, 142 aa, Homo sapiens
  Payload ID: 1850;
  Gene Symbol: BLOC1S1;
  Gene Name: biogenesis of lysosomal organelles complex-1, subunit 1;
  ENSP ID: ENSP00000450328
MAPGSRGERSSFRSRRGPGVPSPQPDVTMLSRLLKEHQAKQNERKELQEKRRREAITAATCLTEALVDHLNVGVAQAYMNQRKLDHEVKTLQVQAAQFAKQTGQWIGMVENFNQALKVGHTPYLTTPILGPHWLPPVRLPQV

SEQ ID NO: 9133 - protein, 142 aa, Homo sapiens
  Payload ID: 1851;
  Gene Symbol: BLOC1S2;
  Gene Name: biogenesis of lysosomal organelles complex-1, subunit 2;
  Uniprot ID:  Q6QNY1;
  ENSP ID: ENSP00000359398
MAAAAEGVLATRSDEPARDDAAVETAEEAKEPAEADITELCRDMFSKMATYLTGELTATSEDYKLLENMNKLTSLKYLEMKDIAINISRNLKDLNQKYAGLQPYLDQINVIEEQVAALEQAAYKLDAYSKKLEAKYKKLEKR

SEQ ID NO: 9134 - protein, 99 aa, Homo sapiens
  Payload ID: 1851;
  Gene Symbol: BLOC1S2;
  Gene Name: biogenesis of lysosomal organelles complex-1, subunit 2;
  Uniprot ID:  Q6QNY1;
  ENSP ID: ENSP00000410865
MFSKMATYLTGELTATSEDYKLLENMNKLTSLKYLEMKDIAINISRNLKDLNQKYAGLQPYLDQINVIEEQVAALEQAAYKLDAYSKKLEAKYKKLEKR

SEQ ID NO: 9135 - protein, 117 aa, Homo sapiens
  Payload ID: 1851;
  Gene Symbol: BLOC1S2;
  Gene Name: biogenesis of lysosomal organelles complex-1, subunit 2;
  ENSP ID: ENSP00000464387
CRDMFSKMATYLTGELTATSEDYKLLENMNKLTSLKYLEMKDIAINISRNLKDLNQKYAGLQPYLDQINVIEEQVAALEQAAYKLDAYSKKLGNRFYFCFDVIKTASCQHILSKHNS

SEQ ID NO: 9136 - protein, 99 aa, Homo sapiens; identical to SEQ ID NO: 9134
  Payload ID: 1851;
  Gene Symbol: BLOC1S2;
  Gene Name: biogenesis of lysosomal organelles complex-1, subunit 2;
  Uniprot ID:  Q6QNY1;
  ENSP ID: ENSP00000481847

SEQ ID NO: 9137 - protein, 95 aa, Homo sapiens
  Payload ID: 1851;
  Gene Symbol: BLOC1S2;
  Gene Name: biogenesis of lysosomal organelles complex-1, subunit 2;
  ENSP ID: ENSP00000484340
MRLPRKSLEVATSEDYKLLENMNKLTSLKYLEMKDIAINISRNLKDLNQKYAGLQPYLDQINVIEEQVAALEQAAYKLDAYSKKLEAKYKKLEKR

SEQ ID NO: 9138 - protein, 202 aa, Homo sapiens
  Payload ID: 1852;
  Gene Symbol: BLOC1S3;
  Gene Name: biogenesis of lysosomal organelles complex-1, subunit 3;
  Uniprot ID:  Q6QNY0;
  ENSP ID: ENSP00000393840
MASQGRRRRPLRRPETVVPGEATETDSERSASSSEEEELYLGPSGPTRGRPTGLRVAGEAAETDSEPEPEPEPTAAPRDLPPLVVQRESAEEAWGTEEAPAPAPARSLLQLRLAESQARLDHDVAAAVSGVYRRAGRDVAALASRLAAAQAAGLAAAHSVRLARGDLCALAERLDIVAGCRLLPDIRGVPGTEPEKDPGPRA

SEQ ID NO: 9139 - protein, 78 aa, Homo sapiens
  Payload ID: 1852;
  Gene Symbol: BLOC1S3;
  Gene Name: biogenesis of lysosomal organelles complex-1, subunit 3;
  ENSP ID: ENSP00000466798
AAAVSGVYRRAGRDVAALASRLAAAQAAGLAAAHSVRLARGDLCALAERLDIVAGCRLLPDIRGVPGTEPEKDPGPRA

SEQ ID NO: 9140 - protein, 202 aa, Homo sapiens; identical to SEQ ID NO: 9138
  Payload ID: 1852;
  Gene Symbol: BLOC1S3;
  Gene Name: biogenesis of lysosomal organelles complex-1, subunit 3;
  Uniprot ID:  Q6QNY0;
  ENSP ID: ENSP00000468281

SEQ ID NO: 9141 - protein, 217 aa, Homo sapiens
  Payload ID: 1853;
  Gene Symbol: BLOC1S4;
  Gene Name: biogenesis of lysosomal organelles complex-1, subunit 4, cappuccino;
  Uniprot ID:  Q9NUP1;
  ENSP ID: ENSP00000318128
MEGSFSDGGALPEGLAEEAEPQGAAWSGDSGTVSQSHSSASGPWEDEGAEDGAPGRDLPLLRRAAAGYAACLLPGAGARPEVEALDASLEDLLTRVDEFVGMLDMLRGDSSHVVSEGVPRIHAKAAEMRRIYSRIDRLEAFVRMVGGRVARMEEQVTKAEAELGTFPRAFKKLLHTMNVPSLFSKSAPSRPQQAGYEAPVLFRTEDYFPCCSERPQL

SEQ ID NO: 9142 - protein, 114 aa, Homo sapiens
  Payload ID: 1854;
  Gene Symbol: BLOC1S5;
  Gene Name: biogenesis of lysosomal organelles complex-1, subunit 5, muted;
  ENSP ID: ENSP00000244777
MSGGGTETPVGCEAAPGGGSKKRDSLGTAGSAHLIIKDLGEIHSRLLDHRPVIQGETRYFVKEFEEKRGLREMRVLENLKNMIHETNEHTLPKCRDTMRDSLSQVLQRYEELSC

SEQ ID NO: 9143 - protein, 187 aa, Homo sapiens
  Payload ID: 1854;
  Gene Symbol: BLOC1S5;
  Gene Name: biogenesis of lysosomal organelles complex-1, subunit 5, muted;
  Uniprot ID:  Q8TDH9;
  ENSP ID: ENSP00000380598
MSGGGTETPVGCEAAPGGGSKKRDSLGTAGSAHLIIKDLGEIHSRLLDHRPVIQGETRYFVKEFEEKRGLREMRVLENLKNMIHETNEHTLPKCRDTMRDSLSQVLQRLQAANDSVCRLQQREQERKKIHSDHLVASEKQHMLQWDNFMKEQPNKRAEVDEEHRKAMERLKEQYAEMEKDLAKFSTF

SEQ ID NO: 9144 - protein, 90 aa, Homo sapiens
  Payload ID: 1854;
  Gene Symbol: BLOC1S5;
  Gene Name: biogenesis of lysosomal organelles complex-1, subunit 5, muted;
  ENSP ID: ENSP00000445215
MSGGGTETPVGCEAAPGGGSKKRDSLGTAGSAHLIIKDLGEIHSRLLDHRPVIQGETRYFVKEFECKQLMTQSVDSNRGNRNEKRFIVTT

SEQ ID NO: 9145 - protein, 68 aa, Homo sapiens
  Payload ID: 1854;
  Gene Symbol: BLOC1S5;
  Gene Name: biogenesis of lysosomal organelles complex-1, subunit 5, muted;
  ENSP ID: ENSP00000486019
MSGGGTETPVGCEAAPGGGSKKRDSLGTAGSAHLIIKDLGEIHSRLLDHRPVIQGETRYFVKEFENED

SEQ ID NO: 9146 - protein, 172 aa, Homo sapiens
  Payload ID: 1855;
  Gene Symbol: BLOC1S6;
  Gene Name: biogenesis of lysosomal organelles complex-1, subunit 6, pallidin;
  Uniprot ID:  Q9UL45;
  ENSP ID: ENSP00000220531
MSVPGPSSPDGALTRPPYCLEAGEPTPGLSDTSPDEGLIEDLTIEDKAVEQLAEGLLSHYLPDLQRSKQALQELTQNQVVLLDTLEQEISKFKECHSMLDINALFAEAKHYHAKLVNIRKEMLMLHEKTSKLKKRALKLQQKRQKEELEREQQREKEFEREKQLTARPAKRM

SEQ ID NO: 9147 - protein, 43 aa, Homo sapiens
  Payload ID: 1855;
  Gene Symbol: BLOC1S6;
  Gene Name: biogenesis of lysosomal organelles complex-1, subunit 6, pallidin;
  ENSP ID: ENSP00000454438
MSVPGPSSPDGALTRPPYCLEAGEPTPEPSCIVRHTGTRDFKI

SEQ ID NO: 9148 - protein, 46 aa, Homo sapiens
  Payload ID: 1855;
  Gene Symbol: BLOC1S6;
  Gene Name: biogenesis of lysosomal organelles complex-1, subunit 6, pallidin;
  ENSP ID: ENSP00000454537
MLDINALKRALKLQQKRQKEELEREQQREKEFEREKQLTARPAKRM

SEQ ID NO: 9149 - protein, 86 aa, Homo sapiens
  Payload ID: 1855;
  Gene Symbol: BLOC1S6;
  Gene Name: biogenesis of lysosomal organelles complex-1, subunit 6, pallidin;
  ENSP ID: ENSP00000454638
MSVPGPSSPDGALTRPPYCLEAGEPTPGLSDTSPDEGLIEDLTIEDKAVEQLAEGLLSHYLPDLQRSKQALQELTLLRLNTIMPSW

SEQ ID NO: 9150 - protein, 21 aa, Homo sapiens
  Payload ID: 1855;
  Gene Symbol: BLOC1S6;
  Gene Name: biogenesis of lysosomal organelles complex-1, subunit 6, pallidin;
  ENSP ID: ENSP00000454715
MLDINALFAEAKHYHAKLVNI

SEQ ID NO: 9151 - protein, 113 aa, Homo sapiens
  Payload ID: 1855;
  Gene Symbol: BLOC1S6;
  Gene Name: biogenesis of lysosomal organelles complex-1, subunit 6, pallidin;
  ENSP ID: ENSP00000454803
MQKSSIKYWQTESSSTSKSLSTMIKQNQVVLLDTLEQEISKFKECHSMLDINALFAEAKHYHAKLVNIRKEMLMLHEKTSKLKKRALKLQQKRQKEELEREQQREKEFEREKQ

SEQ ID NO: 9152 - protein, 75 aa, Homo sapiens
  Payload ID: 1855;
  Gene Symbol: BLOC1S6;
  Gene Name: biogenesis of lysosomal organelles complex-1, subunit 6, pallidin;
  ENSP ID: ENSP00000455021
MLDINALFAEAKHYHAKLVNIRKEMLMLHEKTSKLKKRALKLQQKRQKEELEREQQREKEFEREKQLTARPAKRM

SEQ ID NO: 9153 - protein, 57 aa, Homo sapiens
  Payload ID: 1855;
  Gene Symbol: BLOC1S6;
  Gene Name: biogenesis of lysosomal organelles complex-1, subunit 6, pallidin;
  ENSP ID: ENSP00000455439
  MOD_RES (1)..(1): Any amino acid
XLGTGLSDTSPDEGLIEDLTIEDKAVEQLAEGLLSHYLPDLQRSKQALQELTTKLYC

SEQ ID NO: 9154 - protein, 75 aa, Homo sapiens; identical to SEQ ID NO: 9152
  Payload ID: 1855;
  Gene Symbol: BLOC1S6;
  Gene Name: biogenesis of lysosomal organelles complex-1, subunit 6, pallidin;
  ENSP ID: ENSP00000455599

SEQ ID NO: 9155 - protein, 131 aa, Homo sapiens
  Payload ID: 1855;
  Gene Symbol: BLOC1S6;
  Gene Name: biogenesis of lysosomal organelles complex-1, subunit 6, pallidin;
  ENSP ID: ENSP00000456067
MSVPGPSSPDGALTRPPYCLEAGEPTPAFFKIFRQNQVVLLDTLEQEISKFKECHSMLDINALFAEAKHYHAKLVNIRKEMLMLHEKTSKLKKRALKLQQKRQKEELEREQQREKEFEREKQLTARPAKRM

SEQ ID NO: 9156 - protein, 75 aa, Homo sapiens; identical to SEQ ID NO: 9152
  Payload ID: 1855;
  Gene Symbol: BLOC1S6;
  Gene Name: biogenesis of lysosomal organelles complex-1, subunit 6, pallidin;
  ENSP ID: ENSP00000456152

SEQ ID NO: 9157 - protein, 80 aa, Homo sapiens
  Payload ID: 1855;
  Gene Symbol: BLOC1S6;
  Gene Name: biogenesis of lysosomal organelles complex-1, subunit 6, pallidin;
  Uniprot ID:  Q9UL45;
  ENSP ID: ENSP00000456624
MSVPGPSSPDGALTRPPYCLEAGEPTPGLSDTSPDEGLIEDLTIEDKAVEQLAEGLLSHYLPDLQRSKQALQELTTKLYC

SEQ ID NO: 9158 - protein, 177 aa, Homo sapiens
  Payload ID: 1855;
  Gene Symbol: BLOC1S6;
  Gene Name: biogenesis of lysosomal organelles complex-1, subunit 6, pallidin;
  ENSP ID: ENSP00000456851
MGGTEVPRGSFVLGVQLKAVDGEAILSLCVDSGLSDTSPDEGLIEDLTIEDKAVEQLAEGLLSHYLPDLQRSKQALQELTQNQVVLLDTLEQEISKFKECHSMLDINALFAEAKHYHAKLVNIRKEMLMLHEKTSKLKKRALKLQQKRQKEELEREQQREKEFEREKQLTARPAKRM

SEQ ID NO: 9159 - protein, 75 aa, Homo sapiens; identical to SEQ ID NO: 9152
  Payload ID: 1855;
  Gene Symbol: BLOC1S6;
  Gene Name: biogenesis of lysosomal organelles complex-1, subunit 6, pallidin;
  ENSP ID: ENSP00000457077

SEQ ID NO: 9160 - protein, 85 aa, Homo sapiens
  Payload ID: 1855;
  Gene Symbol: BLOC1S6;
  Gene Name: biogenesis of lysosomal organelles complex-1, subunit 6, pallidin;
  ENSP ID: ENSP00000457478
MSVPGPSSPDGALTRPPYCLEAGEPTPGLSDTSPDEGLIEDLTIEDKAVEQLAEGLLSHYLPDLQRSKQALQELTLDLKYDVEYP

SEQ ID NO: 9161 - protein, 129 aa, Homo sapiens
  Payload ID: 1856;
  Gene Symbol: BOD1;
  Gene Name: biorientation of chromosomes in cell division 1;
  Uniprot ID:  Q96IK1;
  ENSP ID: ENSP00000285908
MADGGGGGGTGAVGGGGTSQASAGAATGATGASGGGGPINPASLPPGDPQLIALIVEQLKSRGLFDSFRRDCLADVDTKPAYQNLRQKVDNFVSTHLDKQEWNPTMNKNQLRNGLRQSVVQIRQTPFES

SEQ ID NO: 9162 - protein, 185 aa, Homo sapiens
  Payload ID: 1856;
  Gene Symbol: BOD1;
  Gene Name: biorientation of chromosomes in cell division 1;
  Uniprot ID:  Q96IK1;
  ENSP ID: ENSP00000309644
MADGGGGGGTGAVGGGGTSQASAGAATGATGASGGGGPINPASLPPGDPQLIALIVEQLKSRGLFDSFRRDCLADVDTKPAYQNLRQKVDNFVSTHLDKQEWNPTMNKNQLRNGLRQSVVQSGMLEAGVDRIISQVVDPKLNHIFRPQIERAIHEFLAAQKKAAVPAPPPEPEGQDPPAPSQDTS

SEQ ID NO: 9163 - protein, 41 aa, Homo sapiens
  Payload ID: 1856;
  Gene Symbol: BOD1;
  Gene Name: biorientation of chromosomes in cell division 1;
  ENSP ID: ENSP00000417641
MNKNQLRNGLRQSVVQSGMLEAGVDRIISQVVDPKLNHIFR

SEQ ID NO: 9164 - protein, 118 aa, Homo sapiens
  Payload ID: 1856;
  Gene Symbol: BOD1;
  Gene Name: biorientation of chromosomes in cell division 1;
  ENSP ID: ENSP00000420005
  MOD_RES (1)..(1): Any amino acid
XLALLGPAGAVAPSTRPRCLPATRSSSLSSWSSSRAGAFLTASAGTAWPTWTPRSGMLEAGVDRIISQVVDPKLNHIFRPQIERAIHEFLAAQKKAAVPAPPPEPEGQDPPAPSQDTS

SEQ ID NO: 9165 - protein, 85 aa, Homo sapiens
  Payload ID: 1856;
  Gene Symbol: BOD1;
  Gene Name: biorientation of chromosomes in cell division 1;
  ENSP ID: ENSP00000420337
MADGGGGGGTGAVGGGGTSQASAGAATGATGASGGGGPINPASLPPGDPQLIALIVEQLKSRGLFDSFRRDCLADVDTKNTPDTF

SEQ ID NO: 9166 - protein, 3051 aa, Homo sapiens
  Payload ID: 1857;
  Gene Symbol: BOD1L1;
  Gene Name: biorientation of chromosomes in cell division 1-like 1;
  Uniprot ID:  Q8NFC6;
  ENSP ID: ENSP00000040738
MATNPQPQPPPPAPPPPPPQPQPQPPPPPPGPGAGPGAGGAGGAGAGAGDPQLVAMIVNHLKSQGLFDQFRRDCLADVDTKPAYQNLRQRVDNFVANHLATHTWSPHLNKNQLRNNIRQQVLKSGMLESGIDRIISQVVDPKINHTFRPQVEKAVHEFLATLNHKEEGSGNTAPDDEKPDTSLITQGVPTPGPSANVANDAMSILETITSLNQEASAARASTETSNAKTSERASKKLPSQPTTDTSTDKERTSEDMADKEKSTADSGGEGLETAPKSEEFSDLPCPVEEIKNYTKEHNNLILLNKDVQQESSEQKNKSTDKGEKKPDSNEKGERKKEKKEKTEKKFDHSKKSEDTQKVKDEKQAKEKEVESLKLPSEKNSNKAKTVEGTKEDFSLIDSDVDGLTDITVSSVHTSDLSSFEEDTEEEVVTSDSMEEGEITSDDEEKNKQNKTKTQTSDSSEGKTKSVRHAYVHKPYLYSKYYSDSDDELTVEQRRQSIAKEKEERLLRRQINREKLEEKRKQKAEKTKSSKTKGQGRSSVDLEESSTKSLEPKAARIKEVLKERKVLEKKVALSKKRKKDSRNVEENSKKKQQYEEDSKETLKTSEHCEKEKISSSKELKHVHAKSEPSKPARRLSESLHVVDENKNESKLEREHKRRTSTPVIMEGVQEETDTRDVKRQVERSEICTEEPQKQKSTLKNEKHLKKDDSETPHLKSLLKKEVKSSKEKPEREKTPSEDKLSVKHKYKGDCMHKTGDETELHSSEKGLKVEENIQKQSQQTKLSSDDKTERKSKHRNERKLSVLGKDGKPVSEYIIKTDENVRKENNKKERRLSAEKTKAEHKSRRSSDSKIQKDSLGSKQHGITLQRRSESYSEDKCDMDSTNMDSNLKPEEVVHKEKRRTKSLLEEKLVLKSKSKTQGKQVKVVETELQEGATKQATTPKPDKEKNTEENDSEKQRKSKVEDKPFEETGVEPVLETASSSAHSTQKDSSHRAKLPLAKEKYKSDKDSTSTRLERKLSDGHKSRSLKHSSKDIKKKDENKSDDKDGKEVDSSHEKARGNSSLMEKKLSRRLCENRRGSLSQEMAKGEEKLAANTLSTPSGSSLQRPKKSGDMTLIPEQEPMEIDSEPGVENVFEVSKTQDNRNNNSQQDIDSENMKQKTSATVQKDELRTCTADSKATAPAYKPGRGTGVNSNSEKHADHRSTLTKKMHIQSAVSKMNPGEKEPIHRGTTEVNIDSETVHRMLLSAPSENDRVQKNLKNTAAEEHVAQGDATLEHSTNLDSSPSLSSVTVVPLRESYDPDVIPLFDKRTVLEGSTASTSPADHSALPNQSLTVRESEVLKTSDSKEGGEGFTVDTPAKASITSKRHIPEAHQATLLDGKQGKVIMPLGSKLTGVIVENENITKEGGLVDMAKKENDLNAEPNLKQTIKATVENGKKDGIAVDHVVGLNTEKYAETVKLKHKRSPGKVKDISIDVERRNENSEVDTSAGSGSAPSVLHQRNGQTEDVATGPRRAEKTSVATSTEGKDKDVTLSPVKAGPATTTSSETRQSEVALPCTSIEADEGLIIGTHSRNNPLHVGAEASECTVFAAAEEGGAVVTEGFAESETFLTSTKEGESGECAVAESEDRAADLLAVHAVKIEANVNSVVTEEKDDAVTSAGSEEKCDGSLSRDSEIVEGTITFISEVESDGAVTSAGTEIRAGSISSEEVDGSQGNMMRMGPKKETEGTVTCTGAEGRSDNFVICSVTGAGPREERMVTGAGVVLGDNDAPPGTSASQEGDGSVNDGTEGESAVTSTGITEDGEGPASCTGSEDSSEGFAISSESEENGESAMDSTVAKEGTNVPLVAAGPCDDEGIVTSTGAKEEDEEGEDVVTSTGRGNEIGHASTCTGLGEESEGVLICESAEGDSQIGTVVEHVEAEAGAAIMNANENNVDSMSGTEKGSKDTDICSSAKGIVESSVTSAVSGKDEVTPVPGGCEGPMTSAASDQSDSQLEKVEDTTISTGLVGGSYDVLVSGEVPECEVAHTSPSEKEDEDIITSVENEECDGLMATTASGDITNQNSLAGGKNQGKVLIISTSTTNDYTPQVSAITDVEGGLSDALRTEENMEGTRVTTEEFEAPMPSAVSGDDSQLTASRSEEKDECAMISTSIGEEFELPISSATTIKCAESLQPVAAAVEERATGPVLISTADFEGPMPSAPPEAESPLASTSKEEKDECALISTSIAEECEASVSGVVVESENERAGTVMEEKDGSGIISTSSVEDCEGPVSSAVPQEEGDPSVTPAEEMGDTAMISTSTSEGCEAVMIGAVLQDEDRLTITRVEDLSDAAIISTSTAECMPISASIDRHEENQLTADNPEGNGDLSATEVSKHKVPMPSLIAENNCRCPGPVRGGKEPGPVLAVSTEEGHNGPSVHKPSAGQGHPSAVCAEKEEKHGKECPEIGPFAGRGQKESTLHLINAEEKNVLLNSLQKEDKSPETGTAGGSSTASYSAGRGLEGNANSPAHLRGPEQTSGQTAKDPSVSIRYLAAVNTGAIKADDMPPVQGTVAEHSFLPAEQQGSEDNLKTSTTKCITGQESKIAPSHTMIPPATYSVALLAPKCEQDLTIKNDYSGKWTDQASAEKTGDDNSTRKSFPEEGDIMVTVSSEENVCDIGNEESPLNVLGGLKLKANLKMEAYVPSEEEKNGEILAPPESLCGGKPSGIAELQREPLLVNESLNVENSGFRTNEEIHSESYNKGEISSGRKDNAEAISGHSVEADPKEVEEEERHMPKRKRKQHYLSSEDEPDDNPDVLDSRIETAQRQCPETEPHDTKEENSRDLEELPKTSSETNSTTSRVMEEKDEYSSSETTGEKPEQNDDDTIKSQEEDQPIIIKRKRGRPRKYPVETTLKMKDDSKTDTGIVTVEQSPSSSKLKVMQTDESNKETANLQERSISNDDGEEKIVTSVRRRGRKPKRSLTVSDDAESSEPERKRQKSVSDPVEDKKEQESDEEEEEEEEDEPSGATTRSTTRSEAQRSKTQLSPSIKRKREVSPPGARTRGQQRVEEAPVKKAKR

SEQ ID NO: 9167 - protein, 93 aa, Homo sapiens
  Payload ID: 1857;
  Gene Symbol: BOD1L1;
  Gene Name: biorientation of chromosomes in cell division 1-like 1;
  ENSP ID: ENSP00000420541
MATNPQPQPPPPAPPPPPPQPQPQPPPPPPGPGAGPGAGGAGGAGAGAGDPQLVAMIVNHLKSQGLFDQFRRDCLADVDTKSLALSPGWNAMA

SEQ ID NO: 9168 - protein, 207 aa, Homo sapiens
  Payload ID: 1857;
  Gene Symbol: BOD1L1;
  Gene Name: biorientation of chromosomes in cell division 1-like 1;
  ENSP ID: ENSP00000425492
  MOD_RES (1)..(1): Any amino acid
XSKTDTGIVTVEQSPSSSKLKVMQTDESNKETANLQERSISNDDGEEKIVTSVRRRGRKPKRSLTVSDDAESSEPERKRQKSVSDPVEDKKEQESDEEEEEEEEDEPSGATTRSTTRSEAQRKQHSKPSARATSKLGSPDTVSPRNRQKLAKEKLPTSEKVSNSPPLGRSKTQLSPSIKRKREVSPPGARTRGQQRVEEAPVKKAKR

SEQ ID NO: 9169 - protein, 172 aa, Homo sapiens
  Payload ID: 1858;
  Gene Symbol: BOD1L2;
  Gene Name: biorientation of chromosomes in cell division 1-like 2;
  Uniprot ID:  Q8IYS8;
  ENSP ID: ENSP00000467843
MADGGGGGSGGAGPASTRASGGGGPINPASLPPGDPQLIAIIVGQLKSRGLFDSFRRDCKADVDTKPAYQNLSQKADNFVSTHLDKQEWNPPANDNQLHDGLRQSVVQSGRSEAGVDRISSQVVDPKLNHIFRPQIEQIIHEFLVAQKEAAVPALPPEPEGQDPPAPSQDTS

SEQ ID NO: 9170 - protein, 543 aa, Homo sapiens
  Payload ID: 1859;
  Gene Symbol: BTD;
  Gene Name: biotinidase;
  Uniprot ID:  P43251;
  ENSP ID: ENSP00000306477
MAHAHIQGGRRAKSRFVVCIMSGARSKLALFLCGCYVVALGAHTGEESVADHHEAEYYVAAVYEHPSILSLNPLALISRQEALELMNQNLDIYEQQVMTAAQKDVQIIVFPEDGIHGFNFTRTSIYPFLDFMPSPQVVRWNPCLEPHRFNDTEVLQRLSCMAIRGDMFLVANLGTKEPCHSSDPRCPKDGRYQFNTNVVFSNNGTLVDRYRKHNLYFEAAFDVPLKVDLITFDTPFAGRFGIFTCFDILFFDPAIRVLRDYKVKHVVYPTAWMNQLPLLAAIEIQKAFAVAFGINVLAANVHHPVLGMTGSGIHTPLESFWYHDMENPKSHLIIAQVAKNPVGLIGAENATGETDPSHSKFLKILSGDPYCEKDAQEVHCDEATKWNVNAPPTFHSEMMYDNFTLVPVWGKEGYLHVCSNGLCCYLLYERPTLSKELYALGVFDGLHTVHGTYYIQVCALVRCGGLGFDTCGQEITEATGIFEFHLWGNFSTSYIFPLFLTSGMTLEVPDQLGWENDHYFLRKSRLSSGLVTAALYGRLYERD

SEQ ID NO: 9171 - protein, 523 aa, Homo sapiens
  Payload ID: 1859;
  Gene Symbol: BTD;
  Gene Name: biotinidase;
  Uniprot ID:  P43251;
  ENSP ID: ENSP00000373288
MSGARSKLALFLCGCYVVALGAHTGEESVADHHEAEYYVAAVYEHPSILSLNPLALISRQEALELMNQNLDIYEQQVMTAAQKDVQIIVFPEDGIHGFNFTRTSIYPFLDFMPSPQVVRWNPCLEPHRFNDTEVLQRLSCMAIRGDMFLVANLGTKEPCHSSDPRCPKDGRYQFNTNVVFSNNGTLVDRYRKHNLYFEAAFDVPLKVDLITFDTPFAGRFGIFTCFDILFFDPAIRVLRDYKVKHVVYPTAWMNQLPLLAAIEIQKAFAVAFGINVLAANVHHPVLGMTGSGIHTPLESFWYHDMENPKSHLIIAQVAKNPVGLIGAENATGETDPSHSKFLKILSGDPYCEKDAQEVHCDEATKWNVNAPPTFHSEMMYDNFTLVPVWGKEGYLHVCSNGLCCYLLYERPTLSKELYALGVFDGLHTVHGTYYIQVCALVRCGGLGFDTCGQEITEATGIFEFHLWGNFSTSYIFPLFLTSGMTLEVPDQLGWENDHYFLRKSRLSSGLVTAALYGRLYERD

SEQ ID NO: 9172 - protein, 545 aa, Homo sapiens
  Payload ID: 1859;
  Gene Symbol: BTD;
  Gene Name: biotinidase;
  Uniprot ID:  P43251;
  ENSP ID: ENSP00000388212
MPEGGGTSRRLLPMQSRFVVCIMSGARSKLALFLCGCYVVALGAHTGEESVADHHEAEYYVAAVYEHPSILSLNPLALISRQEALELMNQNLDIYEQQVMTAAQKDVQIIVFPEDGIHGFNFTRTSIYPFLDFMPSPQVVRWNPCLEPHRFNDTEVLQRLSCMAIRGDMFLVANLGTKEPCHSSDPRCPKDGRYQFNTNVVFSNNGTLVDRYRKHNLYFEAAFDVPLKVDLITFDTPFAGRFGIFTCFDILFFDPAIRVLRDYKVKHVVYPTAWMNQLPLLAAIEIQKAFAVAFGINVLAANVHHPVLGMTGSGIHTPLESFWYHDMENPKSHLIIAQVAKNPVGLIGAENATGETDPSHSKFLKILSGDPYCEKDAQEVHCDEATKWNVNAPPTFHSEMMYDNFTLVPVWGKEGYLHVCSNGLCCYLLYERPTLSKELYALGVFDGLHTVHGTYYIQVCALVRCGGLGFDTCGQEITEATGIFEFHLWGNFSTSYIFPLFLTSGMTLEVPDQLGWENDHYFLRKSRLSSGLVTAALYGRLYERD

SEQ ID NO: 9173 - protein, 251 aa, Homo sapiens
  Payload ID: 1859;
  Gene Symbol: BTD;
  Gene Name: biotinidase;
  ENSP ID: ENSP00000394277
MSGARSKLALFLCGCYVVALGAHTGEESVADHHEAEYYVAAVYEHPSILSLNPLALISRQEALELMNQNLDIYEQQVMTAAQKDVQIIVFPEDGIHGFNFTRTSIYPFLDFMPSPQVVRWNPCLEPHRFNDTEVLQRLSCMAIRGDMFLVANLGTKEPCHSSDPRCPKDGRYQFNTNVVFSNNGTLVDRYRKHNLYFEAAFDVPLKVDLITFDTPFAGRFGIFTCFDILFFDPAIRVLRDYKVKHVVYPTA

SEQ ID NO: 9174 - protein, 58 aa, Homo sapiens
  Payload ID: 1859;
  Gene Symbol: BTD;
  Gene Name: biotinidase;
  ENSP ID: ENSP00000397113
MSGARSKLALFLCGCYVVALGAHTGEESVADHHEAEYYVAAVYEHPSILSLNPLALIS

SEQ ID NO: 9175 - protein, 545 aa, Homo sapiens
  Payload ID: 1859;
  Gene Symbol: BTD;
  Gene Name: biotinidase;
  Uniprot ID:  P43251;
  ENSP ID: ENSP00000400995
MARKETQLIIKMNHLARFVVCIMSGARSKLALFLCGCYVVALGAHTGEESVADHHEAEYYVAAVYEHPSILSLNPLALISRQEALELMNQNLDIYEQQVMTAAQKDVQIIVFPEDGIHGFNFTRTSIYPFLDFMPSPQVVRWNPCLEPHRFNDTEVLQRLSCMAIRGDMFLVANLGTKEPCHSSDPRCPKDGRYQFNTNVVFSNNGTLVDRYRKHNLYFEAAFDVPLKVDLITFDTPFAGRFGIFTCFDILFFDPAIRVLRDYKVKHVVYPTAWMNQLPLLAAIEIQKAFAVAFGINVLAANVHHPVLGMTGSGIHTPLESFWYHDMENPKSHLIIAQVAKNPVGLIGAENATGETDPSHSKFLKILSGDPYCEKDAQEVHCDEATKWNVNAPPTFHSEMMYDNFTLVPVWGKEGYLHVCSNGLCCYLLYERPTLSKELYALGVFDGLHTVHGTYYIQVCALVRCGGLGFDTCGQEITEATGIFEFHLWGNFSTSYIFPLFLTSGMTLEVPDQLGWENDHYFLRKSRLSSGLVTAALYGRLYERD

SEQ ID NO: 9176 - protein, 64 aa, Homo sapiens [sequence omitted]

SEQ ID NO: 9177 - protein, 194 aa, Homo sapiens
  Payload ID: 1860;
  Gene Symbol: BPHL;
  Gene Name: biphenyl hydrolase-like (serine hydrolase);
  ENSP ID: ENSP00000369726
MPRNLLYSLLSSHLSPHFSTSVTSAKVAVNGVQLHYQQTGEGDHAVLLLPGMLGSGETDFGPQLKNLNKKLFTVVAWDPRGYGHSRPPDRDFPADFFERDAKDAVDLMKALKFKKVSLLGWSDGGITALIAAAKYPSYIHKMVIWGANAYVTDEDSMIYEGIRDVSKWSERTRKPLEALYGWSLTLSPGWNAMA

SEQ ID NO: 9178 - protein, 274 aa, Homo sapiens
  Payload ID: 1860;
  Gene Symbol: BPHL;
  Gene Name: biphenyl hydrolase-like (serine hydrolase);
  Uniprot ID:  Q86WA6;
  ENSP ID: ENSP00000369734
MPRNLLYSLLSSHLSPHFSTSVTSAKVAVNGVQLHYQQTGEGDHAVLLLPGMLGSGETDFGPQLKNLNKKLFTVVAWDPRGYGHSRPPDRDFPADFFERDAKDAVDLMKALKFKKVSLLGWSDGGITALIAAAKYPSYIHKMVIWGANAYVTDEDSMIYEGIRDVSKWSERTRKPLEALYGYDYFARTCEKWVDGIRQFKHLPDGNICRHLLPRVQCPALIVHGEKDPLVPRFHADFIHKHVKGSRLHLMPEGKHNLHLRFADEFNKLAEDFLQ

SEQ ID NO: 9179 - protein, 291 aa, Homo sapiens
  Payload ID: 1860;
  Gene Symbol: BPHL;
  Gene Name: biphenyl hydrolase-like (serine hydrolase);
  Uniprot ID:  Q86WA6;
  ENSP ID: ENSP00000369739
MVAVLGGRGVLRLRLLLSALKPGIHVPRAGPAAAFGTSVTSAKVAVNGVQLHYQQTGEGDHAVLLLPGMLGSGETDFGPQLKNLNKKLFTVVAWDPRGYGHSRPPDRDFPADFFERDAKDAVDLMKALKFKKVSLLGWSDGGITALIAAAKYPSYIHKMVIWGANAYVTDEDSMIYEGIRDVSKWSERTRKPLEALYGYDYFARTCEKWVDGIRQFKHLPDGNICRHLLPRVQCPALIVHGEKDPLVPRFHADFIHKHVKGSRLHLMPEGKHNLHLRFADEFNKLAEDFLQ

SEQ ID NO: 9180 - protein, 274 aa, Homo sapiens; identical to SEQ ID NO: 9178
  Payload ID: 1860;
  Gene Symbol: BPHL;
  Gene Name: biphenyl hydrolase-like (serine hydrolase);
  Uniprot ID:  Q86WA6;
  ENSP ID: ENSP00000390472

SEQ ID NO: 9181 - protein, 44 aa, Homo sapiens
  Payload ID: 1860;
  Gene Symbol: BPHL;
  Gene Name: biphenyl hydrolase-like (serine hydrolase);
  ENSP ID: ENSP00000394072
MVAVLGGRGVLRLRLLLSALKPGIHVPRAGPAAAFGNQPEPEYR

SEQ ID NO: 9182 - protein, 29 aa, Homo sapiens
  Payload ID: 1860;
  Gene Symbol: BPHL;
  Gene Name: biphenyl hydrolase-like (serine hydrolase);
  ENSP ID: ENSP00000395744
  MOD_RES (1)..(1): Any amino acid
XALIVHGEKDPLVPRFHADFIHKHVKGSR

SEQ ID NO: 9183 - protein, 44 aa, Homo sapiens; identical to SEQ ID NO: 9181
  Payload ID: 1860;
  Gene Symbol: BPHL;
  Gene Name: biphenyl hydrolase-like (serine hydrolase);
  ENSP ID: ENSP00000396637

SEQ ID NO: 9184 - protein, 211 aa, Homo sapiens
  Payload ID: 1860;
  Gene Symbol: BPHL;
  Gene Name: biphenyl hydrolase-like (serine hydrolase);
  ENSP ID: ENSP00000413762
MVAVLGGRGVLRLRLLLSALKPGIHVPRAGPAAAFGTSVTSAKVAVNGVQLHYQQTGEGDHAVLLLPGMLGSGETDFGPQLKNLNKKLFTVVAWDPRGYGHSRPPDRDFPADFFERDAKDAVDLMKALKFKKVSLLGWSDGGITALIAAAKYPSYIHKMVIWGANAYVTDEDSMIYEGIRDVSKWSERTRKPLEALYGWSLTLSPGWNAMA

SEQ ID NO: 9185 - protein, 1385 aa, Homo sapiens
  Payload ID: 1861;
  Gene Symbol: BIVM-ERCC5;
  Gene Name: BIVM-ERCC5 readthrough;
  ENSP ID: ENSP00000473384
  MOD_RES (1)..(1): Any amino acid
XQGAVKSFCTSASGAPLGPKGDGHYPWSCPVTHTREKIYAICSDYAFLNQATSIYKTPNPSRSPCLPDSTSLSAGNNSSRYIGIPTSTSEIIYNEENSLENLSNSLGKLPLAWEIDKSEFDGVTTNSKHKSGNAKKQVSKRKTSDKKGRYQKECPQHSPLEDIKQRKVLDLRRWYCISRPQYKTSCGISSLISCWNFLYSTMGAGNLPPITQEEALHILGFQPPFEDIRFGPFTGNTTLMRWFRQINDHFHVKGCSYVLYKPHGKNKTAGETASGALSKLTRGLKDESLAYIYHCQNHYFCPIGFEATPVKANKAFSRGPLSPQEVEYWILIGESSRKHPAIHCKKWADIVTDLNTQNPEYLDIRHLERGLQYRKTKKVGGNLHCIIAFQRLNWQRFGLWNFPFGTIRQESQPPTHAQGIAKSESEDNISKKQHGRLGRSFSASFHQDSAWKKMSNISIWLNQALKGVRDRHGNSIENPHLLTLFHRLCKLLFFRIRPIFVFDGDAPLLKKQTLVKRRQRKDLASSDSRKTTEKLLKTFLKRQAIKTAFRSKRDEALPSLTQVRRENDLYVLPPLQEEEKHSSEEEDEKEWQERMNQKQALQEEFFHNPQAIDIESEDFSSLPPEVKHEILTDMKEFTKRRRTLFEAMPEESDDFSQYQLKGLLKKNYLNQHIEHVQKEMNQQHSGHIRRQYEDEGGFLKEVESRRVVSEDTSHYILIKGIQAKTVAEVDSESLPSSSKMHGMSFDVKSSPCEKLKTEKEPDATPPSPRTLLAMQAALLGSSSEEELESENRRQARGRNAPAAVDEGSISPRTLSAIKRALDDDEDVKVCAGDDVQTGGPGAEEMRINSSTENSDEGLKVRDGKGIPFTATLASSSVNSAEEHVASTNEGREPTDSVPKEQMSLVHVGTEAFPISDESMIKDRKDRLPLESAVVRHSDAPGLPNGRELTPASPTCTNSVSKNETHAEVLEQQNELCPYESKFDSSLLSSDDETKCKPNSASEVIGPVSLQETSSIVSVPSEAVDNVENVVSFNAKEHENFLETIQEQQTTESAGQDLISIPKAVEPMEIDSEESESDGSFIEVQSVISDEELQAEFPETSKPPSEQGEEELVGTREGEAPAESESLLRDNSERDDVDGEPQEAEKDAEDSLHEWQDINLEELETLESNLLAQQNSLKAQKQQQERIAATVTGQMFLESQELLRLFGIPYIQAPMEAEAQCAILDLTDQTSGTITDDSDIWLFGARHVYRNFFNKNKFVEYYQYVDFHNQLGLDRNKLINLAYLLGSDYTEGIPTVGCVTAMEILNEFPGHGLEPLLKFSEWWHEAQKNPKIRPNPHDTKVKKKLRTLQLTPGFPNPAVAEAYLKPVVDDSKGSFLWGKPDLDKIR

SEQ ID NO: 9186 - protein, 87 aa, Homo sapiens
  Payload ID: 1862;
  Gene Symbol: BLCAP;
  Gene Name: bladder cancer associated prt;
  Uniprot ID:  P62952;
  ENSP ID: ENSP00000362637
MYCLQWLLPVLLIPKPLNPALWFSHSMFMGFYLLSFLLERKPCTICALVFLAALFLICYSCWGNCFLYHCSDSPLPESAHDPGVVGT

SEQ ID NO: 9187 - protein, 87 aa, Homo sapiens; identical to SEQ ID NO: 9186
  Payload ID: 1862;
  Gene Symbol: BLCAP;
  Gene Name: bladder cancer associated prt;
  Uniprot ID:  P62952;
  ENSP ID: ENSP00000380320

SEQ ID NO: 9188 - protein, 87 aa, Homo sapiens; identical to SEQ ID NO: 9186
  Payload ID: 1862;
  Gene Symbol: BLCAP;
  Gene Name: bladder cancer associated prt;
  Uniprot ID:  P62952;
  ENSP ID: ENSP00000380323

SEQ ID NO: 9189 - protein, 87 aa, Homo sapiens; identical to SEQ ID NO: 9186
  Payload ID: 1862;
  Gene Symbol: BLCAP;
  Gene Name: bladder cancer associated prt;
  Uniprot ID:  P62952;
  ENSP ID: ENSP00000380324

SEQ ID NO: 9190 - protein, 87 aa, Homo sapiens; identical to SEQ ID NO: 9186
  Payload ID: 1862;
  Gene Symbol: BLCAP;
  Gene Name: bladder cancer associated prt;
  Uniprot ID:  P62952;
  ENSP ID: ENSP00000380326

SEQ ID NO: 9191 - protein, 7 aa, Homo sapiens
  Payload ID: 1862;
  Gene Symbol: BLCAP;
  Gene Name: bladder cancer associated prt;
  ENSP ID: ENSP00000389735
MYCLQWL

SEQ ID NO: 9192 - protein, 62 aa, Homo sapiens
  Payload ID: 1862;
  Gene Symbol: BLCAP;
  Gene Name: bladder cancer associated prt;
  ENSP ID: ENSP00000391768
MYCLQWLLPVLLIPKPLNPALWFSHSMFMGFYLLSFLLERKPCTICALVFLAALFLICYSCW

SEQ ID NO: 9193 - protein, 87 aa, Homo sapiens; identical to SEQ ID NO: 9186
  Payload ID: 1862;
  Gene Symbol: BLCAP;
  Gene Name: bladder cancer associated prt;
  Uniprot ID:  P62952;
  ENSP ID: ENSP00000397172

SEQ ID NO: 9194 - protein, 78 aa, Homo sapiens
  Payload ID: 1862;
  Gene Symbol: BLCAP;
  Gene Name: bladder cancer associated prt;
  ENSP ID: ENSP00000405953
MYCLQWLLPVLLIPKPLNPALWFSHSMFMGFYLLSFLLERKPCTICALVFLAALFLICYSCWGNCFLYHCSDSPLPES

SEQ ID NO: 9195 - protein, 87 aa, Homo sapiens; identical to SEQ ID NO: 9186
  Payload ID: 1862;
  Gene Symbol: BLCAP;
  Gene Name: bladder cancer associated prt;
  Uniprot ID:  P62952;
  ENSP ID: ENSP00000414973

SEQ ID NO: 9196 - protein, 455 aa, Homo sapiens
  Payload ID: 1863;
  Gene Symbol: BLMH;
  Gene Name: bleomycin hydrolase;
  Uniprot ID:  Q13867;
  ENSP ID: ENSP00000261714
MSSSGLNSEKVAALIQKLNSDPQFVLAQNVGTTHDLLDICLKRATVQRAQHVFQHAVPQEGKPITNQKSSGRCWIFSCLNVMRLPFMKKLNIEEFEFSQSYLFFWDKVERCYFFLSAFVDTAQRKEPEDGRLVQFLLMNPANDGGQWDMLVNIVEKYGVIPKKCFPESYTTEATRRMNDILNHKMREFCIRLRNLVHSGATKGEISATQDVMMEEIFRVVCICLGNPPETFTWEYRDKDKNYQKIGPITPLEFYREHVKPLFNMEDKICLVNDPRPQHKYNKLYTVEYLSNMVGGRKTLYNNQPIDFLKKMVAASIKDGEAVWFGCDVGKHFNSKLGLSDMNLYDHELVFGVSLKNMNKAERLTFGESLMTHAMTFTAVSEKDDQDGAFTKWRVENSWGEDHGHKGYLCMTDEWFSEYVYEVVVDRKHVPEEVLAVLEQEPIILPAWDPMGALAE

SEQ ID NO: 9197 - protein, 71 aa, Homo sapiens
  Payload ID: 1863;
  Gene Symbol: BLMH;
  Gene Name: bleomycin hydrolase;
  ENSP ID: ENSP00000462353
MSSSGLNSEKVAALIQKLNSDPQFVLAQNVGTTHDLLDICLKRATVQRAQHVFQHAVPQEGKPITNQKSSG

SEQ ID NO: 9198 - protein, 262 aa, Homo sapiens
  Payload ID: 1863;
  Gene Symbol: BLMH;
  Gene Name: bleomycin hydrolase;
  ENSP ID: ENSP00000462442
VDTAQRKEPEDGRLVQFLLMNPANDGGQWDMLVNIVEKYGVIPKKCFPESYTTEATRRMNDILNHKMREFCIRLRNLVHSGATKGEISATQDVMMEEIFRVVCICLGNPPETFTWEYRDKDKNYQKIGPITPLEFYREHVKPLFNMEDKVVNDPRPQHKYNKLYTVEYLSNMVGGRKTLYNNQPIDFLKKMVAASIKDGEAVWFGCDVGKHFNSKLGLSDMNLYDHELVFGVSLKNMNKAERLTFGESLMTHAMTFTAVSEK

SEQ ID NO: 9199 - protein, 67 aa, Homo sapiens
  Payload ID: 1863;
  Gene Symbol: BLMH;
  Gene Name: bleomycin hydrolase;
  ENSP ID: ENSP00000466527
MRLPFMKKLNIEEFEFSQSYLFFWDKVERCYFFLSAFVDTAQRKEPEDGRLVQFLLMNPANDGGQWD

SEQ ID NO: 9200 - protein, 93 aa, Homo sapiens
  Payload ID: 1863;
  Gene Symbol: BLMH;
  Gene Name: bleomycin hydrolase;
  ENSP ID: ENSP00000466948
MSSSGLNSEKVAALIQKLNSDPQFVLAQNVGTTHDLLDICLKRATVQRAQHVFQHAVPQEGKPITNQKSSGVGFHFSHTFLDLPDSVPFWCLI

SEQ ID NO: 9201 - protein, 318 aa, Homo sapiens
  Payload ID: 1863;
  Gene Symbol: BLMH;
  Gene Name: bleomycin hydrolase;
  ENSP ID: ENSP00000468486
MRLRRLNSEKVAALIQKLNSDPQFVLAQNVGTTHDLLDICLKRATVQRAQHVFQHAVPQEGKPITNQKSSGRCWIFSCLNVMRLPFMKKLNIEEFEFSQSYLFFWDKVERCYFFLSAFVDTAQRKEPEDGRLVQFLLMNPANDGGQWDMLVNIVEKYGVIPKKCFPESYTTEATRRMNDILNHKMREFCIRLRNLVHSGATKGEISATQDVMMEEIFRVVCICLGNPPETFTWEYRDKDKNYQKIGPITPLEFYREHVKPLFNMEDKVVNDPRPQHKYNKLYTVEYLSNMVGGRKTLYNNQPIDFLKKMVAASIKDGE

SEQ ID NO: 9202 - protein, 231 aa, Homo sapiens
  Payload ID: 1863;
  Gene Symbol: BLMH;
  Gene Name: bleomycin hydrolase;
  ENSP ID: ENSP00000468681
MNDILNHKMREFCIRLRNLVHSGATKGEISATQDVMMEEIFRVVCICLGNPPETFTWEYRDKDKNYQKIGPITPLEFYREHVKPLFNMEDKICLVNDPRPQHKYNKLYTVEYLSNMVGGRKTLYNNQPIDFLKKMVAASIKDGEAVWFGCDVGKHFNSKLGLSDMNLYDHELVFGVSLKNMNKAERLTFGESLMTHAMTFTAVSEKDDQDGAFTKWRVENSWGEDHGHKGE

SEQ ID NO: 9203 - protein, 505 aa, Homo sapiens
  Payload ID: 1864;
  Gene Symbol: BLK;
  Gene Name: BLK proto-oncogene, Src family tyr kinase;
  Uniprot ID:  P51451;
  ENSP ID: ENSP00000259089
MGLVSSKKPDKEKPIKEKDKGQWSPLKVSAQDKDAPPLPPLVVFNHLTPPPPDEHLDEDKHFVVALYDYTAMNDRDLQMLKGEKLQVLKGTGDWWLARSLVTGREGYVPSNFVARVESLEMERWFFRSQGRKEAERQLLAPINKAGSFLIRESETNKGAFSLSVKDVTTQGELIKHYKIRCLDEGGYYISPRITFPSLQALVQHYSKKGDGLCQRLTLPCVRPAPQNPWAQDEWEIPRQSLRLVRKLGSGQFGEVWMGYYKNNMKVAIKTLKEGTMSPEAFLGEANVMKALQHERLVRLYAVVTKEPIYIVTEYMARGCLLDFLKTDEGSRLSLPRLIDMSAQIAEGMAYIERMNSIHRDLRAANILVSEALCCKIADFGLARIIDSEYTAQEGAKFPIKWTAPEAIHFGVFTIKADVWSFGVLLMEVVTYGRVPYPGMSNPEVIRNLERGYRMPRPDTCPPELYRGVIAECWRSRPEERPTFEFLQSVLEDFYTATERQYELQP

SEQ ID NO: 9204 - protein, 434 aa, Homo sapiens
  Payload ID: 1864;
  Gene Symbol: BLK;
  Gene Name: BLK proto-oncogene, Src family tyr kinase;
  ENSP ID: ENSP00000433663
MNDRDLQMLKGEKLQVLKGTGDWWLARSLVTGREGYVPSNFVARVESLEMERWFFRSQGRKEAERQLLAPINKAGSFLIRESETNKGAFSLSVKDVTTQGELIKHYKIRCLDEGGYYISPRITFPSLQALVQHYSKKGDGLCQRLTLPCVRPAPQNPWAQDEWEIPRQSLRLVRKLGSGQFGEVWMGYYKNNMKVAIKTLKEGTMSPEAFLGEANVMKALQHERLVRLYAVVTKEPIYIVTEYMARGCLLDFLKTDEGSRLSLPRLIDMSAQIAEGMAYIERMNSIHRDLRAANILVSEALCCKIADFGLARIIDSEYTAQEGAKFPIKWTAPEAIHFGVFTIKADVWSFGVLLMEVVTYGRVPYPGMSNPEVIRNLERGYRMPRPDTCPPELYRGVIAECWRSRPEERPTFEFLQSVLEDFYTATERQYELQP

SEQ ID NO: 9205 - protein, 148 aa, Homo sapiens
  Payload ID: 1865;
  Gene Symbol: BORCS5;
  Gene Name: BLOC-1 related complex subunit 5;
  Uniprot ID:  Q969J3;
  ENSP ID: ENSP00000298571
MGSEQSSEAESRPNDLNSSGLLSGQTSPTNAKLEKLDSQQVLQLCLRYQDHLHQCAEAVAFDQNALVKRIKEMDLSVETLFSFMQERQKRYAKYAEQIQKVNEMSAILRRIQMGIDQTVPLLDRLNSMLPEGERLEPFSMKPDRELRL

SEQ ID NO: 9206 - protein, 196 aa, Homo sapiens
  Payload ID: 1865;
  Gene Symbol: BORCS5;
  Gene Name: BLOC-1 related complex subunit 5;
  Uniprot ID:  Q969J3;
  ENSP ID: ENSP00000321546
MGSEQSSEAESRPNDLNSSVTPSPAKHRAKMDDIVVVAQGSQASRNVSNDPDVIKLQEIPTFQPLLKGLLSGQTSPTNAKLEKLDSQQVLQLCLRYQDHLHQCAEAVAFDQNALVKRIKEMDLSVETLFSFMQERQKRYAKYAEQIQKVNEMSAILRRIQMGIDQTVPLLDRLNSMLPEGERLEPFSMKPDRELRL

SEQ ID NO: 9207 - protein, 177 aa, Homo sapiens
  Payload ID: 1865;
  Gene Symbol: BORCS5;
  Gene Name: BLOC-1 related complex subunit 5;
  ENSP ID: ENSP00000443023
MTPSPAKHRAKMDDIVVVAQGSQASRNVSNDPDVIKLQEIPTFQPLLKGLLSGQTSPTNAKLEKLDSQQVLQLCLRYQDHLHQCAEAVAFDQNALVKRIKEMDLSVETLFSFMQERQKRYAKYAEQIQKVNEMSAILRRIQMGIDQTVPLLDRLNSMLPEGERLEPFSMKPDRELRL

SEQ ID NO: 9208 - protein, 177 aa, Homo sapiens; identical to SEQ ID NO: 9207
  Payload ID: 1865;
  Gene Symbol: BORCS5;
  Gene Name: BLOC-1 related complex subunit 5;
  ENSP ID: ENSP00000485829

SEQ ID NO: 9209 - protein, 196 aa, Homo sapiens; identical to SEQ ID NO: 9206
  Payload ID: 1865;
  Gene Symbol: BORCS5;
  Gene Name: BLOC-1 related complex subunit 5;
  ENSP ID: ENSP00000486120

SEQ ID NO: 9210 - protein, 148 aa, Homo sapiens; identical to SEQ ID NO: 9205
  Payload ID: 1865;
  Gene Symbol: BORCS5;
  Gene Name: BLOC-1 related complex subunit 5;
  ENSP ID: ENSP00000486584

SEQ ID NO: 9211 - protein, 357 aa, Homo sapiens
  Payload ID: 1866;
  Gene Symbol: BORCS6;
  Gene Name: BLOC-1 related complex subunit 6;
  Uniprot ID:  Q96GS4;
  ENSP ID: ENSP00000373669
MESSRGRPGPETDLLAVAEHQALVFGGGPGRTSSEPPAGLRVSGEEETENVGGANRHPRTSPKTSSCGVVHRPEREALENEPGPQGTLSGAGSRRGAPGAEHEPSLSSRHKNPAPPEGKPSSGRDCRRGGPGGGMDVEQQEEEDNDEEAAAGSRAGRSFSSRLQDSRSLDGLSEACGGAGSSGSAESGAGGGRRATISSPLELEGTVSRHGDLTHFVANNLQLKIRLSGAPPPPPSAPARPCPAPAPTPTPAIPPIDPEVLRDLERLSRELGGRVDRLLRGLGGAVQELTALSVGCIQTYRDAVDSLGEAVDMSIKGMYTLLARCEELERALQPVQGLARQVRDIRRTLEVLEALCK

SEQ ID NO: 9212 - protein, 106 aa, Homo sapiens
  Payload ID: 1867;
  Gene Symbol: BORCS7;
  Gene Name: BLOC-1 related complex subunit 7;
  Uniprot ID:  Q96B45;
  ENSP ID: ENSP00000342331
MMATGTPESQARFGQSVKGLLTEKVTTCGTDVIALTKQVLKGSRSSELLGQAARNMVLQEDAILHSEDSLRKMAIITTHLQYQQEAIQKNVEQSSDLQDQLNHLLK

SEQ ID NO: 9213 - protein, 106 aa, Homo sapiens; identical to SEQ ID NO: 9212
  Payload ID: 1867;
  Gene Symbol: BORCS7;
  Gene Name: BLOC-1 related complex subunit 7;
  Uniprot ID:  Q96B45;
  ENSP ID: ENSP00000358899

SEQ ID NO: 9214 - protein, 109 aa, Homo sapiens
  Payload ID: 1868;
  Gene Symbol: BORCS8;
  Gene Name: BLOC-1 related complex subunit 8;
  Uniprot ID:  Q96FH0;
  ENSP ID: ENSP00000424833
MEEPEMQLKGKKVTDKFTESVYVLANEPSVALYRLQEHVRRSLPELAQHKADMQRWEEQSQGAIYTVEYACSAVKNLVDSSVYFRSVEGLLKQAISIRDHMNASAQGHR

SEQ ID NO: 9215 - protein, 119 aa, Homo sapiens
  Payload ID: 1868;
  Gene Symbol: BORCS8;
  Gene Name: BLOC-1 related complex subunit 8;
  Uniprot ID:  Q96FH0;
  ENSP ID: ENSP00000425864
MEEPEMQLKGKKVTDKFTESVYVLANEPSVALYRLQEHVRRSLPELAQHKADMQRWEEQSQGAIYTVEYACSAVKNLVDSSVYFRSVEGLLKQAISIRDHMNASAQGHSPEEPPPPSSA

SEQ ID NO: 9216 - protein, 69 aa, Homo sapiens
  Payload ID: 1868;
  Gene Symbol: BORCS8;
  Gene Name: BLOC-1 related complex subunit 8;
  ENSP ID: ENSP00000467140
ADMQRWEEQSQGAIYTVEYACSAVKNLVDSSVYFRSVEGLLKQAISIRDHMNASAQGHSPEEPPPPSSA

SEQ ID NO: 9217 - protein, 119 aa, Homo sapiens; identical to SEQ ID NO: 9215
  Payload ID: 1868;
  Gene Symbol: BORCS8;
  Gene Name: BLOC-1 related complex subunit 8;
  Uniprot ID:  Q96FH0;
  ENSP ID: ENSP00000467744

SEQ ID NO: 9218 - protein, 62 aa, Homo sapiens
  Payload ID: 1868;
  Gene Symbol: BORCS8;
  Gene Name: BLOC-1 related complex subunit 8;
  ENSP ID: ENSP00000475370
MPVPRATARRNHPRPPQPDPGRDSGPPSLRQPRDGVSPCWLGWSQTPELVILPPQPPKVLGL

SEQ ID NO: 9219 - protein, 136 aa, Homo sapiens
  Payload ID: 1869;
  Gene Symbol: BLOC1S5-TXNDC5;
  Gene Name: BLOC1S5-TXNDC5 readthrough (NMD candidate);
  ENSP ID: ENSP00000454697
GTETPVGCEAAPGGGSKKRDSLGTAGSAHLIIKDLGEIHSRLLDHRPVIQGETRYFVKEFEEKRGLREMRVLENLKNMIHETNEHTLPKCRDTMRDSLSQVLQRLQAANDSVCRLQQREQERKKVWTLPAAAADLE

SEQ ID NO: 9220 - protein, 746 aa, Homo sapiens
  Payload ID: 1870;
  Gene Symbol: BOP1;
  Gene Name: block of proliferation 1;
  Uniprot ID:  Q14137;
  ENSP ID: ENSP00000455106
MAGSRGAGRTAAPSVRPEKRRSEPELEPEPEPEPPLLCTSPLSHSTGSDSGVSDSEESVFSGLEDSGSDSSEDDDEGDEEGEDGALDDEGHSGIKKTTEEQVQASTPCPRTEMASARIGDEYAEDSSDEEDIRNTVGNVPLEWYDDFPHVGYDLDGRRIYKPLRTRDELDQFLDKMDDPDYWRTVQDPMTGRDLRLTDEQVALVRRLQSGQFGDVGFNPYEPAVDFFSGDVMIHPVTNRPADKRSFIPSLVEKEKVSRMVHAIKMGWIQPRRPRDPTPSFYDLWAQEDPNAVLGRHKMHVPAPKLALPGHAESYNPPPEYLLSEEERLAWEQQEPGERKLSFLPRKFPSLRAVPAYGRFIQERFERCLDLYLCPRQRKMRVNVDPEDLIPKLPRPRDLQPFPTCQALVYRGHSDLVRCLSVSPGGQWLVSGSDDGSLRLWEVATARCVRTVPVGGVVKSVAWNPSPAVCLVAAAVEDSVLLLNPALGDRLVAGSTDQLLSAFVPPEEPPLQPARWLEASEEERQVGLRLRICHGKPVTQVTWHGRGDYLAVVLATQGHTQVLIHQLSRRRSQSPFRRSHGQVQRVAFHPARPFLLVASQRSVRLYHLLRQELTKKLMPNCKWVSSLAVHPAGDNVICGSYDSKLVWFDLDLSTKPYRMLRHHKKALRAVAFHPRYPLFASGSDDGSVIVCHGMVYNDLLQNPLLVPVKVLKGHVLTRDLGVLDVIFHPTQPWVFSSGADGTVRLFT

SEQ ID NO: 9221 - protein, 217 aa, Homo sapiens
  Payload ID: 1870;
  Gene Symbol: BOP1;
  Gene Name: block of proliferation 1;
  ENSP ID: ENSP00000456082
MAGSRGAGRTAAPSVRPEKRRSEPELEPEPEPEASTPCPRTEMASARIGDEYAEDSSDEEDIRNTVGNVPLEWYDDFPHVGYDLDGRRIYKPLRTRDELDQFLDKMDDPDYWRTVQDPMTGRDLRLTDEQVALVRRLQSGQFGDVGFNPYEPAVDFFSGDVMIHPVTNRPADKRSFIPSLVEKEKVSRMVHAIKMGWIQPRRPRDPTPSFYDLWAQE

SEQ ID NO: 9222 - protein, 360 aa, Homo sapiens
  Payload ID: 1871;
  Gene Symbol: BVES;
  Gene Name: blood vessel epicardial substance;
  Uniprot ID:  Q8NE79;
  ENSP ID: ENSP00000313172
MNYTESSPLRESTAIGFTPELESIIPVPSNKTTCENWREIHHLVFHVANICFAVGLVIPTTLHLHMIFLRGMLTLGCTLYIVWATLYRCALDIMIWNSVFLGVNILHLSYLLYKKRPVKIEKELSGMYRRLFEPLRVPPDLFRRLTGQFCMIQTLKKGQTYAAEDKTSVDDRLSILLKGKMKVSYRGHFLHNIYPCAFIDSPEFRSTQMHKGEKFQVTIIADDNCRFLCWSRERLTYFLESEPFLYEIFRYLIGKDITNKLYSLNDPTLNDKKAKKLEHQLSLCTQISMLEMRNSIASSSDSDDGLHQFLRGTSSMSSLHVSSPHQRASAKMKPIEEGAEDDDDVFEPASPNTLKVHQLP

SEQ ID NO: 9223 - protein, 360 aa, Homo sapiens; identical to SEQ ID NO: 9222
  Payload ID: 1871;
  Gene Symbol: BVES;
  Gene Name: blood vessel epicardial substance;
  Uniprot ID:  Q8NE79;
  ENSP ID: ENSP00000337259

SEQ ID NO: 9224 - protein, 360 aa, Homo sapiens; identical to SEQ ID NO: 9222
  Payload ID: 1871;
  Gene Symbol: BVES;
  Gene Name: blood vessel epicardial substance;
  Uniprot ID:  Q8NE79;
  ENSP ID: ENSP00000397310

SEQ ID NO: 9225 - protein, 1417 aa, Homo sapiens
  Payload ID: 1872;
  Gene Symbol: BLM;
  Gene Name: Bloom syndrome, RecQ helicase-like;
  Uniprot ID:  P54132;
  ENSP ID: ENSP00000347232
MAAVPQNNLQEQLERHSARTLNNKLSLSKPKFSGFTFKKKTSSDNNVSVTNVSVAKTPVLRNKDVNVTEDFSFSEPLPNTTNQQRVKDFFKNAPAGQETQRGGSKSLLPDFLQTPKEVVCTTQNTPTVKKSRDTALKKLEFSSSPDSLSTINDWDDMDDFDTSETSKSFVTPPQSHFVRVSTAQKSKKGKRNFFKAQLYTTNTVKTDLPPPSSESEQIDLTEEQKDDSEWLSSDVICIDDGPIAEVHINEDAQESDSLKTHLEDERDNSEKKKNLEEAELHSTEKVPCIEFDDDDYDTDFVPPSPEEIISASSSSSKCLSTLKDLDTSDRKEDVLSTSKDLLSKPEKMSMQELNPETSTDCDARQISLQQQLIHVMEHICKLIDTIPDDKLKLLDCGNELLQQRNIRRKLLTEVDFNKSDASLLGSLWRYRPDSLDGPMEGDSCPTGNSMKELNFSHLPSNSVSPGDCLLTTTLGKTGFSATRKNLFERPLFNTHLQKSFVSSNWAETPRLGKKNESSYFPGNVLTSTAVKDQNKHTASINDLERETQPSYDIDNFDIDDFDDDDDWEDIMHNLAASKSSTAAYQPIKEGRPIKSVSERLSSAKTDCLPVSSTAQNINFSESIQNYTDKSAQNLASRNLKHERFQSLSFPHTKEMMKIFHKKFGLHNFRTNQLEAINAALLGEDCFILMPTGGGKSLCYQLPACVSPGVTVVISPLRSLIVDQVQKLTSLDIPATYLTGDKTDSEATNIYLQLSKKDPIIKLLYVTPEKICASNRLISTLENLYERKLLARFVIDEAHCVSQWGHDFRQDYKRMNMLRQKFPSVPVMALTATANPRVQKDILTQLKILRPQVFSMSFNRHNLKYYVLPKKPKKVAFDCLEWIRKHHPYDSGIIYCLSRRECDTMADTLQRDGLAALAYHAGLSDSARDEVQQKWINQDGCQVICATIAFGMGIDKPDVRFVIHASLPKSVEGYYQESGRAGRDGEISHCLLFYTYHDVTRLKRLIMMEKDGNHHTRETHFNNLYSMVHYCENITECRRIQLLAYFGENGFNPDFCKKHPDVSCDNCCKTKDYKTRDVTDDVKSIVRFVQEHSSSQGMRNIKHVGPSGRFTMNMLVDIFLGSKSAKIQSGIFGKGSAYSRHNAERLFKKLILDKILDEDLYINANDQAIAYVMLGNKAQTVLNGNLKVDFMETENSSSVKKQKALVAKVSQREEMVKKCLGELTEVCKSLGKVFGVHYFNIFNTVTLKKLAESLSSDPEVLLQIDGVTEDKLEKYGAEVISVLQKYSEWTSPAEDSSPGISLSSSRGPGRSAAEELDEEIPVSSHYFASKTRNERKRKKMPASQRSKRRKTASSGSKAKGGSATCRKISSKTKSSSIIGSSSASHTSQATSGANSKLGIMAPPKPINRPFLKPSYAFS

SEQ ID NO: 9226 - protein, 413 aa, Homo sapiens
  Payload ID: 1872;
  Gene Symbol: BLM;
  Gene Name: Bloom syndrome, RecQ helicase-like;
  ENSP ID: ENSP00000453359
MAAVPQNNLQEQLERHSARTLNNKLSLSKPKFSGFTFKKKTSSDNNVSVTNVSVAKTPVLRNKDVNVTEDFSFSEPLPNTTNQQRVKDFFKNAPAGQETQRGGSKSLLPDFLQTPKEVVCTTQNTPTVKKSRDTALKKLEFSSSPDSLSTINDWDDMDDFDTSETSKSFVTPPQSHFVRVSTAQKSKKGKRNFFKAQLYTTNTVKTDLPPPSSESEQIDLTEEQKDDSEWLSSDVICIDDGPIAEVHINEDAQESDSLKTHLEDERDNSEKKKNLEEAELHSTEKVPCIEFDDDDYDTDFVPPSPEEIISASSSSSKCLSTLKDLDTSDRKEDVLSTSKDLLSKPEKMSMQELNPETSTDCDGSHCVAQAGLELLDLSNPPALASPKGWDYSHEPPCLAKTFFFFPQRKILTT

SEQ ID NO: 9227 - protein, 1286 aa, Homo sapiens
  Payload ID: 1872;
  Gene Symbol: BLM;
  Gene Name: Bloom syndrome, RecQ helicase-like;
  ENSP ID: ENSP00000454158
MAAVPQNNLQEQLERHSARTLNNKLSLSKPKFSGFTFKKKTSSDNNVSVTNVSVAKTPVLRNKDVNVTEDFSFSEPLPNTTNQQRVKDFFKNAPAGQETQRGGSKSLLPDFLQTPKEVVCTTQNTPTVKKSRDTALKKLEFSSSPDSLSTINDWDDMDDFDTSETSKSFVTPPQSHFVRVSTAQKSKKGKRNFFKAQLYTTNTVKTDLPPPSSESEQIDLTEEQKDDSEWLSSDVICIDDGPIAEVHINEDAQESDSLKTHLEDERDNSEKKKNLEEAELHSTEKVPCIEFDDDDYDTDFVPPSPEEIISASSSSSKCLSTLKDLDTSDRKEDVLSTSKDLLSKPEKMSMQELNPETSTDCDARQISLQQQLIHVMEHICKLIDTIPDDKLKLLDCGNELLQQRNIRRKLLTEVDFNKSDASLLGSLWRYRPDSLDGPMEGDSCPTGNSMKELNFSHLPSNSVSPGDCLLTTTLGKTGFSATRKNLFERPLFNTHLQKSFVSSNWAETPRLGKKNESSYFPGNVLTSTAVKDQNKHTASINDLERETQPSYDIDNFDIDDFDDDDDWEDIMHNLAASKSSTAAYQPIKEGRPIKSVSERLSSAKTDCLPVSSTAQNINFSESIQNYTDKSAQNLASRNLKHERFQSLSFPHTKEMMKIFHKKFGLHNFRTNQLEAINAALLGEDCFILMPTGGGKSLCYQLPACVSPGVTVVISPLRSLIVDQVQKLTSLDIPATYLTGDKTDSEATNIYLQLSKKDPIIKLLYVTPEKICASNRLISTLENLYERKLLARFVIDEAHCVSQWGHDFRQDYKRMNMLRQKFPSVPVMALTATANPRVQKDILTQLKILRPQVFSMSFNRHNLKYYVLPKKPKKVAFDCLEWIRKHHPYDSGIIYCLSRRECDTMADTLQRDGLAALAYHAGLSDSARDEVQQKWINQDGCQVICATIAFGMGIDKPDVRFVIHASLPKSVEGYYQESGRAGRDGEISHCLLFYTYHDVTRLKRLIMMEKDGNHHTRETHFNNLYSMVHYCENITECRRIQLLAYFGENGFNPDFCKKHPDVSCDNCCKTKDYKTRDVTDDVKSIVRFVQEHSSSQGMRNIKHVGPSGRFTMNMLVDIFLESLSSDPEVLLQIDGVTEDKLEKYGAEVISVLQKYSEWTSPAEDSSPGISLSSSRGPGRSAAEELDEEIPVSSHYFASKTRNERKRKKMPASQRSKRRKTASSGSKAKGGSATCRKISSKTKSSSIIGSSSASHTSQATSGANSKLGIMAPPKPINRPFLKPSYAFS

SEQ ID NO: 9228 - protein, 326 aa, Homo sapiens
  Payload ID: 1873;
  Gene Symbol: BMI1;
  Gene Name: BMI1 proto-oncogene, polycomb ring finger;
  Uniprot ID:  P35226;
  ENSP ID: ENSP00000365851
MHRTTRIKITELNPHLMCVLCGGYFIDATTIIECLHSFCKTCIVRYLETSKYCPICDVQVHKTRPLLNIRSDKTLQDIVYKLVPGLFKNEMKRRRDFYAAHPSADAANGSNEDRGEVADEDKRIITDDEIISLSIEFFDQNRLDRKVNKDKEKSKEEVNDKRYLRCPAAMTVMHLRKFLRSKMDIPNTFQIDVMYEEEPLKDYYTLMDIAYIYTWRRNGPLPLKYRVRPTCKRMKISHQRDGLTNAGELESDSGSDKANSPAGGIPSTSSCLPSPSTPVQSPHPQFPHISSTMNGTSNSPSGNHQSSFANRPRKSSVNGSSATSSG

SEQ ID NO: 9229 - protein, 184 aa, Homo sapiens
  Payload ID: 1873;
  Gene Symbol: BMI1;
  Gene Name: BMI1 proto-oncogene, polycomb ring finger;
  ENSP ID: ENSP00000390768
YFIDATTIIECLHSFCKTCIVRYLETSKYCPICDVQVHKTRPLLNIRLDRKVNKDKEKSKEEVNDKRYLRCPAAMTVMHLRKFLRSKMDIPNTFQIDVMYEEEPLKDYYTLMDIAYIYTWRRNGPLPLKYRVRPTCKRMKISHQRDGLTNAGELESDSGSDKANSPAGGIPSTSSCLPSPSTPV

SEQ ID NO: 9230 - protein, 150 aa, Homo sapiens
  Payload ID: 1873;
  Gene Symbol: BMI1;
  Gene Name: BMI1 proto-oncogene, polycomb ring finger;
  ENSP ID: ENSP00000397912
MHRTTRIKITELNPHLMCVLCGGYFIDATTIIECLHSFCKTCIVRYLETSKYCPICDVQVHKTRPLLNIRSDKTLQDIVYKLVPGLFKNEMKRRRDFYAAHPSADAANGSNEDRGEVADEDKRIITDDEIISLSIEFFDQNRLDRKVNKD

SEQ ID NO: 9231 - protein, 105 aa, Homo sapiens
  Payload ID: 1873;
  Gene Symbol: BMI1;
  Gene Name: BMI1 proto-oncogene, polycomb ring finger;
  ENSP ID: ENSP00000399220
MHRTTRIKITELNPHLMCVLCGGYFIDATTIIECLHSFCKTCIVRYLETSKYCPICDVQVHKTRPLLNIRSDKTLQDIVYKLVPGLFKNEMKRRRDFYAAHPSAD

SEQ ID NO: 9232 - protein, 260 aa, Homo sapiens
  Payload ID: 1874;
  Gene Symbol: BAMBI;
  Gene Name: BMP and activin membrane-bound inhibitor;
  Uniprot ID:  Q13145;
  ENSP ID: ENSP00000364683
MDRHSSYIFIWLQLELCAMAVLLTKGEIRCYCDAAHCVATGYMCKSELSACFSRLLDPQNSNSPLTHGCLDSLASTTDICQAKQARNHSGTTIPTLECCHEDMCNYRGLHDVLSPPRGEASGQGNRYQHDGSRNLITKVQELTSSKELWFRAAVIAVPIAGGLILVLLIMLALRMLRSENKRLQDQRQQMLSRLHYSFHGHHSKKGQVAKLDLECMVPVSGHENCCLTCDKMRQADLSNDKILSLVHWGMYSGHGKLEFV

SEQ ID NO: 9233 - protein, 685 aa, Homo sapiens
  Payload ID: 1875;
  Gene Symbol: BMPER;
  Gene Name: BMP binding endothelial regulator;
  Uniprot ID:  Q8N8U9;
  ENSP ID: ENSP00000297161
MLWFSGVGALAERYCRRSPGITCCVLLLLNCSGVPMSLASSFLTGSVAKCENEGEVLQIPFITDNPCIMCVCLNKEVTCKREKCPVLSRDCALAIKQRGACCEQCKGCTYEGNTYNSSFKWQSPAEPCVLRQCQEGVVTESGVRCVVHCKNPLEHLGMCCPTCPGCVFEGVQYQEGEEFQPEGSKCTKCSCTGGRTQCVREVCPILSCPQHLSHIPPGQCCPKCLGQRKVFDLPFGSCLFRSDVYDNGSSFLYDNCTACTCRDSTVVCKRKCSHPGGCDQGQEGCCEECLLRVPPEDIKVCKFGNKIFQDGEMWSSINCTICACVKGRTECRNKQCIPISSCPQGKILNRKGCCPICTEKPGVCTVFGDPHYNTFDGRTFNFQGTCQYVLTKDCSSPASPFQVLVKNDARRTRSFSWTKSVELVLGESRVSLQQHLTVRWNGSRIALPCRAPHFHIDLDGYLLKVTTKAGLEISWDGDSFVEVMAAPHLKGKLCGLCGNYNGHKRDDLIGGDGNFKFDVDDFAESWRVESNEFCNRPQRKPVPELCQGTVKVKLRAHRECQKLKSWEFQTCHSTVDYATFYRSCVTDMCECPVHKNCYCESFLAYTRACQREGIKVHWEPQQNCAATQCKHGAVYDTCGPGCIKTCDNWNEIGPCNKPCVAGCHCPANLVLHKGRCIKPVLCPQR

SEQ ID NO: 9234 - protein, 90 aa, Homo sapiens
  Payload ID: 1875;
  Gene Symbol: BMPER;
  Gene Name: BMP binding endothelial regulator;
  ENSP ID: ENSP00000398835
MLWFSGVGALAERYCRRSPGITCCVLLLLNCSGVPMSLASSFLTGSVAKCENEGEVLQIPFITDNPCIMCVCLHEPTRWSNLTQNPGFYD

SEQ ID NO: 9235 - protein, 161 aa, Homo sapiens
  Payload ID: 1875;
  Gene Symbol: BMPER;
  Gene Name: BMP binding endothelial regulator;
  ENSP ID: ENSP00000399843
MLWFSGVGALAERYCRRSPGITCCVLLLLNCSGVPMSLASSFLTGSVAKCENEGEVLQIPFITDNPCIMCVCLVAPMKEIPITAPSNGRARLSLVFYASARRALSQSLGCAVLFIVKTLWSIWECAAPHVQAVCLRVCSIKKGRNFSQKEANVPSVPALEA

SEQ ID NO: 9236 - protein, 133 aa, Homo sapiens
  Payload ID: 1875;
  Gene Symbol: BMPER;
  Gene Name: BMP binding endothelial regulator;
  ENSP ID: ENSP00000409998
MLWFSGVGALAERYCRRSPGITCCVLLLLNCSGVPMSLASSFLTGSVAKCENEGEVLQIPFITDNPCIMCVCLNKEVTCKREKCPVLSRDCALAIKQRGACCEQCKVLVSRVLRDTVLFTLKYWRLPVFWLHL

SEQ ID NO: 9237 - protein, 1161 aa, Homo sapiens
  Payload ID: 1876;
  Gene Symbol: BMP2K;
  Gene Name: BMP2 inducible kinase;
  Uniprot ID:  Q9NSY1;
  ENSP ID: ENSP00000334836
MKKFSRMPKSEGGSGGGAAGGGAGGAGAGAGCGSGGSSVGVRVFAVGRHQVTLEESLAEGGFSTVFLVRTHGGIRCALKRMYVNNMPDLNVCKREITIMKELSGHKNIVGYLDCAVNSISDNVWEVLILMEYCRAGQVVNQMNKKLQTGFTEPEVLQIFCDTCEAVARLHQCKTPIIHRDLKVENILLNDGGNYVLCDFGSATNKFLNPQKDGVNVVEEEIKKYTTLSYRAPEMINLYGGKPITTKADIWALGCLLYKLCFFTLPFGESQVAICDGNFTIPDNSRYSRNIHCLIRFMLEPDPEHRPDIFQVSYFAFKFAKKDCPVSNINNSSIPSALPEPMTASEAAARKSQIKARITDTIGPTETSIAPRQRPKANSATTATPSVLTIQSSATPVKVLAPGEFGNHRPKGALRPGNGPEILLGQGPPQQPPQQHRVLQQLQQGDWRLQQLHLQHRHPHQQQQQQQQQQQQQQQQQQQQQQQQQQQHHHHHHHHLLQDAYMQQYQHATQQQQMLQQQFLMHSVYQPQPSASQYPTMMPQYQQAFFQQQMLAQHQPSQQQASPEYLTSPQEFSPALVSYTSSLPAQVGTIMDSSYSANRSVADKEAIANFTNQKNISNPPDMSGWNPFGEDNFSKLTEEELLDREFDLLRSNRLEERASSDKNVDSLSAPHNHPPEDPFGSVPFISHSGSPEKKAEHSSINQENGTANPIKNGKTSPASKDQRTGKKTSVQGQVQKGNDESESDFESDPPSPKSSEEEEQDDEEVLQGEQGDFNDDDTEPENLGHRPLLMDSEDEEEEEKHSSDSDYEQAKAKYSDMSSVYRDRSGSGPTQDLNTILLTSAQLSSDVAVETPKQEFDVFGAVPFFAVRAQQPQQEKNEKNLPQHRFPAAGLEQEEFDVFTKAPFSKKVNVQECHAVGPEAHTIPGYPKSVDVFGSTPFQPFLTSTSKSESNEDLFGLVPFDEITGSQQQKVKQRSLQKLSSRQRRTKQDMSKSNGKRHHGTPTSTKKTLKPTYRTPERARRHKKVGRRDSQSSNEFLTISDSKENISVALTDGKDRGNVLQPEESLLDPFGAKPFHSPDLSWHPPHQGLSDIRADHNTVLPGRPRQNSLHGSFHSADVLKMDDFGAVPFTELVVQSITPHQSQQSQPVELDPFGAAPFPSKQ

SEQ ID NO: 9238 - protein, 355 aa, Homo sapiens
  Payload ID: 1876;
  Gene Symbol: BMP2K;
  Gene Name: BMP2 inducible kinase;
  ENSP ID: ENSP00000373662
MKKFSRMPKSEGGSGGGAAGGGAGGAGAGAGCGSGGSSVGVRVFAVGRHQVTLEESLAEGGFSTVFLVRTHGGIRCALKRMYVNNMPDLNVCKREITIMKELSGHKNIVGYLDCAVNSISDNVWEVLILMEYCRAGQVVNQMNKKLQTGFTEPEVLQIFCDTCEAVARLHQCKTPIIHRDLKVENILLNDGGNYVLCDFGSATNKFLNPQKDGVNVVEEEIKKYTTLSYRAPEMINLYGGKPITTKADIWALGCLLYKLCFFTLPFGESQVAICDGNFTIPDNSRYSRNIHCLIRFMLEPDPEHRPDIFQVSYFAFKFAKKDCPVSNINKCCKQLLRHGALLTEILLFLQLFLNR

SEQ ID NO: 9239 - protein, 662 aa, Homo sapiens
  Payload ID: 1876;
  Gene Symbol: BMP2K;
  Gene Name: BMP2 inducible kinase;
  Uniprot ID:  Q9NSY1;
  ENSP ID: ENSP00000421768
MKKFSRMPKSEGGSGGGAAGGGAGGAGAGAGCGSGGSSVGVRVFAVGRHQVTLEESLAEGGFSTVFLVRTHGGIRCALKRMYVNNMPDLNVCKREITIMKELSGHKNIVGYLDCAVNSISDNVWEVLILMEYCRAGQVVNQMNKKLQTGFTEPEVLQIFCDTCEAVARLHQCKTPIIHRDLKVENILLNDGGNYVLCDFGSATNKFLNPQKDGVNVVEEEIKKYTTLSYRAPEMINLYGGKPITTKADIWALGCLLYKLCFFTLPFGESQVAICDGNFTIPDNSRYSRNIHCLIRFMLEPDPEHRPDIFQVSYFAFKFAKKDCPVSNINNSSIPSALPEPMTASEAAARKSQIKARITDTIGPTETSIAPRQRPKANSATTATPSVLTIQSSATPVKVLAPGEFGNHRPKGALRPGNGPEILLGQGPPQQPPQQHRVLQQLQQGDWRLQQLHLQHRHPHQQQQQQQQQQQQQQQQQQQQQQQQQQQHHHHHHHHLLQDAYMQQYQHATQQQQMLQQQFLMHSVYQPQPSASQYPTMMPQYQQAFFQQQMLAQHQPSQQQASPEYLTSPQEFSPALVSYTSSLPAQVGTIMDSSYSANRSVADKEAIANFTNQKNISNPPDMSGWNPFGEDNFSKLTEEELLDREFDLLRSSKGHLKAYFASQ

SEQ ID NO: 9240 - protein, 854 aa, Homo sapiens
  Payload ID: 1876;
  Gene Symbol: BMP2K;
  Gene Name: BMP2 inducible kinase;
  ENSP ID: ENSP00000424668
  MOD_RES (1)..(1): Any amino acid
XFQVSYFAFKFAKKDCPVSNINNSSIPSALPEPMTASEAAARKSQIKARITDTIGPTETSIAPRQRPKANSATTATPSVLTIQSSATPVKVLAPGEFGNHRPKGALRPGNGPEILLGQGPPQQPPQQHRVLQQLQQGDWRLQQLHLQHRHPHQQQQQQQQQQQQQQQQQQQQQQQQQQQHHHHHHHHLLQDAYMQQYQHATQQQQMLQQQFLMHSVYQPQPSASQYPTMMPQYQQAFFQQQMLAQHQPSQQQASPEYLTSPQEFSPALVSYTSSLPAQVGTIMDSSYSANRSVADKEAIANFTNQKNISNPPDMSGWNPFGEDNFSKLTEEELLDREFDLLRSNRLEERASSDKNVDSLSAPHNHPPEDPFGSVPFISHSGSPEKKAEHSSINQENGTANPIKNGKTSPASKDQRTGKKTSVQGQVQKGNDESESDFESDPPSPKSSEEEEQDDEEVLQGEQGDFNDDDTEPENLGHRPLLMDSEDEEEEEKHSSDSDYEQAKAKYSDMSSVYRDRSGSGPTQDLNTILLTSAQLSSDVAVETPKQEFDVFGAVPFFAVRAQQPQQEKNEKNLPQHRFPAAGLEQEEFDVFTKAPFSKKVNVQECHAVGPEAHTIPGYPKSVDVFGSTPFQPFLTSTSKSESNEDLFGLVPFDEITGSQQQKVKQRSLQKLSSRQRRTKQDMSKSNGKRHHGTPTSTKKTLKPTYRTPERARRHKKVGRRDSQSSNEFLTISDSKENISVALTDGKDRGNVLQPEESLLDPFGAKPFHSPDLSWHPPHQGLSDIRADHNTVLPGRPRQNSLHGSFHSADVLKMDDFGAVPFTELVVQSITPHQSQQSQPVELDPFGAAPFPSKQ

SEQ ID NO: 9241 - protein, 355 aa, Homo sapiens; identical to SEQ ID NO: 9238
  Payload ID: 1876;
  Gene Symbol: BMP2K;
  Gene Name: BMP2 inducible kinase;
  ENSP ID: ENSP00000487317

SEQ ID NO: 9242 - protein, 1282 aa, Homo sapiens
  Payload ID: 1877;
  Gene Symbol: BMS1;
  Gene Name: BMS1 ribosome biogenesis factor;
  Uniprot ID:  Q14692;
  ENSP ID: ENSP00000363642
MEAKDQKKHRKKNSGPKAAKKKKRLLQDLQLGDEEDARKRNPKAFAVQSAVRMARSFHRTQDLKTKKHHIPVVDRTPLEPPPIVVVVMGPPKVGKSTLIQCLIRNFTRQKLTEIRGPVTIVSGKKRRLTIIECGCDINMMIDLAKVADLVLMLIDASFGFEMETFEFLNICQVHGFPKIMGVLTHLDSFKHNKQLKKTKKRLKHRFWTEVYPGAKLFYLSGMVHGEYQNQEIHNLGRFITVMKFRPLTWQTSHPYILADRMEDLTNPEDIRTNIKCDRKVSLYGYLRGAHLKNKSQIHMPGVGDFAVSDISFLPDPCALPEQQKKRCLNEKEKLVYAPLSGVGGVLYDKDAVYVDLGGSHVFQDEVGPTHELVQSLISTHSTIDAKMASSRVTLFSDSKPLGSEDIDNQGLMMPKEEKQMDLNTGRMRRKAIFGDEDESGDSDDEEDDEMSEDDGLENGSSDEEAEEEENAEMTDQYMAVKGIKRRKLELEEDSEMDLPAFADSDDDLERSSAEEGEAEEADESSEEEDCTAGEKGISGSKAAGEGSKAGLSPANCQSDRVNLEKSLLMKKAALPTFDSGHCTAEEVFASEDESEESSSLSAEEEDSENEEAIRKKLSKPSQVSSGQKLGPQNFIDETSDIENLLKEEEDYKEENNDSKETSGALKWKEDLSRKAAEAFLRQQQAAPNLRKLIYGTVTEDNEEEDDDTLEELGGLFRVNQPDRECKHKADSLDCSRFLVEAPHDWDLEEVMNSIRDCFVTGKWEDDKDAAKVLAEDEELYGDFEDLETGDVHKGKSGPNTQNEDIEKEVKEEIDPDEEESAKKKHLDKKRKLKEMFDAEYDEGESTYFDDLKGEMQKQAQLNRAEFEDQDDEARVQYEGFRPGMYVRIEIENVPCEFVQNFDPHYPIILGGLGNSEGNVGYVQMRLKKHRWYKKILKSRDPIIFSVGWRRFQTIPLYYIEDHNGRQRLLKYTPQHMHCGAAFWGPITPQGTGFLAIQSVSGIMPDFRIAATGVVLDLDKSIKIVKKLKLTGFPYKIFKNTSFIKGMFNSALEVAKFEGAVIRTVSGIRGQIKKALRAPEGAFRASFEDKLLMSDIVFMRTWYPVSIPAFYNPVTSLLKPVGEKDTWSGMRTTGQLRLAHGVRLKANKDSLYKPILRQKKHFNSLHIPKALQKALPFKNKPKTQAKAGKVPKDRRRPAVIREPHERKILALLDALSTVHSQKMKKAKEQRHLHNKEHFRAKQKEEEEKLKRQKDLRKKLFRIQGQKERRNQKSSLKGAEGQLQ

SEQ ID NO: 9243 - protein, 675 aa, Homo sapiens
  Payload ID: 1878;
  Gene Symbol: BMX;
  Gene Name: BMX non-receptor tyr kinase;
  Uniprot ID:  P51813;
  ENSP ID: ENSP00000308774
MDTKSILEELLLKRSQQKKKMSPNNYKERLFVLTKTNLSYYEYDKMKRGSRKGSIEIKKIRCVEKVNLEEQTPVERQYPFQIVYKDGLLYVYASNEESRSQWLKALQKEIRGNPHLLVKYHSGFFVDGKFLCCQQSCKAAPGCTLWEAYANLHTAVNEEKHRVPTFPDRVLKIPRAVPVLKMDAPSSSTTLAQYDNESKKNYGSQPPSSSTSLAQYDSNSKKIYGSQPNFNMQYIPREDFPDWWQVRKLKSSSSSEDVASSNQKERNVNHTTSKISWEFPESSSSEEEENLDDYDWFAGNISRSQSEQLLRQKGKEGAFMVRNSSQVGMYTVSLFSKAVNDKKGTVKHYHVHTNAENKLYLAENYCFDSIPKLIHYHQHNSAGMITRLRHPVSTKANKVPDSVSLGNGIWELKREEITLLKELGSGQFGVVQLGKWKGQYDVAVKMIKEGSMSEDEFFQEAQTMMKLSHPKLVKFYGVCSKEYPIYIVTEYISNGCLLNYLRSHGKGLEPSQLLEMCYDVCEGMAFLESHQFIHRDLAARNCLVDRDLCVKVSDFGMTRYVLDDQYVSSVGTKFPVKWSAPEVFHYFKYSSKSDVWAFGILMWEVFSLGKQPYDLYDNSQVVLKVSQGHRLYRPHLASDTIYQIMYSCWHELPEKRPTFQQLLSSIEPLREKDKH

SEQ ID NO: 9244 - protein, 675 aa, Homo sapiens; identical to SEQ ID NO: 9243
  Payload ID: 1878;
  Gene Symbol: BMX;
  Gene Name: BMX non-receptor tyr kinase;
  Uniprot ID:  P51813;
  ENSP ID: ENSP00000340082

SEQ ID NO: 9245 - protein, 675 aa, Homo sapiens; identical to SEQ ID NO: 9243
  Payload ID: 1878;
  Gene Symbol: BMX;
  Gene Name: BMX non-receptor tyr kinase;
  Uniprot ID:  P51813;
  ENSP ID: ENSP00000350224

SEQ ID NO: 9246 - protein, 354 aa, Homo sapiens
  Payload ID: 1879;
  Gene Symbol: ABO;
  Gene Name: BO blood group (transferase A, alpha 1-3-N-acetylgalactosaminyltransferase;
  transferase B, alpha 1-3-galactosyltransferase);
  ENSP ID: ENSP00000487108
MAEVLRTLAGKPKCHALRPMILFLIMLVLVLFGYGVLSPRSLMPGSLERGFCMAVREPDHLQRVSLPRMVYPQPKVLTPCRKDVLVVTPWLAPIVWEGTFNIDILNEQFRLQNTTIGLTVFAIKKYVAFLKLFLETAEKHFMVGHRVHYYVFTDQLAAVPRVTLGTGRQLSVLEVRAYKRWQDVSMRRMEMISDFCERRFLSEVDYLVCVDVDMEFRDHVGVEILTPLFGTLHPGFYGSSREAFTYERRPQSQAYIPKDEGDFYYLGGFFGGSVQEVQRLTRACHQAMMVDQANGIEAVWHDESHLNKYLLRHKPTKVLSPEYLWDQQLLGWPAVLRKLRFTAVPKNHQAVRNP

SEQ ID NO: 9247 - protein, 941 aa, Homo sapiens
  Payload ID: 1880;
  Gene Symbol: BBX;
  Gene Name: bobby sox homolog (Drosophila);
  Uniprot ID:  Q8WY36;
  ENSP ID: ENSP00000319974
MKGSNRNKDHSAEGEGVGKRPKRKCLQWHPLLAKKLLDFSEEEEEEDEEEDIDKVQLLGADGLEQDVGETEDDESPEQRARRPMNAFLLFCKRHRSLVRQEHPRLDNRGATKILADWWAVLDPKEKQKYTDMAKEYKDAFMKANPGYKWCPTTNKPVKSPTPTVNPRKKLWAFPSDSSRDLPSPKKAKTEEMPQLNFGMADPTQMGGLSMLLLAGEHALGTPEVSSGTCRPDVSESPELRQKSPLFQFAEISSSTSHSDASTKQCQTSALFQFAEISSNTSQLGGAEPVKRCGKSALFQLAEMCLASEGMKMEESKLIKAKESDGGRIKELEKGKEEKEIKMEKTDETRLQKEAEFEKSAKENLRDSKELRNFEALQIDDIMAIKMEDPKEIRKEELEEDHKCSHFPDFSYSASSKIIISDVPSRKDHMCHPHGIMIIEDPAALNKPEKLKKKKKKSKMDRHGNDKSTPKKTCKKRQSSESDIESVIYTIEAVAKGDWGIEKLGDTPRKKVRTSSSGKGSILDAKPPKKKVKSREKKMSKEKSSDTTKESRPPDFISISASKNISGETPEGIKAEPLTPMEDALPPSLSGQAKPEDSDCHRKIETCGSRKSERSCKGALYKTLVSEGMLTSLRANVDRGKRSSGKGNSSDHEGCWNEESWTFSQSGTSGSKKFKKTKPKEDCLLGSAKLDEEFEKKFNSLPQYSPVTFDRKCVPVPRKKKKTGNVSSEPTKTSKGPFQSQKKNLFHKIVSKYKHKKEKPNVPEKGSGDKWSNKQLFLDAIHPTEAIFSEDRNTMEPVHKVKNIPSIFNTPEPTTTQEPLVGSQKRKARKTKITHLVRTADGRVSPAGGTLDDKPKEQLQRSLPKATETDCNDKCSHNTEVGETRSSTPEMPAVSAFFSLAALAEVAAMENVHRGQRSTPLTHDGQPKEMPQAPVLISCADQ

SEQ ID NO: 9248 - protein, 891 aa, Homo sapiens
  Payload ID: 1880;
  Gene Symbol: BBX;
  Gene Name: bobby sox homolog (Drosophila);
  ENSP ID: ENSP00000385317
MKGSNRNKDHSAEGEGVGKRPKRKCLQWHPLLAKKLLDFSEEEEEEDEEEDIDKVQLLGADGLEQDVGETEDDESPEQRARRPMNAFLLFCKRHRSLVRQEHPRLDNRGATKILADWWAVLDPKEKQKYTDMAKEYKDAFMKANPGYKWCPTTNKPVKSPTPTVNPRKKLWAFPSDSSRDLPSPKKAKTEEMPQLNFGMADPTQMGGLSMLLLAGEHALGTPEVSSGTCRPDVSESPELRQKSPLFQFAEISSSTSHSDASTKQCQTSALFQFAEISSNTSQLGGAEPVKRCGKSALFQLAEMCLASEGMKMEESKLIKAKESDGGRIKELEKGKEEKEIKMEKTDETRLQKEAEFEKSAKENLRDSKELRNFEALQIDDIMAIKMEDPKEIRKEELEEDHKCSHFPDFSYSASSKIIISDVPSRKDHMCHPHGIMIIEDPAALNKPEKLKKKKKKSKMDRHGNDKSTPKKTCKKRQSSESDIESVIYTIEAVAKGDWGIEKLGDTPRKKVRTSSSGKGSILDAKPPKKKVKSREKKMSKEKSSDTTKESRPPDFISISASKNISGETPEGIKAEPLTPMEDALPPSLSGQAKPEDSDCHRKIETCGSRKSERSCKGALYKTLVSEGMLTSLRANVDRGKRSSGKGNSSDHEGCWNEESWTFSQSGTSGSKKFKKTKPKEDCLLGSAKLDEEFEKKFNSLPQYSPVTFDRKCVPVPRKKKKTGNVSSEPTKTSKAIFSEDRNTMEPVHKVKNIPSIFNTPEPTTTQEPLVGSQKRKARKTKITHLVRTADGRVSPAGGTLDDKPKEQLQRSLPKATETDCNDKCSHNTEVGETRSSTPEMPAVSAFFSLAALAEVAAMENVHRGQRSTPLTHDGQPKEMPQAPVLISCADQ

SEQ ID NO: 9249 - protein, 448 aa, Homo sapiens
  Payload ID: 1880;
  Gene Symbol: BBX;
  Gene Name: bobby sox homolog (Drosophila);
  ENSP ID: ENSP00000385518
MKGSNRNKDHSAEGEGVGKRPKRKCLQWHPLLAKKLLDFSEEEEEEDEEEDIDKVQLLGADGLEQDVGETEDDESPEQRARRPMNAFLLFCKRHRSLVRQEHPRLDNRGATKILADWWAVLDPKEKQKYTDMAKEYKDAFMKANPGYKWCPTTNKPVKSPTPTVNPRKKLWAFPSDSSRDLPSPKKAKTEEMPQLNFGMADPTQMGGLSMLLLAGEHALGTPEVSSGTCRPDVSESPELRQKSPLFQFAEISSSTSHSDASTKQCQTSALFQFAEISSNTSQLGGAEPVKRCGKSALFQLAEMCLASEGMKMEESKLIKAKESDGGRIKELEKGKEEKEIKMEKTDETRLQKEAEFEKSAKENLRDSKELRNFEALQIDDIMAIKMEDPKEIRKEELEEDHKCSHFPDFSYSASSKIIISDVPSRKDHMCHPHGIMIIEDPAALNKPE

SEQ ID NO: 9250 - protein, 911 aa, Homo sapiens
  Payload ID: 1880;
  Gene Symbol: BBX;
  Gene Name: bobby sox homolog (Drosophila);
  Uniprot ID:  Q8WY36;
  ENSP ID: ENSP00000385530
MKGSNRNKDHSAEGEGVGKRPKRKCLQWHPLLAKKLLDFSEEEEEEDEEEDIDKVQLLGADGLEQDVGETEDDESPEQRARRPMNAFLLFCKRHRSLVRQEHPRLDNRGATKILADWWAVLDPKEKQKYTDMAKEYKDAFMKANPGYKWCPTTNKPVKSPTPTVNPRKKLWAFPSDSSRDLPSPKKAKTEEMPQLNFGMADPTQMGGLSMLLLAGEHALGTPEVSSGTCRPDVSESPELRQKSPLFQFAEISSSTSHSDASTKQCQTSALFQFAEISSNTSQLGGAEPVKRCGKSALFQLAEMCLASEGMKMEESKLIKAKESDGGRIKELEKGKEEKEIKMEKTDETRLQKEAEFEKSAKENLRDSKELRNFEALQIDDIMAIKMEDPKEIRKEELEEDHKCSHFPDFSYSASSKIIISDVPSRKDHMCHPHGIMIIEDPAALNKPEKLKKKKKKSKMDRHGNDKSTPKKTCKKRQSSESDIESVIYTIEAVAKGDWGIEKLGDTPRKKVRTSSSGKGSILDAKPPKKKVKSREKKMSKEKSSDTTKESRPPDFISISASKNISGETPEGIKAEPLTPMEDALPPSLSGQAKPEDSDCHRKIETCGSRKSERSCKGALYKTLVSEGMLTSLRANVDRGKRSSGKGNSSDHEGCWNEESWTFSQSGTSGSKKFKKTKPKEDCLLGSAKLDEEFEKKFNSLPQYSPVTFDRKCVPVPRKKKKTGNVSSEPTKTSKGSGDKWSNKQLFLDAIHPTEAIFSEDRNTMEPVHKVKNIPSIFNTPEPTTTQEPLVGSQKRKARKTKITHLVRTADGRVSPAGGTLDDKPKEQLQRSLPKATETDCNDKCSHNTEVGETRSSTPEMPAVSAFFSLAALAEVAAMENVHRGQRSTPLTHDGQPKEMPQAPVLISCADQ

SEQ ID NO: 9251 - protein, 119 aa, Homo sapiens
  Payload ID: 1880;
  Gene Symbol: BBX;
  Gene Name: bobby sox homolog (Drosophila);
  ENSP ID: ENSP00000392230
MKGSNRNKDHSAEGEGVGKRPKRKCLQWHPLLAKKLLDFSEEEEEEDEEEDIDKTRIEAQYKNRGLACLVLSSCLRNENGAWHIVQLLGADGLEQDVGETEDDESPEQRARRPMNAFLL

SEQ ID NO: 9252 - protein, 13 aa, Homo sapiens
  Payload ID: 1880;
  Gene Symbol: BBX;
  Gene Name: bobby sox homolog (Drosophila);
  ENSP ID: ENSP00000396373
MKGSNRNKDHSAE

SEQ ID NO: 9253 - protein, 71 aa, Homo sapiens
  Payload ID: 1880;
  Gene Symbol: BBX;
  Gene Name: bobby sox homolog (Drosophila);
  ENSP ID: ENSP00000400543
MKGSNRNKDHSAEGEGVGKRPKRKCLQWHPLLAKKLLDFSEEEEEEDEEEDIDKVQLLGADGLEQDVGETE

SEQ ID NO: 9254 - protein, 131 aa, Homo sapiens
  Payload ID: 1880;
  Gene Symbol: BBX;
  Gene Name: bobby sox homolog (Drosophila);
  ENSP ID: ENSP00000401524
NTPEPTTTQEPLVGSQKRKARKTKITHLVRTADGRVSPAGDDKPKEQLQRSLPKATETDCNDKCSHNTEVGETRSSTPEMPAVSAFFSLAALAEVAAMENVHRGQRSTPLTHDGQPKEMPQAPVLISCADQ

SEQ ID NO: 9255 - protein, 80 aa, Homo sapiens
  Payload ID: 1880;
  Gene Symbol: BBX;
  Gene Name: bobby sox homolog (Drosophila);
  ENSP ID: ENSP00000402372
  MOD_RES (1)..(1): Any amino acid
XTKTSKGPFQSQKKNLFHKIVSKYKHKKEKPNVPEKGSGDKWSNKQLFLDAIHPTEEPTTTQEPLVGSQKRKARKTKITH

SEQ ID NO: 9256 - protein, 149 aa, Homo sapiens
  Payload ID: 1880;
  Gene Symbol: BBX;
  Gene Name: bobby sox homolog (Drosophila);
  ENSP ID: ENSP00000403806
MKGSNRNKDHSAEGEGVGKRPKRKCLQWHPLLAKKLLDFSEEEEEEDEEEDIDKVQLLGADGLEQDVGETEDDESPEQRARRPMNAFLLFCKRHRSLVRQEHPRLDNRGATKILADWWAVLDPKEKQKYTDMAKEYKDAFMKANPGYKW

SEQ ID NO: 9257 - protein, 628 aa, Homo sapiens
  Payload ID: 1880;
  Gene Symbol: BBX;
  Gene Name: bobby sox homolog (Drosophila);
  Uniprot ID:  Q8WY36;
  ENSP ID: ENSP00000403860
MKGSNRNKDHSAEGEGVGKRPKRKCLQWHPLLAKKLLDFSEEEEEEDEEEDIDKVQLLGADGLEQDVGETEDDESPEQRARRPMNAFLLFCKRHRSLVRQEHPRLDNRGATKILADWWAVLDPKEKQKYTDMAKEYKDAFMKANPGYKWCPTTNKPVKSPTPTVNPRKKLWAFPSDSSRDLPSPKKAKTEEMPQLNFGMADPTQMGGLSMLLLAGEHALGTPEVSSGTCRPDVSESPELRQKSPLFQFAEISSSTSHSDASTKQCQTSALFQFAEISSNTSQLGGAEPVKRCGKSALFQLAEENEAQEKETPLIMKGVGMKKAGHLVRVGPVGARSSRRQSQKKTVSLAPQSWMKNLKKNSTASLNIVLLHLTGNVYLSQEKRRRLEMCPQNRLKPAKVLSSLRKRTYSTKLSANISTKRRSPMFRKKEVGINGQTSNSSWMPFTLQKPYFQKTETPWSLFIRLKISHPFSTLQSQQQRKNLWWAAKREKQGKPRLHTLSGQQMAGYHQQEVLWMTNQRNNCRGVSLKQLRQTAMTNAHTTPRSGRRGAVLQKCLPCLRSLASLRWLKWQPWKMCTEVRGQLRSPMMDSQKKCRRLLYLFPALTSEAPFHCKTLCFTYYPSLVFTEGC

SEQ ID NO: 9258 - protein, 97 aa, Homo sapiens
  Payload ID: 1880;
  Gene Symbol: BBX;
  Gene Name: bobby sox homolog (Drosophila);
  ENSP ID: ENSP00000404654
MKGSNRNKDHSAEGEGVGKRPKRKCLQWHPLLAKKLLDFSEEEEEEDEEEDIDKVQLLGADGLEQDVGETEDDESPEQRARRPMNAFLLFCKRHRSL

SEQ ID NO: 9259 - protein, 85 aa, Homo sapiens
  Payload ID: 1880;
  Gene Symbol: BBX;
  Gene Name: bobby sox homolog (Drosophila);
  ENSP ID: ENSP00000404943
MKGSNRNKDHSAEGEGVGKRPKRKCLQWHPLLAKKLLDFSEEEEEEDEEEDIDKVQLLGADGLEQDVGETEDDESPEQRARRPMN

SEQ ID NO: 9260 - protein, 113 aa, Homo sapiens
  Payload ID: 1880;
  Gene Symbol: BBX;
  Gene Name: bobby sox homolog (Drosophila);
  ENSP ID: ENSP00000406554
MKGSNRNKDHSAEGEGVGKRPKRKCLQWHPLLAKKLLDFSEEEEEEDEEEDIDKVQLLGADGLEQDVGETEDDESPEQRARRPMNAFLLFCKRHRSLVRQEHPRLDNRGATKI

SEQ ID NO: 9261 - protein, 159 aa, Homo sapiens
  Payload ID: 1880;
  Gene Symbol: BBX;
  Gene Name: bobby sox homolog (Drosophila);
  ENSP ID: ENSP00000407662
MKGSNRNKDHSAEGEGVGKRPKRKCLQWHPLLAKKLLDFSEEEEEEDEEEDIDKVQLLGADGLEQDVGETEDDESPEQRARRPMNAFLLFCKRHRSLVRQEHPRLDNRGATKILADWWAVLDPKEKQKYTDMAKEYKDAFMKANPGYKWCPTTNKPVKS

SEQ ID NO: 9262 - protein, 144 aa, Homo sapiens
  Payload ID: 1880;
  Gene Symbol: BBX;
  Gene Name: bobby sox homolog (Drosophila);
  ENSP ID: ENSP00000408297
MKGSNRNKDHSAEGEGVGKRPKRKCLQWHPLLAKKLLDFSEEEEEEDEEEDIDKVQLLGADGLEQDVGETEDDESPEQRARRPMNAFLLFCKRHRSLVRQEHPRLDNRGATKILADWWAVLDPKEKQKYTDMAKEYKDAFMKAN

SEQ ID NO: 9263 - protein, 911 aa, Homo sapiens; identical to SEQ ID NO: 9250
  Payload ID: 1880;
  Gene Symbol: BBX;
  Gene Name: bobby sox homolog (Drosophila);
  Uniprot ID:  Q8WY36;
  ENSP ID: ENSP00000408358

SEQ ID NO: 9264 - protein, 24 aa, Homo sapiens
  Payload ID: 1880;
  Gene Symbol: BBX;
  Gene Name: bobby sox homolog (Drosophila);
  ENSP ID: ENSP00000412390
MKGSNRNKDHSAEGEGVGKRPKRK

SEQ ID NO: 9265 - protein, 205 aa, Homo sapiens
  Payload ID: 1880;
  Gene Symbol: BBX;
  Gene Name: bobby sox homolog (Drosophila);
  ENSP ID: ENSP00000413274
MKGSNRNKDHSAEGEGVGKRPKRKCLQWHPLLAKKLLDFSEEEEEEDEEEDIDKVQLLGADGLEQDVGETEDDESPEQRARRPMNAFLLFCKRHRSLVRQEHPRLDNRGATKILADWWAVLDPKEKQKYTDMAKEYKDAFMKANPGYKWCPTTNKPVKSPTPTVNPRKKLWAFPSDSSRDLPSPKKAKTEEMPQLNFGMADPTQM

SEQ ID NO: 9266 - protein, 193 aa, Homo sapiens
  Payload ID: 1880;
  Gene Symbol: BBX;
  Gene Name: bobby sox homolog (Drosophila);
  ENSP ID: ENSP00000413320
MKGSNRNKDHSAEGEGVGKRPKRKCLQWHPLLAKKLLDFSEEEEEEDEEEDIDKVQLLGADGLEQDVGETEDDESPEQRARRPMNAFLLFCKRHRSLVRQEHPRLDNRGATKILADWWAVLDPKEKQKYTDMAKEYKDAFMKANPGYKWCPTTNKPVKSPTPTVNPRKKLWAFPSDSSRDLPSPKKAKTEEMP

SEQ ID NO: 9267 - protein, 166 aa, Homo sapiens
  Payload ID: 1880;
  Gene Symbol: BBX;
  Gene Name: bobby sox homolog (Drosophila);
  ENSP ID: ENSP00000414673
MKGSNRNKDHSAEGEGVGKRPKRKCLQWHPLLAKKLLDFSEEEEEEDEEEDIDKVQLLGADGLEQDVGETEDDESPEQRARRPMNAFLLFCKRHRSLVRQEHPRLDNRGATKILADWWAVLDPKEKQKYTDMAKEYKDAFMKANPGYKWCPTTNKPVKSPTPTVNP

SEQ ID NO: 9268 - protein, 1115 aa, Homo sapiens
  Payload ID: 1881;
  Gene Symbol: BOC;
  Gene Name: BOC cell adhesion associated, oncogene regulated;
  Uniprot ID:  Q9BWV1;
  ENSP ID: ENSP00000273395
MLRGTMTAWRGMRPEVTLACLLLATAGCFADLNEVPQVTVQPASTVQKPGGTVILGCVVEPPRMNVTWRLNGKELNGSDDALGVLITHGTLVITALNNHTVGRYQCVARMPAGAVASVPATVTLANLQDFKLDVQHVIEVDEGNTAVIACHLPESHPKAQVRYSVKQEWLEASRGNYLIMPSGNLQIVNASQEDEGMYKCAAYNPVTQEVKTSGSSDRLRVRRSTAEAARIIYPPEAQTIIVTKGQSLILECVASGIPPPRVTWAKDGSSVTGYNKTRFLLSNLLIDTTSEEDSGTYRCMADNGVGQPGAAVILYNVQVFEPPEVTMELSQLVIPWGQSAKLTCEVRGNPPPSVLWLRNAVPLISSQRLRLSRRALRVLSMGPEDEGVYQCMAENEVGSAHAVVQLRTSRPSITPRLWQDAELATGTPPVSPSKLGNPEQMLRGQPALPRPPTSVGPASPQCPGEKGQGAPAEAPIILSSPRTSKTDSYELVWRPRHEGSGRAPILYYVVKHRKQVTNSSDDWTISGIPANQHRLTLTRLDPGSLYEVEMAAYNCAGEGQTAMVTFRTGRRPKPEIMASKEQQIQRDDPGASPQSSSQPDHGRLSPPEAPDRPTISTASETSVYVTWIPRGNGGFPIQSFRVEYKKLKKVGDWILATSAIPPSRLSVEITGLEKGTSYKFRVRALNMLGESEPSAPSRPYVVSGYSGRVYERPVAGPYITFTDAVNETTIMLKWMYIPASNNNTPIHGFYIYYRPTDSDNDSDYKKDMVEGDKYWHSISHLQPETSYDIKMQCFNEGGESEFSNVMICETKARKSSGQPGRLPPPTLAPPQPPLPETIERPVGTGAMVARSSDLPYLIVGVVLGSIVLIIVTFIPFCLWRAWSKQKHTTDLGFPRSALPPSCPYTMVPLGGLPGHQASGQPYLSGISGRACANGIHMNRGCPSAAVGYPGMKPQQHCPGELQQQSDTSSLLRQTHLGNGYDPQSHQITRGPKSSPDEGSFLYTLPDDSTHQLLQPHHDCCQRQEQPAAVGQSGVRRAPDSPVLEAVWDPPFHSGPPCCLGLVPVEEVDSPDSCQVSGGDWCPQHPVGAYVGQEPGMQLSPGPLVRVSFETPPLTI

SEQ ID NO: 9269 - protein, 1114 aa, Homo sapiens
  Payload ID: 1881;
  Gene Symbol: BOC;
  Gene Name: BOC cell adhesion associated, oncogene regulated;
  Uniprot ID:  Q9BWV1;
  ENSP ID: ENSP00000347546
MLRGTMTAWRGMRPEVTLACLLLATAGCFADLNEVPQVTVQPASTVQKPGGTVILGCVVEPPRMNVTWRLNGKELNGSDDALGVLITHGTLVITALNNHTVGRYQCVARMPAGAVASVPATVTLANLQDFKLDVQHVIEVDEGNTAVIACHLPESHPKAQVRYSVKQEWLEASRGNYLIMPSGNLQIVNASQEDEGMYKCAAYNPVTQEVKTSGSSDRLRVRRSTAEAARIIYPPEAQTIIVTKGQSLILECVASGIPPPRVTWAKDGSSVTGYNKTRFLLSNLLIDTTSEEDSGTYRCMADNGVGQPGAAVILYNVQVFEPPEVTMELSQLVIPWGQSAKLTCEVRGNPPPSVLWLRNAVPLISSQRLRLSRRALRVLSMGPEDEGVYQCMAENEVGSAHAVVQLRTSRPSITPRLWQDAELATGTPPVSPSKLGNPEQMLRGQPALPRPPTSVGPASPQCPGEKGQGAPAEAPIILSSPRTSKTDSYELVWRPRHEGSGRAPILYYVVKHRKVTNSSDDWTISGIPANQHRLTLTRLDPGSLYEVEMAAYNCAGEGQTAMVTFRTGRRPKPEIMASKEQQIQRDDPGASPQSSSQPDHGRLSPPEAPDRPTISTASETSVYVTWIPRGNGGFPIQSFRVEYKKLKKVGDWILATSAIPPSRLSVEITGLEKGTSYKFRVRALNMLGESEPSAPSRPYVVSGYSGRVYERPVAGPYITFTDAVNETTIMLKWMYIPASNNNTPIHGFYIYYRPTDSDNDSDYKKDMVEGDKYWHSISHLQPETSYDIKMQCFNEGGESEFSNVMICETKARKSSGQPGRLPPPTLAPPQPPLPETIERPVGTGAMVARSSDLPYLIVGVVLGSIVLIIVTFIPFCLWRAWSKQKHTTDLGFPRSALPPSCPYTMVPLGGLPGHQASGQPYLSGISGRACANGIHMNRGCPSAAVGYPGMKPQQHCPGELQQQSDTSSLLRQTHLGNGYDPQSHQITRGPKSSPDEGSFLYTLPDDSTHQLLQPHHDCCQRQEQPAAVGQSGVRRAPDSPVLEAVWDPPFHSGPPCCLGLVPVEEVDSPDSCQVSGGDWCPQHPVGAYVGQEPGMQLSPGPLVRVSFETPPLTI

SEQ ID NO: 9270 - protein, 157 aa, Homo sapiens
  Payload ID: 1881;
  Gene Symbol: BOC;
  Gene Name: BOC cell adhesion associated, oncogene regulated;
  ENSP ID: ENSP00000417337
MLRGTMTAWRGMRPEVTLACLLLATAGCFADLNEVPQVTVQPASTVQKPGGTVILGCVVEPPRMNVTWRLNGKELNGSDDALGVLITHGTLVITALNNHTVGRYQCVARMPAGAVASVPATVTLASESAPLPPCHGAVPPHLSHPEAPTIHAASCYS

SEQ ID NO: 9271 - protein, 84 aa, Homo sapiens
  Payload ID: 1881;
  Gene Symbol: BOC;
  Gene Name: BOC cell adhesion associated, oncogene regulated;
  ENSP ID: ENSP00000417362
MLRGTMTAWRGMRPEVTLACLLLATAGCFADLNEVPQVTVQPASTVQKPGGTVILGCVVEPPRMNVTWRLNGKELNGSDDALGV

SEQ ID NO: 9272 - protein, 21 aa, Homo sapiens
  Payload ID: 1881;
  Gene Symbol: BOC;
  Gene Name: BOC cell adhesion associated, oncogene regulated;
  ENSP ID: ENSP00000418118
MLRGTMTAWRGMRPEVTLACL

SEQ ID NO: 9273 - protein, 39 aa, Homo sapiens
  Payload ID: 1881;
  Gene Symbol: BOC;
  Gene Name: BOC cell adhesion associated, oncogene regulated;
  ENSP ID: ENSP00000418182
  MOD_RES (1)..(1): Any amino acid
XQQQSDTSSLLRQTHLGNGYDPQSHQITRAPMLLGPCAS

SEQ ID NO: 9274 - protein, 32 aa, Homo sapiens
  Payload ID: 1881;
  Gene Symbol: BOC;
  Gene Name: BOC cell adhesion associated, oncogene regulated;
  ENSP ID: ENSP00000418260
MLRGTMTAWRGMRPEVTLACLLLATAGCFADL

SEQ ID NO: 9275 - protein, 1114 aa, Homo sapiens; identical to SEQ ID NO: 9269
  Payload ID: 1881;
  Gene Symbol: BOC;
  Gene Name: BOC cell adhesion associated, oncogene regulated;
  Uniprot ID:  Q9BWV1;
  ENSP ID: ENSP00000418663

SEQ ID NO: 9276 - protein, 65 aa, Homo sapiens
  Payload ID: 1881;
  Gene Symbol: BOC;
  Gene Name: BOC cell adhesion associated, oncogene regulated;
  ENSP ID: ENSP00000419022
MTHEVLSTFIPSEGSSSKVEEVDLQDFKLDVQHVIEVDEGNTAVIACHLPESHPKAQVRYSVKQE

SEQ ID NO: 9277 - protein, 84 aa, Homo sapiens
  Payload ID: 1881;
  Gene Symbol: BOC;
  Gene Name: BOC cell adhesion associated, oncogene regulated;
  ENSP ID: ENSP00000420056
  MOD_RES (1)..(1): Any amino acid
XRACANGIHMNRGCPSAAVGYPGMKPQQHCPGELQQQSDTSSLLRQTHLGNGYDPQSHQITSCCSPITTAANARSSLLLWASQG

SEQ ID NO: 9278 - protein, 157 aa, Homo sapiens; identical to SEQ ID NO: 9270
  Payload ID: 1881;
  Gene Symbol: BOC;
  Gene Name: BOC cell adhesion associated, oncogene regulated;
  ENSP ID: ENSP00000420154

SEQ ID NO: 9279 - protein, 137 aa, Homo sapiens
  Payload ID: 1882;
  Gene Symbol: BOLA1;
  Gene Name: bolA family member 1;
  Uniprot ID:  Q9Y3E2;
  ENSP ID: ENSP00000358146
MLSGRLVLGLVSMAGRVCLCQGSAGSGAIGPVEAAIRTKLEEALSPEVLELRNESGGHAVPPGSETHFRVAVVSSRFEGLSPLQRHRLVHAALAEELGGPVHALAIQARTPAQWRENSQLDTSPPCLGGNKKTLGTP

SEQ ID NO: 9280 - protein, 137 aa, Homo sapiens; identical to SEQ ID NO: 9279
  Payload ID: 1882;
  Gene Symbol: BOLA1;
  Gene Name: bolA family member 1;
  Uniprot ID:  Q9Y3E2;
  ENSP ID: ENSP00000358148

SEQ ID NO: 9281 - protein, 137 aa, Homo sapiens; identical to SEQ ID NO: 9279
  Payload ID: 1882;
  Gene Symbol: BOLA1;
  Gene Name: bolA family member 1;
  Uniprot ID:  Q9Y3E2;
  ENSP ID: ENSP00000358149

SEQ ID NO: 9282 - protein, 152 aa, Homo sapiens
  Payload ID: 1883;
  Gene Symbol: BOLA2;
  Gene Name: bolA family member 2;
  Uniprot ID:  Q9H3K6;
  ENSP ID: ENSP00000331127
MASAKSLDRWKARLLEGGSTALTYALVRAEVSFPAEVAPVRQQGSVAGARAGVVSLLGCRSSWTAAMELSAEYLREKLQRDLEAEHVEVEDTTLNRCSCSFRVLVVSAKFEGKPLLQRHRLVNACLAEELPHIHAFEQKTLTPDQWARERQK

SEQ ID NO: 9283 - protein, 152 aa, Homo sapiens; identical to SEQ ID NO: 9282
  Payload ID: 1883;
  Gene Symbol: BOLA2;
  Gene Name: bolA family member 2;
  ENSP ID: ENSP00000482868

SEQ ID NO: 9284 - protein, 152 aa, Homo sapiens; identical to SEQ ID NO: 9282
  Payload ID: 1884;
  Gene Symbol: BOLA2B;
  Gene Name: bolA family member 2B;
  Uniprot ID:  Q9H3K6;
  ENSP ID: ENSP00000306752

SEQ ID NO: 9285 - protein, 81 aa, Homo sapiens
  Payload ID: 1884;
  Gene Symbol: BOLA2B;
  Gene Name: bolA family member 2B;
  ENSP ID: ENSP00000455468
  MOD_RES (1)..(1): Any amino acid
XGSVAGARAGVVSLLGCRSSWTAAMELSAEYLREKLQRDLEAEHVLPSPGGVGQVRGETAASETQAGERVPSRRAPAHPCL

SEQ ID NO: 9286 - protein, 88 aa, Homo sapiens
  Payload ID: 1884;
  Gene Symbol: BOLA2B;
  Gene Name: bolA family member 2B;
  ENSP ID: ENSP00000457995
FPAEVAPVRQQGSVAGARAGVVSLLGCRSSWTAAMELSAEYLREKLQRDLEAEHVEVEDTTLNRCSCSFRVLVVSAKFEGKPLLQRHR

SEQ ID NO: 9287 - protein, 101 aa, Homo sapiens
  Payload ID: 1885;
  Gene Symbol: BOLA3;
  Gene Name: bolA family member 3;
  Uniprot ID:  Q53S33;
  ENSP ID: ENSP00000295326
MAAWSPAAAAPLLRGIRGLPLHHRMFATQTEGELRVTQILKEKFPRATAIKVTDISGTKRRNQRDAWIADIYLCPQTLTTPWLHRCCCLRPWMNFTDIILP

SEQ ID NO: 9288 - protein, 107 aa, Homo sapiens
  Payload ID: 1885;
  Gene Symbol: BOLA3;
  Gene Name: bolA family member 3;
  Uniprot ID:  Q53S33;
  ENSP ID: ENSP00000331369
MAAWSPAAAAPLLRGIRGLPLHHRMFATQTEGELRVTQILKEKFPRATAIKVTDISGGCGAMYEIKIESEEFKEKRTVQQHQMVNQALKEEIKEMHGLRIFTSVPKR

SEQ ID NO: 9289 - protein, 399 aa, Homo sapiens
  Payload ID: 1886;
  Gene Symbol: BRS3;
  Gene Name: bombesin-like receptor 3;
  Uniprot ID:  P32247;
  ENSP ID: ENSP00000359682
MAQRQPHSPNQTLISITNDTESSSSVVSNDNTNKGWSGDNSPGIEALCAIYITYAVIISVGILGNAILIKVFFKTKSMQTVPNIFITSLAFGDLLLLLTCVPVDATHYLAEGWLFGRIGCKVLSFIRLTSVGVSVFTLTILSADRYKAVVKPLERQPSNAILKTCVKAGCVWIVSMIFALPEAIFSNVYTFRDPNKNMTFESCTSYPVSKKLLQEIHSLLCFLVFYIIPLSIISVYYSLIARTLYKSTLNIPTEEQSHARKQIESRKRIARTVLVLVALFALCWLPNHLLYLYHSFTSQTYVDPSAMHFIFTIFSRVLAFSNSCVNPFALYWLSKSFQKHFKAQLFCCKAERPEPPVADTSLTTLAVMGTVPGTGSIQMSEISVTSFTGCSVKQAEDRF

SEQ ID NO: 9290 - protein, 100 aa, Homo sapiens
  Payload ID: 1887;
  Gene Symbol: BGLAP;
  Gene Name: bone gamma-carboxyglutamate (gla) prt;
  Uniprot ID:  P02818;
  ENSP ID: ENSP00000357255
MRALTLLALLALAALCIAGQAGAKPSGAESSKGAAFVSKQEGSEVVKRPRRYLYQWLGAPVPYPDPLEPRREVCELNPDCDELADHIGFQEAYRRFYGPV

SEQ ID NO: 9291 - protein, 318 aa, Homo sapiens
  Payload ID: 1888;
  Gene Symbol: BST1;
  Gene Name: bone marrow stromal cell antigen 1;
  Uniprot ID:  Q10588;
  ENSP ID: ENSP00000265016
MAAQGCAASRLLQLLLQLLLLLLLLAAGGARARWRGEGTSAHLRDIFLGRCAEYRALLSPEQRNKNCTAIWEAFKVALDKDPCSVLPSDYDLFINLSRHSIPRDKSLFWENSHLLVNSFADNTRRFMPLSDVLYGRVADFLSWCRQKNDSGLDYQSCPTSEDCENNPVDSFWKRASIQYSKDSSGVIHVMLNGSEPTGAYPIKGFFADYEIPNLQKEKITRIEIWVMHEIGGPNVESCGEGSMKVLEKRLKDMGFQYSCINDYRPVKLLQCVDHSTHPDCALKSAAAATQRKAPSLYTEQRAGLIIPLFLVLASRTQL

SEQ ID NO: 9292 - protein, 333 aa, Homo sapiens
  Payload ID: 1888;
  Gene Symbol: BST1;
  Gene Name: bone marrow stromal cell antigen 1;
  ENSP ID: ENSP00000371783
MAAQGCAASRLLQLLLQLLLLLLLLAAGGARARWRGEGTSAHLRDIFLGRCAEYRALLSPEQRQIRNSREPPVLHTTQNKNCTAIWEAFKVALDKDPCSVLPSDYDLFINLSRHSIPRDKSLFWENSHLLVNSFADNTRRFMPLSDVLYGRVADFLSWCRQKNDSGLDYQSCPTSEDCENNPVDSFWKRASIQYSKDSSGVIHVMLNGSEPTGAYPIKGFFADYEIPNLQKEKITRIEIWVMHEIGGPNVESCGEGSMKVLEKRLKDMGFQYSCINDYRPVKLLQCVDHSTHPDCALKSAAAATQRKAPSLYTEQRAGLIIPLFLVLASRTQL

SEQ ID NO: 9293 - protein, 155 aa, Homo sapiens
  Payload ID: 1888;
  Gene Symbol: BST1;
  Gene Name: bone marrow stromal cell antigen 1;
  ENSP ID: ENSP00000420925
GLDYQSCPTSEDCENNPVDSFWKRASIQYSKDSSGVIHVMLNGSEPTGAYPIKGFFADYEIPNLQKEKITRIEIWVMHEIGGPNVESCGEGSMKVLEKRLKDMGFQYSCINDYRPVKLLQCVDHSTHPDCALKSPKRLCGTLGVRPRAEPYNRRF

SEQ ID NO: 9294 - protein, 186 aa, Homo sapiens
  Payload ID: 1888;
  Gene Symbol: BST1;
  Gene Name: bone marrow stromal cell antigen 1;
  ENSP ID: ENSP00000423357
  MOD_RES (1)..(1): Any amino acid
XSLFWENSHLLVNSFADNTRRFMPLSDVLYGRVADFLSWCRQKNDSGLDYQSCPTSEDCENNPVDSFWKRASIQYSKDSSGVIHVMLNGSEPTGAYPIKGFFADYEIPNLQKEKITRIEIWVMHEIGGPNVESCGEGSMKVLEKRLKDMGFQYSCINDYRPVKLLQCVDHSTHPDCALKSDGVSPC

SEQ ID NO: 9295 - protein, 97 aa, Homo sapiens
  Payload ID: 1888;
  Gene Symbol: BST1;
  Gene Name: bone marrow stromal cell antigen 1;
  ENSP ID: ENSP00000424761
  MOD_RES (1)..(1): Any amino acid
XSEPTGAYPIKGFFADYEIPNLQKEKITRIEIWVMHEIGGPNVESCGEGSMKVLEKRLKDMGFQYSCINDYRPVKLLQCVDHSTHPDCALKSKLWEP

SEQ ID NO: 9296 - protein, 180 aa, Homo sapiens
  Payload ID: 1889;
  Gene Symbol: BST2;
  Gene Name: bone marrow stromal cell antigen 2;
  Uniprot ID:  Q10589;
  ENSP ID: ENSP00000252593
MASTSYDYCRVPMEDGDKRCKLLLGIGILVLLIIVILGVPLIIFTIKANSEACRDGLRAVMECRNVTHLLQQELTEAQKGFQDVEAQAATCNHTVMALMASLDAEKAQGQKKVEELEGEITTLNHKLQDASAEVERLRRENQVLSVRIADKKYYPSSQDSSSAAAPQLLIVLLGLSALLQ

SEQ ID NO: 9297 - protein, 986 aa, Homo sapiens
  Payload ID: 1890;
  Gene Symbol: BMP1;
  Gene Name: bone morphogenetic prt 1;
  Uniprot ID:  P13497;
  ENSP ID: ENSP00000305714
MPGVARLPLLLGLLLLPRPGRPLDLADYTYDLAEEDDSEPLNYKDPCKAAAFLGDIALDEEDLRAFQVQQAVDLRRHTARKSSIKAAVPGNTSTPSCQSTNGQPQRGACGRWRGRSRSRRAATSRPERVWPDGVIPFVIGGNFTGSQRAVFRQAMRHWEKHTCVTFLERTDEDSYIVFTYRPCGCCSYVGRRGGGPQAISIGKNCDKFGIVVHELGHVVGFWHEHTRPDRDRHVSIVRENIQPGQEYNFLKMEPQEVESLGETYDFDSIMHYARNTFSRGIFLDTIVPKYEVNGVKPPIGQRTRLSKGDIAQARKLYKCPACGETLQDSTGNFSSPEYPNGYSAHMHCVWRISVTPGEKIILNFTSLDLYRSRLCWYDYVEVRDGFWRKAPLRGRFCGSKLPEPIVSTDSRLWVEFRSSSNWVGKGFFAVYEAICGGDVKKDYGHIQSPNYPDDYRPSKVCIWRIQVSEGFHVGLTFQSFEIERHDSCAYDYLEVRDGHSESSTLIGRYCGYEKPDDIKSTSSRLWLKFVSDGSINKAGFAVNFFKEVDECSRPNRGGCEQRCLNTLGSYKCSCDPGYELAPDKRRCEAACGGFLTKLNGSITSPGWPKEYPPNKNCIWQLVAPTQYRISLQFDFFETEGNDVCKYDFVEVRSGLTADSKLHGKFCGSEKPEVITSQYNNMRVEFKSDNTVSKKGFKAHFFSDKDECSKDNGGCQQDCVNTFGSYECQCRSGFVLHDNKHDCKEAGCDHKVTSTSGTITSPNWPDKYPSKKECTWAISSTPGHRVKLTFMEMDIESQPECAYDHLEVFDGRDAKAPVLGRFCGSKKPEPVLATGSRMFLRFYSDNSVQRKGFQASHATECGGQVRADVKTKDLYSHAQFGDNNYPGGVDCEWVIVAEEGYGVELVFQTFEVEEETDCGYDYMELFDGYDSTAPRLGRYCGSGPPEEVYSAGDSVLVKFHSDDTITKKGFHLRYTSTKFQDTLHSRK

SEQ ID NO: 9298 - protein, 730 aa, Homo sapiens
  Payload ID: 1890;
  Gene Symbol: BMP1;
  Gene Name: bone morphogenetic prt 1;
  Uniprot ID:  P13497;
  ENSP ID: ENSP00000306121
MPGVARLPLLLGLLLLPRPGRPLDLADYTYDLAEEDDSEPLNYKDPCKAAAFLGDIALDEEDLRAFQVQQAVDLRRHTARKSSIKAAVPGNTSTPSCQSTNGQPQRGACGRWRGRSRSRRAATSRPERVWPDGVIPFVIGGNFTGSQRAVFRQAMRHWEKHTCVTFLERTDEDSYIVFTYRPCGCCSYVGRRGGGPQAISIGKNCDKFGIVVHELGHVVGFWHEHTRPDRDRHVSIVRENIQPGQEYNFLKMEPQEVESLGETYDFDSIMHYARNTFSRGIFLDTIVPKYEVNGVKPPIGQRTRLSKGDIAQARKLYKCPACGETLQDSTGNFSSPEYPNGYSAHMHCVWRISVTPGEKIILNFTSLDLYRSRLCWYDYVEVRDGFWRKAPLRGRFCGSKLPEPIVSTDSRLWVEFRSSSNWVGKGFFAVYEAICGGDVKKDYGHIQSPNYPDDYRPSKVCIWRIQVSEGFHVGLTFQSFEIERHDSCAYDYLEVRDGHSESSTLIGRYCGYEKPDDIKSTSSRLWLKFVSDGSINKAGFAVNFFKEVDECSRPNRGGCEQRCLNTLGSYKCSCDPGYELAPDKRRCEAACGGFLTKLNGSITSPGWPKEYPPNKNCIWQLVAPTQYRISLQFDFFETEGNDVCKYDFVEVRSGLTADSKLHGKFCGSEKPEVITSQYNNMRVEFKSDNTVSKKGFKAHFFSEKRPALQPPRGRPHQLKFRVQKRNRTPQ

SEQ ID NO: 9299 - protein, 302 aa, Homo sapiens
  Payload ID: 1890;
  Gene Symbol: BMP1;
  Gene Name: bone morphogenetic prt 1;
  ENSP ID: ENSP00000346941
MPGVARLPLLLGLLLLPRPGRPLDLADYTYDLAEEDDSEPLNYKDPCKAAAFLGDIALDEEDLRAFQVQQAVDLRRHTARKSSIKAAVPGNTSTPSCQSTNGQPQRGACGRWRGRSRSRRAATSRPERVWPDGVIPFVIGGNFTGSQRAVFRQAMRHWEKHTCVTFLERTDEDSYIVFTYRPCGCCSYVGRRGGGPQAISIGKNCDKFGIVVHELGHVVGFWHEHTRPDRDRHVSIVRENIQPGVLHSSLLLLSCGSRNGASFPCSLESSIHQALCWTGLFLRPSPFPRLPLAAPRTLRAGV

SEQ ID NO: 9300 - protein, 189 aa, Homo sapiens
  Payload ID: 1890;
  Gene Symbol: BMP1;
  Gene Name: bone morphogenetic prt 1;
  ENSP ID: ENSP00000380915
MPGVARLPLLLGLLLLPRPGRPLDLADYTYDLAEEDDSEPLNYKDPCKAAAFLGDIALDEEDLRAFQVQQAVDLRRHTARKSSIKAAVPGNTSTPSCQSTNGQPQRGACGRWRGRSRSRRAATSRPERVWPDGVIPFVIGGNFTGSQRAVFRQAMRHWEKHTCVTFLERTDEDSYIVFTYRPCGSGPPP

SEQ ID NO: 9301 - protein, 189 aa, Homo sapiens; identical to SEQ ID NO: 9300
  Payload ID: 1890;
  Gene Symbol: BMP1;
  Gene Name: bone morphogenetic prt 1;
  ENSP ID: ENSP00000427950

SEQ ID NO: 9302 - protein, 302 aa, Homo sapiens; identical to SEQ ID NO: 9299
  Payload ID: 1890;
  Gene Symbol: BMP1;
  Gene Name: bone morphogenetic prt 1;
  ENSP ID: ENSP00000428249

SEQ ID NO: 9303 - protein, 730 aa, Homo sapiens; identical to SEQ ID NO: 9298
  Payload ID: 1890;
  Gene Symbol: BMP1;
  Gene Name: bone morphogenetic prt 1;
  Uniprot ID:  P13497;
  ENSP ID: ENSP00000428332

SEQ ID NO: 9304 - protein, 622 aa, Homo sapiens
  Payload ID: 1890;
  Gene Symbol: BMP1;
  Gene Name: bone morphogenetic prt 1;
  Uniprot ID:  P13497;
  ENSP ID: ENSP00000428665
MPGVARLPLLLGLLLLPRPGRPLDLADYTYDLAEEDDSEPLNYKDPCKAAAFLGDIALDEEDLRAFQVQQAVDLRRHTARKSSIKAAVPGNTSTPSCQSTNGQPQRGACGRWRGRSRSRRAATSRPERVWPDGVIPFVIGGNFTGSQRAVFRQAMRHWEKHTCVTFLERTDEDSYIVFTYRPCGCCSYVGRRGGGPQAISIGKNCDKFGIVVHELGHVVGFWHEHTRPDRDRHVSIVRENIQPGQEYNFLKMEPQEVESLGETYDFDSIMHYARNTFSRGIFLDTIVPKYEVNGVKPPIGQRTRLSKGDIAQARKLYKCPACGETLQDSTGNFSSPEYPNGYSAHMHCVWRISVTPGEKIILNFTSLDLYRSRLCWYDYVEVRDGFWRKAPLRGRFCGSKLPEPIVSTDSRLWVEFRSSSNWVGKGFFAVYEAICGGDVKKDYGHIQSPNYPDDYRPSKVCIWRIQVSEGFHVGLTFQSFEIERHDSCAYDYLEVRDGHSESSTLIGRYCGYEKPDDIKSTSSRLWLKFVSDGSINKAGFAVNFFKEVDECSRPNRGGCEQRCLNTLGSYKCSCDPGYELAPDKRRCEGCYDLQVGKPLLWDRHCFRLSTHGPEMLGTALRG

SEQ ID NO: 9305 - protein, 189 aa, Homo sapiens; identical to SEQ ID NO: 9300
  Payload ID: 1890;
  Gene Symbol: BMP1;
  Gene Name: bone morphogenetic prt 1;
  ENSP ID: ENSP00000428798

SEQ ID NO: 9306 - protein, 61 aa, Homo sapiens
  Payload ID: 1890;
  Gene Symbol: BMP1;
  Gene Name: bone morphogenetic prt 1;
  ENSP ID: ENSP00000430015
MPGVARLPLLLGLLLLPRPGRPLDLADYTYDLAEEDDSEPLNYKDPCKLPFLGTLPWTKRT

SEQ ID NO: 9307 - protein, 717 aa, Homo sapiens
  Payload ID: 1890;
  Gene Symbol: BMP1;
  Gene Name: bone morphogenetic prt 1;
  Uniprot ID:  P13497;
  ENSP ID: ENSP00000430406
MPGVARLPLLLGLLLLPRPGRPLDLADYTYDLAEEDDSEPLNYKDPCKAAAFLGDIALDEEDLRAFQVQQAVDLRRHTARKSSIKAAVPGNTSTPSCQSTNGQPQRGACGRWRGRSRSRRAATSRPERVWPDGVIPFVIGGNFTGSQRAVFRQAMRHWEKHTCVTFLERTDEDSYIVFTYRPCGCCSYVGRRGGGPQAISIGKNCDKFGIVVHELGHVVGFWHEHTRPDRDRHVSIVRENIQPGQEYNFLKMEPQEVESLGETYDFDSIMHYARNTFSRGIFLDTIVPKYEVNGVKPPIGQRTRLSKGDIAQARKLYKCPACGETLQDSTGNFSSPEYPNGYSAHMHCVWRISVTPGEKIILNFTSLDLYRSRLCWYDYVEVRDGFWRKAPLRGRFCGSKLPEPIVSTDSRLWVEFRSSSNWVGKGFFAVYEAICGGDVKKDYGHIQSPNYPDDYRPSKVCIWRIQVSEGFHVGLTFQSFEIERHDSCAYDYLEVRDGHSESSTLIGRYCGYEKPDDIKSTSSRLWLKFVSDGSINKAGFAVNFFKEVDECSRPNRGGCEQRCLNTLGSYKCSCDPGYELAPDKRRCEAACGGFLTKLNGSITSPGWPKEYPPNKNCIWQLVAPTQYRISLQFDFFETEGNDVCKYDFVEVRSGLTADSKLHGKFCGSEKPEVITSQYNNMRVEFKSDNTVSKKGFKAHFFSGGELFGLLGHPPRRP

SEQ ID NO: 9308 - protein, 189 aa, Homo sapiens; identical to SEQ ID NO: 9300
  Payload ID: 1890;
  Gene Symbol: BMP1;
  Gene Name: bone morphogenetic prt 1;
  ENSP ID: ENSP00000430977

SEQ ID NO: 9309 - protein, 424 aa, Homo sapiens
  Payload ID: 1891;
  Gene Symbol: BMP10;
  Gene Name: bone morphogenetic prt 10;
  Uniprot ID:  O95393;
  ENSP ID: ENSP00000295379
MGSLVLTLCALFCLAAYLVSGSPIMNLEQSPLEEDMSLFGDVFSEQDGVDFNTLLQSMKDEFLKTLNLSDIPTQDSAKVDPPEYMLELYNKFATDRTSMPSANIIRSFKNEDLFSQPVSFNGLRKYPLLFNVSIPHHEEVIMAELRLYTLVQRDRMIYDGVDRKITIFEVLESKGDNEGERNMLVLVSGEIYGTNSEWETFDVTDAIRRWQKSGSSTHQLEVHIESKHDEAEDASSGRLEIDTSAQNKHNPLLIVFSDDQSSDKERKEELNEMISHEQLPELDNLGLDSFSSGPGEEALLQMRSNIIYDSTARIRRNAKGNYCKRTPLYIDFKEIGWDSWIIAPPGYEAYECRGVCNYPLAEHLTPTKHAIIQALVHLKNSQKASKACCVPTKLEPISILYLDKGVVTYKFKYEGMAVSECGCR

SEQ ID NO: 9310 - protein, 392 aa, Homo sapiens
  Payload ID: 1892;
  Gene Symbol: BMP15;
  Gene Name: bone morphogenetic prt 15;
  Uniprot ID:  O95972;
  ENSP ID: ENSP00000252677
MVLLSILRILFLCELVLFMEHRAQMAEGGQSSIALLAEAPTLPLIEELLEESPGEQPRKPRLLGHSLRYMLELYRRSADSHGHPRENRTIGATMVRLVKPLTNVARPHRGTWHIQILGFPLRPNRGLYQLVRATVVYRHHLQLTRFNLSCHVEPWVQKNPTNHFPSSEGDSSKPSLMSNAWKEMDITQLVQQRFWNNKGHRILRLRFMCQQQKDSGGLELWHGTSSLDIAFLLLYFNDTHKSIRKAKFLPRGMEEFMERESLLRRTRQADGISAEVTASSSKHSGPENNQCSLHPFQISFRQLGWDHWIIAPPFYTPNYCKGTCLRVLRDGLNSPNHAIIQNLINQLVDQSVPRPSCVPYKYVPISVLMIEANGSILYKEYEGMIAESCTCR

SEQ ID NO: 9311 - protein, 396 aa, Homo sapiens
  Payload ID: 1893;
  Gene Symbol: BMP2;
  Gene Name: bone morphogenetic prt 2;
  Uniprot ID:  P12643;
  ENSP ID: ENSP00000368104
MVAGTRCLLALLLPQVLLGGAAGLVPELGRRKFAAASSGRPSSQPSDEVLSEFELRLLSMFGLKQRPTPSRDAVVPPYMLDLYRRHSGQPGSPAPDHRLERAASRANTVRSFHHEESLEELPETSGKTTRRFFFNLSSIPTEEFITSAELQVFREQMQDALGNNSSFHHRINIYEIIKPATANSKFPVTRLLDTRLVNQNASRWESFDVTPAVMRWTAQGHANHGFVVEVAHLEEKQGVSKRHVRISRSLHQDEHSWSQIRPLLVTFGHDGKGHPLHKREKRQAKHKQRKRLKSSCKRHPLYVDFSDVGWNDWIVAPPGYHAFYCHGECPFPLADHLNSTNHAIVQTLVNSVNSKIPKACCVPTELSAISMLYLDENEKVVLKNYQDMVVEGCGCR

SEQ ID NO: 9312 - protein, 472 aa, Homo sapiens
  Payload ID: 1894;
  Gene Symbol: BMP3;
  Gene Name: bone morphogenetic prt 3;
  Uniprot ID:  P12645;
  ENSP ID: ENSP00000282701
MAGASRLLFLWLGCFCVSLAQGERPKPPFPELRKAVPGDRTAGGGPDSELQPQDKVSEHMLRLYDRYSTVQAARTPGSLEGGSQPWRPRLLREGNTVRSFRAAAAETLERKGLYIFNLTSLTKSENILSATLYFCIGELGNISLSCPVSGGCSHHAQRKHIQIDLSAWTLKFSRNQSQLLGHLSVDMAKSHRDIMSWLSKDITQLLRKAKENEEFLIGFNITSKGRQLPKRRLPFPEPYILVYANDAAISEPESVVSSLQGHRNFPTGTVPKWDSHIRAALSIERRKKRSTGVLLPLQNNELPGAEYQYKKDEVWEERKPYKTLQAQAPEKSKNKKKQRKGPHRKSQTLQFDEQTLKKARRKQWIEPRNCARRYLKVDFADIGWSEWIISPKSFDAYYCSGACQFPMPKSLKPSNHATIQSIVRAVGVVPGIPEPCCVPEKMSSLSILFFDENKNVVLKVYPNMTVESCACR

SEQ ID NO: 9313 - protein, 408 aa, Homo sapiens
  Payload ID: 1895;
  Gene Symbol: BMP4;
  Gene Name: bone morphogenetic prt 4;
  Uniprot ID:  P12644;
  ENSP ID: ENSP00000245451
MIPGNRMLMVVLLCQVLLGGASHASLIPETGKKKVAEIQGHAGGRRSGQSHELLRDFEATLLQMFGLRRRPQPSKSAVIPDYMRDLYRLQSGEEEEEQIHSTGLEYPERPASRANTVRSFHHEEHLENIPGTSENSAFRFLFNLSSIPENEVISSAELRLFREQVDQGPDWERGFHRINIYEVMKPPAEVVPGHLITRLLDTRLVHHNVTRWETFDVSPAVLRWTREKQPNYGLAIEVTHLHQTRTHQGQHVRISRSLPQGSGNWAQLRPLLVTFGHDGRGHALTRRRRAKRSPKHHSQRARKKNKNCRRHSLYVDFSDVGWNDWIVAPPGYQAFYCHGDCPFPLADHLNSTNHAIVQTLVNSVNSSIPKACCVPTELSAISMLYLDEYDKVVLKNYQEMVVEGCGCR

SEQ ID NO: 9314 - protein, 408 aa, Homo sapiens; identical to SEQ ID NO: 9313
  Payload ID: 1895;
  Gene Symbol: BMP4;
  Gene Name: bone morphogenetic prt 4;
  Uniprot ID:  P12644;
  ENSP ID: ENSP00000394165

SEQ ID NO: 9315 - protein, 271 aa, Homo sapiens
  Payload ID: 1895;
  Gene Symbol: BMP4;
  Gene Name: bone morphogenetic prt 4;
  ENSP ID: ENSP00000453365
MFGLRRRPQPSKSAVIPDYMRDLYRLQSGEEEEEQIHSTGLEYPERPASRANTVRSFHHEEHLENIPGTSENSAFRFLFNLSSIPENEVISSAELRLFREQVDQGPDWERGFHRINIYEVMKPPAEVVPGHLITRLLDTRLVHHNVTRWETFDVSPAVLRWTREKQPNYGLAIEVTHLHQTRTHQGQHVRISRSLPQGSGNWAQLRPLLVTFGHDGRGHALTRRRRAKRSPKHHSQRARKKNKNCRRHSLYVDFSDVGWNDWIVAPPGYQA

SEQ ID NO: 9316 - protein, 110 aa, Homo sapiens
  Payload ID: 1895;
  Gene Symbol: BMP4;
  Gene Name: bone morphogenetic prt 4;
  ENSP ID: ENSP00000453467
MIPGNRMLMVVLLCQVLLGGASHASLIPETGKKKVAEIQGHAGGRRSGQSHELLRDFEATLLQMFGLRRRPQPSKSAVIPDYMRDLYRLQSGEEEEEQIHSTGLEYPERP

SEQ ID NO: 9317 - protein, 408 aa, Homo sapiens; identical to SEQ ID NO: 9313
  Payload ID: 1895;
  Gene Symbol: BMP4;
  Gene Name: bone morphogenetic prt 4;
  Uniprot ID:  P12644;
  ENSP ID: ENSP00000453485

SEQ ID NO: 9318 - protein, 104 aa, Homo sapiens
  Payload ID: 1895;
  Gene Symbol: BMP4;
  Gene Name: bone morphogenetic prt 4;
  ENSP ID: ENSP00000453691
LIPETGKKKVAEIQGHAGGRRSGQSHELLRDFEATLLQMFGLRRRPQPSKSAVIPDYMRDLYRLQSGEEEEEQIHSTGLEYPERPASRANTVRSFHHEASLRTR

SEQ ID NO: 9319 - protein, 408 aa, Homo sapiens; identical to SEQ ID NO: 9313
  Payload ID: 1895;
  Gene Symbol: BMP4;
  Gene Name: bone morphogenetic prt 4;
  Uniprot ID:  P12644;
  ENSP ID: ENSP00000454134

SEQ ID NO: 9320 - protein, 29 aa, Homo sapiens
  Payload ID: 1895;
  Gene Symbol: BMP4;
  Gene Name: bone morphogenetic prt 4;
  ENSP ID: ENSP00000476690
NTVRSFHHEGQSLPPVCVGEGWWDWLEGQ

SEQ ID NO: 9321 - protein, 454 aa, Homo sapiens
  Payload ID: 1896;
  Gene Symbol: BMP5;
  Gene Name: bone morphogenetic prt 5;
  Uniprot ID:  P22003;
  ENSP ID: ENSP00000359866
MHLTVFLLKGIVGFLWSCWVLVGYAKGGLGDNHVHSSFIYRRLRNHERREIQREILSILGLPHRPRPFSPGKQASSAPLFMLDLYNAMTNEENPEESEYSVRASLAEETRGARKGYPASPNGYPRRIQLSRTTPLTTQSPPLASLHDTNFLNDADMVMSFVNLVERDKDFSHQRRHYKEFRFDLTQIPHGEAVTAAEFRIYKDRSNNRFENETIKISIYQIIKEYTNRDADLFLLDTRKAQALDVGWLVFDITVTSNHWVINPQNNLGLQLCAETGDGRSINVKSAGLVGRQGPQSKQPFMVAFFKASEVLLRSVRAANKRKNQNRNKSSSHQDSSRMSSVGDYNTSEQKQACKKHELYVSFRDLGWQDWIIAPEGYAAFYCDGECSFPLNAHMNATNHAIVQTLVHLMFPDHVPKPCCAPTKLNAISVLYFDDSSNVILKKYRNMVVRSCGCH

SEQ ID NO: 9322 - protein, 513 aa, Homo sapiens
  Payload ID: 1897;
  Gene Symbol: BMP6;
  Gene Name: bone morphogenetic prt 6;
  Uniprot ID:  P22004;
  ENSP ID: ENSP00000283147
MPGLGRRAQWLCWWWGLLCSCCGPPPLRPPLPAAAAAAAGGQLLGDGGSPGRTEQPPPSPQSSSGFLYRRLKTQEKREMQKEILSVLGLPHRPRPLHGLQQPQPPALRQQEEQQQQQQLPRGEPPPGRLKSAPLFMLDLYNALSADNDEDGASEGERQQSWPHEAASSSQRRQPPPGAAHPLNRKSLLAPGSGSGGASPLTSAQDSAFLNDADMVMSFVNLVEYDKEFSPRQRHHKEFKFNLSQIPEGEVVTAAEFRIYKDCVMGSFKNQTFLISIYQVLQEHQHRDSDLFLLDTRVVWASEEGWLEFDITATSNLWVVTPQHNMGLQLSVVTRDGVHVHPRAAGLVGRDGPYDKQPFMVAFFKVSEVHVRTTRSASSRRRQQSRNRSTQSQDVARVSSASDYNSSELKTACRKHELYVSFQDLGWQDWIIAPKGYAANYCDGECSFPLNAHMNATNHAIVQTLVHLMNPEYVPKPCCAPTKLNAISVLYFDDNSNVILKKYRNMVVRACGCH

SEQ ID NO: 9323 - protein, 431 aa, Homo sapiens
  Payload ID: 1898;
  Gene Symbol: BMP7;
  Gene Name: bone morphogenetic prt 7;
  Uniprot ID:  P18075;
  ENSP ID: ENSP00000379204
MHVRSLRAAAPHSFVALWAPLFLLRSALADFSLDNEVHSSFIHRRLRSQERREMQREILSILGLPHRPRPHLQGKHNSAPMFMLDLYNAMAVEEGGGPGGQGFSYPYKAVFSTQGPPLASLQDSHFLTDADMVMSFVNLVEHDKEFFHPRYHHREFRFDLSKIPEGEAVTAAEFRIYKDYIRERFDNETFRISVYQVLQEHLGRESDLFLLDSRTLWASEEGWLVFDITATSNHWVVNPRHNLGLQLSVETLDGQSINPKLAGLIGRHGPQNKQPFMVAFFKATEVHFRSIRSTGSKQRSQNRSKTPKNQEALRMANVAENSSSDQRQACKKHELYVSFRDLGWQDWIIAPEGYAAYYCEGECAFPLNSYMNATNHAIVQTLVHFINPETVPKPCCAPTQLNAISVLYFDDSSNVILKKYRNMVVRACGCH

SEQ ID NO: 9324 - protein, 365 aa, Homo sapiens
  Payload ID: 1898;
  Gene Symbol: BMP7;
  Gene Name: bone morphogenetic prt 7;
  ENSP ID: ENSP00000379205
MHVRSLRAAAPHSFVALWAPLFLLRSALADFSLDNEVHSSFIHRRLRSQERREMQREILSILGLPHRPRPHLQGKHNSAPMFMLDLYNAMAVEEGGGPGGQGFSYPYKAVFSTQGPPLASLQDSHFLTDADMVMSFVNLVEHDKEFFHPRYHHREFRFDLSKIPEGEAVTAAEFRIYKDYIRERFDNETFRISVYQVLQEHLGRESDLFLLDSRTLWASEEGWLVFDITATSNHWVVNPRHNLGLQLSVETLDENSSSDQRQACKKHELYVSFRDLGWQDWIIAPEGYAAYYCEGECAFPLNSYMNATNHAIVQTLVHFINPETVPKPCCAPTQLNAISVLYFDDSSNVILKKYRNMVVRACGCH

SEQ ID NO: 9325 - protein, 297 aa, Homo sapiens
  Payload ID: 1898;
  Gene Symbol: BMP7;
  Gene Name: bone morphogenetic prt 7;
  ENSP ID: ENSP00000390814
  MOD_RES (1)..(1): Any amino acid
XPPLASLQDSHFLTDADMVMSFVNLVEHDKEFFHPRYHHREFRFDLSKIPEGEAVTAAEFRIYKDYIRERFDNETFRISVYQVLQEHLGSTGTCCMPCLRASTRTNQTRVPALWKLTFQQRRGHGRESDLFLLDSRTLWASEEGWLVFDITATSNHWVVNPRHNLGLQLSVETLDGQSINPKLAGLIGRHGPQNKQPFMVAFFKATEVHFRSIRSTGSKQRSQNRSKTPKNQEALRMANVAENSSSDQRQACKKHELYVSFRDLGWQDWIIAPEGYAAYYCEGECAFPLNSYMNATN

SEQ ID NO: 9326 - protein, 412 aa, Homo sapiens
  Payload ID: 1898;
  Gene Symbol: BMP7;
  Gene Name: bone morphogenetic prt 7;
  ENSP ID: ENSP00000398687
MHVRSLRAAAPHSFVALWAPLFLLRSALADFSLDNEVHSSFIHRRLRSQERREMQREILSILGLPHRPRPHLQGKHNSAPMFMLDLYNAMAVEEGGGPGGQGFSYPYKAVFSTQGPPLASLQDSHFLTDADMVMSFVNLVEHDKEFFHPRYHHREFRFDLSKIPEGEAVTAAEFRIYKDYIRERFDNETFRISVYQVLQEHLGRESDLFLLDSRTLWASEEGWLVFDITATSNHWVVNPRHNLGLQLSVETLDGQSINPKLAGLIGRHGPQNKQPFMVAFFKATEVHFRSIRSTGSKQRSQNRSKTPKNQEALRMANVAENSSSDQRQACKKHELYVSFRDLGWQDWIIAPEGYAAYYCEGECAFPLNSYMNATNHAIVQTLVGVTPSWGVVTWAGQAAGPPDPAASKLGPE

SEQ ID NO: 9327 - protein, 402 aa, Homo sapiens
  Payload ID: 1899;
  Gene Symbol: BMP8A;
  Gene Name: bone morphogenetic prt 8a;
  Uniprot ID:  Q7Z5Y6;
  ENSP ID: ENSP00000327440
MAARPGPLWLLGLTLCALGGGGPGLRPPPGCPQRRLGARERRDVQREILAVLGLPGRPRPRAPPAASRLPASAPLFMLDLYHAMAGDDDEDGAPAEQRLGRADLVMSFVNMVERDRALGHQEPHWKEFRFDLTQIPAGEAVTAAEFRIYKVPSIHLLNRTLHVSMFQVVQEQSNRESDLFFLDLQTLRAGDEGWLVLDVTAASDCWLLKRHKDLGLRLYVETEDGHSVDPGLAGLLGQRAPRSQQPFVVTFFRASPSPIRTPRAVRPLRRRQPKKSNELPQANRLPGIFDDVRGSHGRQVCRRHELYVSFQDLGWLDWVIAPQGYSAYYCEGECSFPLDSCMNATNHAILQSLVHLMKPNAVPKACCAPTKLSATSVLYYDSSNNVILRKHRNMVVKACGCH

SEQ ID NO: 9328 - protein, 402 aa, Homo sapiens
  Payload ID: 1900;
  Gene Symbol: BMP8B;
  Gene Name: bone morphogenetic prt 8b;
  Uniprot ID:  P34820;
  ENSP ID: ENSP00000361915
MTALPGPLWLLGLALCALGGGGPGLRPPPGCPQRRLGARERRDVQREILAVLGLPGRPRPRAPPAASRLPASAPLFMLDLYHAMAGDDDEDGAPAERRLGRADLVMSFVNMVERDRALGHQEPHWKEFRFDLTQIPAGEAVTAAEFRIYKVPSIHLLNRTLHVSMFQVVQEQSNRESDLFFLDLQTLRAGDEGWLVLDVTAASDCWLLKRHKDLGLRLYVETEDGHSVDPGLAGLLGQRAPRSQQPFVVTFFRASPSPIRTPRAVRPLRRRQPKKSNELPQANRLPGIFDDVHGSHGRQVCRRHELYVSFQDLGWLDWVIAPQGYSAYYCEGECSFPLDSCMNATNHAILQSLVHLMMPDAVPKACCAPTKLSATSVLYYDSSNNVILRKHRNMVVKACGCH

SEQ ID NO: 9329 - protein, 349 aa, Homo sapiens
  Payload ID: 1900;
  Gene Symbol: BMP8B;
  Gene Name: bone morphogenetic prt 8b;
  Uniprot ID:  P34820;
  ENSP ID: ENSP00000380518
MTALPGPLWLLGLALCALGGGGPGLRPPPGCPQRRLGARERRDVQREILAVLGLPGRPRPRAPPAASRLPASAPLFMLDLYHAMAGDDDEDGAPAERRLGRADLVMSFVNMVERDRALGHQEPHWKEFRFDLTQIPAGEAVTAAEFRIYKVPSIHLLNRTLHVSMFQVVQEQSNRESDLFFLDLQTLRAGDEGWLVLDVTAASDCWLLKRHKDLGLRLYVETEDGETWTGWGWTKDSRLQMWKLRLSRTPWVLSLHAPGPAQAPAERPLLCLLQGHCPASPSPIRTPRAVRPLRRRQPKKSNELPQANRLPGIFDDVHGSHGRQVCRRHELYVSFQDLGWLVIADSSCF

SEQ ID NO: 9330 - protein, 532 aa, Homo sapiens
  Payload ID: 1901;
  Gene Symbol: BMPR1A;
  Gene Name: bone morphogenetic prt receptor, type IA;
  Uniprot ID:  P36894;
  ENSP ID: ENSP00000361107
MPQLYIYIRLLGAYLFIISRVQGQNLDSMLHGTGMKSDSDQKKSENGVTLAPEDTLPFLKCYCSGHCPDDAINNTCITNGHCFAIIEEDDQGETTLASGCMKYEGSDFQCKDSPKAQLRRTIECCRTNLCNQYLQPTLPPVVIGPFFDGSIRWLVLLISMAVCIIAMIIFSSCFCYKHYCKSISSRRRYNRDLEQDEAFIPVGESLKDLIDQSQSSGSGSGLPLLVQRTIAKQIQMVRQVGKGRYGEVWMGKWRGEKVAVKVFFTTEEASWFRETEIYQTVLMRHENILGFIAADIKGTGSWTQLYLITDYHENGSLYDFLKCATLDTRALLKLAYSAACGLCHLHTEIYGTQGKPAIAHRDLKSKNILIKKNGSCCIADLGLAVKFNSDTNEVDVPLNTRVGTKRYMAPEVLDESLNKNHFQPYIMADIYSFGLIIWEMARRCITGGIVEEYQLPYYNMVPSDPSYEDMREVVCVKRLRPIVSNRWNSDECLRAVLKLMSECWAHNPASRLTALRIKKTLAKMVESQDVKI

SEQ ID NO: 9331 - protein, 41 aa, Homo sapiens
  Payload ID: 1901;
  Gene Symbol: BMPR1A;
  Gene Name: bone morphogenetic prt receptor, type IA;
  ENSP ID: ENSP00000483569
MPQLYIYIRLLGAYLFIISRVQGQNLDSMLHGTGMKSDSDQ

SEQ ID NO: 9332 - protein, 502 aa, Homo sapiens
  Payload ID: 1902;
  Gene Symbol: BMPR1B;
  Gene Name: bone morphogenetic prt receptor, type IB;
  Uniprot ID:  O00238;
  ENSP ID: ENSP00000264568
MLLRSAGKLNVGTKKEDGESTAPTPRPKVLRCKCHHHCPEDSVNNICSTDGYCFTMIEEDDSGLPVVTSGCLGLEGSDFQCRDTPIPHQRRSIECCTERNECNKDLHPTLPPLKNRDFVDGPIHHRALLISVTVCSLLLVLIILFCYFRYKRQETRPRYSIGLEQDETYIPPGESLRDLIEQSQSSGSGSGLPLLVQRTIAKQIQMVKQIGKGRYGEVWMGKWRGEKVAVKVFFTTEEASWFRETEIYQTVLMRHENILGFIAADIKGTGSWTQLYLITDYHENGSLYDYLKSTTLDAKSMLKLAYSSVSGLCHLHTEIFSTQGKPAIAHRDLKSKNILVKKNGTCCIADLGLAVKFISDTNEVDIPPNTRVGTKRYMPPEVLDESLNRNHFQSYIMADMYSFGLILWEVARRCVSGGIVEEYQLPYHDLVPSDPSYEDMREIVCIKKLRPSFPNRWSSDECLRQMGKLMTECWAHNPASRLTALRVKKTLAKMSESQDIKL

SEQ ID NO: 9333 - protein, 502 aa, Homo sapiens; identical to SEQ ID NO: 9332
  Payload ID: 1902;
  Gene Symbol: BMPR1B;
  Gene Name: bone morphogenetic prt receptor, type IB;
  Uniprot ID:  O00238;
  ENSP ID: ENSP00000378389

SEQ ID NO: 9334 - protein, 532 aa, Homo sapiens
  Payload ID: 1902;
  Gene Symbol: BMPR1B;
  Gene Name: bone morphogenetic prt receptor, type IB;
  Uniprot ID:  O00238;
  ENSP ID: ENSP00000401907
MGWLEELNWQLHIFLLILLSMHTRANFLDNMLLRSAGKLNVGTKKEDGESTAPTPRPKVLRCKCHHHCPEDSVNNICSTDGYCFTMIEEDDSGLPVVTSGCLGLEGSDFQCRDTPIPHQRRSIECCTERNECNKDLHPTLPPLKNRDFVDGPIHHRALLISVTVCSLLLVLIILFCYFRYKRQETRPRYSIGLEQDETYIPPGESLRDLIEQSQSSGSGSGLPLLVQRTIAKQIQMVKQIGKGRYGEVWMGKWRGEKVAVKVFFTTEEASWFRETEIYQTVLMRHENILGFIAADIKGTGSWTQLYLITDYHENGSLYDYLKSTTLDAKSMLKLAYSSVSGLCHLHTEIFSTQGKPAIAHRDLKSKNILVKKNGTCCIADLGLAVKFISDTNEVDIPPNTRVGTKRYMPPEVLDESLNRNHFQSYIMADMYSFGLILWEVARRCVSGGIVEEYQLPYHDLVPSDPSYEDMREIVCIKKLRPSFPNRWSSDECLRQMGKLMTECWAHNPASRLTALRVKKTLAKMSESQDIKL

SEQ ID NO: 9335 - protein, 125 aa, Homo sapiens
  Payload ID: 1902;
  Gene Symbol: BMPR1B;
  Gene Name: bone morphogenetic prt receptor, type IB;
  ENSP ID: ENSP00000421144
MLLRSAGKLNVGTKKEDGESTAPTPRPKVLRCKCHHHCPEDSVNNICSTDGYCFTMIEEDDSGLPVVTSGCLGLEGSDFQCRDTPIPHQRRSIECCTERNECNKDLHPTLPPLKNRDFVDGPIHH

SEQ ID NO: 9336 - protein, 502 aa, Homo sapiens; identical to SEQ ID NO: 9332
  Payload ID: 1902;
  Gene Symbol: BMPR1B;
  Gene Name: bone morphogenetic prt receptor, type IB;
  Uniprot ID:  O00238;
  ENSP ID: ENSP00000421671

SEQ ID NO: 9337 - protein, 114 aa, Homo sapiens
  Payload ID: 1902;
  Gene Symbol: BMPR1B;
  Gene Name: bone morphogenetic prt receptor, type IB;
  ENSP ID: ENSP00000424693
MLLRSAGKLNVGTKKEDGESTAPTPRPKVLRCKCHHHCPEDSVNNICSTDGYCFTMIEEDDSGLPVVTSGCLGLEGSDFQCRVRTLPFLIKEDQLNAAQKGTNVIKTYTLHCLH

SEQ ID NO: 9338 - protein, 502 aa, Homo sapiens; identical to SEQ ID NO: 9332
  Payload ID: 1902;
  Gene Symbol: BMPR1B;
  Gene Name: bone morphogenetic prt receptor, type IB;
  Uniprot ID:  O00238;
  ENSP ID: ENSP00000425444

SEQ ID NO: 9339 - protein, 502 aa, Homo sapiens; identical to SEQ ID NO: 9332
  Payload ID: 1902;
  Gene Symbol: BMPR1B;
  Gene Name: bone morphogenetic prt receptor, type IB;
  Uniprot ID:  O00238;
  ENSP ID: ENSP00000426617

SEQ ID NO: 9340 - protein, 530 aa, Homo sapiens
  Payload ID: 1903;
  Gene Symbol: BMPR2;
  Gene Name: bone morphogenetic prt receptor, type II (serine/threonine kinase);
  Uniprot ID:  Q13873;
  ENSP ID: ENSP00000363702
MTSSLQRPWRVPWLPWTILLVSTAAASQNQERLCAFKDPYQQDLGIGESRISHENGTILCSKGSTCYGLWEKSKGDINLVKQGCWSHIGDPQECHYEECVVTTTPPSIQNGTYRFCCCSTDLCNVNFTENFPPPDTTPLSPPHSFNRDETIIIALASVSVLAVLIVALCFGYRMLTGDRKQGLHSMNMMEAAASEPSLDLDNLKLLELIGRGRYGAVYKGSLDERPVAVKVFSFANRQNFINEKNIYRVPLMEHDNIARFIVGDERVTADGRMEYLLVMEYYPNGSLCKYLSLHTSDWVSSCRLAHSVTRGLAYLHTELPRGDHYKPAISHRDLNSRNVLVKNDGTCVISDFGLSMRLTGNRLVRPGEEDNAAISEVGTIRYMAPEVLEGAVNLRDCESALKQVDMYALGLIYWEIFMRCTDLFPGESVPEYQMAFQTEVGNHPTFEDMQVLVSREKQRPKFPEAWKENSLAVRSLKETIEDCWDQDAEARLTAQCAEERMAELMMIWERNKSVSPTVNPMSTAMQNERR

SEQ ID NO: 9341 - protein, 1038 aa, Homo sapiens
  Payload ID: 1903;
  Gene Symbol: BMPR2;
  Gene Name: bone morphogenetic prt receptor, type II (serine/threonine kinase);
  Uniprot ID:  Q13873;
  ENSP ID: ENSP00000363708
MTSSLQRPWRVPWLPWTILLVSTAAASQNQERLCAFKDPYQQDLGIGESRISHENGTILCSKGSTCYGLWEKSKGDINLVKQGCWSHIGDPQECHYEECVVTTTPPSIQNGTYRFCCCSTDLCNVNFTENFPPPDTTPLSPPHSFNRDETIIIALASVSVLAVLIVALCFGYRMLTGDRKQGLHSMNMMEAAASEPSLDLDNLKLLELIGRGRYGAVYKGSLDERPVAVKVFSFANRQNFINEKNIYRVPLMEHDNIARFIVGDERVTADGRMEYLLVMEYYPNGSLCKYLSLHTSDWVSSCRLAHSVTRGLAYLHTELPRGDHYKPAISHRDLNSRNVLVKNDGTCVISDFGLSMRLTGNRLVRPGEEDNAAISEVGTIRYMAPEVLEGAVNLRDCESALKQVDMYALGLIYWEIFMRCTDLFPGESVPEYQMAFQTEVGNHPTFEDMQVLVSREKQRPKFPEAWKENSLAVRSLKETIEDCWDQDAEARLTAQCAEERMAELMMIWERNKSVSPTVNPMSTAMQNERNLSHNRRVPKIGPYPDYSSSSYIEDSIHHTDSIVKNISSEHSMSSTPLTIGEKNRNSINYERQQAQARIPSPETSVTSLSTNTTTTNTTGLTPSTGMTTISEMPYPDETNLHTTNVAQSIGPTPVCLQLTEEDLETNKLDPKEVDKNLKESSDENLMEHSLKQFSGPDPLSSTSSSLLYPLIKLAVEATGQQDFTQTANGQACLIPDVLPTQIYPLPKQQNLPKRPTSLPLNTKNSTKEPRLKFGSKHKSNLKQVETGVAKMNTINAAEPHVVTVTMNGVAGRNHSVNSHAATTQYANGTVLSGQTTNIVTHRAQEMLQNQFIGEDTRLNINSSPDEHEPLLRREQQAGHDEGVLDRLVDRRERPLEGGRTNSNNNNSNPCSEQDVLAQGVPSTAADPGPSKPRRAQRPNSLDLSATNVLDGSSIQIGESTQDGKSGSGEKIKKRVKTPYSLKRWRPSTWVISTESLDCEVNNNGSNRAVHSKSSTAVYLAEGGTATTMVSKDIGMNCL

SEQ ID NO: 9342 - protein, 761 aa, Homo sapiens
  Payload ID: 1904;
  Gene Symbol: BRINP1;
  Gene Name: bone morphogenetic prt/retinoic acid inducible neural-specific 1;
  Uniprot ID:  O60477;
  ENSP ID: ENSP00000265922
MNWRFVELLYFLFIWGRISVQPSHQEPAGTDQHVSKEFDWLISDRGPFHHSRSYLSFVERHRQGFTTRYKIYREFARWKVRNTAIERRDLVRHPVPLMPEFQRSIRLLGRRPTTQQFIDTIIKKYGTHLLISATLGGEEALTMYMDKSRLDRKSGNATQSVEALHQLASSYFVDRDGTMRRLHEIQISTGAIKVTETRTGPLGCNSYDNLDSVSSVLLQSTESKLHLQGLQIIFPQYLQEKFVQSALSYIMCNGEGEYLCQNSQCRCQCAEEFPQCNCPITDIQIMEYTLANMAKSWAEAYKDLENSDEFKSFMKRLPSNHFLTIGSIHQHWGNDWDLQNRYKLLQSATEAQRQKIQRTARKLFGLSVRCRHNPNHQLPRERTIQQWLARVQSLLYCNENGFWGTFLESQRSCVCHGSTTLCQRPIPCVIGGNNSCAMCSLANISLCGSCNKGYKLYRGRCEPQNVDSERSEQFISFETDLDFQDLELKYLLQKMDSRLYVHTTFISNEIRLDTFFDPRWRKRMSLTLKSNKNRMDFIHMVIGMSMRICQMRNSSLDPMFFVYVNPFSGSHSEGWNMPFGEFGYPRWEKIRLQNSQCYNWTLLLGNRWKTFFETVHIYLRSRTRLPTLLRNETGQGPVDLSDPSKRQFYIKISDVQVFGYSLRFNADLLRSAVQQVNQSYTQGGQFYSSSSVMLLLLDIRDRINRLAPPVAPGKPQLDLFSCMLKHRLKLTNSEIIRVNHALDLYNTEILKQSDQMTAKLC

SEQ ID NO: 9343 - protein, 320 aa, Homo sapiens
  Payload ID: 1904;
  Gene Symbol: BRINP1;
  Gene Name: bone morphogenetic prt/retinoic acid inducible neural-specific 1;
  Uniprot ID:  O60477;
  ENSP ID: ENSP00000363075
MNWRFVELLYFLFIWGRISVQPSHQEPAGTDQHVSKEFDWLISDRGPFHHSRSYLSFVERHRQGFTTRYKIYREFARWKVRNTAIERRDLVRHPVPLMPEFQRSIRLLGRRPTTQQFIDTIIKKYGTHLLISATLGGEEALTMYMDKSRLDRKSGNATQSVEALHQLASSYFVDRDGTMRRLHEIQISTGAIKVTETRTGPLGCNSYDNLDSVSSVLLQSTESKLHLQGLQIIFPQYLQEKFVQSALSYIMCNGEGEYLCQNSQCRCQCAEEFPQCNCPITDIQIMEYTLANMAKSWAEAYKDLENSGRESHSVPLHEWP

SEQ ID NO: 9344 - protein, 783 aa, Homo sapiens
  Payload ID: 1905;
  Gene Symbol: BRINP2;
  Gene Name: bone morphogenetic prt/retinoic acid inducible neural-specific 2;
  Uniprot ID:  Q9C0B6;
  ENSP ID: ENSP00000354481
MRWQCGTRFRGLRPAVAPWTALLALGLPGWVLAVSATAAAVVPEQHASVAGQHPLDWLLTDRGPFHRAQEYADFMERYRQGFTTRYRIYREFARWKVNNLALERKDFFSLPLPLAPEFIRNIRLLGRRPNLQQVTENLIKKYGTHFLLSATLGGEESLTIFVDKQKLGRKTETTGGASIIGGSGNSTAVSLETLHQLAASYFIDRESTLRRLHHIQIATGAIKVTETRTGPLGCSNYDNLDSVSSVLVQSPENKVQLLGLQVLLPEYLRERFVAAALSYITCSSEGELVCKENDCWCKCSPTFPECNCPDADIQAMEDSLLQIQDSWATHNRQFEESEEFQALLKRLPDDRFLNSTAISQFWAMDTSLQHRYQQLGAGLKVLFKKTHRILRRLFNLCKRCHRQPRFRLPKERSLSYWWNRIQSLLYCGESTFPGTFLEQSHSCTCPYDQSSCQGPIPCALGEGPACAHCAPDNSTRCGSCNPGYVLAQGLCRPEVAESLENFLGLETDLQDLELKYLLQKQDSRIEVHSIFISNDMRLGSWFDPSWRKRMLLTLKSNKYKPGLVHVMLALSLQICLTKNSTLEPVMAIYVNPFGGSHSESWFMPVNEGSFPDWERTNVDAAAQCQNWTITLGNRWKTFFETVHVYLRSRIKSLDDSSNETIYYEPLEMTDPSKNLGYMKINTLQVFGYSLPFDPDAIRDLILQLDYPYTQGSQDSALLQLIELRDRVNQLSPPGKVRLDLFSCLLRHRLKLANNEVGRIQSSLRAFNSKLPNPVEYETGKLCS

SEQ ID NO: 9345 - protein, 766 aa, Homo sapiens
  Payload ID: 1906;
  Gene Symbol: BRINP3;
  Gene Name: bone morphogenetic prt/retinoic acid inducible neural-specific 3;
  Uniprot ID:  Q76B58;
  ENSP ID: ENSP00000356432
MIWRSRAGAELFSLMALWEWIALSLHCWVLAVAAVSDQHATSPFDWLLSDKGPFHRSQEYTDFVDRSRQGFSTRYKIYREFGRWKVNNLAVERRNFLGSPLPLAPEFFRNIRLLGRRPTLQQITENLIKKYGTHFLLSATLGGEESLTIFVDKRKLSKRAEGSDSTTNSSSVTLETLHQLAASYFIDRDSTLRRLHHIQIASTAIKVTETRTGPLGCSNYDNLDSVSSVLVQSPENKIQLQGLQVLLPDYLQERFVQAALSYIACNSEGEFICKENDCWCHCGPKFPECNCPSMDIQAMEENLLRITETWKAYNSDFEESDEFKLFMKRLPMNYFLNTSTIMHLWTMDSNFQRRYEQLENSMKQLFLKAQKIVHKLFSLSKRCHKQPLISLPRQRTSTYWLTRIQSFLYCNENGLLGSFSEETHSCTCPNDQVVCTAFLPCTVGDASACLTCAPDNRTRCGTCNTGYMLSQGLCKPEVAESTDHYIGFETDLQDLEMKYLLQKTDRRIEVHAIFISNDMRLNSWFDPSWRKRMLLTLKSNKYKSSLVHMILGLSLQICLTKNSTLEPVLAVYVNPFGGSHSESWFMPVNENSFPDWERTKLDLPLQCYNWTLTLGNKWKTFFETVHIYLRSRIKSNGPNGNESIYYEPLEFIDPSRNLGYMKINNIQVFGYSMHFDPEAIRDLILQLDYPYTQGSQDSALLQLLEIRDRVNKLSPPGQRRLDLFSCLLRHRLKLSTSEVVRIQSALQAFNAKLPNTMDYDTTKLCS

SEQ ID NO: 9346 - protein, 28 aa, Homo sapiens
  Payload ID: 1906;
  Gene Symbol: BRINP3;
  Gene Name: bone morphogenetic prt/retinoic acid inducible neural-specific 3;
  ENSP ID: ENSP00000393441
MIWRSRAGAELFSLMALWEWIALSLHCW

SEQ ID NO: 9347 - protein, 158 aa, Homo sapiens
  Payload ID: 1906;
  Gene Symbol: BRINP3;
  Gene Name: bone morphogenetic prt/retinoic acid inducible neural-specific 3;
  ENSP ID: ENSP00000487601
MIWRSRAGAELFSLMALWEWIALSLHCWVLAVAAVSDQHATSPFDWLLSDKGPFHRSQEYTDFVDRSRQGFSTRYKIYREFGRWKVNNLAVERRNFLGSPLPLAPEFFRNIRLLGRRPTLQQITENLIKKYGTHFLLSATLGGEESLTIFVDKRKLSK

SEQ ID NO: 9348 - protein, 214 aa, Homo sapiens
  Payload ID: 1907;
  Gene Symbol: BORA;
  Gene Name: bora, aurora kinase A activator;
  ENSP ID: ENSP00000367045
  MOD_RES (1)..(1): Any amino acid
XKSLCLSWKLAWPPELPGVGTGGFVLYAPTPGKFRWSIDQLAVINPVEIDPEDIHRQALYLSHSRIDKDVEDKRQKAIEEFFTKDVIVPSPWTDHEGKQLSQCHSSKCTNINSDSPVGKKLTIHSEKSDAACQTLLSLPVDFNLENILGDYFRADEFADQSPGNLSSSSLRRKLFLDGNGSISDSLPSASPGSPHSGVQTSLEMFYSIDLSPVK

SEQ ID NO: 9349 - protein, 489 aa, Homo sapiens
  Payload ID: 1907;
  Gene Symbol: BORA;
  Gene Name: bora, aurora kinase A activator;
  Uniprot ID:  Q6PGQ7;
  ENSP ID: ENSP00000367046
MNKLSPVLLFLNQQNYQIDKDVEDKRQKAIEEFFTKDVIVPSPWTDHEGKQLSQCHSSKCTNINSDSPVGKKLTIHSEKSDAACQTLLSLPVDFNLENILGDYFRADEFADQSPGNLSSSSLRRKLFLDGNGSISDSLPSASPGSPHSGVQTSLEMFYSIDLSPVKCRSPLQTPSSGQFSSSPIQASAKKYSLGSITSPSPISSPTFSPIEFQIGETPLSEQRKFTVHSPDASSGTNSNGITNPCIRSPYIDGCSPIKNWSPMRLQMYSGGTQYRTSVIQIPFTLETQGEDEEDKENIPSTDVSSPAMDAAGIHLRQFSNEASTHGTHLVVTAMSVTQNQSSASEKELALLQDVEREKDNNTVDMVDPIEIADETTWIKEPVDNGSLPMTDFVSGIAFSIENSHMCMSPLAESSVIPCESSNIQMDSGYNTQNCGSNIMDTVGAESYCKESDAQTCEVESKSQAFNMKQDHTTQRCWMKTASPFQCSSP

SEQ ID NO: 9350 - protein, 619 aa, Homo sapiens
  Payload ID: 1907;
  Gene Symbol: BORA;
  Gene Name: bora, aurora kinase A activator;
  ENSP ID: ENSP00000375082
MAGRHDWLVAHKPRALVGPRQRGSGELKSLCLSWKLAWPPELPGVGTGGFVLYAPFSLCAMGDVKESKMQITPETPGRIPVLNPFESPSDYSNLHEQTLASPSVFKSTKLPTPGKFRWSIDQLAVINPVEIDPEDIHRQALYLSHSRIDKDVEDKRQKAIEEFFTKDVIVPSPWTDHEGKQLSQCHSSKCTNINSDSPVGKKLTIHSEKSDAACQTLLSLPVDFNLENILGDYFRADEFADQSPGNLSSSSLRRKLFLDGNGSISDSLPSASPGSPHSGVQTSLEMFYSIDLSPVKCRSPLQTPSSGQFSSSPIQASAKKYSLGSITSPSPISSPTFSPIEFQIGETPLSEQRKFTVHSPDASSGTNSNGITNPCIRSPYIDGCSPIKNWSPMRLQMYSGGTQYRTSVIQIPFTLETQGEDEEDKENIPSTDVSSPAMDAAGIHLRQFSNEASTHGTHLVVTAMSVTQNQSSASEKELALLQDVEREKDNNTVDMVDPIEIADETTWIKEPVDNGSLPMTDFVSGIAFSIENSHMCMSPLAESSVIPCESSNIQMDSGYNTQNCGSNIMDTVGAESYCKESDAQTCEVESKSQAFNMKQDHTTQRCWMKTASPFQCSSP

SEQ ID NO: 9351 - protein, 634 aa, Homo sapiens
  Payload ID: 1907;
  Gene Symbol: BORA;
  Gene Name: bora, aurora kinase A activator;
  ENSP ID: ENSP00000479266
MERFLFPAPDLPARSPLVNGSSQGVGVEERGTRKSGHVGLGATPPSHSIQGSRLHLNLPEVDSFPPHPAKFSLCAMGDVKESKMQITPETPGRIPVLNPFESPSDYSNLHEQTLASPSVFKSTKLPTPGKFRWSIDQLAVINPVEIDPEDIHRQALYLSHSRIDKDVEDKRQKAIEEFFTKDVIVPSPWTDHEGKQLSQCHSSKCTNINSDSPVGKKLTIHSEKSDAACQTLLSLPVDFNLENILGDYFRADEFADQSPGNLSSSSLRRKLFLDGNGSISDSLPSASPGSPHSGVQTSLEMFYSIDLSPVKCRSPLQTPSSGQFSSSPIQASAKKYSLGSITSPSPISSPTFSPIEFQIGETPLSEQRKFTVHSPDASSGTNSNGITNPCIRSPYIDGCSPIKNWSPMRLQMYSGGTQYRTSVIQIPFTLETQGEDEEDKENIPSTDVSSPAMDAAGIHLRQFSNEASTHGTHLVVTAMSVTQNQSSASEKELALLQDVEREKDNNTVDMVDPIEIADETTWIKEPVDNGSLPMTDFVSGIAFSIENSHMCMSPLAESSVIPCESSNIQMDSGYNTQNCGSNIMDTVGAESYCKESDAQTCEVESKSQAFNMKQDHTTQRCWMKTASPFQCSSP

SEQ ID NO: 9352 - protein, 114 aa, Homo sapiens
  Payload ID: 1907;
  Gene Symbol: BORA;
  Gene Name: bora, aurora kinase A activator;
  ENSP ID: ENSP00000479349
MAGRHDWLVAHKPRALVGPRQRGSGELKSLCLSWKLAWPPELPGVGTGGFVLYAPFSLCAMGDVKESKMQITPETPGRIPVLNPFESPSDYSNLHEQTLASPSVFKSTKLPALT

SEQ ID NO: 9353 - protein, 106 aa, Homo sapiens; identical to SEQ ID NO: 9212
  Payload ID: 1908;
  Gene Symbol: BORCS7-ASMT;
  Gene Name: BORCS7-ASMT readthrough (NMD candidate);
  ENSP ID: ENSP00000299353

SEQ ID NO: 9354 - protein, 365 aa, Homo sapiens
  Payload ID: 1909;
  Gene Symbol: BORCS8-MEF2B;
  Gene Name: BORCS8-MEF2B readthrough;
  ENSP ID: ENSP00000390762
MGRKKIQISRILDQRNRQVTFTKRKFGLMKKAYELSVLCDCEIALIIFNSANRLFQYASTDMDRVLLKYTEYSEPHESRTNTDILETLKRRGIGLDGPELEPDEGPEEPGEKFRRLAGEGGDPALPRPRLYPAAPAMPSPDVVYGALPPPGCDPSGLGEALPAQSRPSPFRPAAPKAGPPGLVHPLFSPSHLTSKTPPPLYLPTEGRRSDLPGGLAGPRGGLNTSRSLYSGLQNPCSTATPGPPLGSFPFLPGGPPVGAEAWARRVPQPAAPPRRPPQSASSLSASLRPPGAPATFLRPSPIPCSSPGPWQSLCGLGPPCAGCPWPTAGPGRRSPGGTSPERSPGTARARGDPTSLQASSEKTQQ

SEQ ID NO: 9355 - protein, 382 aa, Homo sapiens
  Payload ID: 1909;
  Gene Symbol: BORCS8-MEF2B;
  Gene Name: BORCS8-MEF2B readthrough;
  ENSP ID: ENSP00000454967
MPVPRATDKDHSTQPGTMGRKKIQISRILDQRNRQVTFTKRKFGLMKKAYELSVLCDCEIALIIFNSANRLFQYASTDMDRVLLKYTEYSEPHESRTNTDILETLKRRGIGLDGPELEPDEGPEEPGEKFRRLAGEGGDPALPRPRLYPAAPAMPSPDVVYGALPPPGCDPSGLGEALPAQSRPSPFRPAAPKAGPPGLVHPLFSPSHLTSKTPPPLYLPTEGRRSDLPGGLAGPRGGLNTSRSLYSGLQNPCSTATPGPPLGSFPFLPGGPPVGAEAWARRVPQPAAPPRRPPQSASSLSASLRPPGAPATFLRPSPIPCSSPGPWQSLCGLGPPCAGCPWPTAGPGRRSPGGTSPERSPGTARARGDPTSLQASSEKTQQ

SEQ ID NO: 9356 - protein, 119 aa, Homo sapiens; identical to SEQ ID NO: 9215
  Payload ID: 1909;
  Gene Symbol: BORCS8-MEF2B;
  Gene Name: BORCS8-MEF2B readthrough;
  ENSP ID: ENSP00000457957

SEQ ID NO: 9357 - protein, 119 aa, Homo sapiens; identical to SEQ ID NO: 9215
  Payload ID: 1909;
  Gene Symbol: BORCS8-MEF2B;
  Gene Name: BORCS8-MEF2B readthrough;
  ENSP ID: ENSP00000473369

SEQ ID NO: 9358 - protein, 119 aa, Homo sapiens; identical to SEQ ID NO: 9215
  Payload ID: 1909;
  Gene Symbol: BORCS8-MEF2B;
  Gene Name: BORCS8-MEF2B readthrough;
  ENSP ID: ENSP00000473577

SEQ ID NO: 9359 - protein, 119 aa, Homo sapiens; identical to SEQ ID NO: 9215
  Payload ID: 1909;
  Gene Symbol: BORCS8-MEF2B;
  Gene Name: BORCS8-MEF2B readthrough;
  ENSP ID: ENSP00000486975

SEQ ID NO: 9360 - protein, 174 aa, Homo sapiens
  Payload ID: 1910;
  Gene Symbol: BOLL;
  Gene Name: boule-like RNA-binding prt;
  Uniprot ID:  Q8N9W6;
  ENSP ID: ENSP00000282278
MTELEYPKGSSIMPAAGTMYLTTSTGYPYTYHNGVAYFHTPEVTSVPPPWPSRSVCSSPVMVAQPIYQQPAYHYQATTQYLPGQWQWSVPQPSASSAPFLYLQPSEVIYQPVEIAQDGGCVPPPLSLMETSVPEPYSDHGVQATYHQVYAPSAITMPAPVMQPEPIKTVWSIHY

SEQ ID NO: 9361 - protein, 295 aa, Homo sapiens
  Payload ID: 1910;
  Gene Symbol: BOLL;
  Gene Name: boule-like RNA-binding prt;
  Uniprot ID:  Q8N9W6;
  ENSP ID: ENSP00000314792
METESGPQTSNQMQTDSLSPSPNPVSPVPLNNPTSAPRYGTVIPNRIFVGGIDFKTNESDLRKFFSQYGSVKEVKIVNDRAGVSKGYGFVTFETQEDAQKILQEAEKLNYKDKKLNIGPAIRKQQVGIPRSSIMPAAGTMYLTTSTGYPYTYHNGVAYFHTPEVTSVPPPWPSRSVCSSPVMVAQPIYQQPAYHYQATTQYLPGQWQWSVPQPSASSAPFLYLQPSEVIYQPVEIAQDGGCVPPPLSLMETSVPEPYSDHGVQATYHQVYAPSAITMPAPVMQPEPIKTVWSIHY

SEQ ID NO: 9362 - protein, 283 aa, Homo sapiens
  Payload ID: 1910;
  Gene Symbol: BOLL;
  Gene Name: boule-like RNA-binding prt;
  Uniprot ID:  Q8N9W6;
  ENSP ID: ENSP00000376116
MQTDSLSPSPNPVSPVPLNNPTSAPRYGTVIPNRIFVGGIDFKTNESDLRKFFSQYGSVKEVKIVNDRAGVSKGYGFVTFETQEDAQKILQEAEKLNYKDKKLNIGPAIRKQQVGIPRSSIMPAAGTMYLTTSTGYPYTYHNGVAYFHTPEVTSVPPPWPSRSVCSSPVMVAQPIYQQPAYHYQATTQYLPGQWQWSVPQPSASSAPFLYLQPSEVIYQPVEIAQDGGCVPPPLSLMETSVPEPYSDHGVQATYHQVYAPSAITMPAPVMQPEPIKTVWSIHY

SEQ ID NO: 9363 - protein, 283 aa, Homo sapiens; identical to SEQ ID NO: 9362
  Payload ID: 1910;
  Gene Symbol: BOLL;
  Gene Name: boule-like RNA-binding prt;
  Uniprot ID:  Q8N9W6;
  ENSP ID: ENSP00000396099

SEQ ID NO: 9364 - protein, 333 aa, Homo sapiens
  Payload ID: 1910;
  Gene Symbol: BOLL;
  Gene Name: boule-like RNA-binding prt;
  ENSP ID: ENSP00000397711
MQTDSLSPSPNPVSPVPLNNPTSAPRYGTVIPNRIFVGGIDFKTNESDLRKFFSQYGSVKEVKIVNDRAGVSKGYGFVTFETQEDAQKILQEAEKLNYKDKKLNIGPAIRKQQVGIPRSSIMPAAGTMYLTTSTGYPYTYHNGVAYFHTPEVTSVPPPWPSRSVCSSPVMVAQPIYQQPAYHYQGIKQCHTRRWMDSLLPFTKCDEATTQYLPGQWQWSVPQPSASSAPFLYLQPSEVIYQPVEIAQDGGCVPPPLSLMETSVPEPYSDHGVQATYHQVYAPSAITMPAPVMQPEPIKCGAFIIKTIGQLYSSSTDFLSNDPCVAEIQLQRTS

SEQ ID NO: 9365 - protein, 87 aa, Homo sapiens
  Payload ID: 1910;
  Gene Symbol: BOLL;
  Gene Name: boule-like RNA-binding prt;
  ENSP ID: ENSP00000416911
METESGPQTSNQMQTDSLSPSPNPVSPVPLNNPTSAPRYGTVIPNRIFVGGIDFKTNESDLRKFFSQYGSVKEVKIVNDRAGVSKGF

SEQ ID NO: 9366 - protein, 256 aa, Homo sapiens
  Payload ID: 1911;
  Gene Symbol: BPIFA1;
  Gene Name: BPI fold containing family A, member 1;
  Uniprot ID:  Q9NP55;
  ENSP ID: ENSP00000346251
MFQTGGLIVFYGLLAQTMAQFGGLPVPLDQTLPLNVNPALPLSPTGLAGSLTNALSNGLLSGGLLGILENLPLLDILKPGGGTSGGLLGGLLGKVTSVIPGLNNIIDIKVTDPQLLELGLVQSPDGHRLYVTIPLGIKLQVNTPLVGASLLRLAVKLDITAEILAVRDKQERIHLVLGDCTHSPGSLQISLLDGLGPLPIQGLLDSLTGILNKVLPELVQGNVCPLVNEVLRGLDITLVHDIVNMLIHGLQFVIKV

SEQ ID NO: 9367 - protein, 256 aa, Homo sapiens; identical to SEQ ID NO: 9366
  Payload ID: 1911;
  Gene Symbol: BPIFA1;
  Gene Name: BPI fold containing family A, member 1;
  Uniprot ID:  Q9NP55;
  ENSP ID: ENSP00000364562

SEQ ID NO: 9368 - protein, 256 aa, Homo sapiens; identical to SEQ ID NO: 9366
  Payload ID: 1911;
  Gene Symbol: BPIFA1;
  Gene Name: BPI fold containing family A, member 1;
  Uniprot ID:  Q9NP55;
  ENSP ID: ENSP00000364571

SEQ ID NO: 9369 - protein, 242 aa, Homo sapiens
  Payload ID: 1911;
  Gene Symbol: BPIFA1;
  Gene Name: BPI fold containing family A, member 1;
  Uniprot ID:  Q9NP55;
  ENSP ID: ENSP00000482297
MFQTGGLIVFYGLLAQTLPLNVNPALPLSPTGLAGSLTNALSNGLLSGGLLGILENLPLLDILKPGGGTSGGLLGGLLGKVTSVIPGLNNIIDIKVTDPQLLELGLVQSPDGHRLYVTIPLGIKLQVNTPLVGASLLRLAVKLDITAEILAVRDKQERIHLVLGDCTHSPGSLQISLLDGLGPLPIQGLLDSLTGILNKVLPELVQGNVCPLVNEVLRGLDITLVHDIVNMLIHGLQFVIKV

SEQ ID NO: 9370 - protein, 249 aa, Homo sapiens
  Payload ID: 1912;
  Gene Symbol: BPIFA2;
  Gene Name: BPI fold containing family A, member 2;
  Uniprot ID:  Q96DR5;
  ENSP ID: ENSP00000253362
MLQLWKLVLLCGVLTGTSESLLDNLGNDLSNVVDKLEPVLHEGLETVDNTLKGILEKLKVDLGVLQKSSAWQLAKQKAQEAEKLLNNVISKLLPTNTDIFGLKISNSLILDVKAEPIDDGKGLNLSFPVTANVTVAGPIIGQIINLKASLDLLTAVTIETDPQTHQPVAVLGECASDPTSISLSLLDKHSQIINKFVNSVINTLKSTVSSLLQKEICPLIRIFIHSLDVNVIQQVVDNPQHKTQLQTLI

SEQ ID NO: 9371 - protein, 249 aa, Homo sapiens; identical to SEQ ID NO: 9370
  Payload ID: 1912;
  Gene Symbol: BPIFA2;
  Gene Name: BPI fold containing family A, member 2;
  Uniprot ID:  Q96DR5;
  ENSP ID: ENSP00000347012

SEQ ID NO: 9372 - protein, 218 aa, Homo sapiens
  Payload ID: 1913;
  Gene Symbol: BPIFA3;
  Gene Name: BPI fold containing family A, member 3;
  Uniprot ID:  Q9BQP9;
  ENSP ID: ENSP00000364601
MMCPLWRLLIFLGLLALPLAPHKQPWPGLAQAHRDNKSTLARIIAQGLIKHNAESRIQNIHFGDRLNASAQVAPGLVGWLISGRKHQQQQESRSFDNNIVKMCAHMSIVVEFWLEKDEFGRRDLVIGKCDAEPSSVHVAILTEAIPPKMNQFLYNLKENLQKVLPHMVESQVCPLIGEILGQLDVKLLKSLIEQEAAHEPTHHETSQPSACQAGESPS

SEQ ID NO: 9373 - protein, 254 aa, Homo sapiens
  Payload ID: 1913;
  Gene Symbol: BPIFA3;
  Gene Name: BPI fold containing family A, member 3;
  Uniprot ID:  Q9BQP9;
  ENSP ID: ENSP00000364603
MMCPLWRLLIFLGLLALPLAPHKQPWPGLAQAHRDNKSTLARIIAQGLIKHNAESRIQNIHFGDRLNASAQVAPGLVGWLISGRKHQQQQESSINITNIQLDCGGIQISFHKEWFSANISLEFDLELRPSFDNNIVKMCAHMSIVVEFWLEKDEFGRRDLVIGKCDAEPSSVHVAILTEAIPPKMNQFLYNLKENLQKVLPHMVESQVCPLIGEILGQLDVKLLKSLIEQEAAHEPTHHETSQPSACQAGESPS

SEQ ID NO: 9374 - protein, 484 aa, Homo sapiens
  Payload ID: 1914;
  Gene Symbol: BPIFB1;
  Gene Name: BPI fold containing family B, member 1;
  Uniprot ID:  Q8TDL5;
  ENSP ID: ENSP00000253354
MAGPWTFTLLCGLLAATLIQATLSPTAVLILGPKVIKEKLTQELKDHNATSILQQLPLLSAMREKPAGGIPVLGSLVNTVLKHIIWLKVITANILQLQVKPSANDQELLVKIPLDMVAGFNTPLVKTIVEFHMTTEAQATIRMDTSASGPTRLVLSDCATSHGSLRIQLLHKLSFLVNALAKQVMNLLVPSLPNLVKNQLCPVIEASFNGMYADLLQLVKVPISLSIDRLEFDLLYPAIKGDTIQLYLGAKLLDSQGKVTKWFNNSAASLTMPTLDNIPFSLIVSQDVVKAAVAAVLSPEEFMVLLDSVLPESAHRLKSSIGLINEKAADKLGSTQIVKILTQDTPEFFIDQGHAKVAQLIVLEVFPSSEALRPLFTLGIEASSEAQFYTKGDQLILNLNNISSDRIQLMNSGIGWFQPDVLKNIITEIIHSILLPNQNGKLRSGVPVSLVKALGFEAAESSLTKDALVLTPASLWKPSSPVSQ

SEQ ID NO: 9375 - protein, 147 aa, Homo sapiens
  Payload ID: 1914;
  Gene Symbol: BPIFB1;
  Gene Name: BPI fold containing family B, member 1;
  ENSP ID: ENSP00000390471
MAGPWTFTLLCGLLAATLIQATLSPTAVLILGPKVIKEKLTQELKDHNATSILQQLPLLSAMREKPAGGIPVLGSLVNTVLKHIIWLKVITANILQLQVKPSANDQELLVKIPLDMVAGFNTPLVKTIVEFHMTTEAQATIRMDTSA

SEQ ID NO: 9376 - protein, 458 aa, Homo sapiens
  Payload ID: 1915;
  Gene Symbol: BPIFB2;
  Gene Name: BPI fold containing family B, member 2;
  Uniprot ID:  Q8N4F0;
  ENSP ID: ENSP00000170150
MAWASRLGLLLALLLPVVGASTPGTVVRLNKAALSYVSEIGKAPLQRALQVTVPHFLDWSGEALQPTRIRILNVHVPRLHLKFIAGFGVRLLAAANFTFKVFRAPEPLELTLPVELLADTRVTQSSIRTPVVSISACSLFSGHANEFDGSNSTSHALLVLVQKHIKAVLSNKLCLSISNLVQGVNVHLGTLIGLNPVGPESQIRYSMVSVPTVTSDYISLEVNAVLFLLGKPIILPTDATPFVLPRHVGTEGSMATVGLSQQLFDSALLLLQKAGALNLDITGQLRSDDNLLNTSALGRLIPEVARQFPEPMPVVLKVRLGATPVAMLHTNNATLRLQPFVEVLATASNSAFQSLFSLDVVVNLRLQLSVSKVKLQGTTSVLGDVQLTVASSNVGFIDTDQVRTLMGTVFEKPLLDHLNALLAMGIALPGVVNLHYVAPEIFVYEGYVVISSGLFYQS

SEQ ID NO: 9377 - protein, 476 aa, Homo sapiens
  Payload ID: 1916;
  Gene Symbol: BPIFB3;
  Gene Name: BPI fold containing family B, member 3;
  Uniprot ID:  P59826;
  ENSP ID: ENSP00000364643
MQPVMLALWSLLLLWGLATPCQELLETVGTLARIDKDELGKAIQNSLVGEPILQNVLGSVTAVNRGLLGSGGLLGGGGLLGHGGVFGVVEELSGLKIEELTLPKVLLKLLPGFGVQLSLHTKVGMHCSGPLGGLLQLAAEVNVTSRVALAVSSRGTPILILKRCSTLLGHISLFSGLLPTPLFGVVEQMLFKVLPGLLCPVVDSVLGVVNELLGAVLGLVSLGALGSVEFSLATLPLISNQYIELDINPIVKSVAGDIIDFPKSRAPAKVPPKKDHTSQVMVPLYLFNTTFGLLQTNGALDMDITPELVPSDVPLTTTDLAALLPEALGKLPLHQQLLLFLRVREAPTVTLHNKKALVSLPANIHVLFYVPKGTPESLFELNSVMTVRAQLAPSATKLHISLSLERLSVKVASSFTHAFDGSRLEEWLSHVVGAVYAPKLNVALDVGIPLPKVLNINFSNSVLEIVENAVVLTVAS

SEQ ID NO: 9378 - protein, 614 aa, Homo sapiens
  Payload ID: 1917;
  Gene Symbol: BPIFB4;
  Gene Name: BPI fold containing family B, member 4;
  Uniprot ID:  P59827;
  ENSP ID: ENSP00000364632
MWMAWCVAALSVVAVCGTSHETNTVLRVTKDVLSNAISGMLQQSDALHSALREVPLGVGDIPYNDFHVRGPPPVYTNGKKLDGIYQYGHIETNDNTAQLGGKYRYGEILESEGSIRDLRNSGYRSAENAYGGHRGLGRYRAAPVGRLHRRELQPGEIPPGVATGAVGPGGLLGTGGMLAADGILAGQGGLLGGGGLLGDGGLLGGGGVLGVLGEGGILSTVQGITGLRIVELTLPRVSVRLLPGVGVYLSLYTRVAINGKSLIGFLDIAVEVNITAKVRLTMDRTGYPRLVIERCDTLLGGIKVKLLRGLLPNLVDNLVNRVLADVLPDLLCPIVDVVLGLVNDQLGLVDSLIPLGILGSVQYTFSSLPLVTGEFLELDLNTLVGEAGGGLIDYPLGWPAVSPKPMPELPPMGDNTKSQLAMSANFLGSVLTLLQKQHALDLDITNGMFEELPPLTTATLGALIPKVFQQYPESCPLIIRIQVLNPPSVMLQKDKALVKVLATAEVMVSQPKDLETTICLIDVDTEFLASFSTEGDKLMIDAKLEKTSLNLRTSNVGNFDIGLMEVLVEKIFDLAFMPAMNAVLGSGVPLPKILNIDFSNADIDVLEDLLVLSA

SEQ ID NO: 9379 - protein, 44 aa, Homo sapiens
  Payload ID: 1917;
  Gene Symbol: BPIFB4;
  Gene Name: BPI fold containing family B, member 4;
  ENSP ID: ENSP00000388423
MWMAWCVAALSVVAVCGTSHETNTVLRVTKDVLSNGFSPISWTI

SEQ ID NO: 9380 - protein, 453 aa, Homo sapiens
  Payload ID: 1918;
  Gene Symbol: BPIFB6;
  Gene Name: BPI fold containing family B, member 6;
  Uniprot ID:  Q8NFQ5;
  ENSP ID: ENSP00000344929
MLRILCLALCSLLTGTRADPGALLRLGMDIMNQVQSAMDESHILEKMAAEAGKKQPGMKPIKGITNLKVKDVQLPVITLNFVPGVGIFQCVSTGMTVTGKSFMGGNMEIIVALNITATNRLLRDEETGLPVFKSEGCEVILVNVKTNLPSNMLPKMVNKFLDSTLHKVLPGLMCPAIDAVLVYVNRKWTNLSDPMPVGQMGTVKYVLMSAPATTASYIQLDFSPVVQQQKGKTIKLADAGEALTFPEGYAKGSSQLLLPATFLSAELALLQKSFHVNIQDTMIGELPPQTTKTLARFIPEVAVAYPKSKPLTTQIKIKKPPKVTMKTGKSLLHLHSTLEMFAARWRSKAPMSLFLLEVHFNLKVQYSVHENQLQMATSLDRLLSLSRKSSSIGNFNERELTGFITSYLEEAYIPVVNDVLQVGLPLPDFLAMNYNLAELDIVENALMLDLKLG

SEQ ID NO: 9381 - protein, 88 aa, Homo sapiens
  Payload ID: 1918;
  Gene Symbol: BPIFB6;
  Gene Name: BPI fold containing family B, member 6;
  ENSP ID: ENSP00000443533
MLRILCLALCSLLTGTRADPGALLRLGMDIMNREVQSAMDESHILEKMAAEAGKKQPGMKPIKGITNEQGHFEEEMRLESQISTLHAT

SEQ ID NO: 9382 - protein, 507 aa, Homo sapiens
  Payload ID: 1919;
  Gene Symbol: BPIFC;
  Gene Name: BPI fold containing family C;
  Uniprot ID:  Q8NFQ6;
  ENSP ID: ENSP00000300399
MCTKTIPVLWGCFLLWNLYVSSSQTIYPGIKARITQRALDYGVQAGMKMIEQMLKEKKLPDLSGSESLEFLKVDYVNYNFSNIKISAFSFPNTSLAFVPGVGIKALTNHGTANISTDWGFESPLFQDTGGADLFLSGVYFTGIIILTRNDFGHPTLKLQDCYAQLSHAHVSFSGELSVLYNSFAEPMEKPILKNLNEMLCPIIASEVKALNANLSTLEVLTKIDNYTLLDYSLISSPEITENYLDLNLKGVFYPLENLTDPPFSPVPFVLPERSNSMLYIGIAEYFFKSASFAHFTAGVFNVTLSTEEISNHFVQNSQGLGNVLSRIAEIYILSQPFMVRIMATEPPIINLQPGNFTLDIPASIMMLTQPKNSTVETIVSMDFVASTSVGLVILGQRLVCSLSLNRFRLALPESNRSNIEVLRFENILSSILHFGVLPLANAKLQQGFPLSNPHKFLFVNSDIEVLEGFLLISTDLKYETSSKQQPSFHVWEGLNLISRQWRGKSAP

SEQ ID NO: 9383 - protein, 82 aa, Homo sapiens
  Payload ID: 1919;
  Gene Symbol: BPIFC;
  Gene Name: BPI fold containing family C;
  ENSP ID: ENSP00000380592
MCTKTIPVLWGCFLLWNLYVSSSQTIYPGIKARITQRALDYGVQAGMKMIEQMLKEKKLPDLSGSESLEFLKVDYVNYNFSK

SEQ ID NO: 9384 - protein, 507 aa, Homo sapiens; identical to SEQ ID NO: 9382
  Payload ID: 1919;
  Gene Symbol: BPIFC;
  Gene Name: BPI fold containing family C;
  Uniprot ID:  Q8NFQ6;
  ENSP ID: ENSP00000380594

SEQ ID NO: 9385 - protein, 264 aa, Homo sapiens
  Payload ID: 1919;
  Gene Symbol: BPIFC;
  Gene Name: BPI fold containing family C;
  Uniprot ID:  Q8NFQ6;
  ENSP ID: ENSP00000439123
MEKPILKNLNEMLCPIIASEVKALNANLSTLEVLTKIDNYTLLDYSLISSPEITENYLDLNLKGVFYPLENLTDPPFSPVPFVLPERSNSMLYIGIAEYFFKSASFAHFTAGVFNVTLSTEEISNHFVQNSQGLGNVLSRVASTSVGLVILGQRLVCSLSLNRFRLALPESNRSNIEVLRFENILSSILHFGVLPLANAKLQQGFPLSNPHKFLFVNSDIEVLEGFLLISTDLKYETSSKQQPSFHVWEGLNLISRQWRGKSAP

SEQ ID NO: 9386 - protein, 778 aa, Homo sapiens
  Payload ID: 1920;
  Gene Symbol: BRSK1;
  Gene Name: BR serine/threonine kinase 1;
  Uniprot ID:  Q8TDC3;
  ENSP ID: ENSP00000310649
MSSGAKEGGGGSPAYHLPHPHPHPPQHAQYVGPYRLEKTLGKGQTGLVKLGVHCITGQKVAIKIVNREKLSESVLMKVEREIAILKLIEHPHVLKLHDVYENKKYLYLVLEHVSGGELFDYLVKKGRLTPKEARKFFRQIVSALDFCHSYSICHRDLKPENLLLDEKNNIRIADFGMASLQVGDSLLETSCGSPHYACPEVIKGEKYDGRRADMWSCGVILFALLVGALPFDDDNLRQLLEKVKRGVFHMPHFIPPDCQSLLRGMIEVEPEKRLSLEQIQKHPWYLGGKHEPDPCLEPAPGRRVAMRSLPSNGELDPDVLESMASLGCFRDRERLHRELRSEEENQEKMIYYLLLDRKERYPSCEDQDLPPRNDVDPPRKRVDSPMLSRHGKRRPERKSMEVLSITDAGGGGSPVPTRRALEMAQHSQRSRSVSGASTGLSSSPLSSPRSPVFSFSPEPGAGDEARGGGSPTSKTQTLPSRGPRGGGAGEQPPPPSARSTPLPGPPGSPRSSGGTPLHSPLHTPRASPTGTPGTTPPPSPGGGVGGAAWRSRLNSIRNSFLGSPRFHRRKMQVPTAEEMSSLTPESSPELAKRSWFGNFISLDKEEQIFLVLKDKPLSSIKADIVHAFLSIPSLSHSVLSQTSFRAEYKASGGPSVFQKPVRFQVDISSSEGPEPSPRRDGSGGGGIYSVTFTLISGPSRRFKRVVETIQAQLLSTHDQPSVQALADEKNGAQTRPAGAPPRSLQPPPGRPDPELSSSPRRGPPKDKKLLATNGTPLP

SEQ ID NO: 9387 - protein, 473 aa, Homo sapiens
  Payload ID: 1920;
  Gene Symbol: BRSK1;
  Gene Name: BR serine/threonine kinase 1;
  ENSP ID: ENSP00000320853
MRSLPSNGELDPDVLESMASLGCFRDRERLHRELRSEEENQEKMIYYLLLDRKERYPSCEDQDLPPRNDVDPPRKRVDSPMLSRHGKRRPERKSMEVLSITDAGGGGSPVPTRRALEMAQHSQRSRSVSGASTGLSSSPLSSPRSPVFSFSPEPGAGDEARGGGSPTSKTQTLPSRGPRGGGAGEQPPPPSARSTPLPGPPGSPRSSGGTPLHSPLHTPRASPTGTPGTTPPPSPGGGVGGAAWRSRLNSIRNSFLGSPRFHRRKMQVPTAEEMSSLTPESSPELAKRSWFGNFISLDKEEQIFLVLKDKPLSSIKADIVHAFLSIPSLSHSVLSQTSFRAEYKASGGPSVFQKPVRFQVDISSSEGPEPSPRRDGSGGGGIYSVTFTLISGPSRRFKRVVETIQAQLLSTHDQPSVQALADEKNGAQTRPAGAPPRSLQPPPGRPDPELSSSPRRGPPKDKKLLATNGTPLP

SEQ ID NO: 9388 - protein, 131 aa, Homo sapiens
  Payload ID: 1920;
  Gene Symbol: BRSK1;
  Gene Name: BR serine/threonine kinase 1;
  ENSP ID: ENSP00000466380
MRSLPSNGELDPDVLESMASLGCFRDRERLHRELRSEEENQEKMIYYLLLDRKERYPSCEDQDLPPRNDVDPPRKRVDSPMLSRHGKRRPERKSMEVLSITDAGGGGSPVPTRRALEMAQHSQRSRSVSGA

SEQ ID NO: 9389 - protein, 63 aa, Homo sapiens
  Payload ID: 1920;
  Gene Symbol: BRSK1;
  Gene Name: BR serine/threonine kinase 1;
  ENSP ID: ENSP00000466755
  MOD_RES (1)..(1): Any amino acid
XAGLVKLGVHCITGQKVAIKIVNREKLSESVLMKVEREIAILKLIEHPHVLKLHDVYENKKYL

SEQ ID NO: 9390 - protein, 343 aa, Homo sapiens
  Payload ID: 1920;
  Gene Symbol: BRSK1;
  Gene Name: BR serine/threonine kinase 1;
  Uniprot ID:  Q8TDC3;
  ENSP ID: ENSP00000467357
MSSGAKEGGGGSPAYHLPHPHPHPPQHAQYVGPYRLEKTLGKGQTGLVKLGVHCITGQKVAIKIVNREKLSESVLMKVEREIAILKLIEHPHVLKLHDVYENKKYLYLVLEHVSGGELFDYLVKKGRLTPKEARKFFRQIVSALDFCHSYSICHRDLKPENLLLDEKNNIRIADFGMASLQVGDSLLETSCGSPHYACPEVIKGEKYDGRRADMWSCGVILFALLVGALPFDDDNLRQLLEKVKRGVFHMPHFIPPDCQSLLRGMIEVEPEKRLSLEQIQKHPWYLGGKHEPDPCLEPAPGRRVAMRSLPSNGELDPDVLESMASLGCFRDRERLHRELRSEE

SEQ ID NO: 9391 - protein, 794 aa, Homo sapiens
  Payload ID: 1920;
  Gene Symbol: BRSK1;
  Gene Name: BR serine/threonine kinase 1;
  Uniprot ID:  Q8TDC3;
  ENSP ID: ENSP00000468190
MVAGLTLGKGPESPDGDVSVPERKDEVAGGGGEEEEAEERGRHAQYVGPYRLEKTLGKGQTGLVKLGVHCITGQKVAIKIVNREKLSESVLMKVEREIAILKLIEHPHVLKLHDVYENKKYLYLVLEHVSGGELFDYLVKKGRLTPKEARKFFRQIVSALDFCHSYSICHRDLKPENLLLDEKNNIRIADFGMASLQVGDSLLETSCGSPHYACPEVIKGEKYDGRRADMWSCGVILFALLVGALPFDDDNLRQLLEKVKRGVFHMPHFIPPDCQSLLRGMIEVEPEKRLSLEQIQKHPWYLGGKHEPDPCLEPAPGRRVAMRSLPSNGELDPDVLESMASLGCFRDRERLHRELRSEEENQEKMIYYLLLDRKERYPSCEDQDLPPRNDVDPPRKRVDSPMLSRHGKRRPERKSMEVLSITDAGGGGSPVPTRRALEMAQHSQRSRSVSGASTGLSSSPLSSPRSPVFSFSPEPGAGDEARGGGSPTSKTQTLPSRGPRGGGAGEQPPPPSARSTPLPGPPGSPRSSGGTPLHSPLHTPRASPTGTPGTTPPPSPGGGVGGAAWRSRLNSIRNSFLGSPRFHRRKMQVPTAEEMSSLTPESSPELAKRSWFGNFISLDKEEQIFLVLKDKPLSSIKADIVHAFLSIPSLSHSVLSQTSFRAEYKASGGPSVFQKPVRFQVDISSSEGPEPSPRRDGSGGGGIYSVTFTLISGPSRRFKRVVETIQAQLLSTHDQPSVQALADEKNGAQTRPAGAPPRSLQPPPGRPDPELSSSPRRGPPKDKKLLATNGTPLP

SEQ ID NO: 9392 - protein, 668 aa, Homo sapiens
  Payload ID: 1921;
  Gene Symbol: BRSK2;
  Gene Name: BR serine/threonine kinase 2;
  Uniprot ID:  Q8IWQ3;
  ENSP ID: ENSP00000310697
MTSTGKDGGAQHAQYVGPYRLEKTLGKGQTGLVKLGVHCVTCQKVAIKIVNREKLSESVLMKVEREIAILKLIEHPHVLKLHDVYENKKYLYLVLEHVSGGELFDYLVKKGRLTPKEARKFFRQIISALDFCHSHSICHRDLKPENLLLDEKNNIRIADFGMASLQVGDSLLETSCGSPHYACPEVIRGEKYDGRKADVWSCGVILFALLVGALPFDDDNLRQLLEKVKRGVFHMPHFIPPDCQSLLRGMIEVDAARRLTLEHIQKHIWYIGGKNEPEPEQPIPRKVQIRSLPSLEDIDPDVLDSMHSLGCFRDRNKLLQDLLSEEENQEKMIYFLLLDRKERYPSQEDEDLPPRNEIDPPRKRVDSPMLNRHGKRRPERKSMEVLSVTDGGSPVPARRAIEMAQHGQRSRSISGASSGLSTSPLSSPRVTPHPSPRGSPLPTPKGTPVHTPKESPAGTPNPTPPSSPSVGGVPWRARLNSIKNSFLGSPRFHRRKLQVPTPEEMSNLTPESSPELAKKSWFGNFISLEKEEQIFVVIKDKPLSSIKADIVHAFLSIPSLSHSVISQTSFRAEYKATGGPAVFQKPVKFQVDITYTEGGEAQKENGIYSVTFTLLSGPSRRFKRVVETIQAQLLSTHDPPAAQHLSDTTNCMEMMTGRLSKCGIIPKS

SEQ ID NO: 9393 - protein, 766 aa, Homo sapiens
  Payload ID: 1921;
  Gene Symbol: BRSK2;
  Gene Name: BR serine/threonine kinase 2;
  Uniprot ID:  Q8IWQ3;
  ENSP ID: ENSP00000371614
MSPEGHPSRWARPRRPCICPSSLCSPREPRSGPAVGRGGAAHHRVPAGHTPGPQLLQPHLHLPQGQTWLCLQPSPAGLVKLGVHCVTCQKVAIKIVNREKLSESVLMKVEREIAILKLIEHPHVLKLHDVYENKKYLYLVLEHVSGGELFDYLVKKGRLTPKEARKFFRQIISALDFCHSHSICHRDLKPENLLLDEKNNIRIADFGMASLQVGDSLLETSCGSPHYACPEVIRGEKYDGRKADVWSCGVILFALLVGALPFDDDNLRQLLEKVKRGVFHMPHFIPPDCQSLLRGMIEVDAARRLTLEHIQKHIWYIGGKNEPEPEQPIPRKVQIRSLPSLEDIDPDVLDSMHSLGCFRDRNKLLQDLLSEEENQEKMIYFLLLDRKERYPSQEDEDLPPRNEIDPPRKRVDSPMLNRHGKRRPERKSMEVLSVTDGGSPVPARRAIEMAQHGQRSRSISGASSGLSTSPLSSPRVTPHPSPRGSPLPTPKGTPVHTPKESPAGTPNPTPPSSPSVGGVPWRARLNSIKNSFLGSPRFHRRKLQVPTPEEMSNLTPESSPELAKKSWFGNFISLEKEEQIFVVIKDKPLSSIKADIVHAFLSIPSLSHSVISQTSFRAEYKATGGPAVFQKPVKFQVDITYTEGGEAQKENGIYSVTFTLLSGPSRRFKRVVETIQAQLLSTHDPPAAQHLSDTTNCMEMMTGRLSKCDEKNGQAAQAPSTPAKRSAHGPLGDSAAAGPGPGGDAEYPTGKDTAKMGPPTARREQP

SEQ ID NO: 9394 - protein, 674 aa, Homo sapiens
  Payload ID: 1921;
  Gene Symbol: BRSK2;
  Gene Name: BR serine/threonine kinase 2;
  Uniprot ID:  Q8IWQ3;
  ENSP ID: ENSP00000431152
MTSTGKDGGAQHAQYVGPYRLEKTLGKGQTGLVKLGVHCVTCQKVAIKIVNREKLSESVLMKVEREIAILKLIEHPHVLKLHDVYENKKYLYLVLEHVSGGELFDYLVKKGRLTPKEARKFFRQIISALDFCHSHSICHRDLKPENLLLDEKNNIRIADFGMASLQVGDSLLETSCGSPHYACPEVIRGEKYDGRKADVWSCGVILFALLVGALPFDDDNLRQLLEKVKRGVFHMPHFIPPDCQSLLRGMIEVDAARRLTLEHIQKHIWYIGGKNEPEPEQPIPRKVQIRSLPSLEDIDPDVLDSMHSLGCFRDRNKLLQDLLSEEENQEKMIYFLLLDRKERYPSQEDEDLPPRNEIDPPRKRVDSPMLNRHGKRRPERKSMEVLSVTDGGSPVPARRAIEMAQHGQRSRSISGASSGLSTSPLSSPRVTPHPSPRGSPLPTPKGTPVHTPKESPAGTPNPTPPSSPSVGGVPWRARLNSIKNSFLGSPRFHRRKLQVPTPEEMSNLTPESSPELAKKSWFGNFISLEKEEQIFVVIKDKPLSSIKADIVHAFLSIPSLSHSVISQTSFRAEYKATGGPAVFQKPVKFQVDITYTEGGEAQKENGIYSVTFTLLSGPSRRFKRVVETIQAQLLSTHDPPAAQHLSEPPPPAPGLSWGAGLKGQKVATSYESSL

SEQ ID NO: 9395 - protein, 736 aa, Homo sapiens
  Payload ID: 1921;
  Gene Symbol: BRSK2;
  Gene Name: BR serine/threonine kinase 2;
  Uniprot ID:  Q8IWQ3;
  ENSP ID: ENSP00000432000
MTSTGKDGGAQHAQYVGPYRLEKTLGKGQTGLVKLGVHCVTCQKVAIKIVNREKLSESVLMKVEREIAILKLIEHPHVLKLHDVYENKKYLYLVLEHVSGGELFDYLVKKGRLTPKEARKFFRQIISALDFCHSHSICHRDLKPENLLLDEKNNIRIADFGMASLQVGDSLLETSCGSPHYACPEVIRGEKYDGRKADVWSCGVILFALLVGALPFDDDNLRQLLEKVKRGVFHMPHFIPPDCQSLLRGMIEVDAARRLTLEHIQKHIWYIGGKNEPEPEQPIPRKVQIRSLPSLEDIDPDVLDSMHSLGCFRDRNKLLQDLLSEEENQEKMIYFLLLDRKERYPSQEDEDLPPRNEIDPPRKRVDSPMLNRHGKRRPERKSMEVLSVTDGGSPVPARRAIEMAQHGQRSRSISGASSGLSTSPLSSPRVTPHPSPRGSPLPTPKGTPVHTPKESPAGTPNPTPPSSPSVGGVPWRARLNSIKNSFLGSPRFHRRKLQVPTPEEMSNLTPESSPELAKKSWFGNFISLEKEEQIFVVIKDKPLSSIKADIVHAFLSIPSLSHSVISQTSFRAEYKATGGPAVFQKPVKFQVDITYTEGGEAQKENGIYSVTFTLLSGPSRRFKRVVETIQAQLLSTHDPPAAQHLSDTTNCMEMMTGRLSKCGSPLSNFFDVIKQLFSDEKNGQAAQAPSTPAKRSAHGPLGDSAAAGPGPGGDAEYPTGKDTAKMGPPTARREQP

SEQ ID NO: 9396 - protein, 170 aa, Homo sapiens
  Payload ID: 1921;
  Gene Symbol: BRSK2;
  Gene Name: BR serine/threonine kinase 2;
  ENSP ID: ENSP00000432252
  MOD_RES (1)..(1): Any amino acid
XEHVSGGELFDYLVKKGRLTPKEARKFFRQIISALDFCHSHSICHRDLKPENLLLDEKNNIRIADFGMASLQVGDSLLETSCGSPHYACPEVIRGEKYDGRKADVWSCGVILFALLVGALPFDDDNLRQLLEKVKRGVFHMPHFIPPDCQSLLRGMIEVDAARRLTRGQE

SEQ ID NO: 9397 - protein, 130 aa, Homo sapiens
  Payload ID: 1921;
  Gene Symbol: BRSK2;
  Gene Name: BR serine/threonine kinase 2;
  ENSP ID: ENSP00000432672
MKVEREIAILKLIEHPHVLKLHDVYENKKYLYLVLEHVSGGELFDYLVKKGRLTPKEARKFFRQIISALDFCHSHSICHRDLKPENLLLDEKNNIRIADFGMASLQVGDSLLETSCGSPHYACPEVIRGE

SEQ ID NO: 9398 - protein, 614 aa, Homo sapiens
  Payload ID: 1921;
  Gene Symbol: BRSK2;
  Gene Name: BR serine/threonine kinase 2;
  Uniprot ID:  Q8IWQ3;
  ENSP ID: ENSP00000433235
MKVEREIAILKLIEHPHVLKLHDVYENKKYLYLVLEHVSGGELFDYLVKKGRLTPKEARKFFRQIISALDFCHSHSICHRDLKPENLLLDEKNNIRIADFGMASLQVGDSLLETSCGSPHYACPEVIRGEKYDGRKADVWSCGVILFALLVGALPFDDDNLRQLLEKVKRGVFHMPHFIPPDCQSLLRGMIEVDAARRLTLEHIQKHIWYIGGKNEPEPEQPIPRKVQIRSLPSLEDIDPDVLDSMHSLGCFRDRNKLLQDLLSEEENQEKMIYFLLLDRKERYPSQEDEDLPPRNEIDPPRKRVDSPMLNRHGKRRPERKSMEVLSVTDGGSPVPARRAIEMAQHGQRSRSISGASSGLSTSPLSSPRVTPHPSPRGSPLPTPKGTPVHTPKESPAGTPNPTPPSSPSVGGVPWRARLNSIKNSFLGSPRFHRRKLQVPTPEEMSNLTPESSPELAKKSWFGNFISLEKEEQIFVVIKDKPLSSIKADIVHAFLSIPSLSHSVISQTSFRAEYKATGGPAVFQKPVKFQVDITYTEGGEAQKENGIYSVTFTLLSGPSRRFKRVVETIQAQLLSTHDPPAAQHLSEPPPPAPGLSWGAGLKGQKVATSYESSL

SEQ ID NO: 9399 - protein, 696 aa, Homo sapiens
  Payload ID: 1921;
  Gene Symbol: BRSK2;
  Gene Name: BR serine/threonine kinase 2;
  Uniprot ID:  Q8IWQ3;
  ENSP ID: ENSP00000433370
MTSTGKDGGAQHAQYVGPYRLEKTLGKGQTGLVKLGVHCVTCQKVAIKIVNREKLSESVLMKVEREIAILKLIEHPHVLKLHDVYENKKYLYLVLEHVSGGELFDYLVKKGRLTPKEARKFFRQIISALDFCHSHSICHRDLKPENLLLDEKNNIRIADFGMASLQVGDSLLETSCGSPHYACPEVIRGEKYDGRKADVWSCGVILFALLVGALPFDDDNLRQLLEKVKRGVFHMPHFIPPDCQSLLRGMIEVDAARRLTLEHIQKHIWYIGGKNEPEPEQPIPRKVQIRSLPSLEDIDPDVLDSMHSLGCFRDRNKLLQDLLSEEENQEKMIYFLLLDRKERYPSQEDEDLPPRNEIDPPRKRVDSPMLNRHGKRRPERKSMEVLSVTDGGSPVPARRAIEMAQHGQSKAMFSKSLDIAEAHPQFSKEDRSRSISGASSGLSTSPLSSPRVTPHPSPRGSPLPTPKGTPVHTPKESPAGTPNPTPPSSPSVGGVPWRARLNSIKNSFLGSPRFHRRKLQVPTPEEMSNLTPESSPELAKKSWFGNFISLEKEEQIFVVIKDKPLSSIKADIVHAFLSIPSLSHSVISQTSFRAEYKATGGPAVFQKPVKFQVDITYTEGGEAQKENGIYSVTFTLLSGPSRRFKRVVETIQAQLLSTHDPPAAQHLSEPPPPAPGLSWGAGLKGQKVATSYESSL

SEQ ID NO: 9400 - protein, 674 aa, Homo sapiens; identical to SEQ ID NO: 9394
  Payload ID: 1921;
  Gene Symbol: BRSK2;
  Gene Name: BR serine/threonine kinase 2;
  Uniprot ID:  Q8IWQ3;
  ENSP ID: ENSP00000433684

SEQ ID NO: 9401 - protein, 86 aa, Homo sapiens
  Payload ID: 1921;
  Gene Symbol: BRSK2;
  Gene Name: BR serine/threonine kinase 2;
  ENSP ID: ENSP00000434075
MKVEREIAILKLIEHPHVLKLHDVYENKKYLYLVLEHVSGGELFDYLVKKGRLTPKEARKFFRQIISALDFCHSHSICHRDLKPEN

SEQ ID NO: 9402 - protein, 200 aa, Homo sapiens
  Payload ID: 1921;
  Gene Symbol: BRSK2;
  Gene Name: BR serine/threonine kinase 2;
  ENSP ID: ENSP00000436474
  MOD_RES (1)..(1): Any amino acid
XTPPSSPSVGGVPWRARLNSIKNSFLGSPRFHRRKLQVPTPEEMSNLTPESSPELAKKSWFGNFISLEKEEQIFVVIKDKPLSSIKADIVHAFLSIPSLSHSVISQTSFRAEYKATGGPAVFQKPVKFQVDITYTEGGEAQKENGIYSVTFTLLSGPSRRFKRVVETIQAQLLSTHDPPAAQHLSDTTNCMEMMTGRLSK

SEQ ID NO: 9403 - protein, 170 aa, Homo sapiens
  Payload ID: 1921;
  Gene Symbol: BRSK2;
  Gene Name: BR serine/threonine kinase 2;
  ENSP ID: ENSP00000445168
MSNLTPESSPELAKKSWFGNFISLEKEEQIFVVIKDKPLSSIKADIVHAFLSIPSLSHSVISQTSFRAEYKATGGPAVFQKPVKFQVDITYTEGGEAQKENGIYSVTFTLLSGPSRRFKRVVETIQAQLLSTHDPPAAQHLSEPPPPAPGLSWGAGLKGQKVATSYESSL

SEQ ID NO: 9404 - protein, 353 aa, Homo sapiens
  Payload ID: 1922;
  Gene Symbol: BDKRB1;
  Gene Name: bradykinin receptor B1;
  Uniprot ID:  P46663;
  ENSP ID: ENSP00000216629
MASSWPPLELQSSNQSQLFPQNATACDNAPEAWDLLHRVLPTFIISICFFGLLGNLFVLLVFLLPRRQLNVAEIYLANLAASDLVFVLGLPFWAENIWNQFNWPFGALLCRVINGVIKANLFISIFLVVAISQDRYRVLVHPMASRRQQRRRQARVTCVLIWVVGGLLSIPTFLLRSIQAVPDLNITACILLLPHEAWHFARIVELNILGFLLPLAAIVFFNYHILASLRTREEVSRTRCGGRKDSKTTALILTLVVAFLVCWAPYHFFAFLEFLFQVQAVRGCFWEDFIDLGLQLANFFAFTNSSLNPVIYVFVGRLFRTKVWELYKQCTPKSLAPISSSHRKEIFQLFWRN

SEQ ID NO: 9405 - protein, 284 aa, Homo sapiens
  Payload ID: 1922;
  Gene Symbol: BDKRB1;
  Gene Name: bradykinin receptor B1;
  ENSP ID: ENSP00000452064
MASSWPPLELQSSNQSQLFPQNATACDNAPEAWDLLHRVLPTFIISICFFGLLGNLFVLLVFLLPRRQLNVAEIYLANLAASDLVFVLGLPFWAENIWNQFNWPFGALLCRVINGVIKANLFISIFLVVAISQDRYRVLVHPMASRRQQRRRQARVTCVLIWVVGGLLSIPTFLLRSIQAVPDLNITACILLLPHEAWHFARIVELNILGFLLPLAAIVFFNYHILASLRTREEVSRTSSLNPVIYVFVGRLFRTKPALSRWLIKILSRSCKNQSHTREERAGR

SEQ ID NO: 9406 - protein, 353 aa, Homo sapiens; identical to SEQ ID NO: 9404
  Payload ID: 1922;
  Gene Symbol: BDKRB1;
  Gene Name: bradykinin receptor B1;
  Uniprot ID:  P46663;
  ENSP ID: ENSP00000479276

SEQ ID NO: 9407 - protein, 364 aa, Homo sapiens
  Payload ID: 1923;
  Gene Symbol: BDKRB2;
  Gene Name: bradykinin receptor B2;
  Uniprot ID:  P30411;
  ENSP ID: ENSP00000438376
MLNVTLQGPTLNGTFAQSKCPQVEWLGWLNTIQPPFLWVLFVLATLENIFVLSVFCLHKSSCTVAEIYLGNLAAADLILACGLPFWAITISNNFDWLFGETLCRVVNAIISMNLYSSICFLMLVSIDRYLALVKTMSMGRMRGVRWAKLYSLVIWGCTLLLSSPMLVFRTMKEYSDEGHNVTACVISYPSLIWEVFTNMLLNVVGFLLPLSVITFCTMQIMQVLRNNEMQKFKEIQTERRATVLVLVVLLLFIICWLPFQISTFLDTLHRLGILSSCQDERIIDVITQIASFMAYSNSCLNPLVYVIVGKRFRKKSWEVYQGVCQKGGCRSEPIQMENSMGTLRTSISVERQIHKLQDWAGSRQ

SEQ ID NO: 9408 - protein, 364 aa, Homo sapiens; identical to SEQ ID NO: 9407
  Payload ID: 1923;
  Gene Symbol: BDKRB2;
  Gene Name: bradykinin receptor B2;
  Uniprot ID:  P30411;
  ENSP ID: ENSP00000439459

SEQ ID NO: 9409 - protein, 391 aa, Homo sapiens
  Payload ID: 1923;
  Gene Symbol: BDKRB2;
  Gene Name: bradykinin receptor B2;
  Uniprot ID:  P30411;
  ENSP ID: ENSP00000450482
MFSPWKISMFLSVREDSVPTTASFSADMLNVTLQGPTLNGTFAQSKCPQVEWLGWLNTIQPPFLWVLFVLATLENIFVLSVFCLHKSSCTVAEIYLGNLAAADLILACGLPFWAITISNNFDWLFGETLCRVVNAIISMNLYSSICFLMLVSIDRYLALVKTMSMGRMRGVRWAKLYSLVIWGCTLLLSSPMLVFRTMKEYSDEGHNVTACVISYPSLIWEVFTNMLLNVVGFLLPLSVITFCTMQIMQVLRNNEMQKFKEIQTERRATVLVLVVLLLFIICWLPFQISTFLDTLHRLGILSSCQDERIIDVITQIASFMAYSNSCLNPLVYVIVGKRFRKKSWEVYQGVCQKGGCRSEPIQMENSMGTLRTSISVERQIHKLQDWAGSRQ

SEQ ID NO: 9410 - protein, 766 aa, Homo sapiens [sequence omitted]

SEQ ID NO: 9411 - protein, 102 aa, Homo sapiens
  Payload ID: 1924;
  Gene Symbol: BRAF;
  Gene Name: B-Raf proto-oncogene, serine/threonine kinase;
  ENSP ID: ENSP00000418033
IHRDLKSNNIFLHEDLTVKIGDFGLATVKSRWSGSHQFEQLSGSILWMAPEVIRMQDKNPYSFQSDVYAFGIVLYELMTGQLPYSNINNRDQVLCPPWEYNK

SEQ ID NO: 9412 - protein, 375 aa, Homo sapiens
  Payload ID: 1924;
  Gene Symbol: BRAF;
  Gene Name: B-Raf proto-oncogene, serine/threonine kinase;
  ENSP ID: ENSP00000419060
  MOD_RES (1)..(1): Any amino acid
XSTTGLSATPPASLPGSLTNVKALQKSPGPQRERKSSSSSEDRNRMKTLGRRDSSDDWEIPDGQITVGQRIGSGSFGTVYKGKWHGDVAVKMLNVTAPTPQQLQAFKNEVGVLRKTRHVNILLFMGYSTKPQLAIVTQWCEGSSLYHHLHIIETKFEMIKLIDIARQTAQGMDYLHAKSIIHRDLKSNNIFLHEDLTVKIGDFGLATVKSRWSGSHQFEQLSGSILWMAPEVIRMQDKNPYSFQSDVYAFGIVLYELMTGQLPYSNINNRDQIIFMVGRGYLSPDLSKVRSNCPKAMKRLMAECLKKKRDERPLFPQILASIELLARSLPKIHRSASEPSLNRAGFQTEDFSLYACASPKTPIQAGGYGEFAAFK

SEQ ID NO: 9413 - protein, 194 aa, Homo sapiens
  Payload ID: 1924;
  Gene Symbol: BRAF;
  Gene Name: B-Raf proto-oncogene, serine/threonine kinase;
  ENSP ID: ENSP00000420119
QALFNGDMEPEAGAGAGAAASSAADPAIPEEVWNIKQMIKLTQEHIEALLDKFGGEHNPPSIYLEAYEEYTSKLDALQQREQQLLESLGNGTDFSVSSSASMDTVTSSSSSSLSVLPSSLSVFQNPTDVARSNPKSPQKPIVRVFLPNKQRTVVPARCGVTVRDSLKKALMMRGLIPECCAVYRIQDGSFLELT

SEQ ID NO: 9414 - protein, 227 aa, Homo sapiens
  Payload ID: 1925;
  Gene Symbol: BASP1;
  Gene Name: brain abundant, membrane attached signal prt 1;
  Uniprot ID:  P80723;
  ENSP ID: ENSP00000319281
MGGKLSKKKKGYNVNDEKAKEKDKKAEGAATEEEGTPKESEPQAAAEPAEAKEGKEKPDQDAEGKAEEKEGEKDAAAAKEEAPKAEPEKTEGAAEAKAEPPKAPEQEQAAPGPAAGGEAPKAAEAAAAPAESAAPAAGEEPSKEEGEPKKTEAPAAPAAQETKSDGAPASDSKPGSSEAAPSSKETPAATEAPSSTPKAQGPAASAEEPKPVEAPAANSDQTVTVKE

SEQ ID NO: 9415 - protein, 45 aa, Homo sapiens
  Payload ID: 1925;
  Gene Symbol: BASP1;
  Gene Name: brain abundant, membrane attached signal prt 1;
  ENSP ID: ENSP00000476090
MGGKLSKKKKGYNVNDEKAKEKDKKAEGAATEEEGTPKESEPQAA

SEQ ID NO: 9416 - protein, 227 aa, Homo sapiens; identical to SEQ ID NO: 9414
  Payload ID: 1925;
  Gene Symbol: BASP1;
  Gene Name: brain abundant, membrane attached signal prt 1;
  Uniprot ID:  P80723;
  ENSP ID: ENSP00000482066

SEQ ID NO: 9417 - protein, 180 aa, Homo sapiens
  Payload ID: 1926;
  Gene Symbol: BAALC;
  Gene Name: brain and acute leukemia, cytoplasmic;
  Uniprot ID:  Q8WXS3;
  ENSP ID: ENSP00000297574
MGCGGSRADAIEPRYYESWTRETESTWLTYTDSDAPPSAAAPDSGPEAGGLHSVLEAEKSKIKAPTDSVSDEGLFSASKMAPLAVFSHGMLEDGLPSNGVPRSTAPGGIPNPEKKTNCETQCPNPQSLSSGPLTQKQNGLQTTEAKRDAKRMPAKEVTINVTDSIQQMDRSRRITKNCVN

SEQ ID NO: 9418 - protein, 80 aa, Homo sapiens
  Payload ID: 1926;
  Gene Symbol: BAALC;
  Gene Name: brain and acute leukemia, cytoplasmic;
  Uniprot ID:  Q8WXS3;
  ENSP ID: ENSP00000302559
MGCGGSRADAIEPRYYESWTRETESTWLTYTDSDAPPSAAAPDSGPEAGGLHSAHYPLAFALAWRDNSLGALLVQEGLCR

SEQ ID NO: 9419 - protein, 145 aa, Homo sapiens
  Payload ID: 1926;
  Gene Symbol: BAALC;
  Gene Name: brain and acute leukemia, cytoplasmic;
  Uniprot ID:  Q8WXS3;
  ENSP ID: ENSP00000312457
MGCGGSRADAIEPRYYESWTRETESTWLTYTDSDAPPSAAAPDSGPEAGGLHSGMLEDGLPSNGVPRSTAPGGIPNPEKKTNCETQCPNPQSLSSGPLTQKQNGLQTTEAKRDAKRMPAKEVTINVTDSIQQMDRSRRITKNCVN

SEQ ID NO: 9420 - protein, 73 aa, Homo sapiens
  Payload ID: 1926;
  Gene Symbol: BAALC;
  Gene Name: brain and acute leukemia, cytoplasmic;
  Uniprot ID:  Q8WXS3;
  ENSP ID: ENSP00000331579
MGCGGSRADAIEPRYYESWTRETESTWLTYTDSDAPPSAAAPDSGPEAGGLHSGCLEEHYHLTALQKVGHPNH

SEQ ID NO: 9421 - protein, 54 aa, Homo sapiens
  Payload ID: 1926;
  Gene Symbol: BAALC;
  Gene Name: brain and acute leukemia, cytoplasmic;
  Uniprot ID:  Q8WXS3;
  ENSP ID: ENSP00000395024
MGCGGSRADAIEPRYYESWTRETESTWLTYTDSDAPPSAAAPDSGPEAGGLHSG

SEQ ID NO: 9422 - protein, 383 aa, Homo sapiens
  Payload ID: 1927;
  Gene Symbol: BRE;
  Gene Name: brain and reproductive organ-expressed (TNFRSF1A modulator);
  Uniprot ID:  Q9NXR7;
  ENSP ID: ENSP00000339371
MSPEVALNRISPMLSPFISSVVRNGKVGLDATNCLRITDLKSGCTSLTPGPNCDRFKLHIPYAGETLKWDIIFNAQYPELPPDFIFGEDAEFLPDPSALQNLASWNPSNPECLLLVVKELVQQYHQFQCSRLRESSRLMFEYQTLLEEPQYGENMEIYAGKKNNWTGEFSARFLLKLPVDFSNIPTYLLKDVNEDPGEDVALLSVSFEDTEATQVYPKLYLSPRIEHALGGSSALHIPAFPGGGCLIDYVPQVCHLLTNKVQYVIQGYHKRREYIAAFLSHFGTGVVEYDAEGFTKLTLLLMWKDFCFLVHIDLPLFFPRDQPTLTFQSVYHFTNSGQLYSQAQKNYPYSPRWDGNEMAKRAKAYFKTFVPQFQEAAFANGKL

SEQ ID NO: 9423 - protein, 415 aa, Homo sapiens
  Payload ID: 1927;
  Gene Symbol: BRE;
  Gene Name: brain and reproductive organ-expressed (TNFRSF1A modulator);
  Uniprot ID:  Q9NXR7;
  ENSP ID: ENSP00000343412
MSPEVALNRISPMLSPFISSVVRNGKVGLDATNCLRITDLKSGCTSLTPGPNCDRFKLHIPYAGETLKWDIIFNAQYPELPPDFIFGEDAEFLPDPSALQNLASWNPSNPECLLLVVKELVQQYHQFQCSRLRESSRLMFEYQTLLEEPQYGENMEIYAGKKNNWTGEFSARFLLKLPVDFSNIPTYLLKDVNEDPGEDVALLSVSFEDTEATQVYPKLYLSPRIEHALGGSSALHIPAFPGGGCLIDYVPQVCHLLTNKVQYVIQGYHKRREYIAAFLSHFGTGVVEYDAEGFTKLTLLLMWKDFCFLVHIDLPLFFPRDQPTLTFQSVYHFTNSGQLYSQAQKNYPYSPRWDGNEMAKRAKGCQGSRDACSPWEQVLAFAVAKTGCKLLQPQRNWPSSRGPPWRASEGERTAQ

SEQ ID NO: 9424 - protein, 376 aa, Homo sapiens
  Payload ID: 1927;
  Gene Symbol: BRE;
  Gene Name: brain and reproductive organ-expressed (TNFRSF1A modulator);
  Uniprot ID:  Q9NXR7;
  ENSP ID: ENSP00000354699
MSPEVALNRISPMLSPFISSVVRNGKVGLDATNCLRITDLKSGCTSLTPGPNCDRFKLHIPYAGETLKWDIIFNAQYPELPPDFIFGEDAEFLPDPSALQNLASWNPSNPECLLLVVKELVQQYHQFQCSRLRESSRLMFEYQTLLEEPQYGENMEIYAGKKNNWTGEFSARFLLKLPVDFSNIPTYLLKDVNEDPGEDVALLSVSFEDTEATQVYPKLYLSPRIEHALGGSSALHIPAFPGGGCLIDYVPQVCHLLTNKVQYVIQGYHKRREYIAAFLSHFGTGVVEYDAEGFTKLTLLLMWKDFCFLVHIDLPLFFPRDQPTLTFQSVYHFTNSGQLYSQAQKNYPYSPRWDGNEMAKRAKRESNRDGEESSSA

SEQ ID NO: 9425 - protein, 383 aa, Homo sapiens; identical to SEQ ID NO: 9422
  Payload ID: 1927;
  Gene Symbol: BRE;
  Gene Name: brain and reproductive organ-expressed (TNFRSF1A modulator);
  Uniprot ID:  Q9NXR7;
  ENSP ID: ENSP00000368945

SEQ ID NO: 9426 - protein, 284 aa, Homo sapiens
  Payload ID: 1927;
  Gene Symbol: BRE;
  Gene Name: brain and reproductive organ-expressed (TNFRSF1A modulator);
  ENSP ID: ENSP00000368950
MSPEVALNRISPMLSPFISSVVRNGKVGLDATNCLRITDLKSGCTSLTPGPNCDRFKLHIPYAGETLKWDIIFNAQYPELPPDFIFGEDAEFLPDPSALQNLASWNPSNPECLLLVVKELVQQYHQFQCSRLRESSRLMFEYQTLLEEPQYGENMEIYAGKKNNWTGEFSARFLLKLPVDFSNIPTYLLKDVNEDPGEDVALLSVSFEDTEATQVYPKLYLSPRIEQLSLSPCHTDFLLTRFLPAPLWGSEVSVPSGPFHLLIILPQPLSGLVRPCLLFSQPCS

SEQ ID NO: 9427 - protein, 376 aa, Homo sapiens; identical to SEQ ID NO: 9424
  Payload ID: 1927;
  Gene Symbol: BRE;
  Gene Name: brain and reproductive organ-expressed (TNFRSF1A modulator);
  Uniprot ID:  Q9NXR7;
  ENSP ID: ENSP00000368953

SEQ ID NO: 9428 - protein, 153 aa, Homo sapiens
  Payload ID: 1927;
  Gene Symbol: BRE;
  Gene Name: brain and reproductive organ-expressed (TNFRSF1A modulator);
  ENSP ID: ENSP00000392345
MSPEVALNRISPMLSPFISSVVRNGKVGLDATNCLRITDLKSGCTSLTPGPNCDRFKLHIPYAGETLKWDIIFNAQYPELPPDFIFGEDAEFLPDPSALQNLASWNPSNPECLLLVVKELVQQYHQFQCSRLRESSRLMFEYQTLLEEPQYGE

SEQ ID NO: 9429 - protein, 166 aa, Homo sapiens
  Payload ID: 1927;
  Gene Symbol: BRE;
  Gene Name: brain and reproductive organ-expressed (TNFRSF1A modulator);
  ENSP ID: ENSP00000474342
VRNGKVGLDATNCLRITDLKSGCTSLTPGPNCDRFKLHIPYAGETLKWDIIFNAQYPELPPDFIFGEDAEFLPDPSALQNLASWNPSNPECLLLVVKELVQQYHQFQCSRLRESSRLMFEYQTLLEEPQYGENMEIYAGKKNNWVRIFENGKKDDFIHNKIINSYV

SEQ ID NO: 9430 - protein, 128 aa, Homo sapiens
  Payload ID: 1928;
  Gene Symbol: BEX2;
  Gene Name: brain expressed X-linked 2;
  Uniprot ID:  Q9BXY8;
  ENSP ID: ENSP00000361759
MESKEERALNNLIVENVNQENDEKDEKEQVANKGEPLALPLNVSEYCVPRGNRRRFRVRQPILQYRWDIMHRLGEPQARMREENMERIGEEVRQLMEKLREKQLSHSLRAVSTDPPHHDHHDEFCLMP

SEQ ID NO: 9431 - protein, 128 aa, Homo sapiens; identical to SEQ ID NO: 9430
  Payload ID: 1928;
  Gene Symbol: BEX2;
  Gene Name: brain expressed X-linked 2;
  Uniprot ID:  Q9BXY8;
  ENSP ID: ENSP00000361762

SEQ ID NO: 9432 - protein, 101 aa, Homo sapiens
  Payload ID: 1928;
  Gene Symbol: BEX2;
  Gene Name: brain expressed X-linked 2;
  ENSP ID: ENSP00000394915
MESKEERALNNLIVENVNQENDEKDEKEQVANKGEPLALPLNVSEYCVPRGNRRRFRVRQPILQYRWDIMHRLGEPQARMREENMERIGEEVRQLMEKLRE

SEQ ID NO: 9433 - protein, 160 aa, Homo sapiens
  Payload ID: 1928;
  Gene Symbol: BEX2;
  Gene Name: brain expressed X-linked 2;
  Uniprot ID:  Q9BXY8;
  ENSP ID: ENSP00000442521
MQKMVVCGAKCCGDAPHVENREEETARIGPGVMESKEERALNNLIVENVNQENDEKDEKEQVANKGEPLALPLNVSEYCVPRGNRRRFRVRQPILQYRWDIMHRLGEPQARMREENMERIGEEVRQLMEKLREKQLSHSLRAVSTDPPHHDHHDEFCLMP

SEQ ID NO: 9434 - protein, 150 aa, Homo sapiens
  Payload ID: 1929;
  Gene Symbol: BEAN1;
  Gene Name: brain expressed, associated with NEDD4, 1;
  Uniprot ID:  Q3B7T3;
  ENSP ID: ENSP00000299694
MRYACSSSEDWPPPLDISSDGDVDATVLRELYPDSPPGYEECVGPGATQLYVPTDAPPPYSLTDSCPTLDGTSDSGSGHSPGRHQQEQRTPAQGGLHTVSMDTLPPYEAVCGAGPPSGLLPLPGPDPGPRGSQGSPTPTRAPASGPERIV

SEQ ID NO: 9435 - protein, 259 aa, Homo sapiens
  Payload ID: 1929;
  Gene Symbol: BEAN1;
  Gene Name: brain expressed, associated with NEDD4, 1;
  Uniprot ID:  Q3B7T3;
  ENSP ID: ENSP00000442793
MSFKRPCPLARYNRTSYFYPTFSESSEHSHLLVSPVLVASAVIGVVIILSCITIIVGSIRRDRQARLQRHRHRHHRHHHHHHHHRRRRHREYEHGYVSDEHTYSRSSRRMRYACSSSEDWPPPLDISSDGDVDATVLRELYPDSPPGYEECVGPGATQLYVPTDAPPPYSLTDSCPTLDGTSDSGSGHSPGRHQQEQRTPAQGGLHTVSMDTLPPYEAVCGAGPPSGLLPLPGPDPGPRGSQGSPTPTRAPASGPERIV

SEQ ID NO: 9436 - protein, 208 aa, Homo sapiens
  Payload ID: 1929;
  Gene Symbol: BEAN1;
  Gene Name: brain expressed, associated with NEDD4, 1;
  Uniprot ID:  Q3B7T3;
  ENSP ID: ENSP00000455212
MRYACSSSEDWPPPLDISSDGDVDATVLRELYPDSPPGVSLSRLRWSAMMYTGSFTYWVRSMLSRHKLDAILGRLGYTATLESEFSLVQAISKENVKQMVFKIFLVRVSCEAVLRTAGTRMLEPGTEKLARTHSRHSSEKRLVKPCSCLEGVQPGPGSGGPQQGPSEGVGSETALAEGTAGQRSLPMALSPSEVSTAPNSLPSGSPVL

SEQ ID NO: 9437 - protein, 72 aa, Homo sapiens
  Payload ID: 1929;
  Gene Symbol: BEAN1;
  Gene Name: brain expressed, associated with NEDD4, 1;
  ENSP ID: ENSP00000456430
MRYACSSSEDWPPPLDISSDGDVDATVLRELYPDSPPGQGLTQSPTLECNGMNIAHCSLELLGSSDPPTSAS

SEQ ID NO: 9438 - protein, 150 aa, Homo sapiens; identical to SEQ ID NO: 9434
  Payload ID: 1929;
  Gene Symbol: BEAN1;
  Gene Name: brain expressed, associated with NEDD4, 1;
  Uniprot ID:  Q3B7T3;
  ENSP ID: ENSP00000456822

SEQ ID NO: 9439 - protein, 82 aa, Homo sapiens
  Payload ID: 1929;
  Gene Symbol: BEAN1;
  Gene Name: brain expressed, associated with NEDD4, 1;
  ENSP ID: ENSP00000462088
  MOD_RES (1)..(1): Any amino acid
XPLDISSDGDVDATVLRELYPDSPPGCTLGALPTGCDLCFPDTNWTPSWAGWATRPPWSLSSHWSRPSAKRMSSRWCSRSSW

SEQ ID NO: 9440 - protein, 113 aa, Homo sapiens
  Payload ID: 1929;
  Gene Symbol: BEAN1;
  Gene Name: brain expressed, associated with NEDD4, 1;
  ENSP ID: ENSP00000477843
MSFKRPCPCKFPPHILPPLGARQGQSLESSCRERLEVFGQRTAGVQPEANVACWVGRGQHGRPLTSARCSLRTENRTLAHSSVSALPEVWIGVPLRDVNGMTHTHTQIKDYMA

SEQ ID NO: 9441 - protein, 208 aa, Homo sapiens; identical to SEQ ID NO: 9436
  Payload ID: 1929;
  Gene Symbol: BEAN1;
  Gene Name: brain expressed, associated with NEDD4, 1;
  Uniprot ID:  Q3B7T3;
  ENSP ID: ENSP00000483700

SEQ ID NO: 9442 - protein, 125 aa, Homo sapiens
  Payload ID: 1930;
  Gene Symbol: BEX1;
  Gene Name: brain expressed, X-linked 1;
  Uniprot ID:  Q9HBH7;
  ENSP ID: ENSP00000361813
MESKEKRAVNSLSMENANQENEEKEQVANKGEPLALPLDAGEYCVPRGNRRRFRVRQPILQYRWDMMHRLGEPQARMREENMERIGEEVRQLMEKLREKQLSHSLRAVSTDPPHHDHHDEFCLMP

SEQ ID NO: 9443 - protein, 120 aa, Homo sapiens
  Payload ID: 1931;
  Gene Symbol: BEX4;
  Gene Name: brain expressed, X-linked 4;
  Uniprot ID:  Q9NWD9;
  ENSP ID: ENSP00000361776
MESKEELAANNLNGENAQQENEGGEQAPTQNEEESRHLGGGEGQKPGGNIRRGRVRRLVPNFRWAIPNRHIEHNEARDDVERFVGQMMEIKRKTREQQMRHYMRFQTPEPDNHYDFCLIP

SEQ ID NO: 9444 - protein, 120 aa, Homo sapiens; identical to SEQ ID NO: 9443
  Payload ID: 1931;
  Gene Symbol: BEX4;
  Gene Name: brain expressed, X-linked 4;
  Uniprot ID:  Q9NWD9;
  ENSP ID: ENSP00000361780

SEQ ID NO: 9445 - protein, 111 aa, Homo sapiens
  Payload ID: 1932;
  Gene Symbol: BEX5;
  Gene Name: brain expressed, X-linked 5;
  Uniprot ID:  Q5H9J7;
  ENSP ID: ENSP00000328030
MENVPKENKVVEKAPVQNEAPALGGGEYQEPGGNVKGVWAPPAPGFGEDVPNRLVDNIDMIDGDGDDMERFMEEMRELRRKIRELQLRYSLRILIGDPPHHDHHDEFCLMP

SEQ ID NO: 9446 - protein, 111 aa, Homo sapiens; identical to SEQ ID NO: 9445
  Payload ID: 1932;
  Gene Symbol: BEX5;
  Gene Name: brain expressed, X-linked 5;
  Uniprot ID:  Q5H9J7;
  ENSP ID: ENSP00000446054

SEQ ID NO: 9447 - protein, 125 aa, Homo sapiens
  Payload ID: 1933;
  Gene Symbol: BRI3;
  Gene Name: brain prt I3;
  Uniprot ID:  O95415;
  ENSP ID: ENSP00000297290
MDHKPLLQERPPAYNLEAGQGDYACGPHGYGAIPAAPPPPPYPYLVTGIPTHHPRVYNIHSRTVTRYPANSIVVVGGCPVCRVGVLEDCFTFLGIFLAIILFPFGFICCFALRKRRCPNCGATFA

SEQ ID NO: 9448 - protein, 98 aa, Homo sapiens
  Payload ID: 1933;
  Gene Symbol: BRI3;
  Gene Name: brain prt I3;
  ENSP ID: ENSP00000440936
MDHKPLLQERPPAYNLEAGQGDYACGPHGYGAIPAAPPPPPYPYLVTGIPTHHPRVYNIHSRTVTRYPANSIVVVGGCPVCRHQRSSWLYTYPLRVCT

SEQ ID NO: 9449 - protein, 47 aa, Homo sapiens
  Payload ID: 1933;
  Gene Symbol: BRI3;
  Gene Name: brain prt I3;
  ENSP ID: ENSP00000459133
IHSRTVTRYPANSIVVVGGCPVCSNFVYDDGNQPLLPAKREKRPYQQ

SEQ ID NO: 9450 - protein, 255 aa, Homo sapiens
  Payload ID: 1934;
  Gene Symbol: BDNF;
  Gene Name: brain-derived neurotrophic factor;
  Uniprot ID:  P23560;
  ENSP ID: ENSP00000320002
MFHQVRRVMTILFLTMVISYFGCMKAAPMKEANIRGQGGLAYPGVRTHGTLESVNGPKAGSRGLTSLADTFEHVIEELLDEDQKVRPNEENNKDADLYTSRVMLSSQVPLEPPLLFLLEEYKNYLDAANMSMRVRRHSDPARRGELSVCDSISEWVTAADKKTAVDMSGGTVTVLEKVPVSKGQLKQYFYETKCNPMGYTKEGCRGIDKRHWNSQCRTTQSYVRALTMDSKKRIGWRFIRIDTSCVCTLTIKRGR

SEQ ID NO: 9451 - protein, 247 aa, Homo sapiens
  Payload ID: 1934;
  Gene Symbol: BDNF;
  Gene Name: brain-derived neurotrophic factor;
  Uniprot ID:  P23560;
  ENSP ID: ENSP00000349084
MTILFLTMVISYFGCMKAAPMKEANIRGQGGLAYPGVRTHGTLESVNGPKAGSRGLTSLADTFEHVIEELLDEDQKVRPNEENNKDADLYTSRVMLSSQVPLEPPLLFLLEEYKNYLDAANMSMRVRRHSDPARRGELSVCDSISEWVTAADKKTAVDMSGGTVTVLEKVPVSKGQLKQYFYETKCNPMGYTKEGCRGIDKRHWNSQCRTTQSYVRALTMDSKKRIGWRFIRIDTSCVCTLTIKRGR

SEQ ID NO: 9452 - protein, 247 aa, Homo sapiens; identical to SEQ ID NO: 9451
  Payload ID: 1934;
  Gene Symbol: BDNF;
  Gene Name: brain-derived neurotrophic factor;
  Uniprot ID:  P23560;
  ENSP ID: ENSP00000379302

SEQ ID NO: 9453 - protein, 247 aa, Homo sapiens; identical to SEQ ID NO: 9451
  Payload ID: 1934;
  Gene Symbol: BDNF;
  Gene Name: brain-derived neurotrophic factor;
  Uniprot ID:  P23560;
  ENSP ID: ENSP00000379304

SEQ ID NO: 9454 - protein, 247 aa, Homo sapiens; identical to SEQ ID NO: 9451
  Payload ID: 1934;
  Gene Symbol: BDNF;
  Gene Name: brain-derived neurotrophic factor;
  Uniprot ID:  P23560;
  ENSP ID: ENSP00000379305

SEQ ID NO: 9455 - protein, 247 aa, Homo sapiens; identical to SEQ ID NO: 9451
  Payload ID: 1934;
  Gene Symbol: BDNF;
  Gene Name: brain-derived neurotrophic factor;
  Uniprot ID:  P23560;
  ENSP ID: ENSP00000379307

SEQ ID NO: 9456 - protein, 262 aa, Homo sapiens
  Payload ID: 1934;
  Gene Symbol: BDNF;
  Gene Name: brain-derived neurotrophic factor;
  Uniprot ID:  P23560;
  ENSP ID: ENSP00000379309
MQSREEEWFHQVRRVMTILFLTMVISYFGCMKAAPMKEANIRGQGGLAYPGVRTHGTLESVNGPKAGSRGLTSLADTFEHVIEELLDEDQKVRPNEENNKDADLYTSRVMLSSQVPLEPPLLFLLEEYKNYLDAANMSMRVRRHSDPARRGELSVCDSISEWVTAADKKTAVDMSGGTVTVLEKVPVSKGQLKQYFYETKCNPMGYTKEGCRGIDKRHWNSQCRTTQSYVRALTMDSKKRIGWRFIRIDTSCVCTLTIKRGR

SEQ ID NO: 9457 - protein, 247 aa, Homo sapiens; identical to SEQ ID NO: 9451
  Payload ID: 1934;
  Gene Symbol: BDNF;
  Gene Name: brain-derived neurotrophic factor;
  Uniprot ID:  P23560;
  ENSP ID: ENSP00000389345

SEQ ID NO: 9458 - protein, 247 aa, Homo sapiens; identical to SEQ ID NO: 9451
  Payload ID: 1934;
  Gene Symbol: BDNF;
  Gene Name: brain-derived neurotrophic factor;
  Uniprot ID:  P23560;
  ENSP ID: ENSP00000389564

SEQ ID NO: 9459 - protein, 247 aa, Homo sapiens; identical to SEQ ID NO: 9451
  Payload ID: 1934;
  Gene Symbol: BDNF;
  Gene Name: brain-derived neurotrophic factor;
  Uniprot ID:  P23560;
  ENSP ID: ENSP00000400502

SEQ ID NO: 9460 - protein, 329 aa, Homo sapiens
  Payload ID: 1934;
  Gene Symbol: BDNF;
  Gene Name: brain-derived neurotrophic factor;
  Uniprot ID:  P23560;
  ENSP ID: ENSP00000414303
MCGATSFLHECTRLILVTTQNAEFLQKGLQVHTCFGVYPHASVWHDCASQKKGCAVYLHVSVEFNKLIPENGFIKFHQVRRVMTILFLTMVISYFGCMKAAPMKEANIRGQGGLAYPGVRTHGTLESVNGPKAGSRGLTSLADTFEHVIEELLDEDQKVRPNEENNKDADLYTSRVMLSSQVPLEPPLLFLLEEYKNYLDAANMSMRVRRHSDPARRGELSVCDSISEWVTAADKKTAVDMSGGTVTVLEKVPVSKGQLKQYFYETKCNPMGYTKEGCRGIDKRHWNSQCRTTQSYVRALTMDSKKRIGWRFIRIDTSCVCTLTIKRGR

SEQ ID NO: 9461 - protein, 247 aa, Homo sapiens; identical to SEQ ID NO: 9451
  Payload ID: 1934;
  Gene Symbol: BDNF;
  Gene Name: brain-derived neurotrophic factor;
  Uniprot ID:  P23560;
  ENSP ID: ENSP00000432035

SEQ ID NO: 9462 - protein, 247 aa, Homo sapiens; identical to SEQ ID NO: 9451
  Payload ID: 1934;
  Gene Symbol: BDNF;
  Gene Name: brain-derived neurotrophic factor;
  Uniprot ID:  P23560;
  ENSP ID: ENSP00000432376

SEQ ID NO: 9463 - protein, 247 aa, Homo sapiens; identical to SEQ ID NO: 9451
  Payload ID: 1934;
  Gene Symbol: BDNF;
  Gene Name: brain-derived neurotrophic factor;
  Uniprot ID:  P23560;
  ENSP ID: ENSP00000432727

SEQ ID NO: 9464 - protein, 77 aa, Homo sapiens
  Payload ID: 1934;
  Gene Symbol: BDNF;
  Gene Name: brain-derived neurotrophic factor;
  ENSP ID: ENSP00000433003
MCGATSFLHECTRLILVTTQNAEFLQKGLQVHTCFGVYPHASVWHDCASQKKGCAVYLHVSVEFNKLIPENGFIKGW

SEQ ID NO: 9465 - protein, 247 aa, Homo sapiens; identical to SEQ ID NO: 9451
  Payload ID: 1934;
  Gene Symbol: BDNF;
  Gene Name: brain-derived neurotrophic factor;
  Uniprot ID:  P23560;
  ENSP ID: ENSP00000435564

SEQ ID NO: 9466 - protein, 247 aa, Homo sapiens; identical to SEQ ID NO: 9451
  Payload ID: 1934;
  Gene Symbol: BDNF;
  Gene Name: brain-derived neurotrophic factor;
  Uniprot ID:  P23560;
  ENSP ID: ENSP00000435805

SEQ ID NO: 9467 - protein, 247 aa, Homo sapiens; identical to SEQ ID NO: 9451
  Payload ID: 1934;
  Gene Symbol: BDNF;
  Gene Name: brain-derived neurotrophic factor;
  Uniprot ID:  P23560;
  ENSP ID: ENSP00000437138

SEQ ID NO: 9468 - protein, 593 aa, Homo sapiens
  Payload ID: 1935;
  Gene Symbol: BEGAIN;
  Gene Name: brain-enriched guanylate kinase-associated;
  Uniprot ID:  Q9BUH8;
  ENSP ID: ENSP00000347301
MEKLSALQEQKGELRKRLSYTTHKLEKLETEFDSTRHYLEIELRRAQEELEKVTEKLRRIQSNYMALQRINQELEDKLYRMGQHYEEEKRALSHEIVALNSHLLEAKVTIDKLSEDNELYRKDCNLAAQLLQCSQTYGRVHKVSELPSDFQERVSLHMEKHGCSLPSPLCHPAYADSVPTCVIAKVLEKPDPASLSSRLSDASARDLAFCDGVEKPGPRPPYKGDIYCSDTALYCPEERRRDRRPSVDAPVTDVGFLRAQNSTDSAAEEEEEAEAAAFPAGFQHEAFPSYAGSLPTSSSYSSFSATSEEKEHAQASTLTASQQAIYLNSRDELFDRKPPATTYEGSPRFAKATAAVAAPLEAEVAPGFGRTMSPYPAETFRFPASPGPQQALMPPNLWSLRAKPGTARLPGEDMRGQWRPLSVEDIGAYSYPVSAAGRASPCSFSERYYGGAGGSPGKKADGRASPLYASYKADSFSEGDDLSQGHLAEPCFLRAGGDLSLSPGRSADPLPGYAPSEGGDGDRLGVQLCGTASSPEPEQGSRDSLEPSSMEASPEMHPAARLSPQQAFPRTGGSGLSRKDSLTKAQLYGTLLN

SEQ ID NO: 9469 - protein, 593 aa, Homo sapiens; identical to SEQ ID NO: 9468
  Payload ID: 1935;
  Gene Symbol: BEGAIN;
  Gene Name: brain-enriched guanylate kinase-associated;
  Uniprot ID:  Q9BUH8;
  ENSP ID: ENSP00000411124

SEQ ID NO: 9470 - protein, 167 aa, Homo sapiens
  Payload ID: 1935;
  Gene Symbol: BEGAIN;
  Gene Name: brain-enriched guanylate kinase-associated;
  ENSP ID: ENSP00000450722
MEKLSALQEQKGELRKRLSYTTHKLEKLETEFDSTRHYLEIELRRAQEELEKVTEKLRRIQSNYMALQRINQELEDKLYRMGQHYEEEKRALSHEIVALNSHLLEAKVTIDKLSEDNELYRKDCNLAAQLLQCSQTYGRVHKVSELPSDFQERVSLHMEKHGCSLPS

SEQ ID NO: 9471 - protein, 169 aa, Homo sapiens
  Payload ID: 1935;
  Gene Symbol: BEGAIN;
  Gene Name: brain-enriched guanylate kinase-associated;
  ENSP ID: ENSP00000451125
MWTGGRRPGRLRRAASAADMEKLSALQEQKGELRKRLSYTTHKLEKLETEFDSTRHYLEIELRRAQEELEKVTEKLRRIQSNYMALQRINQELEDKLYRMGQHYEEEKRALSHEIVALNSHLLEAKVTIDKLSEDNELYRKDCNLAAQLLQCSQTYGRVHKVSELPSDF

SEQ ID NO: 9472 - protein, 529 aa, Homo sapiens
  Payload ID: 1935;
  Gene Symbol: BEGAIN;
  Gene Name: brain-enriched guanylate kinase-associated;
  ENSP ID: ENSP00000451380
MALQRINQELEDKLYRMGQHYEEEKRALSHEIVALNSHLLEAKVTIDKLSEDNELYRKDCNLAAQLLQCSQTYGRVHKVSELPSDFQERVSLHMEKHGCSLPSPLCHPAYADSVPTCVIAKVLEKPDPASLSSRLSDASARDLAFCDGVEKPGPRPPYKGDIYCSDTALYCPEERRRDRRPSVDAPVTDVGFLRAQNSTDSAAEEEEEAEAAAFPAGFQHEAFPSYAGSLPTSSSYSSFSATSEEKEHAQASTLTASQQAIYLNSRDELFDRKPPATTYEGSPRFAKATAAVAAPLEAEVAPGFGRTMSPYPAETFRFPASPGPQQALMPPNLWSLRAKPGTARLPGEDMRGQWRPLSVEDIGAYSYPVSAAGRASPCSFSERYYGGAGGSPGKKADGRASPLYASYKADSFSEGDDLSQGHLAEPCFLRAGGDLSLSPGRSADPLPGYAPSEGGDGDRLGVQLCGTASSPEPEQGSRDSLEPSSMEASPEMHPAARLSPQQAFPRTGGSGLSRKDSLTKAQLYGTLLN

SEQ ID NO: 9473 - protein, 299 aa, Homo sapiens
  Payload ID: 1935;
  Gene Symbol: BEGAIN;
  Gene Name: brain-enriched guanylate kinase-associated;
  ENSP ID: ENSP00000451397
MPSPSDCASAADMEKLSALQEQKGELRKRLSYTTHKLEKLETEFDSTRHYLEIELRRAQEELEKVTEKLRRIQSNYMALQRINQELEDKLYRMGQHYEEEKRALSHEIVALNSHLLEAKVTIDKLSEDNELYRKDCNLAAQLLQCSQTYGRVHKVSELPSDFQERVSLHMEKHGCSLPSPLCHPAYADSVPTCVIAKVLEKPDPASLSSRLSDASARDLAFCDGVEKPGPRPPYKGDIYCSDTALYCPEERRRDRRPSVDAPVTDVGFLRAQNSTDSAAEEEEEAEAAAFPAGFQHEAF

SEQ ID NO: 9474 - protein, 287 aa, Homo sapiens
  Payload ID: 1935;
  Gene Symbol: BEGAIN;
  Gene Name: brain-enriched guanylate kinase-associated;
  ENSP ID: ENSP00000452157
MEKLSALQEQKGELRKRLSYTTHKLEKLETEFDSTRHYLEIELRRAQEELEKVTEKLRRIQSNYMALQRINQELEDKLYRMGQHYEEEKRALSHEIVALNSHLLEAKVTIDKLSEDNELYRKDCNLAAQLLQCSQTYGRVHKVSELPSDFQERVSLHMEKHGCSLPSPLCHPAYADSVPTCVIAKVLEKPDPASLSSRLSDASARDLAFCDGVEKPGPRPPYKGDIYCSDTALYCPEERRRDRRPSVDAPVTDVGFLRAQNSTDSAAEEEEEAEAAAFPAGFQHEAF

SEQ ID NO: 9475 - protein, 174 aa, Homo sapiens
  Payload ID: 1935;
  Gene Symbol: BEGAIN;
  Gene Name: brain-enriched guanylate kinase-associated;
  ENSP ID: ENSP00000452607
MALQRINQELEDKLYRMGQHYEEEKRALSHEIVALNSHLLEAKVTIDKLSEDNELYRKDCNLAAQLLQCSQTYGRVHKVSELPSDFQERVSLHMEKHGCSLPSPLCHPAYADSVPTCVIAKVLEKPDPASLSSRLSDASARDLAFCDGVEKPGPRPPYKGDIYCSDTALYCPEE

SEQ ID NO: 9476 - protein, 233 aa, Homo sapiens
  Payload ID: 1936;
  Gene Symbol: BSX;
  Gene Name: brain-specific homeobox;
  Uniprot ID:  Q3C1V8;
  ENSP ID: ENSP00000344285
MNLNFTSPLHPASSQRPTSFFIEDILLHKPKPLREVAPDHFASSLASRVPLLDYGYPLMPTPTLLAPHAHHPLHKGDHHHPYFLTTSGMPVPALFPHPQHAELPGKHCRRRKARTVFSDSQLSGLEKRFEIQRYLSTPERVELATALSLSETQVKTWFQNRRMKHKKQLRKSQDEPKAPDGPESPEGSPRGSEAATAAEARLSLPAGPFVLTEPEDEVDIGDEGELGSGPHVL

SEQ ID NO: 9477 - protein, 386 aa, Homo sapiens
  Payload ID: 1937;
  Gene Symbol: BCAT1;
  Gene Name: branched chain amino-acid transaminase 1, cytosolic;
  Uniprot ID:  P54687;
  ENSP ID: ENSP00000261192
MKDCSNGCSAECTGEGGSKEVVGTFKAKDLIVTPATILKEKPDPNNLVFGTVFTDHMLTVEWSSEFGWEKPHIKPLQNLSLHPGSSALHYAVELFEGLKAFRGVDNKIRLFQPNLNMDRMYRSAVRATLPVFDKEELLECIQQLVKLDQEWVPYSTSASLYIRPTFIGTEPSLGVKKPTKALLFVLLSPVGPYFSSGTFNPVSLWANPKYVRAWKGGTGDCKMGGNYGSSLFAQCEAVDNGCQQVLWLYGEDHQITEVGTMNLFLYWINEDGEEELATPPLDGIILPGVTRRCILDLAHQWGEFKVSERYLTMDDLTTALEGNRVREMFGSGTACVVCPVSDILYKGETIHIPTMENGPKLASRILSKLTDIQYGREESDWTIVLS

SEQ ID NO: 9478 - protein, 325 aa, Homo sapiens
  Payload ID: 1937;
  Gene Symbol: BCAT1;
  Gene Name: branched chain amino-acid transaminase 1, cytosolic;
  Uniprot ID:  P54687;
  ENSP ID: ENSP00000339805
MKAKDLIVTPATILKEKPDPNNLVFGTVFTDHMLTVEWSSEFGWEKPHIKPLQNLSLHPGSSALHYAVEVFDKEELLECIQQLVKLDQEWVPYSTSASLYIRPTFIGTEPSLGVKKPTKALLFVLLSPVGPYFSSGTFNPVSLWANPKYVRAWKGGTGDCKMGGNYGSSLFAQCEAVDNGCQQVLWLYGEDHQITEVGTMNLFLYWINEDGEEELATPPLDGIILPGVTRRCILDLAHQWGEFKVSERYLTMDDLTTALEGNRVREMFGSGTACVVCPVSDILYKGETIHIPTMENGPKLASRILSKLTDIQYGREESDWTIVLS

SEQ ID NO: 9479 - protein, 144 aa, Homo sapiens
  Payload ID: 1937;
  Gene Symbol: BCAT1;
  Gene Name: branched chain amino-acid transaminase 1, cytosolic;
  ENSP ID: ENSP00000438593
MKAKDLIVTPATILKEKPDPNNLVFGTVFTDHMLTVEWSSEFGWEKPHIKPLQNLSLHPGSSALHYAVELFEGLKAFRGVDNKIRLFQPNLNMDRMYRSAVRATLPVFDKEELLECIQQLVKLDQEWVPYSTSASLYIRPTFIG

SEQ ID NO: 9480 - protein, 385 aa, Homo sapiens
  Payload ID: 1937;
  Gene Symbol: BCAT1;
  Gene Name: branched chain amino-acid transaminase 1, cytosolic;
  Uniprot ID:  P54687;
  ENSP ID: ENSP00000440817
MDCSNGCSAECTGEGGSKEVVGTFKAKDLIVTPATILKEKPDPNNLVFGTVFTDHMLTVEWSSEFGWEKPHIKPLQNLSLHPGSSALHYAVELFEGLKAFRGVDNKIRLFQPNLNMDRMYRSAVRATLPVFDKEELLECIQQLVKLDQEWVPYSTSASLYIRPTFIGTEPSLGVKKPTKALLFVLLSPVGPYFSSGTFNPVSLWANPKYVRAWKGGTGDCKMGGNYGSSLFAQCEAVDNGCQQVLWLYGEDHQITEVGTMNLFLYWINEDGEEELATPPLDGIILPGVTRRCILDLAHQWGEFKVSERYLTMDDLTTALEGNRVREMFGSGTACVVCPVSDILYKGETIHIPTMENGPKLASRILSKLTDIQYGREESDWTIVLS

SEQ ID NO: 9481 - protein, 349 aa, Homo sapiens
  Payload ID: 1937;
  Gene Symbol: BCAT1;
  Gene Name: branched chain amino-acid transaminase 1, cytosolic;
  Uniprot ID:  P54687;
  ENSP ID: ENSP00000440827
MKDCSNGCSAECTGEGGSKEVVGTFKAKDLIVTPATILKEKPDPNNLVFGTVFTDHMLTVEWSSEFGWEKPHIKPLQNLSLHPGSSALHYAVEVFDKEELLECIQQLVKLDQEWVPYSTSASLYIRPTFIGTEPSLGVKKPTKALLFVLLSPVGPYFSSGTFNPVSLWANPKYVRAWKGGTGDCKMGGNYGSSLFAQCEAVDNGCQQVLWLYGEDHQITEVGTMNLFLYWINEDGEEELATPPLDGIILPGVTRRCILDLAHQWGEFKVSERYLTMDDLTTALEGNRVREMFGSGTACVVCPVSDILYKGETIHIPTMENGPKLASRILSKLTDIQYGREESDWTIVLS

SEQ ID NO: 9482 - protein, 398 aa, Homo sapiens
  Payload ID: 1937;
  Gene Symbol: BCAT1;
  Gene Name: branched chain amino-acid transaminase 1, cytosolic;
  Uniprot ID:  P54687;
  ENSP ID: ENSP00000443459
MASPLRSAAALARQDCSNGCSAECTGEGGSKEVVGTFKAKDLIVTPATILKEKPDPNNLVFGTVFTDHMLTVEWSSEFGWEKPHIKPLQNLSLHPGSSALHYAVELFEGLKAFRGVDNKIRLFQPNLNMDRMYRSAVRATLPVFDKEELLECIQQLVKLDQEWVPYSTSASLYIRPTFIGTEPSLGVKKPTKALLFVLLSPVGPYFSSGTFNPVSLWANPKYVRAWKGGTGDCKMGGNYGSSLFAQCEAVDNGCQQVLWLYGEDHQITEVGTMNLFLYWINEDGEEELATPPLDGIILPGVTRRCILDLAHQWGEFKVSERYLTMDDLTTALEGNRVREMFGSGTACVVCPVSDILYKGETIHIPTMENGPKLASRILSKLTDIQYGREESDWTIVLS

SEQ ID NO: 9483 - protein, 225 aa, Homo sapiens
  Payload ID: 1937;
  Gene Symbol: BCAT1;
  Gene Name: branched chain amino-acid transaminase 1, cytosolic;
  ENSP ID: ENSP00000481749
  MOD_RES (1)..(1): Any amino acid
XKAFRGVDNKIRLFQPNLNMDRMYRSAVRATLPVFDKEELLECIQQLVKLDQEWVPYSTSASLYIRPTFIGTEPSLGVKKPTKALLFVLLSPVGPYFSSGTFNPVSLWANPKYVRAWKGGTGDCKMGGNYGSSLFAQCEAVDNGCQQVLWLYGEDHQITEVGTMNLFLYWINEDGEEELATPPLDGIILPGVTRRCILDLAHQWVGAFDMNNFCKPEIKNNQNKP

SEQ ID NO: 9484 - protein, 392 aa, Homo sapiens
  Payload ID: 1938;
  Gene Symbol: BCAT2;
  Gene Name: branched chain amino-acid transaminase 2, mitochondrial;
  Uniprot ID:  O15382;
  ENSP ID: ENSP00000322991
MAAAALGQIWARKLLSVPWLLCGPRRYASSSFKAADLQLEMTQKPHKKPGPGEPLVFGKTFTDHMLMVEWNDKGWGQPRIQPFQNLTLHPASSSLHYSLQLFEGMKAFKGKDQQVRLFRPWLNMDRMLRSAMRLCLPSFDKLELLECIRRLIEVDKDWVPDAAGTSLYVRPVLIGNEPSLGVSQPTRALLFVILCPVGAYFPGGSVTPVSLLADPAFIRAWVGGVGNYKLGGNYGPTVLVQQEALKRGCEQVLWLYGPDHQLTEVGTMNIFVYWTHEDGVLELVTPPLNGVILPGVVRQSLLDMAQTWGEFRVVERTITMKQLLRALEEGRVREVFGSGTACQVCPVHRILYKDRNLHIPTMENGPELILRFQKELKEIQYGIRAHEWMFPV

SEQ ID NO: 9485 - protein, 352 aa, Homo sapiens
  Payload ID: 1938;
  Gene Symbol: BCAT2;
  Gene Name: branched chain amino-acid transaminase 2, mitochondrial;
  ENSP ID: ENSP00000385161
MTQKPHKKPGPGEPLVFGKTFTDHMLMVEWNDKGWGQPRIQPFQNLTLHPASSSLHYSLQLFEGMKAFKGKDQQVRLFRPWLNMDRMLRSAMRLCLPSFDKLELLECIRRLIEVDKDWVPDAAGTSLYVRPVLIGNEPSLGVSQPTRALLFVILCPVGAYFPGGSVTPVSLLADPAFIRAWVGGVGNYKLGGNYGPTVLVQQEALKRGCEQVLWLYGPDHQLTEVGTMNIFVYWTHEDGVLELVTPPLNGVILPGVVRQSLLDMAQTWGEFRVVERTITMKQLLRALEEGRVREVFGSGTACQVCPVHRILYKDRNLHIPTMENGPELILRFQKELKEIQYGIRAHEWMFPV

SEQ ID NO: 9486 - protein, 300 aa, Homo sapiens
  Payload ID: 1938;
  Gene Symbol: BCAT2;
  Gene Name: branched chain amino-acid transaminase 2, mitochondrial;
  Uniprot ID:  O15382;
  ENSP ID: ENSP00000440973
MAAAALGQLFEGMKAFKGKDQQVRLFRPWLNMDRMLRSAMRLCLPSFDKLELLECIRRLIEVDKDWVPDAAGTSLYVRPVLIGNEPSLGVSQPTRALLFVILCPVGAYFPGGSVTPVSLLADPAFIRAWVGGVGNYKLGGNYGPTVLVQQEALKRGCEQVLWLYGPDHQLTEVGTMNIFVYWTHEDGVLELVTPPLNGVILPGVVRQSLLDMAQTWGEFRVVERTITMKQLLRALEEGRVREVFGSGTACQVCPVHRILYKDRNLHIPTMENGPELILRFQKELKEIQYGIRAHEWMFPV

SEQ ID NO: 9487 - protein, 445 aa, Homo sapiens
  Payload ID: 1938;
  Gene Symbol: BCAT2;
  Gene Name: branched chain amino-acid transaminase 2, mitochondrial;
  ENSP ID: ENSP00000469139
IWARKLLSVPWLLCGPRRYASSSFKAADLQLEMTQKPHKKPGPGEPLVFGKTFTDHMLMVEWNDKGWGQPRIQPFQNLTLHPASSSLHYSLQLFEGMKAFKGKDQQVRLFRPWLNMDRMLRSAMRLCLPSFDKLELLECIRRLIEVDKDWVPDAAGTSLYVRPVLIGNEPSLGVSQPTRALLFVILCPVGAYFPGGSVTPVSLLADPAFIRAWVGGVGNYKLGGNYGPTVLVQQEALKRGCEQVLWLYGPDHQLTEVGTMNIFVYWTHEDGVLELVTPPLNGVILPGVVRQSLLDMAQTWGEFRVVERTITMKQLLRALEEGRVREVFGSGTACQVCPVHRILYKDRNLHIPTMENGPELILRFQKELKEIQYQEQIMAFLIEALESGLSVLLCGLENPLGLNHPFLGAPGALDMSSALETPSCDPLRLLGALYGIRAHEWMFPV

SEQ ID NO: 9488 - protein, 352 aa, Homo sapiens; identical to SEQ ID NO: 9485
  Payload ID: 1938;
  Gene Symbol: BCAT2;
  Gene Name: branched chain amino-acid transaminase 2, mitochondrial;
  ENSP ID: ENSP00000469651

SEQ ID NO: 9489 - protein, 405 aa, Homo sapiens
  Payload ID: 1938;
  Gene Symbol: BCAT2;
  Gene Name: branched chain amino-acid transaminase 2, mitochondrial;
  ENSP ID: ENSP00000470216
MAAAALGQIWARKLLSVPWLLCGPRRYASSSFKAADLQLEMTQKPHKKPGPGEPLVFGKTFTDHMLMVEWNDKGWGQPRIQPFQNLTLHPASSSLHYSLQLFEGMKAFKGKDQQVRLFRPWLNMDRMLRSAMRLCLPSFDKLELLECIRRLIEVDKDWVPDAAGTSLYVRPVLIGNEPSLGVSQPTRALLFVILCPVGAYFPGGSVTPVSLLADPAFIRAWVGGVGNYKLGGNYGPTVLVQQEALKRGCEQVLWLYGPDHQLTEVGTMNIFVYWTHEDGVLELVTPPLNGVILPGVVRQSLLDMAQTWGEFRVVERTITMKQLLRALEEGRVREVFGSGTACQVCPVHRILYKDRNLHIPTMENGPELILRFQKELKEIQVSCRELGNGLGACSLEKLVSHEPLD

SEQ ID NO: 9490 - protein, 313 aa, Homo sapiens
  Payload ID: 1938;
  Gene Symbol: BCAT2;
  Gene Name: branched chain amino-acid transaminase 2, mitochondrial;
  ENSP ID: ENSP00000470680
MAAAALGQLFEGMKAFKGKDQQVRLFRPWLNMDRMLRSAMRLCLPSFDKLELLECIRRLIEVDKDWVPDAAGTSLYVRPVLIGNEPSLGVSQPTRALLFVILCPVGAYFPGGSVTPVSLLADPAFIRAWVGGVGNYKLGGNYGPTVLVQQEALKRGCEQVLWLYGPDHQLTEVGTMNIFVYWTHEDGVLELVTPPLNGVILPGVVRQSLLDMAQTWGEFRVVERTITMKQLLRALEEGRVREVFGSGTACQVCPVHRILYKDRNLHIPTMENGPELILRFQKELKEIQVSCRELGNGLGACSLEKLVSHEPLD

SEQ ID NO: 9491 - protein, 108 aa, Homo sapiens
  Payload ID: 1938;
  Gene Symbol: BCAT2;
  Gene Name: branched chain amino-acid transaminase 2, mitochondrial;
  ENSP ID: ENSP00000472641
MTQKPHKKPGPGEPLVFGKTFTDHMLMVEWNDKGWGQPRIQPFQNLTLHPASSSLHYSLQLFEGMKAFKGKDQQVRLFRPWLNMDRMLRSAMRLCLPSFDKLELLECI

SEQ ID NO: 9492 - protein, 445 aa, Homo sapiens
  Payload ID: 1939;
  Gene Symbol: BCKDHA;
  Gene Name: branched chain keto acid dehydrogenase E1, alpha polypeptide;
  Uniprot ID:  P12694;
  ENSP ID: ENSP00000269980
MAVAIAAARVWRLNRGLSQAALLLLRQPGARGLARSHPPRQQQQFSSLDDKPQFPGASAEFIDKLEFIQPNVISGIPIYRVMDRQGQIINPSEDPHLPKEKVLKLYKSMTLLNTMDRILYESQRQGRISFYMTNYGEEGTHVGSAAALDNTDLVFGQYREAGVLMYRDYPLELFMAQCYGNISDLGKGRQMPVHYGCKERHFVTISSPLATQIPQAVGAAYAAKRANANRVVICYFGEGAASEGDAHAGFNFAATLECPIIFFCRNNGYAISTPTSEQYRGDGIAARGPGYGIMSIRVDGNDVFAVYNATKEARRRAVAENQPFLIEAMTYRIGHHSTSDDSSAYRSVDEVNYWDKQDHPISRLRHYLLSQGWWDEEQEKAWRKQSRRKVMEAFEQAERKPKPNPNLLFSDVYQEMPAQLRKQQESLARHLQTYGEHYPLDHFDK

SEQ ID NO: 9493 - protein, 448 aa, Homo sapiens
  Payload ID: 1939;
  Gene Symbol: BCKDHA;
  Gene Name: branched chain keto acid dehydrogenase E1, alpha polypeptide;
  Uniprot ID:  P12694;
  ENSP ID: ENSP00000416000
MAVAIAAARVWRLNRGLSQQQQFSSLDDKPQFPGASAEFIDKLEFIQPNVISGIPIYRVMDRQGQIINPSEDPHLPKEKVLKLYKSMTLLNTMDRILYESQRQGRISFYMTNYGEEGTHVGSAAALDNTDLVFGQYREAGVLMYRDYPLELFMAQCYGNISDLGKGRQMPVHYGCKERHFVTISSPLATQIPQAVGAAYAAKRANANRVVICYFGEGAASEGDAHAGFNFAATLECPIIFFCRNNGYAISTPTSEQYRGDGIAARGPGYGIMSIRVDGNDVFAVYNATKEARRRAVAENQPFLIEAMTYSSSPILPPDPHSREPTLTWGPLPLCRIGHHSTSDDSSAYRSVDEVNYWDKQDHPISRLRHYLLSQGWWDEEQEKAWRKQSRRKVMEAFEQAERKPKPNPNLLFSDVYQEMPAQLRKQQESLARHLQTYGEHYPLDHFDK

SEQ ID NO: 9494 - protein, 328 aa, Homo sapiens
  Payload ID: 1939;
  Gene Symbol: BCKDHA;
  Gene Name: branched chain keto acid dehydrogenase E1, alpha polypeptide;
  ENSP ID: ENSP00000440345
MAVAIAAARVWRLNRGLSQAALLLLRQPGARGLARSHPPRQQQQFSSLDDKPQFPGASAEFIDKLEFIQPNVISGIPIYRVMDRQGQIINPSEDPHGRISFYMTNYGEEGTHVGSAAALDNTDLVFGQYREAGVLMYRDYPLELFMAQCYGNISDLGKGRQMPVHYGCKERHFVTISSPLATQIPQAVGAAYAAKRANANRVVICYFGEGAASEGDAHAGFNFAATLECPIIFFCRNNGYAISTPTSEQYRGDGIAARGPGYGIMSIRVDGNDVFAVYNATKEARRRAVAENQPFLIEAMTYRIGHHSTSDDSSAYRSVDEVNYWDKQ

SEQ ID NO: 9495 - protein, 94 aa, Homo sapiens
  Payload ID: 1939;
  Gene Symbol: BCKDHA;
  Gene Name: branched chain keto acid dehydrogenase E1, alpha polypeptide;
  ENSP ID: ENSP00000445727
  MOD_RES (1)..(1): Any amino acid
XSQGWWDEEQEKAWRKQSRRKTCIRRCPPSSASSRSLWPATCRPTGSTTHWITSISETCSAHPHPSSATPRGSPTLRGAGGPDSTPLSSPVSSL

SEQ ID NO: 9496 - protein, 211 aa, Homo sapiens
  Payload ID: 1939;
  Gene Symbol: BCKDHA;
  Gene Name: branched chain keto acid dehydrogenase E1, alpha polypeptide;
  ENSP ID: ENSP00000445809
  MOD_RES (1)..(1): Any amino acid
XEFIQPNVISGIPIYRVMDRQGQIINPSEDPHLPKEKVLKLYKSMTLLNTMDRILYESQRQGRISFYMTNYGEEGTHVGSAAALDNTDLVFGQYREAEARPHHVAQAGLQLLGSSDPPTSASQSAGITGVLMYRDYPLELFMAQCYGNISDLGKGRQMPVHYGCKERHFVTISSPLATQIPQAVGAAYAAKRANANRVVICYFGEGAASEG

SEQ ID NO: 9497 - protein, 403 aa, Homo sapiens
  Payload ID: 1939;
  Gene Symbol: BCKDHA;
  Gene Name: branched chain keto acid dehydrogenase E1, alpha polypeptide;
  ENSP ID: ENSP00000471150
MAVAIAAARVWRLNRGLSQAALLLLRQPGARGLARSHPPRQQQQFSSLDDKPQFPGASAEFIDKLEFIQPNVISGIPIYRVMDRQGQIINPSEDPHLPKEKVLKLYKSMTLLNTMDRILYESQRQGRISFYMTNYGEEGTHVGSAAALDNTDLVFGQYREAGVLMYRDYPLELFMAQCYGNISDLGKGRQMPVHYGCKERHFVTISSPLATQIPQAVGAAYAAKRANANRVVICYFGEGAASEGDAHAGFNFAATLECPIIFFCRNNGYAISTPTSEQYRGDGIAARGPGYGIMSIRVDGNDVFAVYTATGGPKARASVGPSSPSTTGTCGIMMPLHAMGLWHPVSHQQELSAAPKPKGTTKPILESYLKSHLLGHSRYQLYIHQDAVRREKPQSNLNRESLI

SEQ ID NO: 9498 - protein, 392 aa, Homo sapiens
  Payload ID: 1940;
  Gene Symbol: BCKDHB;
  Gene Name: branched chain keto acid dehydrogenase E1, beta polypeptide;
  Uniprot ID:  P21953;
  ENSP ID: ENSP00000318351
MAVVAAAAGWLLRLRAAGAEGHWRRLPGAGLARGFLHPAATVEDAAQRRQVAHFTFQPDPEPREYGQTQKMNLFQSVTSALDNSLAKDPTAVIFGEDVAFGGVFRCTVGLRDKYGKDRVFNTPLCEQGIVGFGIGIAVTGATAIAEIQFADYIFPAFDQIVNEAAKYRYRSGDLFNCGSLTIRSPWGCVGHGALYHSQSPEAFFAHCPGIKVVIPRSPFQAKGLLLSCIEDKNPCIFFEPKILYRAAAEEVPIEPYNIPLSQAEVIQEGSDVTLVAWGTQVHVIREVASMAKEKLGVSCEVIDLRTIIPWDVDTICKSVIKTGRLLISHEAPLTGGFASEISSTVQEECFLNLEAPISRVCGYDTPFPHIFEPFYIPDKWKCYDALRKMINY

SEQ ID NO: 9499 - protein, 392 aa, Homo sapiens; identical to SEQ ID NO: 9498
  Payload ID: 1940;
  Gene Symbol: BCKDHB;
  Gene Name: branched chain keto acid dehydrogenase E1, beta polypeptide;
  Uniprot ID:  P21953;
  ENSP ID: ENSP00000348880

SEQ ID NO: 9500 - protein, 218 aa, Homo sapiens
  Payload ID: 1940;
  Gene Symbol: BCKDHB;
  Gene Name: branched chain keto acid dehydrogenase E1, beta polypeptide;
  Uniprot ID:  P21953;
  ENSP ID: ENSP00000358775
MAVVAAAAGWLLRLRAAGAEGHWRRLPGAGLARGFLHPAATVEDAAQRRQVAHFTFQPDPEPREYGQTQKMNLFQSVTSALDNSLAKDPTAVIFGEDVAFGGVFRCTVGLRDKYGKDRVFNTPLCEQGIVGFGIGIAVTGATAIAEIQFADYIFPAFDQIVNEAAKYRYRSGDLFNCGSLTIRSPWGCVGHGALYHSQSPEAFFAHCPGIKIKVISLS

SEQ ID NO: 9501 - protein, 412 aa, Homo sapiens
  Payload ID: 1941;
  Gene Symbol: BCKDK;
  Gene Name: branched chain ketoacid dehydrogenase kinase;
  Uniprot ID:  O14874;
  ENSP ID: ENSP00000219794
MILASVLRSGPGGGLPLRPLLGPALALRARSTSATDTHHVEMARERSKTVTSFYNQSAIDAAAEKPSVRLTPTMMLYAGRSQDGSHLLKSARYLQQELPVRIAHRIKGFRCLPFIIGCNPTILHVHELYIRAFQKLTDFPPIKDQADEAQYCQLVRQLLDDHKDVVTLLAEGLRESRKHIEDEKLVRYFLDKTLTSRLGIRMLATHHLALHEDKPDFVGIICTRLSPKKIIEKWVDFARRLCEHKYGNAPRVRINGHVAARFPFIPMPLDYILPELLKNAMRATMESHLDTPYNVPDVVITIANNDVDLIIRISDRGGGIAHKDLDRVMDYHFTTAEASTQDPRISPLFGHLDMHSGAQSGPMHGFGFGLPTSRAYAEYLGGSLQLQSLQGIGTDVYLRLRHIDGREESFRI

SEQ ID NO: 9502 - protein, 335 aa, Homo sapiens
  Payload ID: 1941;
  Gene Symbol: BCKDK;
  Gene Name: branched chain ketoacid dehydrogenase kinase;
  Uniprot ID:  O14874;
  ENSP ID: ENSP00000287507
MILASVLRSGPGGGLPLRPLLGPALALRARSTSATDTHHVEMARERSKTVTSFYNQSAIDAAAEKPSVRLTPTMMLYAGRSQDGSHLLKSARYLQQELPVRIAHRIKGFRCLPFIIGCNPTILHVHELYIRAFQKLTDFPPIKDQADEAQYCQLVRQLLDDHKDVVTLLAEGLRESRKHIEDEKLVRYFLDKTLTSRLGIRMLATHHLALHEDKPDFVGIICTRLSPKKIIEKWVDFARRLCEHKYGNAPRVRINGHVAARFPFIPMPLDYILPELLKNAMRISDRGGGIAHKDLDRVMDYHFTTAEASTQDPRISPLFGHLDMHSGAQSGPMHG

SEQ ID NO: 9503 - protein, 365 aa, Homo sapiens
  Payload ID: 1941;
  Gene Symbol: BCKDK;
  Gene Name: branched chain ketoacid dehydrogenase kinase;
  Uniprot ID:  O14874;
  ENSP ID: ENSP00000378404
MILASVLRSGPGGGLPLRPLLGPALALRARSTSATDTHHVEMARERSKTVTSFYNQSAIDAAAEKPSVRLTPTMMLYAGRSQDGSHLLKSARYLQQELPVRIAHRIKGFRCLPFIIGCNPTILHVHELYIRAFQKLTDFPPIKDQADEAQYCQLVRQLLDDHKDVVTLLAEGLRESRKHIEDEKLVRYFLDKTLTSRLGIRMLATHHLALHEDKPDFVGIICTRLSPKKIIEKWVDFARRLCEHKYGNAPRVRINGHVAARFPFIPMPLDYILPELLKNAMRATMESHLDTPYNVPDVVITIANNDVDLIIRISDRGGGIAHKDLDRVMDYHFTTAEASTQDPRISPLFGHLDMHSGAQSGPMHG

SEQ ID NO: 9504 - protein, 412 aa, Homo sapiens; identical to SEQ ID NO: 9501
  Payload ID: 1941;
  Gene Symbol: BCKDK;
  Gene Name: branched chain ketoacid dehydrogenase kinase;
  Uniprot ID:  O14874;
  ENSP ID: ENSP00000378405

SEQ ID NO: 9505 - protein, 88 aa, Homo sapiens
  Payload ID: 1941;
  Gene Symbol: BCKDK;
  Gene Name: branched chain ketoacid dehydrogenase kinase;
  ENSP ID: ENSP00000454947
MILASVLRSGPGGGLPLRPLLGPALALRARSTSATDTHHVEMARERSKTVTSFYNQSAIDAAAEKPSVRLTPTMMLYAGRSQDGSHLL

SEQ ID NO: 9506 - protein, 60 aa, Homo sapiens
  Payload ID: 1941;
  Gene Symbol: BCKDK;
  Gene Name: branched chain ketoacid dehydrogenase kinase;
  ENSP ID: ENSP00000455866
MILASVLRSGPGGGLPLRPLLGPALALRARSTSATDTHHVEMARERSKTVTSFYNQSAID

SEQ ID NO: 9507 - protein, 217 aa, Homo sapiens
  Payload ID: 1941;
  Gene Symbol: BCKDK;
  Gene Name: branched chain ketoacid dehydrogenase kinase;
  ENSP ID: ENSP00000456479
MILASVLRSGPGGGLPLRPLLGPALALRARSTSATDTHHVEMARERSKTVTSFYNQSAIDAAAEKPSVRLTPTMMLYAGRSQDGSHLLKSARYLQQELPVRIAHRIKGFRCLPFIIGCNPTILHVHELYIRAFQKLTDFPPIKDQADEAQYCQLVRQLLDDHKDVVTLLAEGLRESRKHIEDEKLVRYFLDKTLTSRLGIRMLATHHLALHEDKTPV

SEQ ID NO: 9508 - protein, 216 aa, Homo sapiens
  Payload ID: 1941;
  Gene Symbol: BCKDK;
  Gene Name: branched chain ketoacid dehydrogenase kinase;
  ENSP ID: ENSP00000457226
MILASVLRSGPGGGLPLRPLLGPALALRARSTSATDTHHVEMARERSKTVTSFYNQSAIDAAAEKPSVRLTPTMMLYAGRSQDGSHLLKSARYLQQELPVRIAHRIKGFRCLPFIIGCNPTILHVKLTDFPPIKDQADEAQYCQLVRQLLDDHKDVVTLLAEGLRESRKHIEDEKLVRYFLDKTLTSRLGIRMLATHHLALHEDKPDFVGIICTRL

SEQ ID NO: 9509 - protein, 146 aa, Homo sapiens
  Payload ID: 1941;
  Gene Symbol: BCKDK;
  Gene Name: branched chain ketoacid dehydrogenase kinase;
  ENSP ID: ENSP00000457821
  MOD_RES (1)..(1): Any amino acid
XDVDLIIRISDRGGGIAHKDLDRVMDYHFTTAEASTQDPRISPLFGHLDMHSGAQSGPMHGALARTSTCGSATSMAGRKASGSDPTAFGLLTRPAWAAFPAGPPGSGRAAPCSTHCCILGLRDPDRWTYMELGTALPQQGPLPPRL

SEQ ID NO: 9510 - protein, 562 aa, Homo sapiens
  Payload ID: 1942;
  Gene Symbol: BRAP;
  Gene Name: BRCA1 associated prt;
  ENSP ID: ENSP00000330813
MSDEEIKKTTLASAVACLEGKSPGEKVAIIHQHLGRREMTDVIIETMKSNPDELKTTVEERKSSEASPTAQRSKDHSKECINAAPDSPSKQLPDQISFFSGNPSVEIVHGIMHLYKTNKMTSLKEDVRRSAMLCILTVPAAMTSHDLMKFVAPFNEVIEQMKIIRDSTPNQYMVLIKFRAQADADSFYMTCNGRQFNSIEDDVCQLVYVERAEVLKSEDGASLPVMDLTELPKCTVCLERMDESVNGILTTLCNHSFHSQCLQRWDDTTCPVCRYCQTPEPVEENKCFECGVQENLWICLICGHIGCGRYVSRHAYKHFEETQHTYAMQLTNHRVWDYAGDNYVHRLVASKTDGKIVQYECEGDTCQEEKIDALQLEYSYLLTSQLESQRIYWENKIVRIEKDTAEEINNMKTKFKETIEKCDNLEHKLNDLLKEKQSVERKCTQLNTKVAKLTNELKEEQEMNKCLRANQVLLQNKLKEEERVLKETCDQKDLQITEIQEQLRDVMFYLETQQKINHLPAETRQEIQEGQINIAMASASSPASSGGSGKLPSRKGRSKRGK

SEQ ID NO: 9511 - protein, 592 aa, Homo sapiens
  Payload ID: 1942;
  Gene Symbol: BRAP;
  Gene Name: BRCA1 associated prt;
  Uniprot ID:  Q7Z569;
  ENSP ID: ENSP00000403524
MSVSLVVIRLELAEHSPVPAGFGFSAAAGEMSDEEIKKTTLASAVACLEGKSPGEKVAIIHQHLGRREMTDVIIETMKSNPDELKTTVEERKSSEASPTAQRSKDHSKECINAAPDSPSKQLPDQISFFSGNPSVEIVHGIMHLYKTNKMTSLKEDVRRSAMLCILTVPAAMTSHDLMKFVAPFNEVIEQMKIIRDSTPNQYMVLIKFRAQADADSFYMTCNGRQFNSIEDDVCQLVYVERAEVLKSEDGASLPVMDLTELPKCTVCLERMDESVNGILTTLCNHSFHSQCLQRWDDTTCPVCRYCQTPEPVEENKCFECGVQENLWICLICGHIGCGRYVSRHAYKHFEETQHTYAMQLTNHRVWDYAGDNYVHRLVASKTDGKIVQYECEGDTCQEEKIDALQLEYSYLLTSQLESQRIYWENKIVRIEKDTAEEINNMKTKFKETIEKCDNLEHKLNDLLKEKQSVERKCTQLNTKVAKLTNELKEEQEMNKCLRANQVLLQNKLKEEERVLKETCDQKDLQITEIQEQLRDVMFYLETQQKINHLPAETRQEIQEGQINIAMASASSPASSGGSGKLPSRKGRSKRGK

SEQ ID NO: 9512 - protein, 711 aa, Homo sapiens
  Payload ID: 1943;
  Gene Symbol: BAP1;
  Gene Name: BRCA1 associated prt-1 (ubiquitin carboxy-terminal hydrolase);
  ENSP ID: ENSP00000296288
MNKGWLELESDPGLFTLLVEDFGVKGVQVEEIYDLQSKCQGPVYGFIFLFKWIEERRSRRKVSTLVDDTSVIDDDIVNNMFFAHQLIPNSCATHALLSVLLNCSSVDLGPTLSRMKDFTKGFSPESKGYAIGNAPELAKAHNSHARPEPRHLPEKQNGLSAVRTMEAFHFVSYVPITGRLFELDGLKVYPIDHGPWGEDEEWTDKARRVIMERIGLATAGIKYEARLHVLKVNRQTVLEALQQLIRVTQPELIQTHKSQESQLPEESKSASNKSPLVLEANRAPAASEGNHTDGAEEAAGSCAQAPSHSPPNKPKLVVKPPGSSLNGVHPNPTPIVQRLPAFLDNHNYAKSPMQEEEDLAAGVGRSRVPVRPPQQYSDDEDDYEDDEEDDVQNTNSALRYKGKGTGKPGALSGSADGQLSVLQPNTINVLAEKLKESQKDLSIPLSIKTSSGAGSPAVAVPTHSQPSPTPSNESTDTASEIGSAFNSPLRSPIRSANPTRPSSPVTSHISKVLFGEDDSLLRVDCIRYNRAVRDLGPVISTGLLHLAEDGVLSPLALTEGGKGSSPSIRPIQGSQGSSSPVEKEVVEATDSREKTGMVRPGEPLSGEKYSPKELLALLKCVEAEIANYEACLKEEVEKRKKFKIDDQRRTHNYDEFICTFISMLAQEGMLANLVEQNISVRRRQGVSIGRLHKQRKPDRRKRSRPYKAKRQ

SEQ ID NO: 9513 - protein, 729 aa, Homo sapiens
  Payload ID: 1943;
  Gene Symbol: BAP1;
  Gene Name: BRCA1 associated prt-1 (ubiquitin carboxy-terminal hydrolase);
  Uniprot ID:  Q92560;
  ENSP ID: ENSP00000417132
MNKGWLELESDPGLFTLLVEDFGVKGVQVEEIYDLQSKCQGPVYGFIFLFKWIEERRSRRKVSTLVDDTSVIDDDIVNNMFFAHQLIPNSCATHALLSVLLNCSSVDLGPTLSRMKDFTKGFSPESKGYAIGNAPELAKAHNSHARPEPRHLPEKQNGLSAVRTMEAFHFVSYVPITGRLFELDGLKVYPIDHGPWGEDEEWTDKARRVIMERIGLATAGEPYHDIRFNLMAVVPDRRIKYEARLHVLKVNRQTVLEALQQLIRVTQPELIQTHKSQESQLPEESKSASNKSPLVLEANRAPAASEGNHTDGAEEAAGSCAQAPSHSPPNKPKLVVKPPGSSLNGVHPNPTPIVQRLPAFLDNHNYAKSPMQEEEDLAAGVGRSRVPVRPPQQYSDDEDDYEDDEEDDVQNTNSALRYKGKGTGKPGALSGSADGQLSVLQPNTINVLAEKLKESQKDLSIPLSIKTSSGAGSPAVAVPTHSQPSPTPSNESTDTASEIGSAFNSPLRSPIRSANPTRPSSPVTSHISKVLFGEDDSLLRVDCIRYNRAVRDLGPVISTGLLHLAEDGVLSPLALTEGGKGSSPSIRPIQGSQGSSSPVEKEVVEATDSREKTGMVRPGEPLSGEKYSPKELLALLKCVEAEIANYEACLKEEVEKRKKFKIDDQRRTHNYDEFICTFISMLAQEGMLANLVEQNISVRRRQGVSIGRLHKQRKPDRRKRSRPYKAKRQ

SEQ ID NO: 9514 - protein, 112 aa, Homo sapiens
  Payload ID: 1943;
  Gene Symbol: BAP1;
  Gene Name: BRCA1 associated prt-1 (ubiquitin carboxy-terminal hydrolase);
  ENSP ID: ENSP00000417776
MFFAHQLIPNSCATHALLSVLLNCSSVDLGPTLSRMKDFTKGFSPESKGYAIGNAPELAKAHNSHARPEPRHLPEKQNGLSAVRTMEAFHFVSYVPITGRLFELDGLKVYPI

SEQ ID NO: 9515 - protein, 129 aa, Homo sapiens
  Payload ID: 1943;
  Gene Symbol: BAP1;
  Gene Name: BRCA1 associated prt-1 (ubiquitin carboxy-terminal hydrolase);
  ENSP ID: ENSP00000418320
  MOD_RES (1)..(1): Any amino acid
XQNTNSALRYKGKGTGKPGALSGSADGQLSVLQPNTINVLAEIANYEACLKEEVEKRKKFKIDDQRRTHNYDEFICTFISMLAQEGMLANLVEQNISVRRRQGVSIGRLHKQRKPDRRKRSRPYKAKRQ

SEQ ID NO: 9516 - protein, 41 aa, Homo sapiens
  Payload ID: 1943;
  Gene Symbol: BAP1;
  Gene Name: BRCA1 associated prt-1 (ubiquitin carboxy-terminal hydrolase);
  ENSP ID: ENSP00000419709
MNKGWLELESDPGLFTLLVEDFGVKGVQVEEIYDLQSKCQG

SEQ ID NO: 9517 - protein, 253 aa, Homo sapiens
  Payload ID: 1943;
  Gene Symbol: BAP1;
  Gene Name: BRCA1 associated prt-1 (ubiquitin carboxy-terminal hydrolase);
  ENSP ID: ENSP00000420647
GSAFNSPLRSPIRSANPTRPSSPVTSHISKVLFGEDDSLLRVDCIRYNRAVRDLGPVISTGLLHLAEDGVLSPLALTEGGKGSSPSIRPIQGSQGSSSPVEKEVVEATDSREKTGMVRPGEPLSGEKYSPKLPIARGALLLARPDQRCNAGFWQELLALLKCVEAEIANYEACLKEEVEKRKKFKIDDQRRTHNYDEFICTFISMLAQEGMLANLVEQNISVRRRQGVSIGRLHKQRKPDRRKRSRPYKAKRQ

SEQ ID NO: 9518 - protein, 162 aa, Homo sapiens
  Payload ID: 1943;
  Gene Symbol: BAP1;
  Gene Name: BRCA1 associated prt-1 (ubiquitin carboxy-terminal hydrolase);
  ENSP ID: ENSP00000482839
MGGTRPHSFHRALRPDTADQPHSAQEAASGVGAQRGTAASSTAGCGAAGPGPSAWAAEYIFYLSETSIFLGSNPTCHHVDISSYLTMLSLLGAVLVGPGPCIMPRSQLQGPSWGPGWALGSGPCCSSPSHQPVPVVRKPGLLSSFLLGECQTQGPSTGLGWE

SEQ ID NO: 9519 - protein, 777 aa, Homo sapiens
  Payload ID: 1944;
  Gene Symbol: BARD1;
  Gene Name: BRCA1 associated RING domain 1;
  Uniprot ID:  Q99728;
  ENSP ID: ENSP00000260947
MPDNRQPRNRQPRIRSGNEPRSAPAMEPDGRGAWAHSRAALDRLEKLLRCSRCTNILREPVCLGGCEHIFCSNCVSDCIGTGCPVCYTPAWIQDLKINRQLDSMIQLCSKLRNLLHDNELSDLKEDKPRKSLFNDAGNKKNSIKMWFSPRSKKVRYVVSKASVQTQPAIKKDASAQQDSYEFVSPSPPADVSERAKKASARSGKKQKKKTLAEINQKWNLEAEKEDGEFDSKEESKQKLVSFCSQPSVISSPQINGEIDLLASGSLTESECFGSLTEVSLPLAEQIESPDTKSRNEVVTPEKVCKNYLTSKKSLPLENNGKRGHHNRLSSPISKRCRTSILSTSGDFVKQTVPSENIPLPECSSPPSCKRKVGGTSGRKNSNMSDEFISLSPGTPPSTLSSSSYRRVMSSPSAMKLLPNMAVKRNHRGETLLHIASIKGDIPSVEYLLQNGSDPNVKDHAGWTPLHEACNHGHLKVVELLLQHKALVNTTGYQNDSPLHDAAKNGHVDIVKLLLSYGASRNAVNIFGLRPVDYTDDESMKSLLLLPEKNESSSASHCSVMNTGQRRDGPLVLIGSGLSSEQQKMLSELAVILKAKKYTEFDSTVTHVVVPGDAVQSTLKCMLGILNGCWILKFEWVKACLRRKVCEQEEKYEIPEGPRRSRLNREQLLPKLFDGCYFYLWGTFKHHPKDNLIKLVTAGGGQILSRKPKPDSDVTQTINTVAYHARPDSDQRFCTQYIIYEDLCNYHPERVRQGKVWKAPSSWFIDCVMSFELLPLDS

SEQ ID NO: 9520 - protein, 216 aa, Homo sapiens
  Payload ID: 1944;
  Gene Symbol: BARD1;
  Gene Name: BRCA1 associated RING domain 1;
  ENSP ID: ENSP00000392245
MPDNRQPRNRQPRIRSGNEPRSAPAMEPDGRGAWAHSRAALDRLEKLLRCSRCTNILREPVCLGGCEHIFCSNIFGLRPVDYTDDESMKSLLLLPEKNESSSASHCSVMNTGQRRDGPLVLIGSGLSSEQQKMLSELAVILKAKKYTEFDSTVTHVVVPGDAVQSTLKCMLGILNGCWILKFEWVKACLRRKVCEQEEKYEIPEGPRRSRLNREQL

SEQ ID NO: 9521 - protein, 44 aa, Homo sapiens
  Payload ID: 1944;
  Gene Symbol: BARD1;
  Gene Name: BRCA1 associated RING domain 1;
  ENSP ID: ENSP00000405020
  MOD_RES (1)..(1): Any amino acid
XVKACLRRKVCEQEEKYEIPEGPRRSRLNREQLHLILKDDHDEQ

SEQ ID NO: 9522 - protein, 76 aa, Homo sapiens
  Payload ID: 1944;
  Gene Symbol: BARD1;
  Gene Name: BRCA1 associated RING domain 1;
  ENSP ID: ENSP00000412186
MPDNRQPRNRQPRIRSGNEPRSAPAMEPDGRGAWAHSRAALDRLEKLLRCSRCTNILREPVCLGGCEHIFCRFERR

SEQ ID NO: 9523 - protein, 758 aa, Homo sapiens
  Payload ID: 1944;
  Gene Symbol: BARD1;
  Gene Name: BRCA1 associated RING domain 1;
  Uniprot ID:  Q99728;
  ENSP ID: ENSP00000480470
MPDNRQPRNRQPRIRSGNEPRSAPAMEPDGRGAWAHSRAALDRLEKLLRCSRCNCVSDCIGTGCPVCYTPAWIQDLKINRQLDSMIQLCSKLRNLLHDNELSDLKEDKPRKSLFNDAGNKKNSIKMWFSPRSKKVRYVVSKASVQTQPAIKKDASAQQDSYEFVSPSPPADVSERAKKASARSGKKQKKKTLAEINQKWNLEAEKEDGEFDSKEESKQKLVSFCSQPSVISSPQINGEIDLLASGSLTESECFGSLTEVSLPLAEQIESPDTKSRNEVVTPEKVCKNYLTSKKSLPLENNGKRGHHNRLSSPISKRCRTSILSTSGDFVKQTVPSENIPLPECSSPPSCKRKVGGTSGRKNSNMSDEFISLSPGTPPSTLSSSSYRRVMSSPSAMKLLPNMAVKRNHRGETLLHIASIKGDIPSVEYLLQNGSDPNVKDHAGWTPLHEACNHGHLKVVELLLQHKALVNTTGYQNDSPLHDAAKNGHVDIVKLLLSYGASRNAVNIFGLRPVDYTDDESMKSLLLLPEKNESSSASHCSVMNTGQRRDGPLVLIGSGLSSEQQKMLSELAVILKAKKYTEFDSTVTHVVVPGDAVQSTLKCMLGILNGCWILKFEWVKACLRRKVCEQEEKYEIPEGPRRSRLNREQLLPKLFDGCYFYLWGTFKHHPKDNLIKLVTAGGGQILSRKPKPDSDVTQTINTVAYHARPDSDQRFCTQYIIYEDLCNYHPERVRQGKVWKAPSSWFIDCVMSFELLPLDS

SEQ ID NO: 9524 - protein, 127 aa, Homo sapiens
  Payload ID: 1944;
  Gene Symbol: BARD1;
  Gene Name: BRCA1 associated RING domain 1;
  Uniprot ID:  Q99728;
  ENSP ID: ENSP00000481988
MPDNRQPRNRQPRIRSGNEPRSAPAMEPDGRGAWAHSRAALDRLEKLLRCSRCTNILREPVCLGGCEHIFCSNCVSDCIGTGCPVCYTPAWIQDLKINRQLDSMIQLCSKLRNLLHDNELSGRHTFC

SEQ ID NO: 9525 - protein, 264 aa, Homo sapiens
  Payload ID: 1944;
  Gene Symbol: BARD1;
  Gene Name: BRCA1 associated RING domain 1;
  ENSP ID: ENSP00000482293
MPDNRQPRNRQPRIRSGNEPRSAPAMEPDGRGAWAHSRAALDRLEKLLRCSRCTNILREPVCLGGCEHIFCSNCVSDCIGTGCPVCYTPAWIQDLKINRQLDSMIQLCSKLRNLLHDNELSGVKACLRRKVCEQEEKYEIPEGPRRSRLNREQLLPKLFDGCYFYLWGTFKHHPKDNLIKLVTAGGGQILSRKPKPDSDVTQTINTVAYHARPDSDQRFCTQYIIYEDLCNYHPERVRQGKVWKAPSSWFIDCVMSFELLPLDS

SEQ ID NO: 9526 - protein, 167 aa, Homo sapiens
  Payload ID: 1944;
  Gene Symbol: BARD1;
  Gene Name: BRCA1 associated RING domain 1;
  ENSP ID: ENSP00000483275
MVAVPGPTVAPRSTAWRSCCAARVGVKACLRRKVCEQEEKYEIPEGPRRSRLNREQLLPKLFDGCYFYLWGTFKHHPKDNLIKLVTAGGGQILSRKPKPDSDVTQTINTVAYHARPDSDQRFCTQYIIYEDLCNYHPERVRQGKVWKAPSSWFIDCVMSFELLPLDS

SEQ ID NO: 9527 - protein, 307 aa, Homo sapiens
  Payload ID: 1944;
  Gene Symbol: BARD1;
  Gene Name: BRCA1 associated RING domain 1;
  ENSP ID: ENSP00000484464
MPDNRQPRNRQPRIRSGNEPRSAPAMEPDGRGAWAHSRAALDRLEKLLRCSRCNIFGLRPVDYTDDESMKSLLLLPEKNESSSASHCSVMNTGQRRDGPLVLIGSGLSSEQQKMLSELAVILKAKKYTEFDSTVTHVVVPGDAVQSTLKCMLGILNGCWILKFEWVKACLRRKVCEQEEKYEIPEGPRRSRLNREQLLPKLFDGCYFYLWGTFKHHPKDNLIKLVTAGGGQILSRKPKPDSDVTQTINTVAYHARPDSDQRFCTQYIIYEDLCNYHPERVRQGKVWKAPSSWFIDCVMSFELLPLDS

SEQ ID NO: 9528 - protein, 326 aa, Homo sapiens
  Payload ID: 1944;
  Gene Symbol: BARD1;
  Gene Name: BRCA1 associated RING domain 1;
  ENSP ID: ENSP00000484976
MPDNRQPRNRQPRIRSGNEPRSAPAMEPDGRGAWAHSRAALDRLEKLLRCSRCTNILREPVCLGGCEHIFCSNIFGLRPVDYTDDESMKSLLLLPEKNESSSASHCSVMNTGQRRDGPLVLIGSGLSSEQQKMLSELAVILKAKKYTEFDSTVTHVVVPGDAVQSTLKCMLGILNGCWILKFEWVKACLRRKVCEQEEKYEIPEGPRRSRLNREQLLPKLFDGCYFYLWGTFKHHPKDNLIKLVTAGGGQILSRKPKPDSDVTQTINTVAYHARPDSDQRFCTQYIIYEDLCNYHPERVRQGKVWKAPSSWFIDCVMSFELLPLDS

SEQ ID NO: 9529 - protein, 1249 aa, Homo sapiens
  Payload ID: 1945;
  Gene Symbol: BRIP1;
  Gene Name: BRCA1 interacting prt C-terminal helicase 1;
  Uniprot ID:  Q9BX63;
  ENSP ID: ENSP00000259008
MSSMWSEYTIGGVKIYFPYKAYPSQLAMMNSILRGLNSKQHCLLESPTGSGKSLALLCSALAWQQSLSGKPADEGVSEKAEVQLSCCCACHSKDFTNNDMNQGTSRHFNYPSTPPSERNGTSSTCQDSPEKTTLAAKLSAKKQASIYRDENDDFQVEKKRIRPLETTQQIRKRHCFGTEVHNLDAKVDSGKTVKLNSPLEKINSFSPQKPPGHCSRCCCSTKQGNSQESSNTIKKDHTGKSKIPKIYFGTRTHKQIAQITRELRRTAYSGVPMTILSSRDHTCVHPEVVGNFNRNEKCMELLDGKNGKSCYFYHGVHKISDQHTLQTFQGMCKAWDIEELVSLGKKLKACPYYTARELIQDADIIFCPYNYLLDAQIRESMDLNLKEQVVILDEAHNIEDCARESASYSVTEVQLRFARDELDSMVNNNIRKKDHEPLRAVCCSLINWLEANAEYLVERDYESACKIWSGNEMLLTLHKMGITTATFPILQGHFSAVLQKEEKISPIYGKEEAREVPVISASTQIMLKGLFMVLDYLFRQNSRFADDYKIAIQQTYSWTNQIDISDKNGLLVLPKNKKRSRQKTAVHVLNFWCLNPAVAFSDINGKVQTIVLTSGTLSPMKSFSSELGVTFTIQLEANHIIKNSQVWVGTIGSGPKGRNLCATFQNTETFEFQDEVGALLLSVCQTVSQGILCFLPSYKLLEKLKERWLSTGLWHNLELVKTVIVEPQGGEKTNFDELLQVYYDAIKYKGEKDGALLVAVCRGKVSEGLDFSDDNARAVITIGIPFPNVKDLQVELKRQYNDHHSKLRGLLPGRQWYEIQAYRALNQALGRCIRHRNDWGALILVDDRFRNNPSRYISGLSKWVRQQIQHHSTFESALESLAEFSKKHQKVLNVSIKDRTNIQDNESTLEVTSLKYSTSPYLLEAASHLSPENFVEDEAKICVQELQCPKIITKNSPLPSSIISRKEKNDPVFLEEAGKAEKIVISRSTSPTFNKQTKRVSWSSFNSLGQYFTGKIPKATPELGSSENSASSPPRFKTEKMESKTVLPFTDKCESSNLTVNTSFGSCPQSETIISSLKIDATLTRKNHSEHPLCSEEALDPDIELSLVSEEDKQSTSNRDFETEAEDESIYFTPELYDPEDTDEEKNDLAETDRGNRLANNSDCILAKDLFEIRTIKEVDSAREVKAEDCIDTKLNGILHIEESKIDDIDGNVKTTWINELELGKTHEIEIKNFKPSPSKNKGMFPGFK

SEQ ID NO: 9530 - protein, 69 aa, Homo sapiens
  Payload ID: 1945;
  Gene Symbol: BRIP1;
  Gene Name: BRCA1 interacting prt C-terminal helicase 1;
  ENSP ID: ENSP00000462274
MSSMWSEYTIGGVKIYFPYKAYPSQLAMMNSILRGLNSKQHCLLESPTGSGKSLALLCSALAWQQSLSG

SEQ ID NO: 9531 - protein, 180 aa, Homo sapiens
  Payload ID: 1945;
  Gene Symbol: BRIP1;
  Gene Name: BRCA1 interacting prt C-terminal helicase 1;
  ENSP ID: ENSP00000463272
  MOD_RES (1)..(1): Any amino acid
XDEVGALLLSVCQTVSQGILCFLPSYKLLEKLKERWLSTGLWHNLELVKTVIVEPQGGEKTNFDELLQVYYDAIKYKGEKDGALLVAVCRGKVSEGLDFSDDNARAVITIGIPFPNVKDLQLTSATAEGTNGYAQSWVSYSKMADAALTTATDETVDIYPRNLLSPSTALVLHSTEVECY

SEQ ID NO: 9532 - protein, 84 aa, Homo sapiens
  Payload ID: 1945;
  Gene Symbol: BRIP1;
  Gene Name: BRCA1 interacting prt C-terminal helicase 1;
  ENSP ID: ENSP00000463827
  MOD_RES (1)..(1): Any amino acid
XIWSGNEMLLTLHKMGITTATFPILQGHFSAVLQKEEKISPIYGKEEAREVPVISASTQIMLKGLFMVLDYLFRQNSRDEISLC

SEQ ID NO: 9533 - protein, 994 aa, Homo sapiens
  Payload ID: 1945;
  Gene Symbol: BRIP1;
  Gene Name: BRCA1 interacting prt C-terminal helicase 1;
  ENSP ID: ENSP00000464654
MSSMWSEYTIGGVKIYFPYKAYPSQLAMMNSILRGLNSKQHCLLESPTGSGKSLALLCSALAWQQSLSGKPADEGVSEKAEVQLSCCCACHSKDFTNNDMNQGTSRHFNYPSTPPSERNGTSSTCQDSPEKTTLAAKLSAKKQASIYRDENDDFQVEKKRIRPLETTQQIRKRHCFGTEVHNLDAKVDSGKTVKLNSPLEKINSFSPQKPPGHCSRCCCSTKQGNSQESSNTIKKDHTGKSKIPKIYFGTRTHKQIAQITRELRRTAYSGVPMTILSSRDHTCVHPEVVGNFNRNEKCMELLDGKNGKSCYFYHGVHKISDQHTLQTFQGMCKAWDIEELVSLGKKLKACPYYTARELIQDADIIFCPYNYLLDAQIRESMDLNLKEQVVILDEAHNIEDCARESASYSVTEVQLRFARDELDSMVNNNIRKKDHEPLRAVCCSLINWLEANAEYLVERDYESACKIWSGNEMLLTLHKMGITTATFPILQGHFSAVLQKEEKISPIYGKEEAREVPVISASTQIMLKGLFMVLDYLFRQNSRFADDYKIAIQQTYSWTNQIDISDKNGLLVLPKNKKRSRQKTAVHVLNFWCLNPAVAFSDINGKVQTIVLTSGTLSPMKSFSSELGVTFTIQLEANHIIKNSQVWVGTIGSGPKGRNLCATFQNTETFEFQDEVGALLLSVCQTVSQGILCFLPSYKLLEKLKERWLSTGLWHNLELVKTVIVEPQGGEKTNFDELLQVYYDAIKYKGEKDGALLVAVCRGKVSEGLDFSDDNARAVITIGIPFPNVKDLQVELKRQYNDHHSKLRGLLPGRQWYEIQAYRALNQALGRCIRHRNDWGALILVDDRFRNNPSRYISGLSKWVRQQIQHHSTFESALESLAEFSKKHQKVLNVSIKDRTNIQDNESTLEVTSLKYSTSPYLLEAASHLSPENFVEDEAKICVQELQCPKIITKNSPLPSSIISRKEKSMKSSSHLPLIEKSFIIFSEMIFIWV

SEQ ID NO: 9534 - protein, 291 aa, Homo sapiens
  Payload ID: 1946;
  Gene Symbol: BRCC3;
  Gene Name: BRCA1/BRCA2-containing complex, subunit 3;
  Uniprot ID:  P46736;
  ENSP ID: ENSP00000328641
MAVQVVQAVQAVHLESDAFLVCLNHALSTEKEEVMGLCIGELNDDTRSDSKFAYTGTEMRTVAEKVDAVRIVHIHSVIILRRSDKRKDRVEISPEQLSAASTEAERLAELTGRPMRVVGWYHSHPHITVWPSHVDVRTQAMYQMMDQGFVGLIFSCFIEDKNTKTGRVLYTCFQSIQAQKSSEYERIEIPIHIVPHVTIGKVCLESAVELPKILCQEEQDAYRRIHSLTHLDSVTKIHNGSVFTKNLCSQMSAVSGPLLQWLEDRLEQNQQHLQELQQEKEELMQELSSLE

SEQ ID NO: 9535 - protein, 292 aa, Homo sapiens
  Payload ID: 1946;
  Gene Symbol: BRCC3;
  Gene Name: BRCA1/BRCA2-containing complex, subunit 3;
  Uniprot ID:  P46736;
  ENSP ID: ENSP00000344103
MAVQVVQAVQAVHLESDAFLVCLNHALSTEKEEVMGLCIGELNDDTSRSDSKFAYTGTEMRTVAEKVDAVRIVHIHSVIILRRSDKRKDRVEISPEQLSAASTEAERLAELTGRPMRVVGWYHSHPHITVWPSHVDVRTQAMYQMMDQGFVGLIFSCFIEDKNTKTGRVLYTCFQSIQAQKSSEYERIEIPIHIVPHVTIGKVCLESAVELPKILCQEEQDAYRRIHSLTHLDSVTKIHNGSVFTKNLCSQMSAVSGPLLQWLEDRLEQNQQHLQELQQEKEELMQELSSLE

SEQ ID NO: 9536 - protein, 247 aa, Homo sapiens
  Payload ID: 1946;
  Gene Symbol: BRCC3;
  Gene Name: BRCA1/BRCA2-containing complex, subunit 3;
  Uniprot ID:  P46736;
  ENSP ID: ENSP00000358471
MAVQVVQAVQAVHLESDAFLVCLNHALSTEKEEVMGLCIGELNDDTRSDSKFAYTGTEMRTVAEKVDAVRIVHIHSVIILRRSDKRKDRVEISPEQLSAASTEAERLAELTGRPMRVVGWYHSHPHITVWPSHVDVRTQAMYQMMDQGFVGLIFSCFIEDKNTKTGRVLYTCFQSIQAQKSSDLTHLDSVTKIHNGSVFTKNLCSQMSAVSGPLLQWLEDRLEQNQQHLQELQQEKEELMQELSSLE

SEQ ID NO: 9537 - protein, 316 aa, Homo sapiens
  Payload ID: 1946;
  Gene Symbol: BRCC3;
  Gene Name: BRCA1/BRCA2-containing complex, subunit 3;
  Uniprot ID:  P46736;
  ENSP ID: ENSP00000358474
MAVQVVQAVQAVHLESDAFLVCLNHALSTEKEEVMGLCIGELNDDTRSDSKFAYTGTEMRTVAEKVDAVRIVHIHSVIILRRSDKRKDRVEISPEQLSAASTEAERLAELTGRPMRVVGWYHSHPHITVWPSHVDVRTQAMYQMMDQGFVGLIFSCFIEDKNTKTGRVLYTCFQSIQAQKSSESLHGPRDFWSSSQHISIEGQKEEERYERIEIPIHIVPHVTIGKVCLESAVELPKILCQEEQDAYRRIHSLTHLDSVTKIHNGSVFTKNLCSQMSAVSGPLLQWLEDRLEQNQQHLQELQQEKEELMQELSSLE

SEQ ID NO: 9538 - protein, 90 aa, Homo sapiens
  Payload ID: 1946;
  Gene Symbol: BRCC3;
  Gene Name: BRCA1/BRCA2-containing complex, subunit 3;
  ENSP ID: ENSP00000381988
MRTVAEKVDAVRIVHIHSVIILRRSDKRKDRVEISPEQLSAASTEAERLAELTGRPMRVVGWYHSHPHITVWPSHVGKYHGVAMFIVFRN

SEQ ID NO: 9539 - protein, 317 aa, Homo sapiens [sequence omitted]

SEQ ID NO: 9540 - protein, 226 aa, Homo sapiens
  Payload ID: 1946;
  Gene Symbol: BRCC3;
  Gene Name: BRCA1/BRCA2-containing complex, subunit 3;
  ENSP ID: ENSP00000413170
MAVQVVQAVQAVHLESDAFLVCLNHALSTEKEEVMGLCIGEVDAVRIVHIHSVIILRRSDKRKDRVEISPEQLSAASTEAERLAELTGRPMRVVGWYHSHPHITVWPSHVDVRTQAMYQMMDQGFVGLIFSCFIEDKNTKTGRVLYTCFQSIQAQKSSESLHGPRDFWSSSQHISIEGQKEEERYERIEIPIHIVPHVTIGKVCLESAVELPKILCQEEQDAYRRI

SEQ ID NO: 9541 - protein, 85 aa, Homo sapiens
  Payload ID: 1946;
  Gene Symbol: BRCC3;
  Gene Name: BRCA1/BRCA2-containing complex, subunit 3;
  ENSP ID: ENSP00000415152
  MOD_RES (1)..(1): Any amino acid
XVQVVQAVQAVHLESDAFLVCLNHALSTEKEEVMGLCIGEVIGVTPNLHILELKCAQLLKRLMPSELFTFILSSSYDVLIRGRTE

SEQ ID NO: 9542 - protein, 293 aa, Homo sapiens [sequence omitted]

SEQ ID NO: 9543 - protein, 317 aa, Homo sapiens [sequence omitted]

SEQ ID NO: 9544 - protein, 821 aa, Homo sapiens
  Payload ID: 1947;
  Gene Symbol: BRAT1;
  Gene Name: BRCA1-associated ATM activator 1;
  Uniprot ID:  Q6PJG6;
  ENSP ID: ENSP00000339637
MDPECAQLLPALCAVLVDPRQPVADDTCLEKLLDWFKTVTEGESSVVLLQEHPCLVELLSHVLKVQDLSSGVLSFSLRLAGTFAAQENCFQYLQQGELLPGLFGEPGPLGRATWAVPTVRSGWIQGLRSLAQHPSALRFLADHGAVDTIFSLQGDSSLFVASAASQLLVHVLALSMRGGAEGQPCLPGGDWPACAQKIMDHVEESLCSAATPKVTQALNVLTTTFGRCQSPWTEALWVRLSPRVACLLERDPIPAAHSFVDLLLCVARSPVFSSSDGSLWETVARALSCLGPTHMGPLALGILKLEHCPQALRTQAFQVLLQPLACVLKATVQAPGPPGLLDGTADDATTVDTLLASKSSCAGLLCRTLAHLEELQPLPQRPSPWPQASLLGATVTVLRLCDGSAAPASSVGGHLCGTLAGCVRVQRAALDFLGTLSQGTGPQELVTQALAVLLECLESPGSSPTVLKKAFQATLRWLLSSPKTPGCSDLGPLIPQFLRELFPVLQKRLCHPCWEVRDSALEFLTQLSRHWGGQADFRCALLASEVPQLALQLLQDPESYVRASAVTAMGQLSSQGLHAPTSPEHAEARQSLFLELLHILSVDSEGFPRRAVMQVFTEWLRDGHADAAQDTEQFVATVLQAASRDLDWEVRAQGLELALVFLGQTLGPPRTHCPYAVALPEVAPAQPLTEALRALCHVGLFDFAFCALFDCDRPVAQKSCDLLLFLRDKIASYSSLREARGSPNTASAEATLPRWRAGEQAQPPGDQEPEAVLAMLRSLDLEGLRSTLAESSDHVEKSPQSLLQDMLATGGFLQGDEADCY

SEQ ID NO: 9545 - protein, 168 aa, Homo sapiens
  Payload ID: 1947;
  Gene Symbol: BRAT1;
  Gene Name: BRCA1-associated ATM activator 1;
  ENSP ID: ENSP00000409209
MDPECAQLLPALCAVLVDPRQPVADDTCLEKLLDWFKTVTEGESSVVLLQEHPCLVELLSHVLKVQDLSSGVLSFSLRLAGTFAAQENCFQYLQVRSTPSSPCRETPACLWPRRPVSSWCTSWLCPCEVEPRGSPACRGVTGPRVPRRSWITLKSPCAPRPPPRSLRP

SEQ ID NO: 9546 - protein, 314 aa, Homo sapiens
  Payload ID: 1948;
  Gene Symbol: BCCIP;
  Gene Name: BRCA2 and CDKN1A interacting prt;
  Uniprot ID:  Q9P287;
  ENSP ID: ENSP00000278100
MASRSKRRAVESGVPQPPDPPVQRDEEEEKEVENEDEDDDDSDKEKDEEDEVIDEEVNIEFEAYSLSDNDYDGIKKLLQQLFLKAPVNTAELTDLLIQQNHIGSVIKQTDVSEDSNDDMDEDEVFGFISLLNLTERKGTQCVEQIQELVLRFCEKNCEKSMVEQLDKFLNDTTKPVGLLLSERFINVPPQIALPMYQQLQKELAGAHRTNKPCGKCYFYLLISKTFVEAGKNNSKKKPSNKKKAALMFANAEEEFFYEKAILKFNYSVQEESDTCLGGKWSFDDVPMTPLRTVMLIPGDKMNEIMDKLKEYLSV

SEQ ID NO: 9547 - protein, 292 aa, Homo sapiens
  Payload ID: 1948;
  Gene Symbol: BCCIP;
  Gene Name: BRCA2 and CDKN1A interacting prt;
  Uniprot ID:  Q9P287;
  ENSP ID: ENSP00000299130
MASRSKRRAVESGVPQPPDPPVQRDEEEEKEVENEDEDDDDSDKEKDEEDEVIDEEVNIEFEAYSLSDNDYDGIKKLLQQLFLKAPVNTAELTDLLIQQNHIGSVIKQTDVSEDSNDDMDEDEVFGFISLLNLTERKGTQCVEQIQELVLRFCEKNCEKSMVEQLDKFLNDTTKPVGLLLSERFINVPPQIALPMYQQLQKELAGAHRTNKPCGKCYFYLLISKTFVEAGKNNSKKKPSNKKKAALMFANAEEEFFYEEQGKPEVLGGPDTRRGLEPVPIQHNGWSVPPVLE

SEQ ID NO: 9548 - protein, 322 aa, Homo sapiens
  Payload ID: 1948;
  Gene Symbol: BCCIP;
  Gene Name: BRCA2 and CDKN1A interacting prt;
  Uniprot ID:  Q9P287;
  ENSP ID: ENSP00000357748
MASRSKRRAVESGVPQPPDPPVQRDEEEEKEVENEDEDDDDSDKEKDEEDEVIDEEVNIEFEAYSLSDNDYDGIKKLLQQLFLKAPVNTAELTDLLIQQNHIGSVIKQTDVSEDSNDDMDEDEVFGFISLLNLTERKGTQCVEQIQELVLRFCEKNCEKSMVEQLDKFLNDTTKPVGLLLSERFINVPPQIALPMYQQLQKELAGAHRTNKPCGKCYFYLLISKTFVEAGKNNSKKKPSNKKKAALMFANAEEEFFYEEQGKPEVLGGPDTRRGLEPVPIQHNGGSRGQVTALVSLKAGLIQSRSTLSDFQGTFMTVGIALS

SEQ ID NO: 9549 - protein, 1271 aa, Homo sapiens
  Payload ID: 1949;
  Gene Symbol: BCR;
  Gene Name: breakpoint cluster region;
  Uniprot ID:  P11274;
  ENSP ID: ENSP00000303507
MVDPVGFAEAWKAQFPDSEPPRMELRSVGDIEQELERCKASIRRLEQEVNQERFRMIYLQTLLAKEKKSYDRQRWGFRRAAQAPDGASEPRASASRPQPAPADGADPPPAEEPEARPDGEGSPGKARPGTARRPGAAASGERDDRGPPASVAALRSNFERIRKGHGQPGADAEKPFYVNVEFHHERGLVKVNDKEVSDRISSLGSQAMQMERKKSQHGAGSSVGDASRPPYRGRSSESSCGVDGDYEDAELNPRFLKDNLIDANGGSRPPWPPLEYQPYQSIYVGGMMEGEGKGPLLRSQSTSEQEKRLTWPRRSYSPRSFEDCGGGYTPDCSSNENLTSSEEDFSSGQSSRVSPSPTTYRMFRDKSRSPSQNSQQSFDSSSPPTPQCHKRHRHCPVVVSEATIVGVRKTGQIWPNDGEGAFHGDADGSFGTPPGYGCAADRAEEQRRHQDGLPYIDDSPSSSPHLSSKGRGSRDALVSGALESTKASELDLEKGLEMRKWVLSGILASEETYLSHLEALLLPMKPLKAAATTSQPVLTSQQIETIFFKVPELYEIHKEFYDGLFPRVQQWSHQQRVGDLFQKLASQLGVYRAFVDNYGVAMEMAEKCCQANAQFAEISENLRARSNKDAKDPTTKNSLETLLYKPVDRVTRSTLVLHDLLKHTPASHPDHPLLQDALRISQNFLSSINEEITPRRQSMTVKKGEHRQLLKDSFMVELVEGARKLRHVFLFTDLLLCTKLKKQSGGKTQQYDCKWYIPLTDLSFQMVDELEAVPNIPLVPDEELDALKIKISQIKNDIQREKRANKGSKATERLKKKLSEQESLLLLMSPSMAFRVHSRNGKSYTFLISSDYERAEWRENIREQQKKCFRSFSLTSVELQMLTNSCVKLQTVHSIPLTINKEDDESPGLYGFLNVIVHSATGFKQSSNLYCTLEVDSFGYFVNKAKTRVYRDTAEPNWNEEFEIELEGSQTLRILCYEKCYNKTKIPKEDGESTDRLMGKGQVQLDPQALQDRDWQRTVIAMNGIEVKLSVKFNSREFSLKRMPSRKQTGVFGVKIAVVTKRERSKVPYIVRQCVEEIERRGMEEVGIYRVSGVATDIQALKAAFDVNNKDVSVMMSEMDVNAIAGTLKLYFRELPEPLFTDEFYPNFAEGIALSDPVAKESCMLNLLLSLPEANLLTFLFLLDHLKRVAEKEAVNKMSLHNLATVFGPTLLRPSEKESKLPANPSQPITMTDSWSLEVMSQVQVLLYFLQLEAIPAPDSKRQSILFSTEV

SEQ ID NO: 9550 - protein, 1227 aa, Homo sapiens
  Payload ID: 1949;
  Gene Symbol: BCR;
  Gene Name: breakpoint cluster region;
  Uniprot ID:  P11274;
  ENSP ID: ENSP00000352535
MVDPVGFAEAWKAQFPDSEPPRMELRSVGDIEQELERCKASIRRLEQEVNQERFRMIYLQTLLAKEKKSYDRQRWGFRRAAQAPDGASEPRASASRPQPAPADGADPPPAEEPEARPDGEGSPGKARPGTARRPGAAASGERDDRGPPASVAALRSNFERIRKGHGQPGADAEKPFYVNVEFHHERGLVKVNDKEVSDRISSLGSQAMQMERKKSQHGAGSSVGDASRPPYRGRSSESSCGVDGDYEDAELNPRFLKDNLIDANGGSRPPWPPLEYQPYQSIYVGGMMEGEGKGPLLRSQSTSEQEKRLTWPRRSYSPRSFEDCGGGYTPDCSSNENLTSSEEDFSSGQSSRVSPSPTTYRMFRDKSRSPSQNSQQSFDSSSPPTPQCHKRHRHCPVVVSEATIVGVRKTGQIWPNDGEGAFHGDADGSFGTPPGYGCAADRAEEQRRHQDGLPYIDDSPSSSPHLSSKGRGSRDALVSGALESTKASELDLEKGLEMRKWVLSGILASEETYLSHLEALLLPMKPLKAAATTSQPVLTSQQIETIFFKVPELYEIHKEFYDGLFPRVQQWSHQQRVGDLFQKLASQLGVYRAFVDNYGVAMEMAEKCCQANAQFAEISENLRARSNKDAKDPTTKNSLETLLYKPVDRVTRSTLVLHDLLKHTPASHPDHPLLQDALRISQNFLSSINEEITPRRQSMTVKKGEHRQLLKDSFMVELVEGARKLRHVFLFTDLLLCTKLKKQSGGKTQQYDCKWYIPLTDLSFQMVDELEAVPNIPLVPDEELDALKIKISQIKNDIQREKRANKGSKATERLKKKLSEQESLLLLMSPSMAFRVHSRNGKSYTFLISSDYERAEWRENIREQQKKCFRSFSLTSVELQMLTNSCVKLQTVHSIPLTINKEDDESPGLYGFLNVIVHSATGFKQSSNLYCTLEVDSFGYFVNKAKTRVYRDTAEPNWNELDPQALQDRDWQRTVIAMNGIEVKLSVKFNSREFSLKRMPSRKQTGVFGVKIAVVTKRERSKVPYIVRQCVEEIERRGMEEVGIYRVSGVATDIQALKAAFDVNNKDVSVMMSEMDVNAIAGTLKLYFRELPEPLFTDEFYPNFAEGIALSDPVAKESCMLNLLLSLPEANLLTFLFLLDHLKRVAEKEAVNKMSLHNLATVFGPTLLRPSEKESKLPANPSQPITMTDSWSLEVMSQVQVLLYFLQLEAIPAPDSKRQSILFSTEV

SEQ ID NO: 9551 - protein, 465 aa, Homo sapiens
  Payload ID: 1949;
  Gene Symbol: BCR;
  Gene Name: breakpoint cluster region;
  ENSP ID: ENSP00000381524
MVDPVGFAEAWKAQFPDSEPPRMELRSVGDIEQELERCKASIRRLEQEVNQERFRMIYLQTLLAKEKKSYDRQRWGFRRAAQAPDGASEPRASASRPQPAPADGADPPPAEEPEARPDGEGSPGKARPGTARRPGAAASGERDDRGPPASVAALRSNFERIRKGHGQPGADAEKPFYVNVEFHHERGLVKVNDKEVSDRISSLGSQAMQMERKKSQHGAGSSVGDASRPPYRGRSSESSCGVDGDYEDAELNPRFLKDNLIDANGGSRPPWPPLEYQPYQSIYVGGMMEGEGKGPLLRSQSTSEQEKRLTWPRRSYSPRSFEDCGGGYTPDCSSNENLTSSEEDFSSGQSSRVSPSPTTYRMFRDKSRSPSQNSQQSFDSSSPPTPQCHKRHRHCPVVVSEATIVGVRKTGQIWPNDGEGAFHGEHPGAAEEVFQKLLPDIRGAADADQLVCETPDCPQHSADHQ

SEQ ID NO: 9552 - protein, 257 aa, Homo sapiens
  Payload ID: 1949;
  Gene Symbol: BCR;
  Gene Name: breakpoint cluster region;
  ENSP ID: ENSP00000396531
ALESTKASELDLEKGLEMRKWVLSGILASEETYLSHLEALLLPMKPLKAAATTSQPVLTSQQIETIFFKVPELYEIHKEFYDGLFPRVQQWSHQQRVGDLFQKLNLRARSNKDAKDPTTKNSLETLLYKPVDRVTRSTLVLHDLLKHTPASHPDHPLLQDALRISQNFLSSINEEITPRRQSMTVKKGEHRQLLKDSFMVELVEGARKLRHVFLFTDLLLCTKLKKQSGGKTQQYDCKWYIPLTDLSFQMVDELEAV

SEQ ID NO: 9553 - protein, 721 aa, Homo sapiens
  Payload ID: 1950;
  Gene Symbol: BRCA1;
  Gene Name: breast cancer 1, early onset;
  Uniprot ID:  P38398;
  ENSP ID: ENSP00000312236
MDLSALRVEEVQNVINAMQKILECPICLELIKEPVSTKCDHIFCKFCMLKLLNQKKGPSQCPLCKNDITKRSLQESTRFSQLVEELLKIICAFQLDTGLEYANSYNFAKKENNSPEHLKDEVSIIQSMGYRNRAKRLLQSEPENPSLQETSLSVQLSNLGTVRTLRTKQRIQPQKTSVYIELGSDSSEDTVNKATYCSVGDQELLQITPQGTRDEISLDSAKKGEAASGCESETSVSEDCSGLSSQSDILTTQQRDTMQHNLIKLQQEMAELEAVLEQHGSQPSNSYPSIISDSSALEDLRNPEQSTSEKAVLTSQKSSEYPISQNPEGLSADKFEVSADSSTSKNKEPGVERSSPSKCPSLDDRWYMHSCSGSLQNRNYPSQEELIKVVDVEEQQLEESGPHDLTETSYLPRQDLEGTPYLESGISLFSDDPESDPSEDRAPESARVGNIPSSTSALKVPQLKVAESAQSPAAAHTTDTAGYNAMEESVSREKPELTASTERVNKRMSMVVSGLTPEEFMLVYKFARKHHITLTNLITEETTHVVMKTDAEFVCERTLKYFLGIAGGKWVVSYFWVTQSIKERKMLNEHDFEVRGDVVNGRNHQGPKRARESQDRKIFRGLEICCYGPFTNMPTDQLEWMVQLCGASVVKELSSFTLGTGVHPIVVVQPDAWTEDNGFHAIGQMCEAPVVTREWVLDSVALYQCQELDTYLIPQIPHSHY

SEQ ID NO: 9554 - protein, 1399 aa, Homo sapiens
  Payload ID: 1950;
  Gene Symbol: BRCA1;
  Gene Name: breast cancer 1, early onset;
  ENSP ID: ENSP00000326002
MDLSALRVEEVQNVINAMQKILECPICLELIKEPVSTKCDHIFCKFCMLKLLNQKKGPSQCPLCKNDITKRSLQESTRFSQLVEELLKIICAFQLDTGLEYANSYNFAKKENNSPEHLKDEVSIIQSMGYRNRAKRLLQSEPENPSLQETSLSVQLSNLGTVRTLRTKQRIQPQKTSVYIELGSDSSEDTVNKATYCSVGDQELLQITPQGTRDEISLDSAKKAACEFSETDVTNTEHHQPSNNDLNTTEKRAAERHPEKYQGSSVSNLHVEPCGTNTHASSLQHENSSLLLTKDRMNVEKAEFCNKSKQPGLARSQHNRWAGSKETCNDRRTPSTEKKVDLNADPLCERKEWNKQKLPCSENPRDTEDVPWITLNSSIQKVNEWFSRSDELLGSDDSHDGESESNAKVADVLDVLNEVDEYSGSSEKIDLLASDPHEALICKSERVHSKSVESNIEDKIFGKTYRKKASLPNLSHVTENLIIGAFVTEPQIIQERPLTNKLKRKRRPTSGLHPEDFIKKADLAVQKTPEMINQGTNQTEQNGQVMNITNSGHENKTKGDSIQNEKNPNPIESLEKESAFKTKAEPISSSISNMELELNIHNSKAPKKNRLRRKSSTRHIHALELVVSRNLSPPNCTELQIDSCSSSEEIKKKKYNQMPVRHSRNLQLMEGKEPATGAKKSNKPNEQTSKRHDSDTFPELKLTNAPGSFTKCSNTSELKEFVNPSLPREEKEEKLETVKVSNNAEDPKDLMLSGERVLQTERSVESSSISLVPGTDYGTQESISLLEVSTLGKAKTEPNKCVSQCAAFENPKGLIHGCSKDNRNDTEGFKYPLGHEVNHSRETSIEMEESELDAQYLQNTFKVSKRQSFAPFSNPGNAEEECATFSAHSGSLKKQSPKVTFECEQKEENQGKNESNIKPVQTVNITAGFPVVGQKDKPVDNAKCSIKGGSRFCLSSQFRGNETGLITPNKHGLLQNPYRIPPLFPIKSFVKTKCKKNLLEENFEEHSMSPEREMGNENIPSTVSTISRNNIRENVFKEASSSNINEVGSSTNEVGSSINEIGSSDENIQAELGRNRGPKLNAMLRLGVLQPEVYKQSLPGSNCKHPEIKKQEYEEVVQTVNTDFSPYLISDNLEQPMGSSHASQVCSETPDDLLDDGEIKEDTSFAENDIKESSAVFSKSVQKGELSRSPSPFTHTHLAQGYRRGAKKLESSEENLSSEDEELPCFQHLLFGKVNNIPSQSTRHSTVATECLSKNTEENLLSLKNSLNDCSNQVILAKASQEHHLSEETKCSASLFSSQCSELEDLTANTNTQDPFLIGSSKQMRHQSESQGVGLSDKELVSDDEERGTGLEENNQEEQSMDSNLGIGTRFLCLPQSIYRSELNVYAFGEHILQISKYS

SEQ ID NO: 9555 - protein, 1863 aa, Homo sapiens
  Payload ID: 1950;
  Gene Symbol: BRCA1;
  Gene Name: breast cancer 1, early onset;
  Uniprot ID:  P38398;
  ENSP ID: ENSP00000350283
MDLSALRVEEVQNVINAMQKILECPICLELIKEPVSTKCDHIFCKFCMLKLLNQKKGPSQCPLCKNDITKRSLQESTRFSQLVEELLKIICAFQLDTGLEYANSYNFAKKENNSPEHLKDEVSIIQSMGYRNRAKRLLQSEPENPSLQETSLSVQLSNLGTVRTLRTKQRIQPQKTSVYIELGSDSSEDTVNKATYCSVGDQELLQITPQGTRDEISLDSAKKAACEFSETDVTNTEHHQPSNNDLNTTEKRAAERHPEKYQGSSVSNLHVEPCGTNTHASSLQHENSSLLLTKDRMNVEKAEFCNKSKQPGLARSQHNRWAGSKETCNDRRTPSTEKKVDLNADPLCERKEWNKQKLPCSENPRDTEDVPWITLNSSIQKVNEWFSRSDELLGSDDSHDGESESNAKVADVLDVLNEVDEYSGSSEKIDLLASDPHEALICKSERVHSKSVESNIEDKIFGKTYRKKASLPNLSHVTENLIIGAFVTEPQIIQERPLTNKLKRKRRPTSGLHPEDFIKKADLAVQKTPEMINQGTNQTEQNGQVMNITNSGHENKTKGDSIQNEKNPNPIESLEKESAFKTKAEPISSSISNMELELNIHNSKAPKKNRLRRKSSTRHIHALELVVSRNLSPPNCTELQIDSCSSSEEIKKKKYNQMPVRHSRNLQLMEGKEPATGAKKSNKPNEQTSKRHDSDTFPELKLTNAPGSFTKCSNTSELKEFVNPSLPREEKEEKLETVKVSNNAEDPKDLMLSGERVLQTERSVESSSISLVPGTDYGTQESISLLEVSTLGKAKTEPNKCVSQCAAFENPKGLIHGCSKDNRNDTEGFKYPLGHEVNHSRETSIEMEESELDAQYLQNTFKVSKRQSFAPFSNPGNAEEECATFSAHSGSLKKQSPKVTFECEQKEENQGKNESNIKPVQTVNITAGFPVVGQKDKPVDNAKCSIKGGSRFCLSSQFRGNETGLITPNKHGLLQNPYRIPPLFPIKSFVKTKCKKNLLEENFEEHSMSPEREMGNENIPSTVSTISRNNIRENVFKEASSSNINEVGSSTNEVGSSINEIGSSDENIQAELGRNRGPKLNAMLRLGVLQPEVYKQSLPGSNCKHPEIKKQEYEEVVQTVNTDFSPYLISDNLEQPMGSSHASQVCSETPDDLLDDGEIKEDTSFAENDIKESSAVFSKSVQKGELSRSPSPFTHTHLAQGYRRGAKKLESSEENLSSEDEELPCFQHLLFGKVNNIPSQSTRHSTVATECLSKNTEENLLSLKNSLNDCSNQVILAKASQEHHLSEETKCSASLFSSQCSELEDLTANTNTQDPFLIGSSKQMRHQSESQGVGLSDKELVSDDEERGTGLEENNQEEQSMDSNLGEAASGCESETSVSEDCSGLSSQSDILTTQQRDTMQHNLIKLQQEMAELEAVLEQHGSQPSNSYPSIISDSSALEDLRNPEQSTSEKAVLTSQKSSEYPISQNPEGLSADKFEVSADSSTSKNKEPGVERSSPSKCPSLDDRWYMHSCSGSLQNRNYPSQEELIKVVDVEEQQLEESGPHDLTETSYLPRQDLEGTPYLESGISLFSDDPESDPSEDRAPESARVGNIPSSTSALKVPQLKVAESAQSPAAAHTTDTAGYNAMEESVSREKPELTASTERVNKRMSMVVSGLTPEEFMLVYKFARKHHITLTNLITEETTHVVMKTDAEFVCERTLKYFLGIAGGKWVVSYFWVTQSIKERKMLNEHDFEVRGDVVNGRNHQGPKRARESQDRKIFRGLEICCYGPFTNMPTDQLEWMVQLCGASVVKELSSFTLGTGVHPIVVVQPDAWTEDNGFHAIGQMCEAPVVTREWVLDSVALYQCQELDTYLIPQIPHSHY

SEQ ID NO: 9556 - protein, 437 aa, Homo sapiens
  Payload ID: 1950;
  Gene Symbol: BRCA1;
  Gene Name: breast cancer 1, early onset;
  ENSP ID: ENSP00000397145
  MOD_RES (1)..(1): Any amino acid
XLDSAKKAACEFSETDVTNTEHHQPSNNDLNTTEKRAAERHPEKYQGSSVSNLHVEPCGTNTHASSLQHENSSLLLTKDRMNVEKAEFCNKSKQPGLARSQHNRWAGSKETCNDRRTPSTEKKVDLNADPLCERKEWNKQKLPCSENPRDTEDVPWITLNSSIQKVNEWFSRSDELLGSDDSHDGESESNAKVADVLDVLNEVDEYSGSSEKIDLLASDPHEALICKSERVHSKSVESNIEDKIFGKTYRKKASLPNLSHVTENLIIGAFVTEPQIIQERPLTNKLKRKRRPTSGLHPEDFIKKADLAVQKTPEMINQGTNQTEQNGQVMNITNSGHENKTKGDSIQNEKNPNPIESLEKESAFKTKAEPISSSISNMELELNIHNSKAPKKNRLRRKSSTRHIHALELVVSRNLSPPNCTELQIDSCSSSEEIKKK

SEQ ID NO: 9557 - protein, 699 aa, Homo sapiens
  Payload ID: 1950;
  Gene Symbol: BRCA1;
  Gene Name: breast cancer 1, early onset;
  Uniprot ID:  P38398;
  ENSP ID: ENSP00000417148
MDLSALRVEEVQNVINAMQKILECPICLELIKEPVSTKCDHIFCKFCMLKLLNQKKGPSQCPLCKNDITKRSLQESTRFSQLVEELLKIICAFQLDTGLEYANSYNFAKKENNSPEHLKDEVSIIQSMGYRNRAKRLLQSEPENPSLQETSLSVQLSNLGTVRTLRTKQRIQPQKTSVYIELGSDSSEDTVNKATYCSVGDQELLQITPQGTRDEISLDSAKKAACEFSETDVTNTEHHQPSNNDLNTTEKRAAERHPEKYQGEAASGCESETSVSEDCSGLSSQSDILTTQQRDTMQHNLIKLQQEMAELEAVLEQHGSQPSNSYPSIISDSSALEDLRNPEQSTSEKVLTSQKSSEYPISQNPEGLSADKFEVSADSSTSKNKEPGVERSSPSKCPSLDDRWYMHSCSGSLQNRNYPSQEELIKVVDVEEQQLEESGPHDLTETSYLPRQDLEGTPYLESGISLFSDDPESDPSEDRAPESARVGNIPSSTSALKVPQLKVAESAQSPAAAHTTDTAGYNAMEESVSREKPELTASTERVNKRMSMVVSGLTPEEFMLVYKFARKHHITLTNLITEETTHVVMKTDAEFVCERTLKYFLGIAGGKWVVSYFWVTQSIKERKMLNEHDFEVRGDVVNGRNHQGPKRARESQDRKIFRGLEICCYGPFTNMPTGCPPNCGCAARCLDRGQWLPCNWADV

SEQ ID NO: 9558 - protein, 242 aa, Homo sapiens
  Payload ID: 1950;
  Gene Symbol: BRCA1;
  Gene Name: breast cancer 1, early onset;
  ENSP ID: ENSP00000417241
  MOD_RES (1)..(1): Any amino acid
XIPSQSTRHSTVATECLSKNTEENLLSLKNSLNDCSNQVILAKASQEHHLSEETKCSASLFSSQCSELEDLTANTNTQDPFLIGSSKQMRHQSESQGVGLSDKELVSDDEERGTGLEENNQEEQSMDSNLGEAASGCESETSVSEDCSGLSSQSDILTTQQRDTMQHNLIKLQQEMAELEAVLEQHGSQPSNSYPSIISDSSALEDLRNPEQSTSEKVLTSQKSSEYPISQNPEGLSADKFE

SEQ ID NO: 9559 - protein, 222 aa, Homo sapiens
  Payload ID: 1950;
  Gene Symbol: BRCA1;
  Gene Name: breast cancer 1, early onset;
  ENSP ID: ENSP00000417554
MDLSALRVEEVQNVINAMQKILECPICLELIKEPVSTKCDHIFCKFCMLKLLNQKKGPSQCPLCKNDITKRSLQESTRFSQLVEELLKIICAFQLDTGLEYANSYNFAKKENNSPEHLKDEVSIIQSMGYRNRAKRLLQSEPENPSLETSLSVQLSNLGTVRTLRTKQRIQPQKTSVYIELGSDSSEDTVNKATYCSVGDQELLQITPQGTRDEISLDSAKK

SEQ ID NO: 9560 - protein, 63 aa, Homo sapiens
  Payload ID: 1950;
  Gene Symbol: BRCA1;
  Gene Name: breast cancer 1, early onset;
  Uniprot ID:  P38398;
  ENSP ID: ENSP00000417988
MDLSALRVEEVQNVINAMQKILECPICLELIKEPVSTKCDHIFCKFCMLKLLNQKKGPSQCPL

SEQ ID NO: 9561 - protein, 266 aa, Homo sapiens
  Payload ID: 1950;
  Gene Symbol: BRCA1;
  Gene Name: breast cancer 1, early onset;
  ENSP ID: ENSP00000418212
ELLKIICAFQLDTGLEYANSYNFAKKENNSPEHLKDEVSIIQSMGYRNRAKRLLQSEPENPSLQETSLSVQLSNLGTVRTLRTKQRIQPQKTSVYIELAACEFSETDVTNTEHHQPSNNDLNTTEKRAAERHPEKYQGEAASGCESETSVSEDCSGLSSQSDILTTQQRDTMQHNLIKLQQEMAELEAVLEQHGSQPSNSYPSIISDSSALEDLRNPEQSTSEKAVLTSQKSSEYPISQNPEGLSADKFEVSADSSTSKNKEPGVE

SEQ ID NO: 9562 - protein, 63 aa, Homo sapiens; identical to SEQ ID NO: 9560
  Payload ID: 1950;
  Gene Symbol: BRCA1;
  Gene Name: breast cancer 1, early onset;
  Uniprot ID:  P38398;
  ENSP ID: ENSP00000418548

SEQ ID NO: 9563 - protein, 1816 aa, Homo sapiens
  Payload ID: 1950;
  Gene Symbol: BRCA1;
  Gene Name: breast cancer 1, early onset;
  Uniprot ID:  P38398;
  ENSP ID: ENSP00000418775
MLKLLNQKKGPSQCPLCKNDITKRSLQESTRFSQLVEELLKIICAFQLDTGLEYANSYNFAKKENNSPEHLKDEVSIIQSMGYRNRAKRLLQSEPENPSLQETSLSVQLSNLGTVRTLRTKQRIQPQKTSVYIELGSDSSEDTVNKATYCSVGDQELLQITPQGTRDEISLDSAKKAACEFSETDVTNTEHHQPSNNDLNTTEKRAAERHPEKYQGSSVSNLHVEPCGTNTHASSLQHENSSLLLTKDRMNVEKAEFCNKSKQPGLARSQHNRWAGSKETCNDRRTPSTEKKVDLNADPLCERKEWNKQKLPCSENPRDTEDVPWITLNSSIQKVNEWFSRSDELLGSDDSHDGESESNAKVADVLDVLNEVDEYSGSSEKIDLLASDPHEALICKSERVHSKSVESNIEDKIFGKTYRKKASLPNLSHVTENLIIGAFVTEPQIIQERPLTNKLKRKRRPTSGLHPEDFIKKADLAVQKTPEMINQGTNQTEQNGQVMNITNSGHENKTKGDSIQNEKNPNPIESLEKESAFKTKAEPISSSISNMELELNIHNSKAPKKNRLRRKSSTRHIHALELVVSRNLSPPNCTELQIDSCSSSEEIKKKKYNQMPVRHSRNLQLMEGKEPATGAKKSNKPNEQTSKRHDSDTFPELKLTNAPGSFTKCSNTSELKEFVNPSLPREEKEEKLETVKVSNNAEDPKDLMLSGERVLQTERSVESSSISLVPGTDYGTQESISLLEVSTLGKAKTEPNKCVSQCAAFENPKGLIHGCSKDNRNDTEGFKYPLGHEVNHSRETSIEMEESELDAQYLQNTFKVSKRQSFAPFSNPGNAEEECATFSAHSGSLKKQSPKVTFECEQKEENQGKNESNIKPVQTVNITAGFPVVGQKDKPVDNAKCSIKGGSRFCLSSQFRGNETGLITPNKHGLLQNPYRIPPLFPIKSFVKTKCKKNLLEENFEEHSMSPEREMGNENIPSTVSTISRNNIRENVFKEASSSNINEVGSSTNEVGSSINEIGSSDENIQAELGRNRGPKLNAMLRLGVLQPEVYKQSLPGSNCKHPEIKKQEYEEVVQTVNTDFSPYLISDNLEQPMGSSHASQVCSETPDDLLDDGEIKEDTSFAENDIKESSAVFSKSVQKGELSRSPSPFTHTHLAQGYRRGAKKLESSEENLSSEDEELPCFQHLLFGKVNNIPSQSTRHSTVATECLSKNTEENLLSLKNSLNDCSNQVILAKASQEHHLSEETKCSASLFSSQCSELEDLTANTNTQDPFLIGSSKQMRHQSESQGVGLSDKELVSDDEERGTGLEENNQEEQSMDSNLGEAASGCESETSVSEDCSGLSSQSDILTTQQRDTMQHNLIKLQQEMAELEAVLEQHGSQPSNSYPSIISDSSALEDLRNPEQSTSEKAVLTSQKSSEYPISQNPEGLSADKFEVSADSSTSKNKEPGVERSSPSKCPSLDDRWYMHSCSGSLQNRNYPSQEELIKVVDVEEQQLEESGPHDLTETSYLPRQDLEGTPYLESGISLFSDDPESDPSEDRAPESARVGNIPSSTSALKVPQLKVAESAQSPAAAHTTDTAGYNAMEESVSREKPELTASTERVNKRMSMVVSGLTPEEFMLVYKFARKHHITLTNLITEETTHVVMKTDAEFVCERTLKYFLGIAGGKWVVSYFWVTQSIKERKMLNEHDFEVRGDVVNGRNHQGPKRARESQDRKIFRGLEICCYGPFTNMPTDQLEWMVQLCGASVVKELSSFTLGTGVHPIVVVQPDAWTEDNGFHAIGQMCEAPVVTREWVLDSVALYQCQELDTYLIPQIPHSHY

SEQ ID NO: 9564 - protein, 572 aa, Homo sapiens
  Payload ID: 1950;
  Gene Symbol: BRCA1;
  Gene Name: breast cancer 1, early onset;
  ENSP ID: ENSP00000418819
MLKLLNQKKGPSQCPLCKNDITKRSLQESTRFSQLVEELLKIICAFQLDTGLEYANSYNFAKKENNSPEHLKDEVSIIQSMGYRNRAKRLLQSEPENPSLQETSLSVQLSNLGTVRTLRTKQRIQPQKTSVYIELGSDSSEDTVNKATYCSVGDQELLQITPQGTRDEISLDSAKKAACEFSETDVTNTEHHQPSNNDLNTTEKRAAERHPEKYQGEAASGCESETSVSEDCSGLSSQSDILTTQQRDTMQHNLIKLQQEMAELEAVLEQHGSQPSNSYPSIISDSSALEDLRNPEQSTSEKAVLTSQKSSEYPISQNPEGLSADKFEVSADSSTSKNKEPGVERSSPSKCPSLDDRWYMHSCSGSLQNRNYPSQEELIKVVDVEEQQLEESGPHDLTETSYLPRQDLEGTPYLESGISLFSDDPESDPSEDRAPESARVGNIPSSTSALKVPQLKVAESAQSPAAAHTTDTAGYNAMEESVSREKPELTASTERVNKRMSMVVSGLTPEEFMLVYKFARKHHITLTNLITEETTHVVMKTDAEFVCERTLKYFLGIAGGKWVVSYFWVTQS

SEQ ID NO: 9565 - protein, 1884 aa, Homo sapiens
  Payload ID: 1950;
  Gene Symbol: BRCA1;
  Gene Name: breast cancer 1, early onset;
  Uniprot ID:  P38398;
  ENSP ID: ENSP00000418960
MDLSALRVEEVQNVINAMQKILECPICLELIKEPVSTKCDHIFCKFCMLKLLNQKKGPSQCPLCKNDITKRSLQESTRFSQLVEELLKIICAFQLDTGLEYANSYNFAKKENNSPEHLKDEVSIIQSMGYRNRAKRLLQSEPENPSLQETSLSVQLSNLGTVRTLRTKQRIQPQKTSVYIELGSDSSEDTVNKATYCSVGDQELLQITPQGTRDEISLDSAKKAACEFSETDVTNTEHHQPSNNDLNTTEKRAAERHPEKYQGSSVSNLHVEPCGTNTHASSLQHENSSLLLTKDRMNVEKAEFCNKSKQPGLARSQHNRWAGSKETCNDRRTPSTEKKVDLNADPLCERKEWNKQKLPCSENPRDTEDVPWITLNSSIQKVNEWFSRSDELLGSDDSHDGESESNAKVADVLDVLNEVDEYSGSSEKIDLLASDPHEALICKSERVHSKSVESNIEDKIFGKTYRKKASLPNLSHVTENLIIGAFVTEPQIIQERPLTNKLKRKRRPTSGLHPEDFIKKADLAVQKTPEMINQGTNQTEQNGQVMNITNSGHENKTKGDSIQNEKNPNPIESLEKESAFKTKAEPISSSISNMELELNIHNSKAPKKNRLRRKSSTRHIHALELVVSRNLSPPNCTELQIDSCSSSEEIKKKKYNQMPVRHSRNLQLMEGKEPATGAKKSNKPNEQTSKRHDSDTFPELKLTNAPGSFTKCSNTSELKEFVNPSLPREEKEEKLETVKVSNNAEDPKDLMLSGERVLQTERSVESSSISLVPGTDYGTQESISLLEVSTLGKAKTEPNKCVSQCAAFENPKGLIHGCSKDNRNDTEGFKYPLGHEVNHSRETSIEMEESELDAQYLQNTFKVSKRQSFAPFSNPGNAEEECATFSAHSGSLKKQSPKVTFECEQKEENQGKNESNIKPVQTVNITAGFPVVGQKDKPVDNAKCSIKGGSRFCLSSQFRGNETGLITPNKHGLLQNPYRIPPLFPIKSFVKTKCKKNLLEENFEEHSMSPEREMGNENIPSTVSTISRNNIRENVFKEASSSNINEVGSSTNEVGSSINEIGSSDENIQAELGRNRGPKLNAMLRLGVLQPEVYKQSLPGSNCKHPEIKKQEYEEVVQTVNTDFSPYLISDNLEQPMGSSHASQVCSETPDDLLDDGEIKEDTSFAENDIKESSAVFSKSVQKGELSRSPSPFTHTHLAQGYRRGAKKLESSEENLSSEDEELPCFQHLLFGKVNNIPSQSTRHSTVATECLSKNTEENLLSLKNSLNDCSNQVILAKASQEHHLSEETKCSASLFSSQCSELEDLTANTNTQDPFLIGSSKQMRHQSESQGVGLSDKELVSDDEERGTGLEENNQEEQSMDSNLGEAASGCESETSVSEDCSGLSSQSDILTTQQRDTMQHNLIKLQQEMAELEAVLEQHGSQPSNSYPSIISDSSALEDLRNPEQSTSEKDSHIHGQRNNSMFSKRPREHISVLTSQKSSEYPISQNPEGLSADKFEVSADSSTSKNKEPGVERSSPSKCPSLDDRWYMHSCSGSLQNRNYPSQEELIKVVDVEEQQLEESGPHDLTETSYLPRQDLEGTPYLESGISLFSDDPESDPSEDRAPESARVGNIPSSTSALKVPQLKVAESAQSPAAAHTTDTAGYNAMEESVSREKPELTASTERVNKRMSMVVSGLTPEEFMLVYKFARKHHITLTNLITEETTHVVMKTDAEFVCERTLKYFLGIAGGKWVVSYFWVTQSIKERKMLNEHDFEVRGDVVNGRNHQGPKRARESQDRKIFRGLEICCYGPFTNMPTDQLEWMVQLCGASVVKELSSFTLGTGVHPIVVVQPDAWTEDNGFHAIGQMCEAPVVTREWVLDSVALYQCQELDTYLIPQIPHSHY

SEQ ID NO: 9566 - protein, 177 aa, Homo sapiens
  Payload ID: 1950;
  Gene Symbol: BRCA1;
  Gene Name: breast cancer 1, early onset;
  ENSP ID: ENSP00000418986
MNVEKAEFCNKSKQPGLARSQHNRWAGSKETCNDRRTPSTEKKVDLNADPLCERKEWNKQKLPCSENPRDTEDVPWITLNSSIQKVNEWFSRSDELLGSDDSHDGESESNAKVADVLDVLNEVDEYSGSSEKIDLLASDPHEALICKSERVHSKSVESNIEDKIFGKTYRKKASLPN

SEQ ID NO: 9567 - protein, 473 aa, Homo sapiens
  Payload ID: 1950;
  Gene Symbol: BRCA1;
  Gene Name: breast cancer 1, early onset;
  ENSP ID: ENSP00000419103
MDLSALRVEEVQNVINAMQKILECPICLELIKEPVSTKCDHIFCKFCMLKLLNQKKGPSQCPLCKNDITKRSLQESTRFSQLVEELLKIICAFQLDTGLEYANSYNFAKKENNSPEHLKDEVSIIQSMGYRNRAKRLLQSEPENPSLQETSLSVQLSNLGTVRTLRTKQRIQPQKTSVYIELGSDSSEDTVNKATYCSVGDQELLQITPQGTRDEISLDSAKKAACEFSETDVTNTEHHQPSNNDLNTTEKRAAERHPEKYQGSSVSNLHVEPCGTNTHASSLQHENSSLLLTKDRMNVEKAEFCNKSKQPGLARSQHNRWAGSKETCNDRRTPSTEKKVDLNADPLCERKEWNKQKLPCSENPRDTEDVPWITLNSSIQKVNEWFSRSDELLGSDDSHDGESESNAKVADVLDVLNEVDEYSGSSEKIDLLASDPHEALICKSERVHSKSVESNIEDKIFGKTYRKKASLPN

SEQ ID NO: 9568 - protein, 649 aa, Homo sapiens
  Payload ID: 1950;
  Gene Symbol: BRCA1;
  Gene Name: breast cancer 1, early onset;
  ENSP ID: ENSP00000419274
MDLSALRVEEVQNVINAMQKILECPICLELIKEPVSTKCDHIFCKFCMLKLLNQKKGPSQCPLCKNDITKRSLQESTRFSQLVEELLKIICAFQLDTGLEYANSYNFAKKENNSPEHLKDEVSIIQSMGYRNRAKRLLQSEPENPSLQETSLSVQLSNLGTVRTLRTKQRIQPQKTSVYIELGSDSSEDTVNKATYCSVGDQELLQITPQGTRDEISLDSAKKAACEFSETDVTNTEHHQPSNNDLNTTEKRAAERHPEKYQGSSVSNLHVEPCGTNTHASSLQHENSSLLLTKDRMNVEKAEFCNKSKQPGLARSQHNRWAGSKETCNDRRTPSTEKKVDLNADPLCERKEWNKQKLPCSENPRDTEDVPWITLNSSIQKVNEWFSRSDELLGSDDSHDGESESNAKVADVLDVLNEVDEYSGSSEKIDLLASDPHEALICKSERVHSKSVESNIEDKIFGKTYRKKASLPNLSHVTENLIIGAFVTEPQIIQERPLTNKLKRKRRPTSGLHPEDFIKKADLAVQKTPEMINQGTNQTEQNGQVMNITNSGHENKTKGDSIQNEKNPNPIESLEKESAFKTKAEPISSSISNMELELNIHNSKAPKKNRLRRKSSTRHIHALELVVSRNLSPPNCTELQIDSCSSSEE

SEQ ID NO: 9569 - protein, 498 aa, Homo sapiens
  Payload ID: 1950;
  Gene Symbol: BRCA1;
  Gene Name: breast cancer 1, early onset;
  ENSP ID: ENSP00000419481
ELLKIICAFQLDTGLEYANSYNFAKKENNSPEHLKDEVSIIQSMGYRNRAKRLLQSEPENPSLETSLSVQLSNLGTVRTLRTKQRIQPQKTSVYIELAACEFSETDVTNTEHHQPSNNDLNTTEKRAAERHPEKYQGEAASGCESETSVSEDCSGLSSQSDILTTQQRDTMQHNLIKLQQEMAELEAVLEQHGSQPSNSYPSIISDSSALEDLRNPEQSTSEKAVLTSQKSSEYPISQNPEGLSADKFEVSADSSTSKNKEPGVERSSPSKCPSLDDRWYMHSCSGSLQNRNYPSQEELIKVVDVEEQQLEESGPHDLTETSYLPRQDLEGTPYLESGISLFSDDPESDPSEDRAPESARVGNIPSSTSALKVPQLKVAESAQSPAAAHTTDTAGYNAMEESVSREKPELTASTERVNKRMSMVVSGLTPEEFMLVYKFARKHHITLTNLITEETTHVVMKTDAEFVCERTLKYFLGIAGGKWVVSYFWVTQSIKERK

SEQ ID NO: 9570 - protein, 622 aa, Homo sapiens
  Payload ID: 1950;
  Gene Symbol: BRCA1;
  Gene Name: breast cancer 1, early onset;
  ENSP ID: ENSP00000419988
MDLSALRVEEVQNVINAMQKILECPICLELIKEPVSTKCDHIFCKSLQESTRFSQLVEELLKIICAFQLDTGLEYANSYNFAKKENNSPEHLKDEVSIIQSMGYRNRAKRLLQSEPENPSLQETSLSVQLSNLGTVRTLRTKQRIQPQKTSVYIELGSDSSEDTVNKATYCSVGDQELLQITPQGTRDEISLDSAKKAACEFSETDVTNTEHHQPSNNDLNTTEKRAAERHPEKYQGSSVSNLHVEPCGTNTHASSLQHENSSLLLTKDRMNVEKAEFCNKSKQPGLARSQHNRWAGSKETCNDRRTPSTEKKVDLNADPLCERKEWNKQKLPCSENPRDTEDVPWITLNSSIQKVNEWFSRSDELLGSDDSHDGESESNAKVADVLDVLNEVDEYSGSSEKIDLLASDPHEALICKSERVHSKSVESNIEDKIFGKTYRKKASLPNLSHVTENLIIGAFVTEPQIIQERPLTNKLKRKRRPTSGLHPEDFIKKADLAVQKTPEMINQGTNQTEQNGQVMNITNSGHENKTKGDSIQNEKNPNPIESLEKESAFKTKAEPISSSISNMELELNIHNSKAPKKNRLRRKSSTRHIHALELVVSRNLSPPNCTELQIDSCSSSE

SEQ ID NO: 9571 - protein, 319 aa, Homo sapiens
  Payload ID: 1950;
  Gene Symbol: BRCA1;
  Gene Name: breast cancer 1, early onset;
  ENSP ID: ENSP00000420201
  MOD_RES (1)..(1): Any amino acid
XQLDTGLEYANSYNFAKKENNSPEHLKDEVSIIQSMGYRNRAKRLLQSEPENPSLETSLSVQLSNLGTVRTLRTKQRIQPQKTSVYIELAACEFSETDVTNTEHHQPSNNDLNTTEKRAAERHPEKYQGSSVSNLHVEPCGTNTHASSLQHENSSLLLTKDRMNVEKAEFCNKSKQPGLARSQHNRWAGSKETCNDRRTPSTEKKVDLNADPLCERKEWNKQKLPCSENPRDTEDVPWITLNSSIQKVNEWFSRSDELLGSDDSHDGESESNAKVADVLDVLNEVDEYSGSSEKIDLLASDPHEALICKSERVHSKSVE

SEQ ID NO: 9572 - protein, 59 aa, Homo sapiens
  Payload ID: 1950;
  Gene Symbol: BRCA1;
  Gene Name: breast cancer 1, early onset;
  ENSP ID: ENSP00000420253
MDLSALRVEEVQNVINAMQKILECPICLELIKEPVSTKCDHIFCKVLLCCPSWSTVVRS

SEQ ID NO: 9573 - protein, 623 aa, Homo sapiens
  Payload ID: 1950;
  Gene Symbol: BRCA1;
  Gene Name: breast cancer 1, early onset;
  ENSP ID: ENSP00000420412
MDLSALRVEEVQNVINAMQKILECPICLELIKEPVSTKCDHIFCKFCMLKLLNQKKGPSQCPLCKNDITKRSLQESTRFSQLVEELLKIICAFQLDTGLEYANSYNFAKKENNSPEHLKDEVSIIQSMGYRNRAKRLLQSEPENPSLETSLSVQLSNLGTVRTLRTKQRIQPQKTSVYIELGSDSSEDTVNKATYCSVGDQELLQITPQGTRDEISLDSAKKAACEFSETDVTNTEHHQPSNNDLNTTEKRAAERHPEKYQGEAASGCESETSVSEDCSGLSSQSDILTTQQRDTMQHNLIKLQQEMAELEAVLEQHGSQPSNSYPSIISDSSALEDLRNPEQSTSEKAVLTSQKSSEYPISQNPEGLSADKFEVSADSSTSKNKEPGVERSSPSKCPSLDDRWYMHSCSGSLQNRNYPSQEELIKVVDVEEQQLEESGPHDLTETSYLPRQDLEGTPYLESGISLFSDDPESDPSEDRAPESARVGNIPSSTSALKVPQLKVAESAQSPAAAHTTDTAGYNAMEESVSREKPELTASTERVNKRMSMVVSGLTPEEFMLVYKFARKHHITLTNLITEETTHVVMKTDAEFVCERTLKYFLGIAGGKWVVSYFWVTQSIKERK

SEQ ID NO: 9574 - protein, 759 aa, Homo sapiens
  Payload ID: 1950;
  Gene Symbol: BRCA1;
  Gene Name: breast cancer 1, early onset;
  Uniprot ID:  P38398;
  ENSP ID: ENSP00000420705
MDLSALRVEEVQNVINAMQKILECPICLELIKEPVSTKCDHIFCKFCMLKLLNQKKGPSQCPLCKNDITKRSLQESTRFSQLVEELLKIICAFQLDTGLEYANSYNFAKKENNSPEHLKDEVSIIQSMGYRNRAKRLLQSEPENPSLQETSLSVQLSNLGTVRTLRTKQRIQPQKTSVYIELGSDSSEDTVNKATYCSVGDQELLQITPQGTRDEISLDSAKKAACEFSETDVTNTEHHQPSNNDLNTTEKRAAERHPEKYQGEAASGCESETSVSEDCSGLSSQSDILTTQQRDTMQHNLIKLQQEMAELEAVLEQHGSQPSNSYPSIISDSSALEDLRNPEQSTSEKVLTSQKSSEYPISQNPEGLSADKFEVSADSSTSKNKEPGVERSSPSKCPSLDDRWYMHSCSGSLQNRNYPSQEELIKVVDVEEQQLEESGPHDLTETSYLPRQDLEGTPYLESGISLFSDDPESDPSEDRAPESARVGNIPSSTSALKVPQLKVAESAQSPAAAHTTDTAGYNAMEESVSREKPELTASTERVNKRMSMVVSGLTPEEFMLVYKFARKHHITLTNLITEETTHVVMKTDAEFVCERTLKYFLGIAGGKWVVSYFWVTQSIKERKMLNEHDFEVRGDVVNGRNHQGPKRARESQDRKIFRGLEICCYGPFTNMPTDQLEWMVQLCGASVVKELSSFTLGTGVHPIVVVQPDAWTEDNGFHAIGQMCEAPVVTREWVLDSVALYQCQELDTYLIPQIPHSHY

SEQ ID NO: 9575 - protein, 98 aa, Homo sapiens
  Payload ID: 1950;
  Gene Symbol: BRCA1;
  Gene Name: breast cancer 1, early onset;
  ENSP ID: ENSP00000420781
MDLSALRVEEVQNVINAMQKILECPICLELIKEPVSTKCDHIFCKSLQESTRFSQLVEELLKIICAFQLDTGLEYANSYNFAKKENNSPEHLKDEVSI

SEQ ID NO: 9576 - protein, 96 aa, Homo sapiens
  Payload ID: 1950;
  Gene Symbol: BRCA1;
  Gene Name: breast cancer 1, early onset;
  ENSP ID: ENSP00000465347
MSDSKKTWLQYQLEWMVQLCGASVVKELSSFTLGTGVHPIVVVQPDAWTEDNGFHAIGQMCEAPVVTREWVLDSVALYQCQELDTYLIPQIPHSHY

SEQ ID NO: 9577 - protein, 173 aa, Homo sapiens
  Payload ID: 1950;
  Gene Symbol: BRCA1;
  Gene Name: breast cancer 1, early onset;
  ENSP ID: ENSP00000465818
MDAEFVCERTLKYFLGIAGGKWVVSYFWVTQSIKERKMLNEHDFEVRGDVVNGRNHQGPKRARESQDRKIFRGLEICCYGPFTNMPTDQLEWMVQLCGASVVKELSSFTLGTGVHPIVVVQPDAWTEDNGFHAIGQMCEAPVVTREWVLDSVALYQCQELDTYLIPQIPHSHY

SEQ ID NO: 9578 - protein, 354 aa, Homo sapiens
  Payload ID: 1950;
  Gene Symbol: BRCA1;
  Gene Name: breast cancer 1, early onset;
  ENSP ID: ENSP00000467329
MHSCSGSLQNRNYPSQEELIKVVDVEEQQLEESGPHDLTETSYLPRQDLEGTPYLESGISLFSDDPESDPSEDRAPESARVGNIPSSTSALKVPQLKVAESAQSPAAAHTTDTAGYNAMEESVSREKPELTASTERVNKRMSMVVSGLTPEEFMLVYKFARKHHITLTNLITEETTHVVMKTDAEFVCERTLKYFLGIAGGKWVVSYFWVTQSIKERKMLNEHDFEVRGDVVNGRNHQGPKRARESQDRKIFRGLEICCYGPFTNMPTDQLEWMVQLCGASVVKELSSFTLGTGVHPIVVVQPDAWTEDNGFHAIGQMCEAPVVTREWVLDSVALYQCQELDTYLIPQIPHSHY

SEQ ID NO: 9579 - protein, 23 aa, Homo sapiens
  Payload ID: 1950;
  Gene Symbol: BRCA1;
  Gene Name: breast cancer 1, early onset;
  ENSP ID: ENSP00000478114
MDLSALRVEEVQNVINAMQKILE

SEQ ID NO: 9580 - protein, 798 aa, Homo sapiens
  Payload ID: 1950;
  Gene Symbol: BRCA1;
  Gene Name: breast cancer 1, early onset;
  ENSP ID: ENSP00000489431
MDLSALRVEEVQNVINAMQKILECPICLELIKEPVSTKCDHIFCKFCMLKLLNQKKGPSQCPLCKNDITKRSLQESTRFSQLVEELLKIICAFQLDTGLEYANSYNFAKKENNSPEHLKDEVSIIQSMGYRNRAKRLLQSEPENPSLQETSLSVQLSNLGTVRTLRTKQRIQPQKTSVYIELAACEFSETDVTNTEHHQPSNNDLNTTEKRAAERHPEKYQGSSVSNLHVEPCGTNTHASSLQHENSSLLLTKDRMNVEKAEFCNKSKQPGLARSQHNRWAGSKETCNDRRTPSTEKKVDLNADPLCERKEWNKQKLPCSENPRDTEDVPWITLNSSIQKVNEWFSRSDELLGSDDSHDGESESNAKVADVLDVLNEVDEYSGSSEKIDLLASDPHEALICKSERVHSKSVESNIEDKIFGKTYRKKASLPNLSHVTENLIIGAFVTEPQIIQERPLTNKLKRKRRPTSGLHPEDFIKKADLAVQKTPEMINQGTNQTEQNGQVMNITNSGHENKTKGDSIQNEKNPNPIESLEKESAFKTKAEPISSSISNMELELNIHNSKAPKKNRLRRKSSTRHIHALELVVSRNLSPPNCTELQIDSCSSSEEIKKKKYNQMPVRHSRNLQLMEGKEPATGAKKSNKPNEQTSKRHDSDTFPELKLTNAPGSFTKCSNTSELKEFVNPSLPREEKEEKLETVKVSNNAEDPKDLMLSGERVLQTERSVESSSISLVPGTDYGTQESISLLEVSTLGKAKTEPNKCVSQCAAFENPKGLIHGCSKDNRNDTEGFKYPLGHEVNH

SEQ ID NO: 9581 - protein, 3418 aa, Homo sapiens [sequence omitted]

SEQ ID NO: 9582 - protein, 64 aa, Homo sapiens
  Payload ID: 1951;
  Gene Symbol: BRCA2;
  Gene Name: breast cancer 2, early onset;
  ENSP ID: ENSP00000433168
SSGLYIFRNEREEEKEAAKYVEAQQKRLEALFTKIQEEFEEHEVTSSTEVLNPPKSSMRVGINF

SEQ ID NO: 9583 - protein, 186 aa, Homo sapiens
  Payload ID: 1951;
  Gene Symbol: BRCA2;
  Gene Name: breast cancer 2, early onset;
  ENSP ID: ENSP00000434898
  MOD_RES (1)..(1): Any amino acid
XSKSKSERANIQLAATKKTQYQQLPVSDEILFQIYQPREPLHFSKFLDPDFQPSCSEVDLIGFVVSVVKKTGLAPFVYLSDECYNLLAIKFWIDLNEDIIKPHMLIAASNLQWRPESKSGLLTLFAGDFSVFSASPKEGHFQETFNKMKNTVERQSLALSPPGWSTIAQSRITAVSASWAQAILVP

SEQ ID NO: 9584 - protein, 3418 aa, Homo sapiens [sequence omitted]

SEQ ID NO: 9585 - protein, 870 aa, Homo sapiens
  Payload ID: 1952;
  Gene Symbol: BCAR1;
  Gene Name: breast cancer anti-estrogen resistance 1;
  Uniprot ID:  P56945;
  ENSP ID: ENSP00000162330
MNHLNVLAKALYDNVAESPDELSFRKGDIMTVLEQDTQGLDGWWLCSLHGRQGIVPGNRLKILVGMYDKKPAGPGPGPPATPAQPQPGLHAPAPPASQYTPMLPNTYQPQPDSVYLVPTPSKAQQGLYQVPGPSPQFQSPPAKQTSTFSKQTPHHPFPSPATDLYQVPPGPGGPAQDIYQVPPSAGMGHDIYQVPPSMDTRSWEGTKPPAKVVVPTRVGQGYVYEAAQPEQDEYDIPRHLLAPGPQDIYDVPPVRGLLPSQYGQEVYDTPPMAVKGPNGRDPLLEVYDVPPSVEKGLPPSNHHAVYDVPPSVSKDVPDGPLLREETYDVPPAFAKAKPFDPARTPLVLAAPPPDSPPAEDVYDVPPPAPDLYDVPPGLRRPGPGTLYDVPRERVLPPEVADGGVVDSGVYAVPPPAEREAPAEGKRLSASSTGSTRSSQSASSLEVAGPGREPLELEVAVEALARLQQGVSATVAHLLDLAGSAGATGSWRSPSEPQEPLVQDLQAAVAAVQSAVHELLEFARSAVGNAAHTSDRALHAKLSRQLQKMEDVHQTLVAHGQALDAGRGGSGATLEDLDRLVACSRAVPEDAKQLASFLHGNASLLFRRTKATAPGPEGGGTLHPNPTDKTSSIQSRPLPSPPKFTSQDSPDGQYENSEGGWMEDYDYVHLQGKEEFEKTQKELLEKGSITRQGKSQLELQQLKQFERLEQEVSRPIDHDLANWTPAQPLAPGRTGGLGPSDRQLLLFYLEQCEANLTTLTNAVDAFFTAVATNQPPKIFVAHSKFVILSAHKLVFIGDTLSRQAKAADVRSQVTHYSNLLCDLLRGIVATTKAAALQYPSPSAAQDMVERVKELGHSTQQFRRVLGQLAAA

SEQ ID NO: 9586 - protein, 888 aa, Homo sapiens
  Payload ID: 1952;
  Gene Symbol: BCAR1;
  Gene Name: breast cancer anti-estrogen resistance 1;
  Uniprot ID:  P56945;
  ENSP ID: ENSP00000377072
MNHLNVLAKALYDNVAESPDELSFRKGDIMTVLEQDTQGLDGWWLCSLHGRQGIVPGNRLKILVGMYDKKPAGPGPGPPATPAQPQPGLHAPAPPASQYTPMLPNTYQPQPDSVYLVPTPSKAQQGLYQVPGPSPQFQSPPAKQTSTFSKQTPHHPFPSPATDLYQVPPGPGGPAQDIYQVPPSAGMGHDIYQVPPSMDTRSWEGTKPPAKVVVPTRVGQGYVYEAAQPEQDEYDIPRHLLAPGPQDIYDVPPVRGLLPSQYGQEVYDTPPMAVKGPNGRDPLLEVYDVPPSVEKGLPPSNHHAVSKCQGNARARLRLWGVWVYDVPPSVSKDVPDGPLLREETYDVPPAFAKAKPFDPARTPLVLAAPPPDSPPAEDVYDVPPPAPDLYDVPPGLRRPGPGTLYDVPRERVLPPEVADGGVVDSGVYAVPPPAEREAPAEGKRLSASSTGSTRSSQSASSLEVAGPGREPLELEVAVEALARLQQGVSATVAHLLDLAGSAGATGSWRSPSEPQEPLVQDLQAAVAAVQSAVHELLEFARSAVGNAAHTSDRALHAKLSRQLQKMEDVHQTLVAHGQALDAGRGGSGATLEDLDRLVACSRAVPEDAKQLASFLHGNASLLFRRTKATAPGPEGGGTLHPNPTDKTSSIQSRPLPSPPKFTSQDSPDGQYENSEGGWMEDYDYVHLQGKEEFEKTQKELLEKGSITRQGKSQLELQQLKQFERLEQEVSRPIDHDLANWTPAQPLAPGRTGGLGPSDRQLLLFYLEQCEANLTTLTNAVDAFFTAVATNQPPKIFVAHSKFVILSAHKLVFIGDTLSRQAKAADVRSQVTHYSNLLCDLLRGIVATTKAAALQYPSPSAAQDMVERVKELGHSTQQFRRVLGQLAAA

SEQ ID NO: 9587 - protein, 888 aa, Homo sapiens
  Payload ID: 1952;
  Gene Symbol: BCAR1;
  Gene Name: breast cancer anti-estrogen resistance 1;
  Uniprot ID:  P56945;
  ENSP ID: ENSP00000377074
MHCPGEAPLAAPRPTPKDPCLRNVLAKALYDNVAESPDELSFRKGDIMTVLEQDTQGLDGWWLCSLHGRQGIVPGNRLKILVGMYDKKPAGPGPGPPATPAQPQPGLHAPAPPASQYTPMLPNTYQPQPDSVYLVPTPSKAQQGLYQVPGPSPQFQSPPAKQTSTFSKQTPHHPFPSPATDLYQVPPGPGGPAQDIYQVPPSAGMGHDIYQVPPSMDTRSWEGTKPPAKVVVPTRVGQGYVYEAAQPEQDEYDIPRHLLAPGPQDIYDVPPVRGLLPSQYGQEVYDTPPMAVKGPNGRDPLLEVYDVPPSVEKGLPPSNHHAVYDVPPSVSKDVPDGPLLREETYDVPPAFAKAKPFDPARTPLVLAAPPPDSPPAEDVYDVPPPAPDLYDVPPGLRRPGPGTLYDVPRERVLPPEVADGGVVDSGVYAVPPPAEREAPAEGKRLSASSTGSTRSSQSASSLEVAGPGREPLELEVAVEALARLQQGVSATVAHLLDLAGSAGATGSWRSPSEPQEPLVQDLQAAVAAVQSAVHELLEFARSAVGNAAHTSDRALHAKLSRQLQKMEDVHQTLVAHGQALDAGRGGSGATLEDLDRLVACSRAVPEDAKQLASFLHGNASLLFRRTKATAPGPEGGGTLHPNPTDKTSSIQSRPLPSPPKFTSQDSPDGQYENSEGGWMEDYDYVHLQGKEEFEKTQKELLEKGSITRQGKSQLELQQLKQFERLEQEVSRPIDHDLANWTPAQPLAPGRTGGLGPSDRQLLLFYLEQCEANLTTLTNAVDAFFTAVATNQPPKIFVAHSKFVILSAHKLVFIGDTLSRQAKAADVRSQVTHYSNLLCDLLRGIVATTKAAALQYPSPSAAQDMVERVKELGHSTQQFRRVLGQLAAA

SEQ ID NO: 9588 - protein, 916 aa, Homo sapiens
  Payload ID: 1952;
  Gene Symbol: BCAR1;
  Gene Name: breast cancer anti-estrogen resistance 1;
  Uniprot ID:  P56945;
  ENSP ID: ENSP00000391669
MPAKPFLSSVLLSWKVLDFSGPGPQGTGQPCSCGHWAEGQGGPPEPAGGPNVLAKALYDNVAESPDELSFRKGDIMTVLEQDTQGLDGWWLCSLHGRQGIVPGNRLKILVGMYDKKPAGPGPGPPATPAQPQPGLHAPAPPASQYTPMLPNTYQPQPDSVYLVPTPSKAQQGLYQVPGPSPQFQSPPAKQTSTFSKQTPHHPFPSPATDLYQVPPGPGGPAQDIYQVPPSAGMGHDIYQVPPSMDTRSWEGTKPPAKVVVPTRVGQGYVYEAAQPEQDEYDIPRHLLAPGPQDIYDVPPVRGLLPSQYGQEVYDTPPMAVKGPNGRDPLLEVYDVPPSVEKGLPPSNHHAVYDVPPSVSKDVPDGPLLREETYDVPPAFAKAKPFDPARTPLVLAAPPPDSPPAEDVYDVPPPAPDLYDVPPGLRRPGPGTLYDVPRERVLPPEVADGGVVDSGVYAVPPPAEREAPAEGKRLSASSTGSTRSSQSASSLEVAGPGREPLELEVAVEALARLQQGVSATVAHLLDLAGSAGATGSWRSPSEPQEPLVQDLQAAVAAVQSAVHELLEFARSAVGNAAHTSDRALHAKLSRQLQKMEDVHQTLVAHGQALDAGRGGSGATLEDLDRLVACSRAVPEDAKQLASFLHGNASLLFRRTKATAPGPEGGGTLHPNPTDKTSSIQSRPLPSPPKFTSQDSPDGQYENSEGGWMEDYDYVHLQGKEEFEKTQKELLEKGSITRQGKSQLELQQLKQFERLEQEVSRPIDHDLANWTPAQPLAPGRTGGLGPSDRQLLLFYLEQCEANLTTLTNAVDAFFTAVATNQPPKIFVAHSKFVILSAHKLVFIGDTLSRQAKAADVRSQVTHYSNLLCDLLRGIVATTKAAALQYPSPSAAQDMVERVKELGHSTQQFRRVLGQLAAA

SEQ ID NO: 9589 - protein, 888 aa, Homo sapiens
  Payload ID: 1952;
  Gene Symbol: BCAR1;
  Gene Name: breast cancer anti-estrogen resistance 1;
  Uniprot ID:  P56945;
  ENSP ID: ENSP00000392708
MLTHRPQEAEQRGRTPGPSFEWNVLAKALYDNVAESPDELSFRKGDIMTVLEQDTQGLDGWWLCSLHGRQGIVPGNRLKILVGMYDKKPAGPGPGPPATPAQPQPGLHAPAPPASQYTPMLPNTYQPQPDSVYLVPTPSKAQQGLYQVPGPSPQFQSPPAKQTSTFSKQTPHHPFPSPATDLYQVPPGPGGPAQDIYQVPPSAGMGHDIYQVPPSMDTRSWEGTKPPAKVVVPTRVGQGYVYEAAQPEQDEYDIPRHLLAPGPQDIYDVPPVRGLLPSQYGQEVYDTPPMAVKGPNGRDPLLEVYDVPPSVEKGLPPSNHHAVYDVPPSVSKDVPDGPLLREETYDVPPAFAKAKPFDPARTPLVLAAPPPDSPPAEDVYDVPPPAPDLYDVPPGLRRPGPGTLYDVPRERVLPPEVADGGVVDSGVYAVPPPAEREAPAEGKRLSASSTGSTRSSQSASSLEVAGPGREPLELEVAVEALARLQQGVSATVAHLLDLAGSAGATGSWRSPSEPQEPLVQDLQAAVAAVQSAVHELLEFARSAVGNAAHTSDRALHAKLSRQLQKMEDVHQTLVAHGQALDAGRGGSGATLEDLDRLVACSRAVPEDAKQLASFLHGNASLLFRRTKATAPGPEGGGTLHPNPTDKTSSIQSRPLPSPPKFTSQDSPDGQYENSEGGWMEDYDYVHLQGKEEFEKTQKELLEKGSITRQGKSQLELQQLKQFERLEQEVSRPIDHDLANWTPAQPLAPGRTGGLGPSDRQLLLFYLEQCEANLTTLTNAVDAFFTAVATNQPPKIFVAHSKFVILSAHKLVFIGDTLSRQAKAADVRSQVTHYSNLLCDLLRGIVATTKAAALQYPSPSAAQDMVERVKELGHSTQQFRRVLGQLAAA

SEQ ID NO: 9590 - protein, 722 aa, Homo sapiens
  Payload ID: 1952;
  Gene Symbol: BCAR1;
  Gene Name: breast cancer anti-estrogen resistance 1;
  Uniprot ID:  P56945;
  ENSP ID: ENSP00000440370
MQGKNVLAKALYDNVAESPDELSFRKGDIMTVLEQDTQGLDGWWLCSLHGRQGIVPGNRLKILVVVPTRVGQGYVYEAAQPEQDEYDIPRHLLAPGPQDIYDVPPVRGLLPSQYGQEVYDTPPMAVKGPNGRDPLLEVYDVPPSVEKGLPPSNHHAVYDVPPSVSKDVPDGPLLREETYDVPPAFAKAKPFDPARTPLVLAAPPPDSPPAEDVYDVPPPAPDLYDVPPGLRRPGPGTLYDVPRERVLPPEVADGGVVDSGVYAVPPPAEREAPAEGKRLSASSTGSTRSSQSASSLEVAGPGREPLELEVAVEALARLQQGVSATVAHLLDLAGSAGATGSWRSPSEPQEPLVQDLQAAVAAVQSAVHELLEFARSAVGNAAHTSDRALHAKLSRQLQKMEDVHQTLVAHGQALDAGRGGSGATLEDLDRLVACSRAVPEDAKQLASFLHGNASLLFRRTKATAPGPEGGGTLHPNPTDKTSSIQSRPLPSPPKFTSQDSPDGQYENSEGGWMEDYDYVHLQGKEEFEKTQKELLEKGSITRQGKSQLELQQLKQFERLEQEVSRPIDHDLANWTPAQPLAPGRTGGLGPSDRQLLLFYLEQCEANLTTLTNAVDAFFTAVATNQPPKIFVAHSKFVILSAHKLVFIGDTLSRQAKAADVRSQVTHYSNLLCDLLRGIVATTKAAALQYPSPSAAQDMVERVKELGHSTQQFRRVLGQLAAA

SEQ ID NO: 9591 - protein, 868 aa, Homo sapiens
  Payload ID: 1952;
  Gene Symbol: BCAR1;
  Gene Name: breast cancer anti-estrogen resistance 1;
  Uniprot ID:  P56945;
  ENSP ID: ENSP00000440415
MENVLAKALYDNVAESPDELSFRKGDIMTVLEQDTQGLDGWWLCSLHGRQGIVPGNRLKILVGMYDKKPAGPGPGPPATPAQPQPGLHAPAPPASQYTPMLPNTYQPQPDSVYLVPTPSKAQQGLYQVPGPSPQFQSPPAKQTSTFSKQTPHHPFPSPATDLYQVPPGPGGPAQDIYQVPPSAGMGHDIYQVPPSMDTRSWEGTKPPAKVVVPTRVGQGYVYEAAQPEQDEYDIPRHLLAPGPQDIYDVPPVRGLLPSQYGQEVYDTPPMAVKGPNGRDPLLEVYDVPPSVEKGLPPSNHHAVYDVPPSVSKDVPDGPLLREETYDVPPAFAKAKPFDPARTPLVLAAPPPDSPPAEDVYDVPPPAPDLYDVPPGLRRPGPGTLYDVPRERVLPPEVADGGVVDSGVYAVPPPAEREAPAEGKRLSASSTGSTRSSQSASSLEVAGPGREPLELEVAVEALARLQQGVSATVAHLLDLAGSAGATGSWRSPSEPQEPLVQDLQAAVAAVQSAVHELLEFARSAVGNAAHTSDRALHAKLSRQLQKMEDVHQTLVAHGQALDAGRGGSGATLEDLDRLVACSRAVPEDAKQLASFLHGNASLLFRRTKATAPGPEGGGTLHPNPTDKTSSIQSRPLPSPPKFTSQDSPDGQYENSEGGWMEDYDYVHLQGKEEFEKTQKELLEKGSITRQGKSQLELQQLKQFERLEQEVSRPIDHDLANWTPAQPLAPGRTGGLGPSDRQLLLFYLEQCEANLTTLTNAVDAFFTAVATNQPPKIFVAHSKFVILSAHKLVFIGDTLSRQAKAADVRSQVTHYSNLLCDLLRGIVATTKAAALQYPSPSAAQDMVERVKELGHSTQQFRRVLGQLAAA

SEQ ID NO: 9592 - protein, 57 aa, Homo sapiens
  Payload ID: 1952;
  Gene Symbol: BCAR1;
  Gene Name: breast cancer anti-estrogen resistance 1;
  ENSP ID: ENSP00000442161
MPAKPFLSSVLLSWKVLDFSGPGPQGTGQPCSCGHWAEGQGGPPEPAGGPVSQGSSD

SEQ ID NO: 9593 - protein, 870 aa, Homo sapiens
  Payload ID: 1952;
  Gene Symbol: BCAR1;
  Gene Name: breast cancer anti-estrogen resistance 1;
  Uniprot ID:  P56945;
  ENSP ID: ENSP00000443841
MSVPNVLAKALYDNVAESPDELSFRKGDIMTVLEQDTQGLDGWWLCSLHGRQGIVPGNRLKILVGMYDKKPAGPGPGPPATPAQPQPGLHAPAPPASQYTPMLPNTYQPQPDSVYLVPTPSKAQQGLYQVPGPSPQFQSPPAKQTSTFSKQTPHHPFPSPATDLYQVPPGPGGPAQDIYQVPPSAGMGHDIYQVPPSMDTRSWEGTKPPAKVVVPTRVGQGYVYEAAQPEQDEYDIPRHLLAPGPQDIYDVPPVRGLLPSQYGQEVYDTPPMAVKGPNGRDPLLEVYDVPPSVEKGLPPSNHHAVYDVPPSVSKDVPDGPLLREETYDVPPAFAKAKPFDPARTPLVLAAPPPDSPPAEDVYDVPPPAPDLYDVPPGLRRPGPGTLYDVPRERVLPPEVADGGVVDSGVYAVPPPAEREAPAEGKRLSASSTGSTRSSQSASSLEVAGPGREPLELEVAVEALARLQQGVSATVAHLLDLAGSAGATGSWRSPSEPQEPLVQDLQAAVAAVQSAVHELLEFARSAVGNAAHTSDRALHAKLSRQLQKMEDVHQTLVAHGQALDAGRGGSGATLEDLDRLVACSRAVPEDAKQLASFLHGNASLLFRRTKATAPGPEGGGTLHPNPTDKTSSIQSRPLPSPPKFTSQDSPDGQYENSEGGWMEDYDYVHLQGKEEFEKTQKELLEKGSITRQGKSQLELQQLKQFERLEQEVSRPIDHDLANWTPAQPLAPGRTGGLGPSDRQLLLFYLEQCEANLTTLTNAVDAFFTAVATNQPPKIFVAHSKFVILSAHKLVFIGDTLSRQAKAADVRSQVTHYSNLLCDLLRGIVATTKAAALQYPSPSAAQDMVERVKELGHSTQQFRRVLGQLAAA

SEQ ID NO: 9594 - protein, 238 aa, Homo sapiens
  Payload ID: 1952;
  Gene Symbol: BCAR1;
  Gene Name: breast cancer anti-estrogen resistance 1;
  ENSP ID: ENSP00000454702
  MOD_RES (1)..(1): Any amino acid
XPQFQSPPAKQTSTFSKQTPHHPFPSPATDLYQVPPGPGGPAQDIYQVPPSAGMGHDIYQVPPSMDTRSWEGTKPPAKVVVPTRVGQGYVYEAAQPEQDEYDIPRHLLAPGPQDIYDVPPVRGLLPSQYGQEVYDVPPSVSKDVPDGPLLREETYDVPPAFAKAKPFDPARTPLVLAAPPPDSPPAEDVYDVPPPAPDLYDVPPGLRRPGPGTLYDVPRERVLPPEVADGGVVDSGVY

SEQ ID NO: 9595 - protein, 57 aa, Homo sapiens; identical to SEQ ID NO: 9592
  Payload ID: 1952;
  Gene Symbol: BCAR1;
  Gene Name: breast cancer anti-estrogen resistance 1;
  ENSP ID: ENSP00000455166

SEQ ID NO: 9596 - protein, 133 aa, Homo sapiens
  Payload ID: 1952;
  Gene Symbol: BCAR1;
  Gene Name: breast cancer anti-estrogen resistance 1;
  ENSP ID: ENSP00000455810
MTVLEQDTQGLDGWWLCSLHGRQGIVPGNRLKILVGMYDKKPAGPGPGPPATPAQPQPGLHAPAPPASQYTPMLPNTYQPQPDSVYLVPTPSKAQQGLYQVPGPSPQFQSPPAKQTSTFSKQTPHHPFPSPAT

SEQ ID NO: 9597 - protein, 135 aa, Homo sapiens
  Payload ID: 1952;
  Gene Symbol: BCAR1;
  Gene Name: breast cancer anti-estrogen resistance 1;
  ENSP ID: ENSP00000456625
MTVLEQDTQGLDGWWLCSLHGRQGIVPGNRLKILVGMYDKKPAGPGPGPPATPAQPQPGLHAPAPPASQYTPMLPNTYQPQPDSVYLVPTPSKAQQGLYQVPGPSPQFQSPPAKQTSTFSKQTPHHPFPSPATDL

SEQ ID NO: 9598 - protein, 128 aa, Homo sapiens
  Payload ID: 1952;
  Gene Symbol: BCAR1;
  Gene Name: breast cancer anti-estrogen resistance 1;
  ENSP ID: ENSP00000456929
MTVLEQDTQGLDGWWLCSLHGRQGIVPGNRLKILVGMYDKKPAGPGPGPPATPAQPQPGLHAPAPPASQYTPMLPNTYQPQPDSVYLVPTPSKAQQGLYQVPGPSPQFQSPPAKQTSTFSKQTPHHPF

SEQ ID NO: 9599 - protein, 58 aa, Homo sapiens
  Payload ID: 1952;
  Gene Symbol: BCAR1;
  Gene Name: breast cancer anti-estrogen resistance 1;
  ENSP ID: ENSP00000457097
MTVLEQDTQGLDGWWLCSLHGRQGIVPGNRLKILVGMYDKKPAGPGPGPPATPAQPQP

SEQ ID NO: 9600 - protein, 50 aa, Homo sapiens
  Payload ID: 1952;
  Gene Symbol: BCAR1;
  Gene Name: breast cancer anti-estrogen resistance 1;
  ENSP ID: ENSP00000457231
MTVLEQDTQGLDGWWLCSLHGRQGIVPGNRLKILVGMYDKKPAGPGPGPP

SEQ ID NO: 9601 - protein, 80 aa, Homo sapiens
  Payload ID: 1952;
  Gene Symbol: BCAR1;
  Gene Name: breast cancer anti-estrogen resistance 1;
  ENSP ID: ENSP00000457457
MTVLEQDTQGLDGWWLCSLHGRQGIVPGNRLKILVGMYDKKPAGPGPGPPATPAQPQPGLHAPAPPASQYTPMLPNTYQP

SEQ ID NO: 9602 - protein, 120 aa, Homo sapiens
  Payload ID: 1952;
  Gene Symbol: BCAR1;
  Gene Name: breast cancer anti-estrogen resistance 1;
  ENSP ID: ENSP00000458088
MTVLEQDTQGLDGWWLCSLHGRQGIVPGNRLKILVGMYDKKPAGPGPGPPATPAQPQPGLHAPAPPASQYTPMLPNTYQPQPDSVYLVPTPSKAQQGLYQVPGPSPQFQSPPAKQTSTFS

SEQ ID NO: 9603 - protein, 825 aa, Homo sapiens
  Payload ID: 1953;
  Gene Symbol: BCAR3;
  Gene Name: breast cancer anti-estrogen resistance 3;
  Uniprot ID:  O75815;
  ENSP ID: ENSP00000260502
MAAGKFASLPRNMPVNHQFPLASSMDLLSSRSPLAEHRPDAYQDVSIHGTLPRKKKGPPPIRSCDDFSHMGTLPHSKSPRQNSPVTQDGIQESPWQDRHGETFTFRDPHLLDPTVEYVKFSKERHIMDRTPEKLKKELEEELLLSSEDLRSHAWYHGRIPRQVSENLVQRDGDFLVRDSLSSPGNFVLTCQWKNLAQHFKINRTVLRLSEAYSRVQYQFEMESFDSIPGLVRCYVGNRRPISQQSGAIIFQPINRTVPLRCLEEHYGTSPGQAREGSLTKGRPDVAKRLSLTMGGVQAREQNLPRGNLLRNKEKSGSQPACLDHMQDRRALSLKAHQSESYLPIGCKLPPQSSGVDTSPCPNSPVFRTGSEPALSPAVVRRVSSDARAGEALRGSDSQLCPKPPPKPCKVPFLKVPSSPSAWLNSEANYCELNPAFATGCGRGAKLPSCAQGSHTELLTAKQNEAPGPRNSGVNYLILDDDDRERPWEPAAAQMEKGQWDKGEFVTPLLETVSSFRPNEFESKFLPPENKPLETAMLKRAKELFTNNDPKVIAQHVLSMDCRVARILGVSEEMRRNMGVSSGLELITLPHGHQLRLDIIERHNTMAIGIAVDILGCTGTLEDRAATLSKIIQVAVELKDSMGDLYSFSALMKALEMPQITRLEKTWTALRHQYTQTAILYEKQLKPFSKLLHEGRESTCVPPNNVSVPLLMPLVTLMERQAVTFEGTDMWEKNDQSCEIMLNHLATARFMAEAADSYRMNAERILAGFQPDEEMNEICKTEFQMRLLWGSKGAQVNQTERYEKFNQILTALSRKLEPPPVKQAEL

SEQ ID NO: 9604 - protein, 825 aa, Homo sapiens; identical to SEQ ID NO: 9603
  Payload ID: 1953;
  Gene Symbol: BCAR3;
  Gene Name: breast cancer anti-estrogen resistance 3;
  Uniprot ID:  O75815;
  ENSP ID: ENSP00000359263

SEQ ID NO: 9605 - protein, 825 aa, Homo sapiens; identical to SEQ ID NO: 9603
  Payload ID: 1953;
  Gene Symbol: BCAR3;
  Gene Name: breast cancer anti-estrogen resistance 3;
  Uniprot ID:  O75815;
  ENSP ID: ENSP00000359264

SEQ ID NO: 9606 - protein, 734 aa, Homo sapiens
  Payload ID: 1953;
  Gene Symbol: BCAR3;
  Gene Name: breast cancer anti-estrogen resistance 3;
  Uniprot ID:  O75815;
  ENSP ID: ENSP00000359267
MPKECSAFHALSAALCCFYHRKSFIGVKFSKERHIMDRTPEKLKKELEEELLLSSEDLRSHAWYHGRIPRQVSENLVQRDGDFLVRDSLSSPGNFVLTCQWKNLAQHFKINRTVLRLSEAYSRVQYQFEMESFDSIPGLVRCYVGNRRPISQQSGAIIFQPINRTVPLRCLEEHYGTSPGQAREGSLTKGRPDVAKRLSLTMGGVQAREQNLPRGNLLRNKEKSGSQPACLDHMQDRRALSLKAHQSESYLPIGCKLPPQSSGVDTSPCPNSPVFRTGSEPALSPAVVRRVSSDARAGEALRGSDSQLCPKPPPKPCKVPFLKVPSSPSAWLNSEANYCELNPAFATGCGRGAKLPSCAQGSHTELLTAKQNEAPGPRNSGVNYLILDDDDRERPWEPAAAQMEKGQWDKGEFVTPLLETVSSFRPNEFESKFLPPENKPLETAMLKRAKELFTNNDPKVIAQHVLSMDCRVARILGVSEEMRRNMGVSSGLELITLPHGHQLRLDIIERHNTMAIGIAVDILGCTGTLEDRAATLSKIIQVAVELKDSMGDLYSFSALMKALEMPQITRLEKTWTALRHQYTQTAILYEKQLKPFSKLLHEGRESTCVPPNNVSVPLLMPLVTLMERQAVTFEGTDMWEKNDQSCEIMLNHLATARFMAEAADSYRMNAERILAGFQPDEEMNEICKTEFQMRLLWGSKGAQVNQTERYEKFNQILTALSRKLEPPPVKQAEL

SEQ ID NO: 9607 - protein, 501 aa, Homo sapiens
  Payload ID: 1953;
  Gene Symbol: BCAR3;
  Gene Name: breast cancer anti-estrogen resistance 3;
  Uniprot ID:  O75815;
  ENSP ID: ENSP00000441343
MQDRRALSLKAHQSESYLPIGCKLPPQSSGVDTSPCPNSPVFRTGSEPALSPAVVRRVSSDARAGEALRGSDSQLCPKPPPKPCKVPFLKVPSSPSAWLNSEANYCELNPAFATGCGRGAKLPSCAQGSHTELLTAKQNEAPGPRNSGVNYLILDDDDRERPWEPAAAQMEKGQWDKGEFVTPLLETVSSFRPNEFESKFLPPENKPLETAMLKRAKELFTNNDPKVIAQHVLSMDCRVARILGVSEEMRRNMGVSSGLELITLPHGHQLRLDIIERHNTMAIGIAVDILGCTGTLEDRAATLSKIIQVAVELKDSMGDLYSFSALMKALEMPQITRLEKTWTALRHQYTQTAILYEKQLKPFSKLLHEGRESTCVPPNNVSVPLLMPLVTLMERQAVTFEGTDMWEKNDQSCEIMLNHLATARFMAEAADSYRMNAERILAGFQPDEEMNEICKTEFQMRLLWGSKGAQVNQTERYEKFNQILTALSRKLEPPPVKQAEL

SEQ ID NO: 9608 - protein, 246 aa, Homo sapiens
  Payload ID: 1954;
  Gene Symbol: BRMS1;
  Gene Name: breast cancer metastasis suppressor 1;
  Uniprot ID:  Q9HCU9;
  ENSP ID: ENSP00000353042
MPVQPPSKDTEEMEAEGDSAAEMNGEEEESEEERSGSQTESEEESSEMDDEDYERRRSECVSEMLDLEKQFSELKEKLFRERLSQLRLRLEEVGAERAPEYTEPLGGLQRSLKIRIQVAGIYKGFCLDVIRNKYECELQGAKQHLESEKLLLYDTLQGELQERIQRLEEDRQSLDLSSEWWDDKLHARGSSRSWDSLPPSKRKKAPLVSGPYIVYMLQEIDILEDWTAIKKARAAVSPQKRKSDGP

SEQ ID NO: 9609 - protein, 290 aa, Homo sapiens
  Payload ID: 1954;
  Gene Symbol: BRMS1;
  Gene Name: breast cancer metastasis suppressor 1;
  ENSP ID: ENSP00000396052
MPVQPPSKDTEEMEAEGDSAAEMNGEEEESEEERSGSQTESEEESSEMDDEDYERRRSECVSEMLDLEKQFSELKEKLFRERLSQLRLRLEEVGAERAPEYTEPLGGLQRSLKIRIQVAGIYKGFCLDVIRNKYECELQGAKQHLESEKLLLYDTLQGELQERIQRLEEDRQSLDLSSEWWDDKLHARGSSRSWDSLPPSKRKKAPLVSGPYIVYMLQEIDILEDWTAIKKARAAVSPQKRKSDDRRTHRPLRVCPARLLWCCWALPLHLALAWTPPLPSSRPAQLWPWS

SEQ ID NO: 9610 - protein, 267 aa, Homo sapiens
  Payload ID: 1954;
  Gene Symbol: BRMS1;
  Gene Name: breast cancer metastasis suppressor 1;
  ENSP ID: ENSP00000431510
  MOD_RES (1)..(1): Any amino acid
XTESEEESSEMDDEDYERRRSECVSEMLDLEKQFSELKEKLFRERLSQLRLRLEEVGAERAPEYTEPLGGLQRSLKIRIQVAGIYKGFCLDVIRNKYECELQGAKQHLESEKLLLYDTLQGELQERIQRLEEDRQSLDLSSEWWDDKLHARGSSRSWDSLPPSKRKKAPLVSGPYIVYMLQEIDILEDWTAIKKDLDPAVHSQGDPQSSWHCTQDSRLPPADRRTHRPLRVCPARLLWCCWALPLHLALAWTPPLPSSRPAQLWPWS

SEQ ID NO: 9611 - protein, 244 aa, Homo sapiens
  Payload ID: 1954;
  Gene Symbol: BRMS1;
  Gene Name: breast cancer metastasis suppressor 1;
  ENSP ID: ENSP00000433740
MPVQPPSKDTEEMEAEGDSAAEMNGEEEESEEERSGSQTESEEESSEMDDEDYERRRSECVSEMLDLEKQFSELKEKLFRERLSQLRLRLEEVGAERAPEYTEPLGGLQRSLKIRIQVAGIYKGFCLDVIRNKYECELQGAKQHLESEKLLLYDTLQGELQERIQRLEEDRQSLDLSSEWWDDKLHARGSSRSWDSLPPSKRKKAPLVSGPYIVYMLQEIDILEDWTAIKKARAAVSPQKRKSD

SEQ ID NO: 9612 - protein, 126 aa, Homo sapiens
  Payload ID: 1954;
  Gene Symbol: BRMS1;
  Gene Name: breast cancer metastasis suppressor 1;
  ENSP ID: ENSP00000434591
MPVQPPSKDTEEMEAEGDSAAEMNGEEEESEEERSGSQTESEEESSEMDDEDYERRRSECVSEMLDLEKQFSELKEKLFRERLSQLRLRLEEVGAERAPEYTEPLGGLQRSLKIRIQGSTRASVWM

SEQ ID NO: 9613 - protein, 323 aa, Homo sapiens
  Payload ID: 1955;
  Gene Symbol: BRMS1L;
  Gene Name: breast cancer metastasis-suppressor 1-like;
  Uniprot ID:  Q5PSV4;
  ENSP ID: ENSP00000216807
MPVHSRGDKKETNHHDEMEVDYAENEGSSSEDEDTESSSVSEDGDSSEMDDEDCERRRMECLDEMSNLEKQFTDLKDQLYKERLSQVDAKLQEVIAGKAPEYLEPLATLQENMQIRTKVAGIYRELCLESVKNKYECEIQASRQHCESEKLLLYDTVQSELEEKIRRLEEDRHSIDITSELWNDELQSRKKRKDPFSPDKKKPVVVSGPYIVYMLQDLDILEDWTTIRKAMATLGPHRVKTEPPVKLEKHLHSARSEEGRLYYDGEWYIRGQTICIDKKDECPTSAVITTINHDEVWFKRPDGSKSKLYISQLQKGKYSIKHS

SEQ ID NO: 9614 - protein, 215 aa, Homo sapiens
  Payload ID: 1955;
  Gene Symbol: BRMS1L;
  Gene Name: breast cancer metastasis-suppressor 1-like;
  ENSP ID: ENSP00000446826
  MOD_RES (1)..(1): Any amino acid
XVDAKLQEVIAGKAPEYLEPLATLQENMQIRTKVAGIYRELCLESVKNKYECEIQASRQHCESEKLLLYDTVQSELEEKIRRLEEDRHSIDITSELWNDELQSRKKRKDPFSPDKKKPVVVSGPYIVYMLQDLDILEDWTTIRKAMATLGPHRVKTEPPVKLEKHLHSARSEEGRLYYDGEWYIRGQTICIDKKDECPTRSYNAAYVYPIGVIMK

SEQ ID NO: 9615 - protein, 48 aa, Homo sapiens
  Payload ID: 1955;
  Gene Symbol: BRMS1L;
  Gene Name: breast cancer metastasis-suppressor 1-like;
  ENSP ID: ENSP00000447022
MPVHSRGDKKETNHHDEMEVDYAENEGSSSEDEDTESSSVSEDGDSSV

SEQ ID NO: 9616 - protein, 48 aa, Homo sapiens; identical to SEQ ID NO: 9615
  Payload ID: 1955;
  Gene Symbol: BRMS1L;
  Gene Name: breast cancer metastasis-suppressor 1-like;
  ENSP ID: ENSP00000448615

SEQ ID NO: 9617 - protein, 506 aa, Homo sapiens
  Payload ID: 1956;
  Gene Symbol: BCAS1;
  Gene Name: breast carcinoma amplified sequence 1;
  ENSP ID: ENSP00000360490
MGNQMSVPQRVEDQENEPEAETYQDNASALNGVPVVVSTHTVQHLEEVDLGISVKTDNVATSSPETTEISAVADANGKNLGKEAKPEAPAAKSRFFLMLSRPVPGRTGDQAADSSLGSVKLDVSSNKAPANKDPSESWTLPVAAGPGQDTDKTPGHAPAQDKVLSAARDPTLLPPETGGAGGEAPSKPKDSSFFDKFFKLDKGQEKVPGDSQQEAKRAEHQDKVDEVPGLSGQSDDVPAGKDIVDGKEKEGQELGTADCSVPGDPEGLETAKDDSQAAAIAENNNSIMSFFKTLVSPNKAETKKDPEDTGAEKSPTTSADLKSDKANFTSQETQGAGKNSKGCNPSGHTQSVTTPEPAKEGTKEKSGPTSLPLGKLFWKKSVKEDSVPTGAEENTSDSTEKTITPPEPEPTGAPQKGKEGSSKDKKSAAEMNKQKSNKQEAKEPAQCTEQATVDTNSLQNGDKLQKRPEKRQQSLGGFFKGLGPKRMLDAQVQTDPVSIGPVGKSK

SEQ ID NO: 9618 - protein, 384 aa, Homo sapiens
  Payload ID: 1956;
  Gene Symbol: BCAS1;
  Gene Name: breast carcinoma amplified sequence 1;
  ENSP ID: ENSP00000360495
MSAPIKLQRTKTQVRAGHFRWQLDRGRTQIKPQGTPRPKTRSSLPPGIPRFSHLRQGEQEEKLPPSPRTPAFDKFFKLDKGQEKVPGDSQQEAKRAEHQDKVDEVPGLSGQSDDVPAGKDIVDGKEKEGQELGTADCSVPGDPEGLETAKDDSQAAAIAENNNSIMSFFKTLVSPNKAETKKDPEDTGAEKSPTTSADLKSDKANFTSQETQGAGKNSKGCNPSGHTQSVTTPEPAKEGTKEKSGPTSLPLGKLFWKKSVKEDSVPTGAEENTSDSTEKTITPPEPEPTGAPQKGKEGSSKDKKSAAEMNKQKSNKQEAKEPAQCTEQATVDTNSLQNGDKLQKRPEKRQQSLGGFFKGLGPKRMLDAQVQTDPVSIGPVGKSK

SEQ ID NO: 9619 - protein, 584 aa, Homo sapiens
  Payload ID: 1956;
  Gene Symbol: BCAS1;
  Gene Name: breast carcinoma amplified sequence 1;
  Uniprot ID:  O75363;
  ENSP ID: ENSP00000379290
MGNQMSVPQRVEDQENEPEAETYQDNASALNGVPVVVSTHTVQHLEEVDLGISVKTDNVATSSPETTEISAVADANGKNLGKEAKPEAPAAKSRFFLMLSRPVPGRTGDQAADSSLGSVKLDVSSNKAPANKDPSESWTLPVAAGPGQDTDKTPGHAPAQDKVLSAARDPTLLPPETGGAGGEAPSKPKDSSFFDKFFKLDKGQEKVPGDSQQEAKRAEHQDKVDEVPGLSGQSDDVPAGKDIVDGKEKEGQELGTADCSVPGDPEGLETAKDDSQAAAIAENNNSIMSFFKTLVSPNKAETKKDPEDTGAEKSPTTSADLKSDKANFTSQETQGAGKNSKGCNPSGHTQSVTTPEPAKEGTKEKSGPTSLPLGKLFWKKSVKEDSVPTGAEENVVCESPVEIIKSKEVESALQTVDLNEGDAAPEPTEAKLKREESKPRTSLMAFLRQMSVKGDGGITHSEEINGKDSSCQTSDSTEKTITPPEPEPTGAPQKGKEGSSKDKKSAAEMNKQKSNKQEAKEPAQCTEQATVDTNSLQNGDKLQKRPEKRQQSLGGFFKGLGPKRMLDAQVQTDPVSIGPVGKSK

SEQ ID NO: 9620 - protein, 476 aa, Homo sapiens
  Payload ID: 1956;
  Gene Symbol: BCAS1;
  Gene Name: breast carcinoma amplified sequence 1;
  ENSP ID: ENSP00000396361
TLPVAAGPGQDTDKTPGHAPAQDKVLSAARDPTLLPPETGGAGGEAPSKPKDSSFFDKFFKLDKGQEKVPGDSQQEAKRAEHQDKVDEVPGLSGQSDDVPAGKDIVDGKEKEGQELGTADCSVPGDPEGLETAKDDSQAAAIAENNNSIMSFFKTLVSPNKAETKKDPEDTASKAESVCDGQAGQKTSEIQARGTKKKHLDSPRLGLAFRKFFRHKGAEKSPTTSADLKSDKANFTSQETQGAGKNSKGCNPSGHTQSVTTPEPAKEGTKEKSGPTSLPLGKLFWKKVVCESPVEIIKSKEVESALQTVDLNEGDAAPEPTEAKLKREESKPRTSLMAFLRQMTSDSTEKTITPPEPEPTGAPQKGKEGSSKDKKSAAEMNKQKSNKQEAKEPAQCTEQATVDTNSLQNGDKLQKRPEKRQQSLGGFFKGLGPKRMLDAQVQTDPVSIGPVGKSKYTGKCVFSHVKKKWPFQEWSY

SEQ ID NO: 9621 - protein, 247 aa, Homo sapiens
  Payload ID: 1956;
  Gene Symbol: BCAS1;
  Gene Name: breast carcinoma amplified sequence 1;
  ENSP ID: ENSP00000399936
  MOD_RES (1)..(1): Any amino acid
XNNNSIMSFFKTLVSPNKAETKKDPEDTGAEKSPTTSADLKSDKANFTSQETQGAGKNSKGCNPSGHTQSVTTPEPAKEGTKEKSGPTSLPLGKLFWKKSVKEDSVPTGAEENSVKGDGGITHSEEINGKDSSCQTSDSTEKTITPPEPEPTGAPQKGKEGSSKDKKSAAEMNKQKSNKQEAKEPAQCTEQATVDTNSLQNGDKLQKRPEKRQQSLGGFFKGLGPKRMLDAQVQTDPVSIGPVGKSK

SEQ ID NO: 9622 - protein, 225 aa, Homo sapiens
  Payload ID: 1957;
  Gene Symbol: BCAS2;
  Gene Name: breast carcinoma amplified sequence 2;
  Uniprot ID:  O75934;
  ENSP ID: ENSP00000358554
MAGTGLVAGEVVVDALPYFDQGYEAPGVREAAAALVEEETRRYRPTKNYLSYLTAPDYSAFETDIMRNEFERLAARQPIELLSMKRYELPAPSSGQKNDITAWQECVNNSMAQLEHQAVRIENLELMSQHGCNAWKVYNENLVHMIEHAQKELQKLRKHIQDLNWQRKNMQLTAGSKLREMESNWVSLVSKNYEIERTIVQLENEIYQIKQQHGEANKENIRQDF

SEQ ID NO: 9623 - protein, 928 aa, Homo sapiens
  Payload ID: 1958;
  Gene Symbol: BCAS3;
  Gene Name: breast carcinoma amplified sequence 3;
  Uniprot ID:  Q9H6U6;
  ENSP ID: ENSP00000375067
MNEAMATDSPRRPSRCTGGVVVRPQAVTEQSYMESVVTFLQDVVPQAYSGTPLTEEKEKIVWVRFENADLNDTSRNLEFHEIHSTGNEPPLLIMIGYSDGMQVWSIPISGEAQELFSVRHGPIRAARILPAPQFGAQKCDNFAEKRPLLGVCKSIGSSGTSPPYCCVDLYSLRTGEMVKSIQFKTPIYDLHCNKRILVVVLQEKIAAFDSCTFTKKFFVTSCYPCPGPNMNPIALGSRWLAYAENKLIRCHQSRGGACGDNIQSYTATVISAAKTLKSGLTMVGKVVTQLTGTLPSGVTEDDVAIHSNSRRSPLVPGIITVIDTETVGEGQVLVSEDSDSDGIVAHFPAHEKPVCCMAFNTSGMLLVTTDTLGHDFHVFQILTHPWSSSQCAVHHLYTLHRGETEAKVQDICFSHDCRWVVVSTLRGTSHVFPINPYGGQPCVRTHMSPRVVNRMSRFQKSAGLEEIEQELTSKQGGRCSPVPGLSSSPSGSPLHGKLNSQDSYNNFTNNNPGNPRLSPLPSLMVVMPLAQIKQPMTLGTITKRTGPYLFGAGCFSIKAPCKVKPPPQISPSKSMGGEFCVAAIFGTSRSWFANNAGLKREKDQSKQVVVESLYIISCYGTLVEHMMEPRPLSTAPKISDDTPLEMMTSPRASWTLVRTPQWNELQPPFNANHPLLLAADAVQYYQFLLAGLVPPGSPGPITRHGSYDSLASDHSGQEDEEWLSQVEIVTHTGPHRRLWMGPQFQFKTIHPSGQTTVISSSSSVLQSHGPSDTPQPLLDFDTDDLDLNSLRIQPVRSDPVSMPGSSRPVSDRRGVSTVIDAASGTFDRSVTLLEVCGSWPEGFGLRHMSSMEHTEEGLRERLADAMAESPSRDVVGSGTELQREGSIETLSNSSGSTSGSIPRNFDGYRSPLPTNESQPLSLFPTGFP

SEQ ID NO: 9624 - protein, 913 aa, Homo sapiens
  Payload ID: 1958;
  Gene Symbol: BCAS3;
  Gene Name: breast carcinoma amplified sequence 3;
  Uniprot ID:  Q9H6U6;
  ENSP ID: ENSP00000385323
MNEAMATDSPRRPSRCTGGVVVRPQAVTEQSYMESVVTFLQDVVPQAYSGTPLTEEKEKIVWVRFENADLNDTSRNLEFHEIHSTGNEPPLLIMIGYSDGMQVWSIPISGEAQELFSVRHGPIRAARILPAPQFGAQKCDNFAEKRPLLGVCKSIGSSGTSPPYCCVDLYSLRTGEMVKSIQFKTPIYDLHCNKRILVVVLQEKIAAFDSCTFTKKFFVTSCYPCPGPNMNPIALGSRWLAYAENKLIRCHQSRGGACGDNIQSYTATVISAAKTLKSGLTMVGKVVTQLTGTLPSGVTEDDVAIHSNSRRSPLVPGIITVIDTETVGEGQVLVSEDSDSDGIVAHFPAHEKPVCCMAFNTSGMLLVTTDTLGHDFHVFQILTHPWSSSQCAVHHLYTLHRGETEAKVQDICFSHDCRWVVVSTLRGTSHVFPINPYGGQPCVRTHMSPRVVNRMSRFQKSAGLEEIEQELTSKQGGRCSPVPGLSSSPSGSPLHGKLNSQDSYNNFTNNNPGNPRLSPLPSLMVVMPLAQIKQPMTLGTITKRTGKVKPPPQISPSKSMGGEFCVAAIFGTSRSWFANNAGLKREKDQSKQVVVESLYIISCYGTLVEHMMEPRPLSTAPKISDDTPLEMMTSPRASWTLVRTPQWNELQPPFNANHPLLLAADAVQYYQFLLAGLVPPGSPGPITRHGSYDSLASDHSGQEDEEWLSQVEIVTHTGPHRRLWMGPQFQFKTIHPSGQTTVISSSSSVLQSHGPSDTPQPLLDFDTDDLDLNSLRIQPVRSDPVSMPGSSRPVSDRRGVSTVIDAASGTFDRSVTLLEVCGSWPEGFGLRHMSSMEHTEEGLRERLADAMAESPSRDVVGSGTELQREGSIETLSNSSGSTSGSIPRNFDGYRSPLPTNESQPLSLFPTGFP

SEQ ID NO: 9625 - protein, 935 aa, Homo sapiens
  Payload ID: 1958;
  Gene Symbol: BCAS3;
  Gene Name: breast carcinoma amplified sequence 3;
  Uniprot ID:  Q9H6U6;
  ENSP ID: ENSP00000386173
MNEAMATDSPRRPSRCTGGVVVRPQAVTEQSYMESVVTFLQDVVPQAYSGTPLTEEKEKIVWVRFENADLNDTSRNLEFHEIHSTGNEPPLLIMIGYSDGMQVWSIPISGEAQELFSVRHGPIRAARILPAPQFGAQKCDNFAEKRPLLGVCKSIGSSGTSPPYCCVDLYSLRTGEMVKSIQFKTPIYDLHCNKRILVVVLQEKIAAFDSCTFTKKFFVTSCYPCPGPNMNPIALGSRWLAYAENKLIRCHQSRGGACGDNIQSYTATVISAAKTLKSGLTMVGKVVTQLTGTLPSGVTEDDVAIHSNSRRSPLVPGIITVIDTETVGEGQVLVSEDSDSDGIVAHFPAHEKPVCCMAFNTSGMLLVTTDTLGHDFHVFQILTHPWSSSQCAVHHLYTLHRGETEAKVQDICFSHDCRWVVVSTLRGTSHVFPINPYGGQPCVRTHMSPRVVNRMSRFQKSAGLEEIEQELTSKQGGRCSPVPGLSSSPSGSPLHGKLNSQDSYNNFTNNNPGNPRLSPLPSLMVVMPLAQIKQPMTLGTITKRTGKVKPPPQISPSKSMGGEFCVAAIFGTSRSWFANNAGLKREKDQSKQVVVESLYIISCYGTLVEHMMEPRPLSTAPKISDDTPLEMMTSPRASWTLVRTPQWNELQPPFNANHPLLLAADAVQYYQFLLAGLVPPGSPGPITRHGSYDSLASDHSGQEDEEWLSQVEIVTHTGPHRRLWMGPQFQFKTIHPSGQTTVISSSSSVLQSHGPSDTPQPLLDFDTDDLDLNSLRIQPVRSDPVSMPGSSRPVSDRRGVSTVIDAASGTFDRSVTLLEVCGSWPEGFGLRHMSSMEHTEEGLRERLADAMAESPSRDVVGSGTDTALDVAVKTFPPERHVAVKCFELQREGSIETLSNSSGSTSGSIPRNFDGYRSPLPTNESQPLSLFPTGFP

SEQ ID NO: 9626 - protein, 183 aa, Homo sapiens
  Payload ID: 1958;
  Gene Symbol: BCAS3;
  Gene Name: breast carcinoma amplified sequence 3;
  ENSP ID: ENSP00000464711
SSVLQSHGPSDTPQPLLDFDTDDLDLNSLRIQPVRSDPVSMPGSSRPVSDRRGVSTVIDAASVDSSTALEWGTSRPSHSRSAHHPSVQGARSSAHLKPQGLMETIHSHSRMSQHCMQPAMATGRRVRHGPWSCRLTCPRLSQDRAQDLTEEASQQGTFDRSVTLLEVCGSWPEGFGLRHMSSM

SEQ ID NO: 9627 - protein, 684 aa, Homo sapiens
  Payload ID: 1958;
  Gene Symbol: BCAS3;
  Gene Name: breast carcinoma amplified sequence 3;
  Uniprot ID:  Q9H6U6;
  ENSP ID: ENSP00000464825
MNPIALGSRWLAYAENKLIRCHQSRGGACGDNIQSYTATVISAAKTLKSGLTMVGKVVTQLTGTLPSGVTEDDVAIHSNSRRSPLVPGIITVIDTETVGEGQVLVSEDSDSDGIVAHFPAHEKPVCCMAFNTSGMLLVTTDTLGHDFHVFQILTHPWSSSQCAVHHLYTLHRGETEAKVQDICFSHDCRWVVVSTLRGTSHVFPINPYGGQPCVRTHMSPRVVNRMSRFQKSAGLEEIEQELTSKQGGRCSPVPGLSSSPSGSPLHGKLNSQDSYNNFTNNNPGNPRLSPLPSLMVVMPLAQIKQPMTLGTITKRTGKVKPPPQISPSKSMGGEFCVAAIFGTSRSWFANNAGLKREKDQSKQVVVESLYIISCYGTLVEHMMEPRPLSTAPKISDDTPLEMMTSPRASWTLVRTPQWNELQPPFNANHPLLLAADAVQYYQFLLAGLVPPGSPGPITRHGSYDSLASDHSGQEDEEWLSQVEIVTHTGPHRRLWMGPQFQFKTIHPSGQTTVISSSSSVLQSHGPSDTPQPLLDFDTDDLDLNSLRIQPVRSDPVSMPGSSRPVSDRRGVSTVIDAASGTFDRSVTLLEVCGSWPEGFGLRHMSSMEHTEEGLRERLADAMAESPSRDVVGSGTELQREGSIETLSNSSGSTSGSIPRNFDGYRSPLPTNESQPLSLFPTGFP

SEQ ID NO: 9628 - protein, 36 aa, Homo sapiens
  Payload ID: 1958;
  Gene Symbol: BCAS3;
  Gene Name: breast carcinoma amplified sequence 3;
  ENSP ID: ENSP00000464864
MNEAMATDSPRRPSRCTGGVVVRPQAVTYIKKSGIS

SEQ ID NO: 9629 - protein, 178 aa, Homo sapiens
  Payload ID: 1958;
  Gene Symbol: BCAS3;
  Gene Name: breast carcinoma amplified sequence 3;
  ENSP ID: ENSP00000465175
MNPIALGSRWLAYAENKLIRCHQSRGGACGDNIQSYTATVISAAKTLKSGLTMVGKVVTQLTGTLPSGVTEDDVAIHSNSRRSPLVPGIITVIDTETVGEGQVLVSEDSDSDGIVAHFPAHEKPVCCMAFNTSGMLLVTTDTLGHDFHVFQILTHPWSSSQCAVHHLYTLHRGETEAK

SEQ ID NO: 9630 - protein, 135 aa, Homo sapiens
  Payload ID: 1958;
  Gene Symbol: BCAS3;
  Gene Name: breast carcinoma amplified sequence 3;
  ENSP ID: ENSP00000465328
MNEAMATDSPRRPSRCTGGVVVRPQAVTEQSYMESVVTFLQDVVPQAYSGTPLTEEKEKIVWVRFENADLNDTSRNLEFHEIHSTGNEPPLLIMIGYSDGMQVWSIPISGEAQELFSVRHGPIRAARILPAPQFG

SEQ ID NO: 9631 - protein, 53 aa, Homo sapiens
  Payload ID: 1958;
  Gene Symbol: BCAS3;
  Gene Name: breast carcinoma amplified sequence 3;
  ENSP ID: ENSP00000465441
MNEAMATDSPRRPSRCTGGVVVRPQAVTEQSYMESVVTFLQDVVPQKSNVAKE

SEQ ID NO: 9632 - protein, 145 aa, Homo sapiens
  Payload ID: 1958;
  Gene Symbol: BCAS3;
  Gene Name: breast carcinoma amplified sequence 3;
  ENSP ID: ENSP00000465539
MNPIALGSRWLAYAENKLIRCHQSRGGACGDNIQSYTATVISAAKTLKSGLTMVGKVVTQLTGTLPSGVTEDDVAIHSNSRRSPLVPGIITVIDTETVGEGQVLVSEDSDSDGIVAHFPAHEKPVCCMAFNTSGMLLVTTDTLGH

SEQ ID NO: 9633 - protein, 56 aa, Homo sapiens
  Payload ID: 1958;
  Gene Symbol: BCAS3;
  Gene Name: breast carcinoma amplified sequence 3;
  ENSP ID: ENSP00000466075
MNEAMATDSPRRPSRCTGGVVVRPQAVTEQSYMESVVTFLQDVVPQASRKQLIGWV

SEQ ID NO: 9634 - protein, 928 aa, Homo sapiens
  Payload ID: 1958;
  Gene Symbol: BCAS3;
  Gene Name: breast carcinoma amplified sequence 3;
  Uniprot ID:  Q9H6U6;
  ENSP ID: ENSP00000466078
MNEAMATDSPRRPSRCTGGVVVRPQAVTEQSYMESVVTFLQDVVPQAYSGTPLTEEKEKIVWVRFENADLNDTSRNLEFHEIHSTGNEPPLLIMIGYSDGMQVWSIPISGEAQELFSVRHGPIRAARILPAPQFGAQKCDNFAEKRPLLGVCKSIGSSGTSPPYCCVDLYSLRTGEMVKSIQFKTPIYDLHCNKRILVVVLQEKIAAFDSCTFTKKFFVTSCYPCPGPNMNPIALGSRWLAYAENKLIRCHQSRGGACGDNIQSYTATVISAAKTLKSGLTMVGKVVTQLTGTLPSGVTEDDVAIHSNSRRSPLVPGIITVIDTETVGEGQVLVSEDSDSDGIVAHFPAHEKPVCCMAFNTSGMLLVTTDTLGHDFHVFQILTHPWSSSQCAVHHLYTLHRGETEAKVQDICFSHDCRWVVVSTLRGTSHVFPINPYGGQPCVRTHMSPRVVNRMSRFQKSAGLEEIEQELTSKQGGRCSPVPGLSSSPSGSPLHGKLNSQDSYNNFTNNNPGNPRLSPLPSLMVVMPLAQIKQPMTLGTITKRTGKVKPPPQISPSKSMGGEFCVAAIFGTSRSWFANNAGLKREKDQSKQVVVESLYIISCYGTLVEHMMEPRPLSTAPKISDDTPLEMMTSPRASWTLVRTPQWNELQPPFNANHPLLLAADAVQYYQFLLAGLVPPGSPGPITRHGSYDSLASDHSGQEDEEWLSQVEIVTHTGPHRRLWMGPQFQFKTIHPSGQTTVISSSSSVLQSHGPSDTPQPLLDFDTDDLDLNSLRIQPVRSDPVSMPGSSRPVSDRRGVSTVIDAASGTFDRSVTLLEVCGSWPEGFGLRHMSSMEHTEEGLRERLADAMAESPSRDVVGSGTDTALDVAVKTFPPERHVAVKCFGKKKGKKKQCQQPSVREQPNSNKACVRDGGRTSARGKHRDSE

SEQ ID NO: 9635 - protein, 184 aa, Homo sapiens
  Payload ID: 1958;
  Gene Symbol: BCAS3;
  Gene Name: breast carcinoma amplified sequence 3;
  ENSP ID: ENSP00000466552
MNPIALGSRWLAYAENKLIRCHQSRGGACGDNIQSYTATVISAAKTLKSGLTMVGKVVTQLTGTLPSGVTEDDVAIHSNSRRSPLVPGIITVIDTETVGEGQVLVSEDSDSDGIVAHFPAHEKPVCCMAFNTSGMLLVTTDTLGHDFHVFQILTHPWSSSQCAVHHLYTLHRGETEAKVQDICF

SEQ ID NO: 9636 - protein, 53 aa, Homo sapiens; identical to SEQ ID NO: 9631
  Payload ID: 1958;
  Gene Symbol: BCAS3;
  Gene Name: breast carcinoma amplified sequence 3;
  ENSP ID: ENSP00000467743

SEQ ID NO: 9637 - protein, 950 aa, Homo sapiens
  Payload ID: 1958;
  Gene Symbol: BCAS3;
  Gene Name: breast carcinoma amplified sequence 3;
  Uniprot ID:  Q9H6U6;
  ENSP ID: ENSP00000468592
MNEAMATDSPRRPSRCTGGVVVRPQAVTEQSYMESVVTFLQDVVPQAYSGTPLTEEKEKIVWVRFENADLNDTSRNLEFHEIHSTGNEPPLLIMIGYSDGMQVWSIPISGEAQELFSVRHGPIRAARILPAPQFGAQKCDNFAEKRPLLGVCKSIGSSGTSPPYCCVDLYSLRTGEMVKSIQFKTPIYDLHCNKRILVVVLQEKIAAFDSCTFTKKFFVTSCYPCPGPNMNPIALGSRWLAYAENKLIRCHQSRGGACGDNIQSYTATVISAAKTLKSGLTMVGKVVTQLTGTLPSGVTEDDVAIHSNSRRSPLVPGIITVIDTETVGEGQVLVSEDSDSDGIVAHFPAHEKPVCCMAFNTSGMLLVTTDTLGHDFHVFQILTHPWSSSQCAVHHLYTLHRGETEAKVQDICFSHDCRWVVVSTLRGTSHVFPINPYGGQPCVRTHMSPRVVNRMSRFQKSAGLEEIEQELTSKQGGRCSPVPGLSSSPSGSPLHGKLNSQDSYNNFTNNNPGNPRLSPLPSLMVVMPLAQIKQPMTLGTITKRTGPYLFGAGCFSIKAPCKVKPPPQISPSKSMGGEFCVAAIFGTSRSWFANNAGLKREKDQSKQVVVESLYIISCYGTLVEHMMEPRPLSTAPKISDDTPLEMMTSPRASWTLVRTPQWNELQPPFNANHPLLLAADAVQYYQFLLAGLVPPGSPGPITRHGSYDSLASDHSGQEDEEWLSQVEIVTHTGPHRRLWMGPQFQFKTIHPSGQTTVISSSSSVLQSHGPSDTPQPLLDFDTDDLDLNSLRIQPVRSDPVSMPGSSRPVSDRRGVSTVIDAASGTFDRSVTLLEVCGSWPEGFGLRHMSSMEHTEEGLRERLADAMAESPSRDVVGSGTDTALDVAVKTFPPERHVAVKCFELQREGSIETLSNSSGSTSGSIPRNFDGYRSPLPTNESQPLSLFPTGFP

SEQ ID NO: 9638 - protein, 699 aa, Homo sapiens
  Payload ID: 1958;
  Gene Symbol: BCAS3;
  Gene Name: breast carcinoma amplified sequence 3;
  ENSP ID: ENSP00000468682
MNPIALGSRWLAYAENKLIRCHQSRGGACGDNIQSYTATVISAAKTLKSGLTMVGKVVTQLTGTLPSGVTEDDVAIHSNSRRSPLVPGIITVIDTETVGEGQVLVSEDSDSDGIVAHFPAHEKPVCCMAFNTSGMLLVTTDTLGHDFHVFQILTHPWSSSQCAVHHLYTLHRGETEAKVQDICFSHDCRWVVVSTLRGTSHVFPINPYGGQPCVRTHMSPRVVNRMSRFQKSAGLEEIEQELTSKQGGRCSPVPGLSSSPSGSPLHGKLNSQDSYNNFTNNNPGNPRLSPLPSLMVVMPLAQIKQPMTLGTITKRTGPYLFGAGCFSIKAPCKVKPPPQISPSKSMGGEFCVAAIFGTSRSWFANNAGLKREKDQSKQVVVESLYIISCYGTLVEHMMEPRPLSTAPKISDDTPLEMMTSPRASWTLVRTPQWNELQPPFNANHPLLLAADAVQYYQFLLAGLVPPGSPGPITRHGSYDSLASDHSGQEDEEWLSQVEIVTHTGPHRRLWMGPQFQFKTIHPSGQTTVISSSSSVLQSHGPSDTPQPLLDFDTDDLDLNSLRIQPVRSDPVSMPGSSRPVSDRRGVSTVIDAASGTFDRSVTLLEVCGSWPEGFGLRHMSSMEHTEEGLRERLADAMAESPSRDVVGSGTELQREGSIETLSNSSGSTSGSIPRNFDGYRSPLPTNESQPLSLFPTGFP

SEQ ID NO: 9639 - protein, 650 aa, Homo sapiens
  Payload ID: 1958;
  Gene Symbol: BCAS3;
  Gene Name: breast carcinoma amplified sequence 3;
  ENSP ID: ENSP00000484605
TSPPYCCVDLYSLRTGEMVKSIQFKTPIYDLHCNKRILVVVLQEKIAAFDSCTFTKKFFVTSCYPCPGPNMNPIALGSRWLAYAENKLIRCHQSRGGACGDNIQSYTATVISAAKTLKSGLTMVGKVVTQLTGTLPSGVTEDDVAIHSNSRRSPLVPGIITVIDTETVGEGQVLVSEDSDSDGIVAHFPAHEKPVCCMAFNTSGMLLVTTDTLGHDFHVFQILTHPWSSSQCAVHHLYTLHRGETEAKVQDICFSHDCRWVVVSTLRGTSHVFPINPYGGQPCVRTHMSPRVVNRMSRFQKSAGLEEIEQELTSKQGGRCSPVPGLSSSPSGSPLHGKLNSQDSYNNFTNNNPGNPRLSPLPSLMVVMPLAQIKQPMTLGTITKRTGKVKPPPQISPSKSMGGEFCVAAIFGTSRSWFANNAGLKREKDQSKQVVVESLYIISCYGTLVEHMMEPRPLSTAPKISDDTPLEMMTSPRASWTLVRTPQWNELQPPFNANHPLLLAADAVQYYQFLLAGLVPPGSPGPITRHGSYDSLASDHSGQEDEEWLSQVEIVTHTGPHRRLWMGPQFQFKTIHPSGQTTVISSSSSVLQSHGPSDTPQPLLDFDTDDLDLNSLRIQPVRSDPVSMPGSSRPVSDRRGVSTVIDAASG

SEQ ID NO: 9640 - protein, 665 aa, Homo sapiens
  Payload ID: 1958;
  Gene Symbol: BCAS3;
  Gene Name: breast carcinoma amplified sequence 3;
  ENSP ID: ENSP00000485015
TSPPYCCVDLYSLRTGEMVKSIQFKTPIYDLHCNKRILVVVLQEKIAAFDSCTFTKKFFVTSCYPCPGPNMNPIALGSRWLAYAENKLIRCHQSRGGACGDNIQSYTATVISAAKTLKSGLTMVGKVVTQLTGTLPSGVTEDDVAIHSNSRRSPLVPGIITVIDTETVGEGQVLVSEDSDSDGIVAHFPAHEKPVCCMAFNTSGMLLVTTDTLGHDFHVFQILTHPWSSSQCAVHHLYTLHRGETEAKVQDICFSHDCRWVVVSTLRGTSHVFPINPYGGQPCVRTHMSPRVVNRMSRFQKSAGLEEIEQELTSKQGGRCSPVPGLSSSPSGSPLHGKLNSQDSYNNFTNNNPGNPRLSPLPSLMVVMPLAQIKQPMTLGTITKRTGPYLFGAGCFSIKAPCKVKPPPQISPSKSMGGEFCVAAIFGTSRSWFANNAGLKREKDQSKQVVVESLYIISCYGTLVEHMMEPRPLSTAPKISDDTPLEMMTSPRASWTLVRTPQWNELQPPFNANHPLLLAADAVQYYQFLLAGLVPPGSPGPITRHGSYDSLASDHSGQEDEEWLSQVEIVTHTGPHRRLWMGPQFQFKTIHPSGQTTVISSSSSVLQSHGPSDTPQPLLDFDTDDLDLNSLRIQPVRSDPVSMPGSSRPVSDRRGVSTVIDAASG

SEQ ID NO: 9641 - protein, 53 aa, Homo sapiens; identical to SEQ ID NO: 9631
  Payload ID: 1958;
  Gene Symbol: BCAS3;
  Gene Name: breast carcinoma amplified sequence 3;
  ENSP ID: ENSP00000486318

SEQ ID NO: 9642 - protein, 211 aa, Homo sapiens
  Payload ID: 1959;
  Gene Symbol: BCAS4;
  Gene Name: breast carcinoma amplified sequence 4;
  Uniprot ID:  Q8TDM0;
  ENSP ID: ENSP00000351642
MQRTGGGAPRPGRNHGLPGSLRQPDPVALLMLLVDADQPEPMRSGARELALFLTPEPGAEAKEVEETIEGMLLRLEEFCSLADLIRSDTSQILEENIPVLKAKLTEMRGIYAKVDRLEAFVKMVGHHVAFLEADVLQAERDHGAFPQALRRWLGSAGLPSFRNVECSGTIPARCNLRLPGSSDSPASASQVAGITEVTCTGARDVRAAHTV

SEQ ID NO: 9643 - protein, 203 aa, Homo sapiens
  Payload ID: 1959;
  Gene Symbol: BCAS4;
  Gene Name: breast carcinoma amplified sequence 4;
  Uniprot ID:  Q8TDM0;
  ENSP ID: ENSP00000360669
MQRTGGGAPRPGRNHGLPGSLRQPDPVALLMLLVDADQPEPMRSGARELALFLTPEPGAEAKEVEETIEGMLLRLEEFCSLADLIRSDTSQILEENIPVLKAKLTEMRGIYAKVDRLEAFVKMVGHHVAFLEADVLQAERDHGAFPQALRRWLGSAGLPSFRNKSPAPVPVTYELPTLYRTEDYFPVDAGEAQHHPRTCPRPL

SEQ ID NO: 9644 - protein, 117 aa, Homo sapiens
  Payload ID: 1959;
  Gene Symbol: BCAS4;
  Gene Name: breast carcinoma amplified sequence 4;
  ENSP ID: ENSP00000392594
MLLVDADQPEPMRSGARELALFLTPEPGAEAKEVEETIEGMLLRLEEFCSLADLIRSDTSQILEENIPVLKAKLTEMRGIYAKVDRLEKSPAPVPVTYELPTLYRTEDYFPVDAGEA

SEQ ID NO: 9645 - protein, 89 aa, Homo sapiens
  Payload ID: 1959;
  Gene Symbol: BCAS4;
  Gene Name: breast carcinoma amplified sequence 4;
  ENSP ID: ENSP00000418559
MLLVDADQPEPMRSGARELALFLTPEPGAEAKEVEETIEGMLLRLEEFCSLADLIRSDTSQILEENIPVLKAKLTEMRGIYAKVDRLES

SEQ ID NO: 9646 - protein, 181 aa, Homo sapiens
  Payload ID: 1959;
  Gene Symbol: BCAS4;
  Gene Name: breast carcinoma amplified sequence 4;
  ENSP ID: ENSP00000477167
MLLVDADQPEPMRSGARELALFLTPEPGAEAKEVEETIEGMLLRLEEFCSLADLIRSDTSQILEENIPVLKAKLTEMRGIYAKVDRLEAFVKMVGHHVAFLEADVLQAERDHGAFPQALRRWLGSAGLPSFRNVECSGTIPARCNLRLPGSSDSPASASQVAGITEVTCTGARDVRAAHTV

SEQ ID NO: 9647 - protein, 911 aa, Homo sapiens
  Payload ID: 1960;
  Gene Symbol: BCAN;
  Gene Name: brevican;
  Uniprot ID:  Q96GW7;
  ENSP ID: ENSP00000331210
MAQLFLPLLAALVLAQAPAALADVLEGDSSEDRAFRVRIAGDAPLQGVLGGALTIPCHVHYLRPPPSRRAVLGSPRVKWTFLSRGREAEVLVARGVRVKVNEAYRFRVALPAYPASLTDVSLALSELRPNDSGIYRCEVQHGIDDSSDAVEVKVKGVVFLYREGSARYAFSFSGAQEACARIGAHIATPEQLYAAYLGGYEQCDAGWLSDQTVRYPIQTPREACYGDMDGFPGVRNYGVVDPDDLYDVYCYAEDLNGELFLGDPPEKLTLEEARAYCQERGAEIATTGQLYAAWDGGLDHCSPGWLADGSVRYPIVTPSQRCGGGLPGVKTLFLFPNQTGFPNKHSRFNVYCFRDSAQPSAIPEASNPASNPASDGLEAIVTVTETLEELQLPQEATESESRGAIYSIPIMEDGGGGSSTPEDPAEAPRTLLEFETQSMVPPTGFSEEEGKALEEEEKYEDEEEKEEEEEEEEVEDEALWAWPSELSSPGPEASLPTEPAAQEESLSQAPARAVLQPGASPLPDGESEASRPPRVHGPPTETLPTPRERNLASPSPSTLVEAREVGEATGGPELSGVPRGESEETGSSEGAPSLLPATRAPEGTRELEAPSEDNSGRTAPAGTSVQAQPVLPTDSASRGGVAVVPASGDCVPSPCHNGGTCLEEEEGVRCLCLPGYGGDLCDVGLRFCNPGWDAFQGACYKHFSTRRSWEEAETQCRMYGAHLASISTPEEQDFINNRYREYQWIGLNDRTIEGDFLWSDGVPLLYENWNPGQPDSYFLSGENCVVMVWHDQGQWSDVPCNYHLSYTCKMGLVSCGPPPELPLAQVFGRPRLRYEVDTVLRYRCREGLAQRNLPLIRCQENGRWEAPQISCVPRRPARALHPEEDPEGRQGRLLGRWKALLIPPSSPMPGP

SEQ ID NO: 9648 - protein, 671 aa, Homo sapiens
  Payload ID: 1960;
  Gene Symbol: BCAN;
  Gene Name: brevican;
  Uniprot ID:  Q96GW7;
  ENSP ID: ENSP00000354925
MAQLFLPLLAALVLAQAPAALADVLEGDSSEDRAFRVRIAGDAPLQGVLGGALTIPCHVHYLRPPPSRRAVLGSPRVKWTFLSRGREAEVLVARGVRVKVNEAYRFRVALPAYPASLTDVSLALSELRPNDSGIYRCEVQHGIDDSSDAVEVKVKGVVFLYREGSARYAFSFSGAQEACARIGAHIATPEQLYAAYLGGYEQCDAGWLSDQTVRYPIQTPREACYGDMDGFPGVRNYGVVDPDDLYDVYCYAEDLNGELFLGDPPEKLTLEEARAYCQERGAEIATTGQLYAAWDGGLDHCSPGWLADGSVRYPIVTPSQRCGGGLPGVKTLFLFPNQTGFPNKHSRFNVYCFRDSAQPSAIPEASNPASNPASDGLEAIVTVTETLEELQLPQEATESESRGAIYSIPIMEDGGGGSSTPEDPAEAPRTLLEFETQSMVPPTGFSEEEGKALEEEEKYEDEEEKEEEEEEEEVEDEALWAWPSELSSPGPEASLPTEPAAQEESLSQAPARAVLQPGASPLPDGESEASRPPRVHGPPTETLPTPRERNLASPSPSTLVEAREVGEATGGPELSGVPRGESEETGSSEGAPSLLPATRAPEGTRELEAPSEDNSGRTAPAGTSVQAQPVLPTDSASRGGVAVVPASGNSAQGSTALSILLLFFPLQLWVT

SEQ ID NO: 9649 - protein, 213 aa, Homo sapiens
  Payload ID: 1960;
  Gene Symbol: BCAN;
  Gene Name: brevican;
  ENSP ID: ENSP00000389898
MAQLFLPLLAALVLAQAPAALADVLEGDSSEDRAFRVRIAGDAPLQGVLGGALTIPCHVHYLRPPPSRRAVLGSPRVKWTFLSRGREAEVLVARGVRVKVNEAYRFRVALPAYPASLTDVSLALSELRPNDSGIYRCEVQHGIDDSSDAVEVKVKGVVFLYREGSARYAFSFSGAQEACARIGAHIATPEQLYAAYLGGYEQCDAGWLSDQTV

SEQ ID NO: 9650 - protein, 145 aa, Homo sapiens
  Payload ID: 1960;
  Gene Symbol: BCAN;
  Gene Name: brevican;
  ENSP ID: ENSP00000392731
MAQLFLPLLAALVLAQAPAALADVLEGDSSEDRAFRVRIAGDAPLQGVLGGALTIPCHVHYLRPPPSRRAVLGSPRVKWTFLSRGREAEVLVARGVRVKVNEAYRFRVALPAYPASLTDVSLALSELRPNDSGIYRCEVQHGIDD

SEQ ID NO: 9651 - protein, 231 aa, Homo sapiens
  Payload ID: 1960;
  Gene Symbol: BCAN;
  Gene Name: brevican;
  ENSP ID: ENSP00000401709
MAQLFLPLLAALVLAQAPAALADVLEGDSSGIYRCEVQHGIDDSSDAVEVKVKGVVFLYREGSARYAFSFSGAQEACARIGAHIATPEQLYAAYLGGYEQCDAGWLSDQTVRYPIQTPREACYGDMDGFPGVRNYGVVDPDDLYDVYCYAEDLNGELFLGDPPEKLTLEEARAYCQERGAEIATTGQLYAAWDGGLDHCSPGWLADGSVRYPIVTPSQRCGGGLPGVKTLF

SEQ ID NO: 9652 - protein, 26 aa, Homo sapiens
  Payload ID: 1960;
  Gene Symbol: BCAN;
  Gene Name: brevican;
  ENSP ID: ENSP00000476259
  MOD_RES (1)..(1): Any amino acid
XHGIDDSSDAVEVKVKGGGHSTHNLT

SEQ ID NO: 9653 - protein, 196 aa, Homo sapiens
  Payload ID: 1960;
  Gene Symbol: BCAN;
  Gene Name: brevican;
  ENSP ID: ENSP00000476509
MAQLFLPLLAALVLAQAPAALADVLEGDSSEDRAFRVRIAGDAPLQGVLGGALTIPCHVHYLRPPPSRRAVLGSPRVKWTFLSRGREAEVLVARGVRVKVNEAYRFRVALPAYPASLTDVSLALSELRPNDSGIYRCEVQHGIDDSSDAVEVKVKGIPSRPHERPVTETWMASPGSGTMVWWTRMTSMMCTVMLKT

SEQ ID NO: 9654 - protein, 562 aa, Homo sapiens
  Payload ID: 1961;
  Gene Symbol: BRF1;
  Gene Name: BRF1, RNA polymerase III transcription initiation factor 90 kDa subunit;
  Uniprot ID:  Q92994;
  ENSP ID: ENSP00000329029
MAVSRHLTRGRKMAHVIAACLYLVCRTEGTPHMLLDLSDLLQVNVYVLGKTFLLLARELCINAPAIDPCLYIPRFAHLLEFGEKNHEVSMTALRLLQRMKRDWMHTGRRPSGLCGAALLVAARMHDFRRTVKEVISVVKVCESTLRKRLTEFEDTPTSQLTIDEFMKIDLEEECDPPSYTAGQRKLRMKQLEQVLSKKLEEVEGEISSYQDAIEIELENSRPKAKGGLASLAKDGSTEDTASSLCGEEDTEDEELEAAASHLNKDLYRELLGGAPGSSEAAGSPEWGGRPPALGSLLDPLPTAASLGISDSIRECISSQSSDPKDASGDGELDLSGIDDLEIDRYILNESEARVKAELWMRENAEYLREQREKEARIAKEKELGIYKEHKPKKSCKRREPIQASTAREAIEKMLEQKKISSKINYSVLRGLSSAGGGSPHREDAQPEHSASARKLSRRRTPASRSGADPVTSVGKRLRPLVSTQPAKKVATGEALLPSSPTLGAEPARPQAVLVESGPVSYHADEEADEEEPDEEDGEPCVSALQMMGSNDYGCDGDEDDGY

SEQ ID NO: 9655 - protein, 134 aa, Homo sapiens [sequence omitted]

SEQ ID NO: 9656 - protein, 650 aa, Homo sapiens
  Payload ID: 1961;
  Gene Symbol: BRF1;
  Gene Name: BRF1, RNA polymerase III transcription initiation  factor 90 kDa subunit;
  Uniprot ID:  Q92994;
  ENSP ID: ENSP00000369269
MTGRVCRGCGGTDIELDAARGDAVCTACGSVLEDNIIVSEVQFVESSGGGSSAVGQFVSLDGRRHIHHLGNQLQLNQHCLDTAFNFFKMAVSRHLTRGRKMAHVIAACLYLVCRTEGTPHMLLDLSDLLQVNVYVLGKTFLLLARELCINAPAIDPCLYIPRFAHLLEFGEKNHEVSMTALRLLQRMKRDWMHTGRRPSGLCGAALLVAARMHDFRRTVKEVISVVKVCESTLRKRLTEFEDTPTSQLTIDEFMKIDLEEECDPPSYTAGQRKLRMKQLEQVLSKKLEEVEGEISSYQDAIEIELENSRPKAKGGLASLAKDGSTEDTASSLCGEEDTEDEELEAAASHLNKDLYRELLGGAPGSSEAAGSPEWGGRPPALGSLLDPLPTAASLGISDSIRECISSQSSDPKDASGDGELDLSGIDDLEIDRYILNESEARVKAELWMRENAEYLREQREKEARIAKEKELGIYKEHKPKKSCKRREPIQASTAREAIEKMLEQKKISSKINYSVLRGLSSAGGGSPHREDAQPEHSASARKLSRRRTPASRSGADPVTSVGKRLRPLVSTQPAKKVATGEALLPSSPTLGAEPARPQAVLVESGPVSYHADEEADEEEPDEEDGEPCVSALQMMGSNDYGCDGDEDDGY

SEQ ID NO: 9657 - protein, 473 aa, Homo sapiens
  Payload ID: 1961;
  Gene Symbol: BRF1;
  Gene Name: BRF1, RNA polymerase III transcription initiation  factor 90 kDa subunit;
  Uniprot ID:  Q92994;
  ENSP ID: ENSP00000376340
MTALRLLQRMKRDWMHTGRRPSGLCGAALLVAARMHDFRRTVKEVISVVKVCESTLRKRLTEFEDTPTSQLTIDEFMKIDLEEECDPPSYTAGQRKLRMKQLEQVLSKKLEEVEGEISSYQDAIEIELENSRPKAKGGLASLAKDGSTEDTASSLCGEEDTEDEELEAAASHLNKDLYRELLGGAPGSSEAAGSPEWGGRPPALGSLLDPLPTAASLGISDSIRECISSQSSDPKDASGDGELDLSGIDDLEIDRYILNESEARVKAELWMRENAEYLREQREKEARIAKEKELGIYKEHKPKKSCKRREPIQASTAREAIEKMLEQKKISSKINYSVLRGLSSAGGGSPHREDAQPEHSASARKLSRRRTPASRSGADPVTSVGKRLRPLVSTQPAKKVATGEALLPSSPTLGAEPARPQAVLVESGPVSYHADEEADEEEPDEEDGEPCVSALQMMGSNDYGCDGDEDDGY

SEQ ID NO: 9658 - protein, 584 aa, Homo sapiens
  Payload ID: 1961;
  Gene Symbol: BRF1;
  Gene Name: BRF1, RNA polymerase III transcription initiation  factor 90 kDa subunit;
  Uniprot ID:  Q92994;
  ENSP ID: ENSP00000388877
MAVSRHLTRGRKMAHVIAACLYLVCRTEGTPHMLLDLSDLLQVNVYVLGKTFLLLARELCINAPAIDPCLYIPRFAHLLEFGEKNHEVSMTALRLLQRMKRDWMHTGRRPSGLCGAALLVAARMHDFRRTVKEVISVVKVCESTLRKRLTEFEDTPTSQLTIDEFMKIDLEEECDPPSYTAGQRKLRMKQLEQVLSKKLEEVEGEISSYQDAIEIELENSRPKAKGGLASLAKDGSTEDTASSLCGEEDTEDEELEAAASHLNKDLYRELLGGAPGSSEAAGSPEWGGRPPALGSLLDPLPTAASLGISDSIRECISSQSSDPKDASGDGELDLSGIDDLEIDRRDLSMPRCAKAKSQPHFPVLAQYILNESEARVKAELWMRENAEYLREQREKEARIAKEKELGIYKEHKPKKSCKRREPIQASTAREAIEKMLEQKKISSKINYSVLRGLSSAGGGSPHREDAQPEHSASARKLSRRRTPASRSGADPVTSVGKRLRPLVSTQPAKKVATGEALLPSSPTLGAEPARPQAVLVESGPVSYHADEEADEEEPDEEDGEPCVSALQMMGSNDYGCDGDEDDGY

SEQ ID NO: 9659 - protein, 439 aa, Homo sapiens
  Payload ID: 1961;
  Gene Symbol: BRF1;
  Gene Name: BRF1, RNA polymerase III transcription initiation  factor 90 kDa subunit;
  Uniprot ID:  Q92994;
  ENSP ID: ENSP00000389859
MHDFRRTVKEVISVVKVCESTLRKRLTEFEDTPTSQLTIDEFMKIDLEEECDPPSYTAGQRKLRMKQLEQVLSKKLEEVEGEISSYQDAIEIELENSRPKAKGGLASLAKDGSTEDTASSLCGEEDTEDEELEAAASHLNKDLYRELLGGAPGSSEAAGSPEWGGRPPALGSLLDPLPTAASLGISDSIRECISSQSSDPKDASGDGELDLSGIDDLEIDRYILNESEARVKAELWMRENAEYLREQREKEARIAKEKELGIYKEHKPKKSCKRREPIQASTAREAIEKMLEQKKISSKINYSVLRGLSSAGGGSPHREDAQPEHSASARKLSRRRTPASRSGADPVTSVGKRLRPLVSTQPAKKVATGEALLPSSPTLGAEPARPQAVLVESGPVSYHADEEADEEEPDEEDGEPCVSALQMMGSNDYGCDGDEDDGY

SEQ ID NO: 9660 - protein, 208 aa, Homo sapiens
  Payload ID: 1961;
  Gene Symbol: BRF1;
  Gene Name: BRF1, RNA polymerase III transcription initiation  factor 90 kDa subunit;
  Uniprot ID:  Q92994;
  ENSP ID: ENSP00000446707
MTGRVCRGCGGTDIELDAARGDAVCTACGSVLEDNIIVSEVQFVESSGGGSSAVGQFVSLDGAGKTPTLGGGFHVNLGKESRAQTLQNGRRHIHHLGNQLQLNQHCLDTAFNFFKMAVSRHLTRGRKMAHVIAACLYLVCRTEGTPHMLLDLSDLLQVDSLRPASFPTWGCDLGVVTRVVTGVYPRCLHASQWPVCAACPVRKFWSVG

SEQ ID NO: 9661 - protein, 161 aa, Homo sapiens
  Payload ID: 1961;
  Gene Symbol: BRF1;
  Gene Name: BRF1, RNA polymerase III transcription initiation  factor 90 kDa subunit;
  ENSP ID: ENSP00000446901
MTALRLLQRMKRDWMHTGRRPSGLCGAALLVAARMHDFRRTVKEVISVVKVCESTLRKRLTEFEDTPTSQLTIDEFMKIDLEEECDPPSYTAGQRKLRMKQLEQVLSKKLEEVEGEISSYQDAIEIELENSRPKAPHRGGRADGGPRASPGLFVGRPQYHS

SEQ ID NO: 9662 - protein, 14 aa, Homo sapiens
  Payload ID: 1961;
  Gene Symbol: BRF1;
  Gene Name: BRF1, RNA polymerase III transcription initiation  factor 90 kDa subunit;
  ENSP ID: ENSP00000447521
MTALRLLQRMKRDW

SEQ ID NO: 9663 - protein, 677 aa, Homo sapiens
  Payload ID: 1961;
  Gene Symbol: BRF1;
  Gene Name: BRF1, RNA polymerase III transcription initiation  factor 90 kDa subunit;
  ENSP ID: ENSP00000448387
MTGRVCRGCGGTDIELDAARGDAVCTACGSVLEDNIIVSEVQFVESSGGGSSAVGQFVSLDGAGKTPTLGGGFHVNLGKESRAQTLQNGRRHIHHLGNQLQLNQHCLDTAFNFFKMAVSRHLTRGRKMAHVIAACLYLVCRTEGTPHMLLDLSDLLQVNVYVLGKTFLLLARELCINAPAIDPCLYIPRFAHLLEFGEKNHEVSMTALRLLQRMKRDWMHTGRRPSGLCGAALLVAARMHDFRRTVKEVISVVKVCESTLRKRLTEFEDTPTSQLTIDEFMKIDLEEECDPPSYTAGQRKLRMKQLEQVLSKKLEEVEGEISSYQDAIEIELENSRPKAKGGLASLAKDGSTEDTASSLCGEEDTEDEELEAAASHLNKDLYRELLGGAPGSSEAAGSPEWGGRPPALGSLLDPLPTAASLGISDSIRECISSQSSDPKDASGDGELDLSGIDDLEIDRYILNESEARVKAELWMRENAEYLREQREKEARIAKEKELGIYKEHKPKKSCKRREPIQASTAREAIEKMLEQKKISSKINYSVLRGLSSAGGGSPHREDAQPEHSASARKLSRRRTPASRSGADPVTSVGKRLRPLVSTQPAKKVATGEALLPSSPTLGAEPARPQAVLVESGPVSYHADEEADEEEPDEEDGEPCVSALQMMGSNDYGCDGDEDDGY

SEQ ID NO: 9664 - protein, 234 aa, Homo sapiens
  Payload ID: 1961;
  Gene Symbol: BRF1;
  Gene Name: BRF1, RNA polymerase III transcription initiation  factor 90 kDa subunit;
  ENSP ID: ENSP00000448723
MTALRLLQRMKRDWMHTGRRPSGLCGAALLVAARMHDFRRTVKEVISVVKVCESTLRKRLTEFEDTPTSQLTIDEFMKIDLEEECDPPSYTAGQRKLRMKQLEQVLSKKLEEVEGEISSYQDAIEIELENSRPKAKGGLASLAKDGSTEDTASSLCGEEDTEDEELEAAASHLNKDLYRELLGGAPGSSEAAGSPEWGGRPPALGSLLDPLPTAASLGISDSIRECISSQSSDP

SEQ ID NO: 9665 - protein, 63 aa, Homo sapiens
  Payload ID: 1961;
  Gene Symbol: BRF1;
  Gene Name: BRF1, RNA polymerase III transcription initiation  factor 90 kDa subunit;
  ENSP ID: ENSP00000448823
MAVSRHLTRGRKMAHVIAACLYLVCRTEGTPHMLLDLSDLLQVNVYVLGKTFLLLARELCINA

SEQ ID NO: 9666 - protein, 45 aa, Homo sapiens
  Payload ID: 1961;
  Gene Symbol: BRF1;
  Gene Name: BRF1, RNA polymerase III transcription initiation  factor 90 kDa subunit;
  ENSP ID: ENSP00000449173
MTALRLLQRMKRDWMHTGRRPSGLCGAALLVAARMHDFRRTVKEV

SEQ ID NO: 9667 - protein, 155 aa, Homo sapiens
  Payload ID: 1961;
  Gene Symbol: BRF1;
  Gene Name: BRF1, RNA polymerase III transcription initiation  factor 90 kDa subunit;
  ENSP ID: ENSP00000449788
MTALRLLQRMKRDWMHTGRRPSGLCGAALLVAARMHDFRRTVKEVISVVKVCESTLRKRLTEFEDTPTSQLTIDEFMKIDLEEECDPPSYTAGQRKLRMKQLEQVLSKKLEEVEGEISSYQDAIEIELENSRPKAKGGLASLAKDGSTEDTASSL

SEQ ID NO: 9668 - protein, 185 aa, Homo sapiens
  Payload ID: 1961;
  Gene Symbol: BRF1;
  Gene Name: BRF1, RNA polymerase III transcription initiation  factor 90 kDa subunit;
  ENSP ID: ENSP00000450258
  MOD_RES (1)..(1): Any amino acid
XGQFVSLDGAGKTPTLGGGFHVNLGKESRAQTLQNDPCLYIPRFAHLLEFGEKNHEVSMTALRLLQRMKRDWMHTGRRPSGLCGAALLVAARMHDFRRTVKEVISVVKVCESTLRKRLTEFEDTPTSQLTIDEFMKIDLEEECDPPSYTAGQRKLRMKQLEQVLSKKLEEVEGEISSYQDAIEIE

SEQ ID NO: 9669 - protein, 184 aa, Homo sapiens
  Payload ID: 1961;
  Gene Symbol: BRF1;
  Gene Name: BRF1, RNA polymerase III transcription initiation  factor 90 kDa subunit;
  ENSP ID: ENSP00000480452
MTALRLLQRMKRDWMHTGRRPSGLCGAALLVAARMHDFRRTVKEVISVVKVCESTLRKRLTEFEDTPTSQLTIDEFMKIDLEEECDPPSYTAGQRKLRMKQLEQVLSKKLEEVEGEISSYQDAIEIELENSPPSRREGRRRPESLPRPLRGKAPVPLVGGLSSGMAAPDVAEGASPCVLRRGWP

SEQ ID NO: 9670 - protein, 419 aa, Homo sapiens
  Payload ID: 1962;
  Gene Symbol: BRF2;
  Gene Name: BRF2, RNA polymerase III transcription initiation  factor 50 kDa subunit;
  Uniprot ID:  Q9HAW0;
  ENSP ID: ENSP00000220659
MPGRGRCPDCGSTELVEDSHYSQSQLVCSDCGCVVTEGVLTTTFSDEGNLREVTYSRSTGENEQVSRSQQRGLRRVRDLCRVLQLPPTFEDTAVAYYQQAYRHSGIRAARLQKKEVLVGCCVLITCRQHNWPLTMGAICTLLYADLDVFSSTYMQIVKLLGLDVPSLCLAELVKTYCSSFKLFQASPSVPAKYVEDKEKMLSRTMQLVELANETWLVTGRHPLPVITAATFLAWQSLQPADRLSCSLARFCKLANVDLPYPASSRLQELLAVLLRMAEQLAWLRVLRLDKRSVVKHIGDLLQHRQSLVRSAFRDGTAEVETREKEPPGWGQGQGEGEVGNNSLGLPQGKRPASPALLLPPCMLKSPKRICPVPPVSTVTGDENISDSEIEQYLRTPQEVRDFQRAQAARQAATSVPNPP

SEQ ID NO: 9671 - protein, 72 aa, Homo sapiens
  Payload ID: 1962;
  Gene Symbol: BRF2;
  Gene Name: BRF2, RNA polymerase III transcription initiation  factor 50 kDa subunit;
  ENSP ID: ENSP00000429554
MPGRGRCPDCGSTELVEDSHYSQSQLVCSDCGCVVTEGVLTTTFSDEGNLREVTYSRSTGENEQVSRSQQRE

SEQ ID NO: 9672 - protein, 202 aa, Homo sapiens
  Payload ID: 1962;
  Gene Symbol: BRF2;
  Gene Name: BRF2, RNA polymerase III transcription initiation  factor 50 kDa subunit;
  ENSP ID: ENSP00000430107
MPGRGRCPDCGSTELVEDSHYSQSQLVCSDCGCVVTEGVLTTTFSDEGNLREVTYSRSTGENEQVSRSQQRGLRRVRDLCRVLQLPPTFEDTAVAYYQQAYRHSGIRAARLQKKEVLVGCCVLITCRQHNWPLTMGAICTLLYADLDVFSSTYMQIVKLLGLDVPSLCLAELVKTYCSSLECSGTIIAHCSLELMGSSDLPT

SEQ ID NO: 9673 - protein, 72 aa, Homo sapiens; identical to SEQ ID NO: 9671
  Payload ID: 1962;
  Gene Symbol: BRF2;
  Gene Name: BRF2, RNA polymerase III transcription initiation  factor 50 kDa subunit;
  ENSP ID: ENSP00000430193

SEQ ID NO: 9674 - protein, 251 aa, Homo sapiens
  Payload ID: 1963;
  Gene Symbol: BRI3BP;
  Gene Name: BRI3 binding prt;
  Uniprot ID:  Q8WY22;
  ENSP ID: ENSP00000340761
MGARASGGPLARAGLLLLLLLLLLLGLLAPGAQGARGRGGAEKNSYRRTVNTFSQSVSSLFGEDNVRAAQKFLARLTERFVLGVDMFVETLWKVWTELLDVLGLDVSNLSQYFSPASVSSSPARALLLVGVVLLAYWFLSLTLGFTFSVLHVVFGRFFWIVRVVLFSMSCVYILHKYEGEPENAVLPLCFVVAVYFMTGPMGFYWRSSPSGPSNPSNPSVEEKLEHLEKQVRLLNIRLNRVLESLDRSKDK

SEQ ID NO: 9675 - protein, 228 aa, Homo sapiens
  Payload ID: 1964;
  Gene Symbol: BRICD5;
  Gene Name: BRICHOS domain containing 5;
  Uniprot ID:  Q6PL45;
  ENSP ID: ENSP00000332389
MEPASCCAERPKPGPTGVKTKPSCGGWRAVSLLLLLLLLVLAAVGVVAGGLLGSAQGPPKPRLQTLRMTLPSPHMPRPNQTILVDVARNAATITVTPPQSNHSWAVLFDGQSGCICYRPEEHQVCFLRLMEDSDRETLRLLVDTSKVQEAWVPSQDTHHTQELLAVQGSLEVDPAQAGALVQRLCMRTPIYWARRAEGPRRQRLIYLCIDICFPSNICVSVCFYYLPD

SEQ ID NO: 9676 - protein, 260 aa, Homo sapiens
  Payload ID: 1964;
  Gene Symbol: BRICD5;
  Gene Name: BRICHOS domain containing 5;
  Uniprot ID:  Q6PL45;
  ENSP ID: ENSP00000455052
MEPASCCAERPKPGPTGVKTKPSCGGWRAVSLLLLLLLLVLAAVGVVAGGLLGSAQGPPKPRLQTLRMTLPSPHMPRPNQTILVDVARNAATITVTPPQSNHSWAVLFDGQSGCICYRPEEHQVCFLRLMEDSDRETLRLLVDTSKVQEAWVPSQDTHHTQELLAVQGSLEVDPAQAGALVQRLCMRTPIYWARRAEGESGPLWGKARPSGWFEELGAEPLEIHGTLATGPRRQRLIYLCIDICFPSNICVSVCFYYLPD

SEQ ID NO: 9677 - protein, 153 aa, Homo sapiens
  Payload ID: 1964;
  Gene Symbol: BRICD5;
  Gene Name: BRICHOS domain containing 5;
  ENSP ID: ENSP00000457969
MEPASCCAERPKPGPTGVKTKPSCGGWRAVSLLLLLLLLVLAAVGVVAGGLLGSAQGPPKPRLQTLRMTLPSPHMPRPNQTILVDVARNAATITVTPPQSNHSWAVLFDGQSVSGQGGVTLAGVGLGGPASPPCLPRAASVTALRSTRSASSA

SEQ ID NO: 9678 - protein, 75 aa, Homo sapiens
  Payload ID: 1965;
  Gene Symbol: BRK1;
  Gene Name: BRICK1, SCAR/WAVE actin-nucleating complex subunit;
  Uniprot ID:  Q8WUW1;
  ENSP ID: ENSP00000432472
MAGQEDPVQREIHQDWANREYIEIITSSIKKIADFLNSFDMSCRSRLATLNEKLTALERRIEYIEARVTKGETLT

SEQ ID NO: 9679 - protein, 409 aa, Homo sapiens
  Payload ID: 1966;
  Gene Symbol: BIN1;
  Gene Name: bridging integrator 1;
  Uniprot ID:  O00499;
  ENSP ID: ENSP00000259237
MAEMGSKGVTAGKIASNVQKKLTRAQEKVLQKLGKADETKDEQFEQCVQNFNKQLTEGTRLQKDLRTYLASVKAMHEASKKLNECLQEVYEPDWPGRDEANKIAENNDLLWMDYHQKLVDQALLTMDTYLGQFPDIKSRIAKRGRKLVDYDSARHHYESLQTAKKKDEAKIAKAEEELIKAQKVFEEMNVDLQEELPSLWNSRVGFYVNTFQSIAGLEENFHKEMSKLNQNLNDVLVGLEKQHGSNTFTVKAQPSDNAPAKGNKSPSPPDGSPAATPEIRVNHEPEPAGGATPGATLPKSPSQSSLPAVVVETFPATVNGTVEGGSGAGRLDLPPGFMFKVQAQHDYTATDTDELQLKAGDVVLVIPFQNPEEQDEGWLMGVKESDWNQHKELEKCRGVFPENFTERVP

SEQ ID NO: 9680 - protein, 497 aa, Homo sapiens
  Payload ID: 1966;
  Gene Symbol: BIN1;
  Gene Name: bridging integrator 1;
  Uniprot ID:  O00499;
  ENSP ID: ENSP00000259238
MAEMGSKGVTAGKIASNVQKKLTRAQEKVLQKLGKADETKDEQFEQCVQNFNKQLTEGTRLQKDLRTYLASVKAMHEASKKLNECLQEVYEPDWPGRDEANKIAENNDLLWMDYHQKLVDQALLTMDTYLGQFPDIKSRIAKRGRKLVDYDSARHHYESLQTAKKKDEAKIAKAEEELIKAQKVFEEMNVDLQEELPSLWNSRVGFYVNTFQSIAGLEENFHKEMSKLNQNLNDVLVGLEKQHGSNTFTVKAQPRKKSKLFSRLRRKKNSDNAPAKGNKSPSPPDGSPAATPEIRVNHEPEPAGGATPGATLPKSPSQLRKGPPVPPPPKHTPSKEVKQEQILSLFEDTFVPEISVTTPSQPAEASEVAGGTQPAAGAQEPGETAASEAASSSLPAVVVETFPATVNGTVEGGSGAGRLDLPPGFMFKVQAQHDYTATDTDELQLKAGDVVLVIPFQNPEEQDEGWLMGVKESDWNQHKELEKCRGVFPENFTERVP

SEQ ID NO: 9681 - protein, 454 aa, Homo sapiens
  Payload ID: 1966;
  Gene Symbol: BIN1;
  Gene Name: bridging integrator 1;
  Uniprot ID:  O00499;
  ENSP ID: ENSP00000315284
MAEMGSKGVTAGKIASNVQKKLTRAQEKVLQKLGKADETKDEQFEQCVQNFNKQLTEGTRLQKDLRTYLASVKAMHEASKKLNECLQEVYEPDWPGRDEANKIAENNDLLWMDYHQKLVDQALLTMDTYLGQFPDIKSRIAKRGRKLVDYDSARHHYESLQTAKKKDEAKIAKAEEELIKAQKVFEEMNVDLQEELPSLWNSRVGFYVNTFQSIAGLEENFHKEMSKLNQNLNDVLVGLEKQHGSNTFTVKAQPRKKSKLFSRLRRKKNSDNAPAKGNKSPSPPDGSPAATPEIRVNHEPEPAGGATPGATLPKSPSQPAEASEVAGGTQPAAGAQEPGETAASEAASSSLPAVVVETFPATVNGTVEGGSGAGRLDLPPGFMFKVQAQHDYTATDTDELQLKAGDVVLVIPFQNPEEQDEGWLMGVKESDWNQHKELEKCRGVFPENFTERVP

SEQ ID NO: 9682 - protein, 506 aa, Homo sapiens
  Payload ID: 1966;
  Gene Symbol: BIN1;
  Gene Name: bridging integrator 1;
  Uniprot ID:  O00499;
  ENSP ID: ENSP00000315388
MAEMGSKGVTAGKIASNVQKKLTRAQEKVLQKLGKADETKDEQFEQCVQNFNKQLTEGTRLQKDLRTYLASVKAMHEASKKLNECLQEVYEPDWPGRDEANKIAENNDLLWMDYHQKLVDQALLTMDTYLGQFPDIKSRIAKRGRKLVDYDSARHHYESLQTAKKKDEAKIAKPVSLLEKAAPQWCQGKLQAHLVAQTNLLRNQAEEELIKAQKVFEEMNVDLQEELPSLWNSRVGFYVNTFQSIAGLEENFHKEMSKLNQNLNDVLVGLEKQHGSNTFTVKAQPSDNAPAKGNKSPSPPDGSPAATPEIRVNHEPEPAGGATPGATLPKSPSQPTESPAGSLPSGEPSAAEGTFAVSWPSQTAEPGPAQPAEASEVAGGTQPAAGAQEPGETAASEAASSSLPAVVVETFPATVNGTVEGGSGAGRLDLPPGFMFKVQAQHDYTATDTDELQLKAGDVVLVIPFQNPEEQDEGWLMGVKESDWNQHKELEKCRGVFPENFTERVP

SEQ ID NO: 9683 - protein, 518 aa, Homo sapiens
  Payload ID: 1966;
  Gene Symbol: BIN1;
  Gene Name: bridging integrator 1;
  Uniprot ID:  O00499;
  ENSP ID: ENSP00000315411
MAEMGSKGVTAGKIASNVQKKLTRAQEKVLQKLGKADETKDEQFEQCVQNFNKQLTEGTRLQKDLRTYLASVKAMHEASKKLNECLQEVYEPDWPGRDEANKIAENNDLLWMDYHQKLVDQALLTMDTYLGQFPDIKSRIAKRGRKLVDYDSARHHYESLQTAKKKDEAKIAKAEEELIKAQKVFEEMNVDLQEELPSLWNSRVGFYVNTFQSIAGLEENFHKEMSKLNQNLNDVLVGLEKQHGSNTFTVKAQPSDNAPAKGNKSPSPPDGSPAATPEIRVNHEPEPAGGATPGATLPKSPSQLRKGPPVPPPPKHTPSKEVKQEQILSLFEDTFVPEISVTTPSQPTESPAGSLPSGEPSAAEGTFAVSWPSQTAEPGPAQPAEASEVAGGTQPAAGAQEPGETAASEAASSSLPAVVVETFPATVNGTVEGGSGAGRLDLPPGFMFKVQAQHDYTATDTDELQLKAGDVVLVIPFQNPEEQDEGWLMGVKESDWNQHKELEKCRGVFPENFTERVP

SEQ ID NO: 9684 - protein, 593 aa, Homo sapiens
  Payload ID: 1966;
  Gene Symbol: BIN1;
  Gene Name: bridging integrator 1;
  Uniprot ID:  O00499;
  ENSP ID: ENSP00000316779
MAEMGSKGVTAGKIASNVQKKLTRAQEKVLQKLGKADETKDEQFEQCVQNFNKQLTEGTRLQKDLRTYLASVKAMHEASKKLNECLQEVYEPDWPGRDEANKIAENNDLLWMDYHQKLVDQALLTMDTYLGQFPDIKSRIAKRGRKLVDYDSARHHYESLQTAKKKDEAKIAKPVSLLEKAAPQWCQGKLQAHLVAQTNLLRNQAEEELIKAQKVFEEMNVDLQEELPSLWNSRVGFYVNTFQSIAGLEENFHKEMSKLNQNLNDVLVGLEKQHGSNTFTVKAQPSDNAPAKGNKSPSPPDGSPAATPEIRVNHEPEPAGGATPGATLPKSPSQLRKGPPVPPPPKHTPSKEVKQEQILSLFEDTFVPEISVTTPSQFEAPGPFSEQASLLDLDFDPLPPVTSPVKAPTPSGQSIPWDLWEPTESPAGSLPSGEPSAAEGTFAVSWPSQTAEPGPAQPAEASEVAGGTQPAAGAQEPGETAASEAASSSLPAVVVETFPATVNGTVEGGSGAGRLDLPPGFMFKVQAQHDYTATDTDELQLKAGDVVLVIPFQNPEEQDEGWLMGVKESDWNQHKELEKCRGVFPENFTERVP

SEQ ID NO: 9685 - protein, 550 aa, Homo sapiens
  Payload ID: 1966;
  Gene Symbol: BIN1;
  Gene Name: bridging integrator 1;
  Uniprot ID:  O00499;
  ENSP ID: ENSP00000350654
MAEMGSKGVTAGKIASNVQKKLTRAQEKVLQKLGKADETKDEQFEQCVQNFNKQLTEGTRLQKDLRTYLASVKAMHEASKKLNECLQEVYEPDWPGRDEANKIAENNDLLWMDYHQKLVDQALLTMDTYLGQFPDIKSRIAKRGRKLVDYDSARHHYESLQTAKKKDEAKIAKPVSLLEKAAPQWCQGKLQAHLVAQTNLLRNQAEEELIKAQKVFEEMNVDLQEELPSLWNSRVGFYVNTFQSIAGLEENFHKEMSKLNQNLNDVLVGLEKQHGSNTFTVKAQPSDNAPAKGNKSPSPPDGSPAATPEIRVNHEPEPAGGATPGATLPKSPSQFEAPGPFSEQASLLDLDFDPLPPVTSPVKAPTPSGQSIPWDLWEPTESPAGSLPSGEPSAAEGTFAVSWPSQTAEPGPAQPAEASEVAGGTQPAAGAQEPGETAASEAASSSLPAVVVETFPATVNGTVEGGSGAGRLDLPPGFMFKVQAQHDYTATDTDELQLKAGDVVLVIPFQNPEEQDEGWLMGVKESDWNQHKELEKCRGVFPENFTERVP

SEQ ID NO: 9686 - protein, 424 aa, Homo sapiens
  Payload ID: 1966;
  Gene Symbol: BIN1;
  Gene Name: bridging integrator 1;
  Uniprot ID:  O00499;
  ENSP ID: ENSP00000365281
MAEMGSKGVTAGKIASNVQKKLTRAQEKVLQKLGKADETKDEQFEQCVQNFNKQLTEGTRLQKDLRTYLASVKAMHEASKKLNECLQEVYEPDWPGRDEANKIAENNDLLWMDYHQKLVDQALLTMDTYLGQFPDIKSRIAKRGRKLVDYDSARHHYESLQTAKKKDEAKIAKAEEELIKAQKVFEEMNVDLQEELPSLWNSRVGFYVNTFQSIAGLEENFHKEMSKLNQNLNDVLVGLEKQHGSNTFTVKAQPRKKSKLFSRLRRKKNSDNAPAKGNKSPSPPDGSPAATPEIRVNHEPEPAGGATPGATLPKSPSQSSLPAVVVETFPATVNGTVEGGSGAGRLDLPPGFMFKVQAQHDYTATDTDELQLKAGDVVLVIPFQNPEEQDEGWLMGVKESDWNQHKELEKCRGVFPENFTERVP

SEQ ID NO: 9687 - protein, 482 aa, Homo sapiens
  Payload ID: 1966;
  Gene Symbol: BIN1;
  Gene Name: bridging integrator 1;
  Uniprot ID:  O00499;
  ENSP ID: ENSP00000376760
MAEMGSKGVTAGKIASNVQKKLTRAQEKVLQKLGKADETKDEQFEQCVQNFNKQLTEGTRLQKDLRTYLASVKAMHEASKKLNECLQEVYEPDWPGRDEANKIAENNDLLWMDYHQKLVDQALLTMDTYLGQFPDIKSRIAKRGRKLVDYDSARHHYESLQTAKKKDEAKIAKAEEELIKAQKVFEEMNVDLQEELPSLWNSRVGFYVNTFQSIAGLEENFHKEMSKLNQNLNDVLVGLEKQHGSNTFTVKAQPSDNAPAKGNKSPSPPDGSPAATPEIRVNHEPEPAGGATPGATLPKSPSQLRKGPPVPPPPKHTPSKEVKQEQILSLFEDTFVPEISVTTPSQPAEASEVAGGTQPAAGAQEPGETAASEAASSSLPAVVVETFPATVNGTVEGGSGAGRLDLPPGFMFKVQAQHDYTATDTDELQLKAGDVVLVIPFQNPEEQDEGWLMGVKESDWNQHKELEKCRGVFPENFTERVP

SEQ ID NO: 9688 - protein, 475 aa, Homo sapiens
  Payload ID: 1966;
  Gene Symbol: BIN1;
  Gene Name: bridging integrator 1;
  Uniprot ID:  O00499;
  ENSP ID: ENSP00000376761
MAEMGSKGVTAGKIASNVQKKLTRAQEKVLQKLGKADETKDEQFEQCVQNFNKQLTEGTRLQKDLRTYLASVKAMHEASKKLNECLQEVYEPDWPGRDEANKIAENNDLLWMDYHQKLVDQALLTMDTYLGQFPDIKSRIAKRGRKLVDYDSARHHYESLQTAKKKDEAKIAKAEEELIKAQKVFEEMNVDLQEELPSLWNSRVGFYVNTFQSIAGLEENFHKEMSKLNQNLNDVLVGLEKQHGSNTFTVKAQPSDNAPAKGNKSPSPPDGSPAATPEIRVNHEPEPAGGATPGATLPKSPSQPTESPAGSLPSGEPSAAEGTFAVSWPSQTAEPGPAQPAEASEVAGGTQPAAGAQEPGETAASEAASSSLPAVVVETFPATVNGTVEGGSGAGRLDLPPGFMFKVQAQHDYTATDTDELQLKAGDVVLVIPFQNPEEQDEGWLMGVKESDWNQHKELEKCRGVFPENFTERVP

SEQ ID NO: 9689 - protein, 439 aa, Homo sapiens
  Payload ID: 1966;
  Gene Symbol: BIN1;
  Gene Name: bridging integrator 1;
  Uniprot ID:  O00499;
  ENSP ID: ENSP00000386797
MAEMGSKGVTAGKIASNVQKKLTRAQEKVLQKLGKADETKDEQFEQCVQNFNKQLTEGTRLQKDLRTYLASVKAMHEASKKLNECLQEVYEPDWPGRDEANKIAENNDLLWMDYHQKLVDQALLTMDTYLGQFPDIKSRIAKRGRKLVDYDSARHHYESLQTAKKKDEAKIAKAEEELIKAQKVFEEMNVDLQEELPSLWNSRVGFYVNTFQSIAGLEENFHKEMSKLNQNLNDVLVGLEKQHGSNTFTVKAQPSDNAPAKGNKSPSPPDGSPAATPEIRVNHEPEPAGGATPGATLPKSPSQPAEASEVAGGTQPAAGAQEPGETAASEAASSSLPAVVVETFPATVNGTVEGGSGAGRLDLPPGFMFKVQAQHDYTATDTDELQLKAGDVVLVIPFQNPEEQDEGWLMGVKESDWNQHKELEKCRGVFPENFTERVP

SEQ ID NO: 9690 - protein, 551 aa, Homo sapiens
  Payload ID: 1967;
  Gene Symbol: BIN2;
  Gene Name: bridging integrator 2;
  ENSP ID: ENSP00000410217
  MOD_RES (1)..(1): Any amino acid
XENHRARGQGGGPQGVGRMAEGKAGGAAGLFAKQVQKKFSRAQEKVLQKLGKAVETKDERFEQSASNFYQQQAEGHKLYKDLKNFLSAVKVMHESSKRVSETLQEIYSSEWDGHEELKAIVWERIAKRGRKLVDYDSARHHLEAVQNAKKKDEAKTAKAEEEFNKAQTVFEDLNQELLEELPILYNSRIGCYVTIFQNISNLRDVFYREMSKLNHNLYEVMSKLEKQHSNKVFVVKGLSSSSRRSLVISPPVRTATVSSPLTSPTSPSTLSLKSESESVSATEDLAPDAAQGEDNSEIKELLEEEEIEKEGSEASSSEEDEPLPACNGPAQAQPSPTTERAKSQEEVLPSSTTPSPGGALSPSGQPSSSATEVVLRTRTASEGSEQPKKRASIQRTSAPPSRPPPPRATASPRPSSGNIPSSPTASGGGSPTSPRASLGTGTASPRTSLEVSPNPEPPEKPVRTPEAKENENIHNQNPEELCTSPTLMTSQVASEPGEAKKMEDKEKDNKLISANSSEGQDQLQVSMVPENNNLTAPEPQEEVSTSENPQL

SEQ ID NO: 9691 - protein, 539 aa, Homo sapiens
  Payload ID: 1967;
  Gene Symbol: BIN2;
  Gene Name: bridging integrator 2;
  ENSP ID: ENSP00000445874
MVLQKLGKAVETKDERFEQSASNFYQQQAEGHKLYKDLKNFLSAVKVMHESSKRVSETLQEIYSSEWDGHEELKAIVWNNDLLWEDYEEKLADQAVRTMEIYVAQFSEIKERIAKRGRKLVDYDSARHHLEAVQNAKKKDEAKTAKAEEEFNKAQTVFEDLNQELLEELPILYNSRIGCYVTIFQNISNLRDVFYREMSKLNHNLYEVMSKLEKQHSNKVFVVKGLSSSSRRSLVISPPVRTATVSSPLTSPTSPSTLSLKSESESVSATEDLAPDAAQGEDNSEIKELLEEEEIEKEGSEASSSEEDEPLPACNGPAQAQPSPTTERAKSQEEVLPSSTTPSPGGALSPSGQPSSSATEVVLRTRTASEGSEQPKKRASIQRTSAPPSRPPPPRATASPRPSSGNIPSSPTASGGGSPTSPRASLGTGTASPRTSLEVSPNPEPPEKPVRTPEAKENENIHNQNPEELCTSPTLMTSQVASEPGEAKKMEDKEKDNKLISANSSEGQDQLQVSMVPENNNLTAPEPQEEVSTSENPQL

SEQ ID NO: 9692 - protein, 73 aa, Homo sapiens
  Payload ID: 1967;
  Gene Symbol: BIN2;
  Gene Name: bridging integrator 2;
  ENSP ID: ENSP00000474425
  MOD_RES (1)..(1): Any amino acid
XARGQGGGPQGVGRMAEGKAGGAAGLFAKQVQKKFSRAQEKVLQKLGKAVETKDERFEQSASNFYQQQFVCLF

SEQ ID NO: 9693 - protein, 536 aa, Homo sapiens
  Payload ID: 1967;
  Gene Symbol: BIN2;
  Gene Name: bridging integrator 2;
  ENSP ID: ENSP00000474972
  MOD_RES (1)..(1): Any amino acid
XGVGRMAEGKAGGAAGLFAKQVQKKFSRAQEKAEGHKLYKDLKNFLSAVKVMHESSKRVSETLQEIYSSEWDGHEELKAIVWNNDLLWEDYEEKLADQAVRTMEIYVAQFSEIKERIAKRGRKLVDYDSARHHLEAVQNAKKKDEAKTAKAEEEFNKAQTVFEDLNQELLEELPILYNSRIGCYVTIFQNISNLRDVFYREMSKLNHNLYEVMSKLEKQHSNKVFVVKGLSSSSRRSLVISPPVRTATVSSPLTSPTSPSTLSLKSESESVSATEDLAPDAAQGEDNSEIKELLEEEEIEKEGSEASSSEEDEPLPACNGPAQAQPSPTTERAKSQEEVLPSSTTPSPGGALSPSGQPSSSATEVVLRTRTASEGSEQPKKRASIQRTSAPPSRPPPPRATASPRPSSGNIPSSPTASGGGSPTSPRASLGTGTASPRTSLEVSPNPEPPEKPVRTPEAKENENIHNQNPEELCTSPTLMTSQTSFKSPWYQKTTTSQHLNLKKRYPQVKIHNSEEKLPRLLLPQTSPEKLFNQRV

SEQ ID NO: 9694 - protein, 597 aa, Homo sapiens
  Payload ID: 1967;
  Gene Symbol: BIN2;
  Gene Name: bridging integrator 2;
  ENSP ID: ENSP00000483983
MRGMPGARTSSSGASENHRARGQGGGPQGVGRMAEGKAGGAAGLFAKQVQKKFSRAQEKVLQKLGKAVETKDERFEQSASNFYQQQAEGHKLYKDLKNFLSAVKVMHESSKRVSETLQEIYSSEWDGHEELKAIVWNNDLLWEDYEEKLADQAVRTMEIYVAQFSEIKERIAKRGRKLVDYDSARHHLEAVQNAKKKDEAKTAKAEEEFNKAQTVFEDLNQELLEELPILYNSRIGCYVTIFQNISNLRDVFYREMSKLNHNLYEVMSKLEKQHSNKVFVVKGLSSSSRRSLVISPPVRTATVSSPLTSPTSPSTLSLKSESESVSATEDLAPDAAQGEDNSEIKELLEEEEIEKEGSEASSSEEDEPLPACNGPAQAQPSPTTERAKSQEEVLPSSTTPSPGGALSPSGQPSSSATEVVLRTRTASEGSEQPKKRASIQRTSAPPSRPPPPRATASPRPSSGNIPSSPTASGGGSPTSPRASLGTGTASPRTSLEVSPNPEPPEKPVRTPEAKENENIHNQNPEELCTSPTLMTSQVASEPGEAKKMEDKEKDNKLISANSSEGQDQLQVSMVPENNNLTAPEPQEEVSTSENPQL

SEQ ID NO: 9695 - protein, 253 aa, Homo sapiens
  Payload ID: 1968;
  Gene Symbol: BIN3;
  Gene Name: bridging integrator 3;
  Uniprot ID:  Q9NQY0;
  ENSP ID: ENSP00000276416
MSWIPFKIGQPKKQIVPKTVERDFEREYGKLQQLEEQTRRLQKDMKKSTDADLAMSKSAVKISLDLLSNPLCEQDQDLLNMVTALDTAMKRMDAFNQEKVNQIQKTVIEPLKKFGSVFPSLNMAVKRREQALQDYRRLQAKVEKYEEKEKTGPVLAKLHQAREELRPVREDFEAKNRQLLEEMPRFYGSRLDYFQPSFESLIRAQVVYYSEMHKIFGDLSHQLDQPGHSDEQRERENEAKLSELRALSIVADD

SEQ ID NO: 9696 - protein, 205 aa, Homo sapiens
  Payload ID: 1968;
  Gene Symbol: BIN3;
  Gene Name: bridging integrator 3;
  ENSP ID: ENSP00000382859
MENFSTMSKSAVKISLDLLSNPLCEQDQDLLNMVTALDTAMKRMDAFNQEKVNQIQKTVIEPLKKFGSVFPSLNMAVKRREQALQDYRRLQAKVEKYEEKEKTGPVLAKLHQAREELRPVREDFEAKNRQLLEEMPRFYGSRLDYFQPSFESLIRAQVVYYSEMHKIFGDLSHQLDQPGHSDEQRERENEAKLSELRALSIVADD

SEQ ID NO: 9697 - protein, 27 aa, Homo sapiens
  Payload ID: 1968;
  Gene Symbol: BIN3;
  Gene Name: bridging integrator 3;
  ENSP ID: ENSP00000428768
MSWIPFKIGQPKKQIVPKTVSNSIVLL

SEQ ID NO: 9698 - protein, 149 aa, Homo sapiens
  Payload ID: 1968;
  Gene Symbol: BIN3;
  Gene Name: bridging integrator 3;
  ENSP ID: ENSP00000429660
MSWIPFKIGQPKKQIVPKTVERDFEREYGKLQQLEEQTRRLQKDMKKSTDADLAMSKSAVKISLDLLSNPLCEQDQDLLNMVTALDTAMKRMDAFNQEKVNQIQKTVIEPLKKRNQLFWSWVTSEWPQSHELPGLRSLILDTAGLWLAW

SEQ ID NO: 9699 - protein, 199 aa, Homo sapiens
  Payload ID: 1968;
  Gene Symbol: BIN3;
  Gene Name: bridging integrator 3;
  Uniprot ID:  Q9NQY0;
  ENSP ID: ENSP00000430423
MSKSAVKISLDLLSNPLCEQDQDLLNMVTALDTAMKRMDAFNQEKVNQIQKTVIEPLKKFGSVFPSLNMAVKRREQALQDYRRLQAKVEKYEEKEKTGPVLAKLHQAREELRPVREDFEAKNRQLLEEMPRFYGSRLDYFQPSFESLIRAQVVYYSEMHKIFGDLSHQLDQPGHSDEQRERENEAKLSELRALSIVADD

SEQ ID NO: 9700 - protein, 63 aa, Homo sapiens
  Payload ID: 1968;
  Gene Symbol: BIN3;
  Gene Name: bridging integrator 3;
  ENSP ID: ENSP00000430546
MSWIPFKIGQPKKQIVPKTVERDFEREYGKLQQLEEQTRRLQKDMKKSTDADLAPKPQPVTDV

SEQ ID NO: 9701 - protein, 329 aa, Homo sapiens
  Payload ID: 1969;
  Gene Symbol: BABAM1;
  Gene Name: BRISC and BRCA1 A complex member 1;
  Uniprot ID:  Q9NWV8;
  ENSP ID: ENSP00000352408
MEVAEPSSPTEEEEEEEEHSAEPRPRTRSNPEGAEDRAVGAQASVGSRSEGEGEAASADDGSLNTSGAGPKSWQVPPPAPEVQIRTPRVNCPEKVIICLDLSEEMSLPKLESFNGSKTNALNVSQKMIEMFVRTKHKIDKSHEFALVVVNDDTAWLSGLTSDPRELCSCLYDLETASCSTFNLEGLFSLIQQKTELPVTENVQTIPPPYVVRTILVYSRPPCQPQFSLTEPMKKMFQCPYFFFDVVYIHNGTEEKEEEMSWKDMFAFMGSLDTKGTSYKYEVALAGPALELHNCMAKLLAHPLQRPCQSHASYSLLEEEDEAIEVEATV

SEQ ID NO: 9702 - protein, 254 aa, Homo sapiens
  Payload ID: 1969;
  Gene Symbol: BABAM1;
  Gene Name: BRISC and BRCA1 A complex member 1;
  ENSP ID: ENSP00000407826
MEVAEPSSPTEEEEEEEEHSAEPRPRTRSNPEGAEDRAVGAQASVGSRSEGEGEAASADDGSLNTSGAGPKSWQVPPPAPEVQIRTPRVNCPEKVIICLDLSEEMSLPKLESFNGQQKTELPVTENVQTIPPPYVVRTILVYSRPPCQPQFSLTEPMKKMFQCPYFFFDVVYIHNGTEEKEEEMSWKDMFAFMGSLDTKGTSYKYEVALAGPALELHNCMAKLLAHPLQRPCQSHASYSLLEEEDEAIEVEATV

SEQ ID NO: 9703 - protein, 254 aa, Homo sapiens; identical to SEQ ID NO: 9702
  Payload ID: 1969;
  Gene Symbol: BABAM1;
  Gene Name: BRISC and BRCA1 A complex member 1;
  ENSP ID: ENSP00000468834

SEQ ID NO: 9704 - protein, 108 aa, Homo sapiens
  Payload ID: 1969;
  Gene Symbol: BABAM1;
  Gene Name: BRISC and BRCA1 A complex member 1;
  ENSP ID: ENSP00000469527
MEVAEPSSPTEEEEEEEEHSAEPRPRTRSNPEGAEDRAVGAQASVGSRSEGEGEAASADDGSLNTSGAGPKSWQVPPPAPEVQIRTPRVNCPEKVLQNQRPQCLPEDD

SEQ ID NO: 9705 - protein, 97 aa, Homo sapiens
  Payload ID: 1969;
  Gene Symbol: BABAM1;
  Gene Name: BRISC and BRCA1 A complex member 1;
  ENSP ID: ENSP00000470088
  MOD_RES (1)..(1): Any amino acid
XTSGAGPKSWQVPPPAPEVQIRTPRVNCPEKVIICLDLSEEMSLPKLESFNGSKTNALNVSQKMIEMFVRTKHKIDKSHCLNHPCTSAPSCARKSLA

SEQ ID NO: 9706 - protein, 32 aa, Homo sapiens
  Payload ID: 1969;
  Gene Symbol: BABAM1;
  Gene Name: BRISC and BRCA1 A complex member 1;
  ENSP ID: ENSP00000470295
PLQKMFQCPYFFFDVVYIHNGTEEKEEEMSWK

SEQ ID NO: 9707 - protein, 329 aa, Homo sapiens; identical to SEQ ID NO: 9701
  Payload ID: 1969;
  Gene Symbol: BABAM1;
  Gene Name: BRISC and BRCA1 A complex member 1;
  Uniprot ID:  Q9NWV8;
  ENSP ID: ENSP00000470920

SEQ ID NO: 9708 - protein, 225 aa, Homo sapiens
  Payload ID: 1969;
  Gene Symbol: BABAM1;
  Gene Name: BRISC and BRCA1 A complex member 1;
  ENSP ID: ENSP00000471246
MEVAEPSSPTEEEEEEEEHSAEPRPRTRSNPEGAEDRAVGAQASVGSRSEGEGEAASADDGSLNTSGAGPKSWQVPPPAPEVQIRTPRVNCPEKVIICLDLSEEMSLPKLESFNGSKTNALNVSQKMIEMFVRTKHKIDKSHEFALVVVNDDTAWLSGLTSDPRELCSCLYDLETASCSTFNLEGLFSLIQQKTELPVTENVQTIPPPYVVRTILVYSRPPCQPQ

SEQ ID NO: 9709 - protein, 329 aa, Homo sapiens; identical to SEQ ID NO: 9701
  Payload ID: 1969;
  Gene Symbol: BABAM1;
  Gene Name: BRISC and BRCA1 A complex member 1;
  Uniprot ID:  Q9NWV8;
  ENSP ID: ENSP00000471605

SEQ ID NO: 9710 - protein, 218 aa, Homo sapiens
  Payload ID: 1969;
  Gene Symbol: BABAM1;
  Gene Name: BRISC and BRCA1 A complex member 1;
  ENSP ID: ENSP00000471721
MEVAEPSSPTEEEEEEEEHSAEPRPRTRSNPEGAEDRAVGAQASVGSRSEGEGEAASADDGSLNTSGAGPKSWQVPPPAPEVQIRTPRVNCPEKVIICLDLSEEMSLPKLESFNGSKTNALNVSQKMIEMFVRTKHKIDKSHEFALVVVNDDTAWLSGLTSDPRELCSCLYDLETASCSTFTFSLAPPPDLEGLFSLIQQKTELPVTENVQTIPPPYV

SEQ ID NO: 9711 - protein, 193 aa, Homo sapiens
  Payload ID: 1969;
  Gene Symbol: BABAM1;
  Gene Name: BRISC and BRCA1 A complex member 1;
  ENSP ID: ENSP00000472425
MEVAEPSSPTEEEEEEEEHSAEPRPRTRSNPEGAEDRAVGAQASVGSRSEGEGEAASADDGSLNTSGAGPKSWQVPPPAPEVQIRTPRVNCPEKVIICLDLSEEMSLPKLESFNGSKTNALNVSQKMIEMFVRTKHKIDKSHEFALVVVNDDTAWLSGLTSDPRELCSCLYDLETASCSTFTPPPDLEGLFSL

SEQ ID NO: 9712 - protein, 237 aa, Homo sapiens
  Payload ID: 1969;
  Gene Symbol: BABAM1;
  Gene Name: BRISC and BRCA1 A complex member 1;
  ENSP ID: ENSP00000472585
MLVRLVSNFQPQGRILASPVRVPSSHTGAMEVAEPSSPTEEEEEEEEHSAEPRPRTRSNPEGAEDRAVGAQASVGSRSEGEGEAASADDGSLNTSGAGPKSWQVPPPAPEVQIRTPRVNCPEKVIICLDLSEEMSLPKLESFNGSKTNALNVSQKMIEMFVRTKHKIDKSHEFALVVVNDDTAWLSGLTSDPRELCSCLYDLETASCSTFNLEGLFSLIQQKTELPVTENVQTIPPP

SEQ ID NO: 9713 - protein, 200 aa, Homo sapiens
  Payload ID: 1969;
  Gene Symbol: BABAM1;
  Gene Name: BRISC and BRCA1 A complex member 1;
  ENSP ID: ENSP00000472632
MEVAEPSSPTEEEEEEEEHSAEPRPRTRSNPEGAEDRAVGAQASVGSRSEGEGEAASADDGSLNTSGAGPKSWQVPPPAPEVQIRTPRVNCPEKVIICLDLSEEMSLPKLESFNGSKTNALNVSQKMIEMFVRTKHKIDKSHEFALVVVNDDTAWLSGLTSDPRELCSCLYDLETASCSTFNLEGLFSLIQQKTELPVTE

SEQ ID NO: 9714 - protein, 181 aa, Homo sapiens
  Payload ID: 1969;
  Gene Symbol: BABAM1;
  Gene Name: BRISC and BRCA1 A complex member 1;
  ENSP ID: ENSP00000473182
MEVAEPSSPTEEEEEEEEHSAEPRPRTRSNPEGAEDRAVGAQASVGSRSEGEGEAASADDGSLNTSGAGPKSWQVPPPAPEVQIRTPRVNCPEKVIICLDLSEEMSLPKLESFNGSKTNALNVSQKMIEMFVRTKHKIDKSHEFALVVVNDDTAWLSGLTSDPRELCSCLYDLETASCSTF

SEQ ID NO: 9715 - protein, 60 aa, Homo sapiens
  Payload ID: 1969;
  Gene Symbol: BABAM1;
  Gene Name: BRISC and BRCA1 A complex member 1;
  ENSP ID: ENSP00000473240
MEVAEPSSPTEEEEEEEEHSAEPRPRTRSNPEGAEDRAVGAQASPLRSKFGHQGSTVQRK

SEQ ID NO: 9716 - protein, 411 aa, Homo sapiens
  Payload ID: 1970;
  Gene Symbol: BROX;
  Gene Name: BRO1 domain and CAAX motif containing;
  Uniprot ID:  Q5VW32;
  ENSP ID: ENSP00000343742
MTHWFHRNPLKATAPVSFNYYGVVTGPSASKICNDLRSSRARLLELFTDLSCNPEMMKNAADSYFSLLQGFINSLDESTQESKLRYIQNFKWTDTLQGQVPSAQQDAVFELISMGFNVALWYTKYASRLAGKENITEDEAKEVHRSLKIAAGIFKHLKESHLPKLITPAEKGRDLESRLIEAYVIQCQAEAQEVTIARAIELKHAPGLIAALAYETANFYQKADHTLSSLEPAYSAKWRKYLHLKMCFYTAYAYCYHGETLLASDKCGEAIRSLQEAEKLYAKAEALCKEYGETKGPGPTVKPSGHLFFRKLGNLVKNTLEKCQRENGFIYFQKIPTEAPQLELKANYGLVEPIPFEFPPTSVQWTPETLAAFDLTKRPKDDSTKPKPEEEVKPVKEPDIKPQKDTGCYIS

SEQ ID NO: 9717 - protein, 215 aa, Homo sapiens
  Payload ID: 1970;
  Gene Symbol: BROX;
  Gene Name: BRO1 domain and CAAX motif containing;
  ENSP ID: ENSP00000398862
MTHWFHRNPLKATAPVSFNYYGVVTGPSASKICNDLRSSRARLLELFTDLSCNPEMMKNAADSYFSLLQGFINSLDESTQESKLRYIQNFKWTDTLQGQVPSAQQDAVFELISMGFNVALWYTKYASRLAGKENITEDEAKEVHRSLKIAAGIFKHLKESHLPKLITPAEKGRDLESRLIEAYVIQCQAEAQEVTIARAIELKHAPGLIAALAYE

SEQ ID NO: 9718 - protein, 338 aa, Homo sapiens
  Payload ID: 1970;
  Gene Symbol: BROX;
  Gene Name: BRO1 domain and CAAX motif containing;
  ENSP ID: ENSP00000440041
MTHWFHRNPLKATAPVSFNYYGVVTGPSASKICNDLRSSRARLLELFTDLSCNPEMMKNAADSYFSLLQGFINSLDESTQESKLRYIQNFKWTDTLQGQVPSAQQDAVFELISMGFNVALWYTKYASRLAGKENITEDEAKEVHRSLKIAAGIFKHLKESHLPKLITPAEKGRDLESRLIEAYVIQCQAEAQEVTIARAIELKHAPGLIAALAYETANFYQKADHTLSSLEPAYSAKWRKYLHLKMCFYTAYAYCYHGETLLASDKCGEAIRSLQEAEKLYAKAEALCKEYGETKGPGPTVKPSGHLFFRKLGNLVKNTLEKCQRENGFILNPNQKKK

SEQ ID NO: 9719 - protein, 379 aa, Homo sapiens
  Payload ID: 1970;
  Gene Symbol: BROX;
  Gene Name: BRO1 domain and CAAX motif containing;
  Uniprot ID:  Q5VW32;
  ENSP ID: ENSP00000441080
MTHWFHRNPLKATAPVSFNYYGVVTGPSASKICNDLRSSRARLLELFTDLSCNPEMMKNAADSYFSLLQGFINSLDESTQESKLRYIQNFKWTDTLQGQVPSITEDEAKEVHRSLKIAAGIFKHLKESHLPKLITPAEKGRDLESRLIEAYVIQCQAEAQEVTIARAIELKHAPGLIAALAYETANFYQKADHTLSSLEPAYSAKWRKYLHLKMCFYTAYAYCYHGETLLASDKCGEAIRSLQEAEKLYAKAEALCKEYGETKGPGPTVKPSGHLFFRKLGNLVKNTLEKCQRENGFIYFQKIPTEAPQLELKANYGLVEPIPFEFPPTSVQWTPETLAAFDLTKRPKDDSTKPKPEEEVKPVKEPDIKPQKDTGCYIS

SEQ ID NO: 9720 - protein, 379 aa, Homo sapiens; identical to SEQ ID NO: 9719
  Payload ID: 1970;
  Gene Symbol: BROX;
  Gene Name: BRO1 domain and CAAX motif containing;
  Uniprot ID:  Q5VW32;
  ENSP ID: ENSP00000478496

SEQ ID NO: 9721 - protein, 780 aa, Homo sapiens
  Payload ID: 1971;
  Gene Symbol: BAHD1;
  Gene Name: bromo adjacent homology domain containing 1;
  Uniprot ID:  Q8TBE0;
  ENSP ID: ENSP00000396976
MTHTRRKSLPMLSSGLTGRREPLQMEDSNMEQGVEGVEPGMPESPGHLTGRRKNYPLRKRPLVPEKPKACKVLLTRLENVAGPRSADEADELPPDLPKPPSPAPSSEDPGLAQPRKRRLASLNAEALNNLLLEREDTSSLAGTRRSRAGDPHRSRDRDRATGGWSSSKKRPRLGDLGGGSRDLSPEPAPDEGPRRDGDPAPKRLASLNAAAFLKLSQERELPLRLPRAHAEVDGRSTEPPAPKAPRPKWPKVNGKNYPKAWQGASSGEAAGPPGWQGCPDEPWPSATPCGPSVQPSHQPLSKALESPLGLRPHLPLLMGGQAALKPEPGRPGEESPAPKQELHQPSFPTPQLSPLPMPGNPADYNGLCVGPELTALGSFYLYCGQEGLQCGGYSPCPMLPEGKLSPVAAPHEEGLLLAPSSVPSGTPFQHPPWGSSRYCSSEDTGVNGYSICGVLPLSVTHAGTTCGGCPYKMPFAAEGCRSLGQLEFPLPEAGHPASPAHPLLGCPVPSVPPAAEPVPHLQTPTSEPQTVARACPQSAKPPSGSKSGLRTGSSCRHTARSKAARRPSHPKQPRVQRPRPRRRRRRRTNGWVPVGAACEKAVYVLDEPEPAIRKSYQAVERHGETIRVRDTVLLKSGPRKTSTPYVAKISALWENPESGELMMSLLWYYRPEHLQGGRSPSMHEPLQNEVFASRHQDQNSVACIEEKCYVLTFAEYCRFCAMAKRRGEGLPSRKTALVPPSADYSTPPHRTVPEDTDPELVFLCRHVYDFRHGRILKNPQ

SEQ ID NO: 9722 - protein, 777 aa, Homo sapiens
  Payload ID: 1971;
  Gene Symbol: BAHD1;
  Gene Name: bromo adjacent homology domain containing 1;
  Uniprot ID:  Q8TBE0;
  ENSP ID: ENSP00000454101
MTHTRRKSLPMLSSGLTGRREPLQMEDSNMEQGVEGVEPGMPESPGHLTGRRKNYPLRKRPLVPEKPKACKVLLTRLENVAGPRSADEADELPPDLPKPPSPAPSSEDPGLAQPRKRRLASLNAEALNNLLLEREDTSSLAGTRRSRAGDPHRSRDRDRATGGWSSSKKRPRLGDLGGGSRDLSPEPAPDEGPRRDGDPAPKRLASLNAAAFLKLSQERELPLRLPRAHAEVDGRSTEPPAPKAPRPKWPKVNGKNYPKAWQGASSGEAAGPPGWQGCPDEPWPSATPCGPSVQPSHQPLSKALESPLGLRPHLPLLMGGQAALKPEPGRPGEESPAPKQELHQPSFPTPQLSPLPMPGNPADYNGLCVGPELTALGSFYLYCGQEGLQCGGYSPCPMLPEGKLSPVAAPHEEGLLLAPSSVPSGTPFQHPPWGSSRYCSSEDTGVNGYSICGVLPLSVTHAGTTCGGCPYKMPFAAEGCRSLGQLEFPLPEAGHPASPAHPLLGCPVPSVPPAAEPVPHLQTPTSEPQTVARACPQSAKPPSGSKSGLRTGSSCRHTARSKAARRPSHPKQPRVQRPRPRRRRRRRTNGWVPVGAACEKAVYVLDEPEPAIRKSYQAVERHGETIRVRDTVLLKSGPRKTSTPYVAKISALWENPESGELMMSLLWYYRPEHLQGGRSPSMHENEVFASRHQDQNSVACIEEKCYVLTFAEYCRFCAMAKRRGEGLPSRKTALVPPSADYSTPPHRTVPEDTDPELVFLCRHVYDFRHGRILKNPQ

SEQ ID NO: 9723 - protein, 779 aa, Homo sapiens
  Payload ID: 1971;
  Gene Symbol: BAHD1;
  Gene Name: bromo adjacent homology domain containing 1;
  Uniprot ID:  Q8TBE0;
  ENSP ID: ENSP00000454150
MTHTRRKSLPMLSSGLTGRREPLQMEDSNMEQGVEGVEPGMPESPGHLTGRRKNYPLRKRPLVPEKPKACKVLLTRLENVAGPRSADEADELPPDLPKPPSPAPSSEDPGLAQPRKRRLASLNAEALNNLLLEREDTSSLAGTRRSRAGDPHRSRDRDRATGGWSSSKKRPRLGDLGGGSRDLSPEPAPDEGPRRDGDPAPKRLASLNAAAFLKLSQERELPLRLPRAHAEVDGRSTEPPAPKAPRPKWPKVNGKNYPKAWQGASSGEAAGPPGWQGCPDEPWPSATPCGPSVQPSHQPLSKALESPLGLRPHLPLLMGGQAALKPEPGRPGEESPAPKQELHQPSFPTPQLSPLPMPGNPADYNGLCVGPELTALGSFYLYCGQEGLQCGGYSPCPMLPEGKLSPVAAPHEEGLLLAPSSVPSGTPFQHPPWGSSRYCSSEDTGVNGYSICGVLPLSVTHAGTTCGGCPYKMPFAAGCRSLGQLEFPLPEAGHPASPAHPLLGCPVPSVPPAAEPVPHLQTPTSEPQTVARACPQSAKPPSGSKSGLRTGSSCRHTARSKAARRPSHPKQPRVQRPRPRRRRRRRTNGWVPVGAACEKAVYVLDEPEPAIRKSYQAVERHGETIRVRDTVLLKSGPRKTSTPYVAKISALWENPESGELMMSLLWYYRPEHLQGGRSPSMHEPLQNEVFASRHQDQNSVACIEEKCYVLTFAEYCRFCAMAKRRGEGLPSRKTALVPPSADYSTPPHRTVPEDTDPELVFLCRHVYDFRHGRILKNPQ

SEQ ID NO: 9724 - protein, 1524 aa, Homo sapiens
  Payload ID: 1972;
  Gene Symbol: BAZ1A;
  Gene Name: bromodomain adjacent to zinc finger domain, 1A;
  Uniprot ID:  Q9NRL2;
  ENSP ID: ENSP00000351555
MPLLHRKPFVRQKPPADLRPDEEVFYCKVTNEIFRHYDDFFERTILCNSLVWSCAVTGRPGLTYQEALESEKKARQNLQSFPEPLIIPVLYLTSLTHRSRLHEICDDIFAYVKDRYFVEETVEVIRNNGARLQCRILEVLPPSHQNGFANGHVNSVDGETIIISDSDDSETQSCSFQNGKKKDAIDPLLFKYKVQPTKKELHESAIVKATQISRRKHLFSRDKLKLFLKQHCEPQDGVIKIKASSLSTYKIAEQDFSYFFPDDPPTFIFSPANRRRGRPPKRIHISQEDNVANKQTLASYRSKATKERDKLLKQEEMKSLAFEKAKLKREKADALEAKKKEKEDKEKKREELKKIVEEERLKKKEEKERLKVEREKEREKLREEKRKYVEYLKQWSKPREDMECDDLKELPEPTPVKTRLPPEIFGDALMVLEFLNAFGELFDLQDEFPDGVTLEVLEEALVGNDSEGPLCELLFFFLTAIFQAIAEEEEEVAKEQLTDADTKGCSLKSLDLDSCTLSEILRLHILASGADVTSANAKYRYQKRGGFDATDDACMELRLSNPSLVKKLSSTSVYDLTPGEKMKILHALCGKLLTLVSTRDFIEDYVDILRQAKQEFRELKAEQHRKEREEAAARIRKRKEEKLKEQEQKMKEKQEKLKEDEQRNSTADISIGEEEREDFDTSIESKDTEQKELDQDMVTEDEDDPGSHKRGRRGKRGQNGFKEFTRQEQINCVTREPLTADEEEALKQEHQRKEKELLEKIQSAIACTNIFPLGRDRMYRRYWIFPSIPGLFIEEDYSGLTEDMLLPRPSSFQNNVQSQDPQVSTKTGEPLMSESTSNIDQGPRDHSVQLPKPVHKPNRWCFYSSCEQLDQLIEALNSRGHRESALKETLLQEKSRICAQLARFSEEKFHFSDKPQPDSKPTYSRGRSSNAYDPSQMCAEKQLELRLRDFLLDIEDRIYQGTLGAIKVTDRHIWRSALESGRYELLSEENKENGIIKTVNEDVEEMEIDEQTKVIVKDRLLGIKTETPSTVSTNASTPQSVSSVVHYLAMALFQIEQGIERRFLKAPLDASDSGRSYKTVLDRWRESLLSSASLSQVFLHLSTLDRSVIWSKSILNARCKICRKKGDAENMVLCDGCDRGHHTYCVRPKLKTVPEGDWFCPECRPKQRSRRLSSRQRPSLESDEDVEDSMGGEDDEVDGDEEEGQSEEEEYEVEQDEDDSQEEEEVSLPKRGRPQVRLPVKTRGKLSSSFSSRGQQQEPGRYPSRSQQSTPKTTVSSKTGRSLRKINSAPPTETKSLRIASRSTRHSHGPLQADVFVELLSPRRKRRGRKSANNTPENSPNFPNFRVIATKSSEQSRSVNIASKLSLQESESKRRCRKRQSPEPSPVTLGRRSSGRQGGVHELSAFEQLVVELVRHDDSWPFLKLVSKIQVPDYYDIIKKPIALNIIREKVNKCEYKLASEFIDDIELMFSNCFEYNPRNTSEAKAGTRLQAFFHIQAQKLGLHVTPSNVDQVSTPPAAKKSRI

SEQ ID NO: 9725 - protein, 1556 aa, Homo sapiens
  Payload ID: 1972;
  Gene Symbol: BAZ1A;
  Gene Name: bromodomain adjacent to zinc finger domain, 1A;
  Uniprot ID:  Q9NRL2;
  ENSP ID: ENSP00000353458
MPLLHRKPFVRQKPPADLRPDEEVFYCKVTNEIFRHYDDFFERTILCNSLVWSCAVTGRPGLTYQEALESEKKARQNLQSFPEPLIIPVLYLTSLTHRSRLHEICDDIFAYVKDRYFVEETVEVIRNNGARLQCRILEVLPPSHQNGFANGHVNSVDGETIIISDSDDSETQSCSFQNGKKKDAIDPLLFKYKVQPTKKELHESAIVKATQISRRKHLFSRDKLKLFLKQHCEPQDGVIKIKASSLSTYKIAEQDFSYFFPDDPPTFIFSPANRRRGRPPKRIHISQEDNVANKQTLASYRSKATKERDKLLKQEEMKSLAFEKAKLKREKADALEAKKKEKEDKEKKREELKKIVEEERLKKKEEKERLKVEREKEREKLREEKRKYVEYLKQWSKPREDMECDDLKELPEPTPVKTRLPPEIFGDALMVLEFLNAFGELFDLQDEFPDGVTLEVLEEALVGNDSEGPLCELLFFFLTAIFQAIAEEEEEVAKEQLTDADTKDLTEALDEDADPTKSALSAVASLAAAWPQLHQGCSLKSLDLDSCTLSEILRLHILASGADVTSANAKYRYQKRGGFDATDDACMELRLSNPSLVKKLSSTSVYDLTPGEKMKILHALCGKLLTLVSTRDFIEDYVDILRQAKQEFRELKAEQHRKEREEAAARIRKRKEEKLKEQEQKMKEKQEKLKEDEQRNSTADISIGEEEREDFDTSIESKDTEQKELDQDMVTEDEDDPGSHKRGRRGKRGQNGFKEFTRQEQINCVTREPLTADEEEALKQEHQRKEKELLEKIQSAIACTNIFPLGRDRMYRRYWIFPSIPGLFIEEDYSGLTEDMLLPRPSSFQNNVQSQDPQVSTKTGEPLMSESTSNIDQGPRDHSVQLPKPVHKPNRWCFYSSCEQLDQLIEALNSRGHRESALKETLLQEKSRICAQLARFSEEKFHFSDKPQPDSKPTYSRGRSSNAYDPSQMCAEKQLELRLRDFLLDIEDRIYQGTLGAIKVTDRHIWRSALESGRYELLSEENKENGIIKTVNEDVEEMEIDEQTKVIVKDRLLGIKTETPSTVSTNASTPQSVSSVVHYLAMALFQIEQGIERRFLKAPLDASDSGRSYKTVLDRWRESLLSSASLSQVFLHLSTLDRSVIWSKSILNARCKICRKKGDAENMVLCDGCDRGHHTYCVRPKLKTVPEGDWFCPECRPKQRSRRLSSRQRPSLESDEDVEDSMGGEDDEVDGDEEEGQSEEEEYEVEQDEDDSQEEEEVSLPKRGRPQVRLPVKTRGKLSSSFSSRGQQQEPGRYPSRSQQSTPKTTVSSKTGRSLRKINSAPPTETKSLRIASRSTRHSHGPLQADVFVELLSPRRKRRGRKSANNTPENSPNFPNFRVIATKSSEQSRSVNIASKLSLQESESKRRCRKRQSPEPSPVTLGRRSSGRQGGVHELSAFEQLVVELVRHDDSWPFLKLVSKIQVPDYYDIIKKPIALNIIREKVNKCEYKLASEFIDDIELMFSNCFEYNPRNTSEAKAGTRLQAFFHIQAQKLGLHVTPSNVDQVSTPPAAKKSRI

SEQ ID NO: 9726 - protein, 1556 aa, Homo sapiens; identical to SEQ ID NO: 9725
  Payload ID: 1972;
  Gene Symbol: BAZ1A;
  Gene Name: bromodomain adjacent to zinc finger domain, 1A;
  Uniprot ID:  Q9NRL2;
  ENSP ID: ENSP00000371859

SEQ ID NO: 9727 - protein, 12 aa, Homo sapiens
  Payload ID: 1972;
  Gene Symbol: BAZ1A;
  Gene Name: bromodomain adjacent to zinc finger domain, 1A;
  ENSP ID: ENSP00000450902
  MOD_RES (1)..(1): Any amino acid
XRKRQSPGPRLL

SEQ ID NO: 9728 - protein, 76 aa, Homo sapiens
  Payload ID: 1972;
  Gene Symbol: BAZ1A;
  Gene Name: bromodomain adjacent to zinc finger domain, 1A;
  ENSP ID: ENSP00000450923
  MOD_RES (1)..(1): Any amino acid
XLLGIKTETPSTVSTNASTPQSVSSVVHYLAMALFQIEQGIERRFLKAPLGKTEINKDQKGDRKKKGQEKERGRSI

SEQ ID NO: 9729 - protein, 77 aa, Homo sapiens
  Payload ID: 1972;
  Gene Symbol: BAZ1A;
  Gene Name: bromodomain adjacent to zinc finger domain, 1A;
  ENSP ID: ENSP00000451896
  MOD_RES (1)..(1): Any amino acid
XYVKDRYFVEETVEVIRNNGARLQCRILEVLPPSHQNGFANGHVNSVDGETIIISDSDDSETQSCSFQNGFPLLTAK

SEQ ID NO: 9730 - protein, 218 aa, Homo sapiens
  Payload ID: 1972;
  Gene Symbol: BAZ1A;
  Gene Name: bromodomain adjacent to zinc finger domain, 1A;
  ENSP ID: ENSP00000480380
  MOD_RES (1)..(1): Any amino acid
XSCTLSEILRLHILASGADVTSANAKYRYQKRGGFDATDDACMELRLSNPSLVKKLSSTSVYDLTPGEKMKILHALCGKLLTLVSTRDFIEDYVDILRQAKQEFRELKAEQHRKEREEAAARIRKRKEEKLKEQEQKMKEKQEKLKEDEQRNSTADISIGEEEREDFDTSIESKDTEQKELDQDMVTEDEDDPGSHKRGRRGNTEISLGHSCVFVFNQ

SEQ ID NO: 9731 - protein, 1483 aa, Homo sapiens
  Payload ID: 1973;
  Gene Symbol: BAZ1B;
  Gene Name: bromodomain adjacent to zinc finger domain, 1B;
  Uniprot ID:  Q9UIG0;
  ENSP ID: ENSP00000342434
MAPLLGRKPFPLVKPLPGEEPLFTIPHTQEAFRTREEYEARLERYSERIWTCKSTGSSQLTHKEAWEEEQEVAELLKEEFPAWYEKLVLEMVHHNTASLEKLVDTAWLEIMTKYAVGEECDFEVGKEKMLKVKIVKIHPLEKVDEEATEKKSDGACDSPSSDKENSSQIAQDHQKKETVVKEDEGRRESINDRARRSPRKLPTSLKKGERKWAPPKFLPHKYDVKLQNEDKIISNVPADSLIRTERPPNKEIVRYFIRHNALRAGTGENAPWVVEDELVKKYSLPSKFSDFLLDPYKYMTLNPSTKRKNTGSPDRKPSKKSKTDNSSLSSPLNPKLWCHVHLKKSLSGSPLKVKNSKNSKSPEEHLEEMMKMMSPNKLHTNFHIPKKGPPAKKPGKHSDKPLKAKGRSKGILNGQKSTGNSKSPKKGLKTPKTKMKQMTLLDMAKGTQKMTRAPRNSGGTPRTSSKPHKHLPPAALHLIAYYKENKDREDKRSALSCVISKTARLLSSEDRARLPEELRSLVQKRYELLEHKKRWASMSEEQRKEYLKKKREELKKKLKEKAKERREKEMLERLEKQKRYEDQELTGKNLPAFRLVDTPEGLPNTLFGDVAMVVEFLSCYSGLLLPDAQYPITAVSLMEALSADKGGFLYLNRVLVILLQTLLQDEIAEDYGELGMKLSEIPLTLHSVSELVRLCLRRSDVQEESEGSDTDDNKDSAAFEDNEVQDEFLEKLETSEFFELTSEEKLQILTALCHRILMTYSVQDHMETRQQMSAELWKERLAVLKEENDKKRAEKQKRKEMEAKNKENGKVENGLGKTDRKKEIVKFEPQVDTEAEDMISAVKSRRLLAIQAKKEREIQEREMKVKLERQAEEERIRKHKAAAEKAFQEGIAKAKLVMRRTPIGTDRNHNRYWLFSDEVPGLFIEKGWVHDSIDYRFNHHCKDHTVSGDEDYCPRSKKANLGKNASMNTQHGTATEVAVETTTPKQGQNLWFLCDSQKELDELLNCLHPQGIRESQLKERLEKRYQDIIHSIHLARKPNLGLKSCDGNQELLNFLRSDLIEVATRLQKGGLGYVEETSEFEARVISLEKLKDFGECVIALQASVIKKFLQGFMAPKQKRRKLQSEDSAKTEEVDEEKKMVEEAKVASALEKWKTAIREAQTFSRMHVLLGMLDACIKWDMSAENARCKVCRKKGEDDKLILCDECNKAFHLFCLRPALYEVPDGEWQCPACQPATARRNSRGRNYTEESASEDSEDDESDEEEEEEEEEEEEEDYEVAGLRLRPRKTIRGKHSVIPPAARSGRRPGKKPHSTRRSQPKAPPVDDAEVDELVLQTKRSSRRQSLELQKCEEILHKIVKYRFSWPFREPVTRDEAEDYYDVITHPMDFQTVQNKCSCGSYRSVQEFLTDMKQVFTNAEVYNCRGSHVLSCMVKTEQCLVALLHKHLPGHPYVRRKRKKFPDRLAEDEGDSEPEAVGQSRGRRQKK

SEQ ID NO: 9732 - protein, 1483 aa, Homo sapiens; identical to SEQ ID NO: 9731
  Payload ID: 1973;
  Gene Symbol: BAZ1B;
  Gene Name: bromodomain adjacent to zinc finger domain, 1B;
  Uniprot ID:  Q9UIG0;
  ENSP ID: ENSP00000385442

SEQ ID NO: 9733 - protein, 1875 aa, Homo sapiens
  Payload ID: 1974;
  Gene Symbol: BAZ2A;
  Gene Name: bromodomain adjacent to zinc finger domain, 2A;
  ENSP ID: ENSP00000368754
MEMEANDHFNFTGLPPAPAASGLKPSPSSGEGLYTNGSPMNFPQQGKSLNGDVNVNGLSTVSHTTTSGILNSAPHSSSTSHLHHPSVAYDCLWNYSQYPSANPGSNLKDPPLLSQFSGGQYPLNGILGGSRQPSSPSHNTNLRAGSQEFWANGTQSPMGLNFDSQELYDSFPDQNFEEVGSGIHPDEAAEKEMTSVVAENGTGLVGSLELEEEQPELKMCGYNGSVPSVESLHQEVSVLVPDPTVSCLDDPSHLPDQLEDTPILSEDSLEPFNSLAPEPVSGGLYGIDDTELMGAEDKLPLEDSPVISALDCPSLNNATAFSLLADDSQTSTSIFASPTSPPVLGESVLQDNSFDLNNGSDAEQEEMETQSSDFPPSLTQPAPDQSSTIQLHPATSPAVSPTTSPAVSLVVSPAASPEISPEVCPAASTVVSPAVFSVVSPASSAVLPAVSLEVPLTASVTSPKASPVTSPAAAFPTASPANKDVSSFLETTADVEEITGEGLTASGSGDVMRRRIATPEEVRLPLQHGWRREVRIKKGSHRWQGETWYYGPCGKRMKQFPEVIKYLSRNVVHSVRREHFSFSPRMPVGDFFEERDTPEGLQWVQLSAEEIPSRIQAITGKRGRPRNTEKAKTKEVPKVKRGRGRPPKVKITELLNKTDNRPLKKLEAQETLNEEDKAKIAKSKKKMRQKVQRGECQTTIQGQARNKRKQETKSLKQKEAKKKSKAEKEKGKTKQEKLKEKVKREKKEKVKMKEKEEVTKAKPACKADKTLATQRRLEERQRQQMILEEMKKPTEDMCLTDHQPLPDFSRVPGLTLPSGAFSDCLTIVEFLHSFGKVLGFDPAKDVPSLGVLQEGLLCQGDSLGEVQDLLVRLLKAALHDPGFPSYCQSLKILGEKVSEIPLTRDNVSEILRCFLMAYGVEPALCDRLRTQPFQAQPPQQKAAVLAFLVHELNGSTLIINEIDKTLESMSSYRKNKWIVEGRLRRLKTVLAKRTGRSEVEMEGPEECLGRRRSSRIMEETSGMEEEEEEESIAAVPGRRGRRDGEVDATASSIPELERQIEKLSKRQLFFRKKLLHSSQMLRAVSLGQDRYRRRYWVLPYLAGIFVEGTEGNLVPEEVIKKETDSLKVAAHASLNPALFSMKMELAGSNTTASSPARARGRPRKTKPGSMQPRHLKSPVRGQDSEQPQAQLQPEAQLHAPAQPQPQLQLQLQSHKGFLEQEGSPLSLGQSQHDLSQSAFLSWLSQTQSHSSLLSSSVLTPDSSPGKLDPAPSQPPEEPEPDEAESSPDPQALWFNISAQMPCNAAPTPPPAVSEDQPTPSPQQLASSKPMNRPSAANPCSPVQFSSTPLAGLAPKRRAGDPGEMPQSPTGLGQPKRRGRPPSKFFKQMEQRYLTQLTAQPVPPEMCSGWWWIRDPEMLDAMLKALHPRGIREKALHKHLNKHRDFLQEVCLRPSADPIFEPRQLPAFQEGIMSWSPKEKTYETDLAVLQWVEELEQRVIMSDLQIRGWTCPSPDSTREDLAYCEHLSDSQEDITWRGRGREGLAPQRKTTNPLDLAVMRLAALEQNVERRYLREPLWPTHEVVLEKALLSTPNGAPEGTTTEISYEITPRIRVWRQTLERCRSAAQVCLCLGQLERSIAWEKSVNKVTCLVCRKGDNDEFLLLCDGCDRGCHIYCHRPKMEAVPEGDWFCTVCLAQQVEGEFTQKPGFPKRGQKRKSGYSLNFSEGDGRRRRVLLRGRESPAAGPRYSEEGLSPSKRRRLSMRNHHSDLTFCEIILMEMESHDAAWPFLEPVNPRLVSGYRRIIKNPMDFSTMRERLLRGGYTSSEEFAADALLVFDNCQTFNEDDSEVGKAGHIMRRFFESRWEEFYQGKQANL

SEQ ID NO: 9734 - protein, 1905 aa, Homo sapiens
  Payload ID: 1974;
  Gene Symbol: BAZ2A;
  Gene Name: bromodomain adjacent to zinc finger domain, 2A;
  Uniprot ID:  Q9UIF9;
  ENSP ID: ENSP00000446880
MEMEANDHFNFTGLPPAPAASGLKPSPSSGEGLYTNGSPMNFPQQGKSLNGDVNVNGLSTVSHTTTSGILNSAPHSSSTSHLHHPSVAYDCLWNYSQYPSANPGSNLKDPPLLSQFSGGQYPLNGILGGSRQPSSPSHNTNLRAGSQEFWANGTQSPMGLNFDSQELYDSFPDQNFEVMPNGPPSFFTSPQTSPMLGSSIQTFAPSQEVGSGIHPDEAAEKEMTSVVAENGTGLVGSLELEEEQPELKMCGYNGSVPSVESLHQEVSVLVPDPTVSCLDDPSHLPDQLEDTPILSEDSLEPFNSLAPEPVSGGLYGIDDTELMGAEDKLPLEDSPVISALDCPSLNNATAFSLLADDSQTSTSIFASPTSPPVLGESVLQDNSFDLNNGSDAEQEEMETQSSDFPPSLTQPAPDQSSTIQLHPATSPAVSPTTSPAVSLVVSPAASPEISPEVCPAASTVVSPAVFSVVSPASSAVLPAVSLEVPLTASVTSPKASPVTSPAAAFPTASPANKDVSSFLETTADVEEITGEGLTASGSGDVMRRRIATPEEVRLPLQHGWRREVRIKKGSHRWQGETWYYGPCGKRMKQFPEVIKYLSRNVVHSVRREHFSFSPRMPVGDFFEERDTPEGLQWVQLSAEEIPSRIQAITGKRGRPRNTEKAKTKEVPKVKRGRGRPPKVKITELLNKTDNRPLKKLEAQETLNEEDKAKIAKSKKKMRQKVQRGECQTTIQGQARNKRKQETKSLKQKEAKKKSKAEKEKGKTKQEKLKEKVKREKKEKVKMKEKEEVTKAKPACKADKTLATQRRLEERQRQQMILEEMKKPTEDMCLTDHQPLPDFSRVPGLTLPSGAFSDCLTIVEFLHSFGKVLGFDPAKDVPSLGVLQEGLLCQGDSLGEVQDLLVRLLKAALHDPGFPSYCQSLKILGEKVSEIPLTRDNVSEILRCFLMAYGVEPALCDRLRTQPFQAQPPQQKAAVLAFLVHELNGSTLIINEIDKTLESMSSYRKNKWIVEGRLRRLKTVLAKRTGRSEVEMEGPEECLGRRRSSRIMEETSGMEEEEEEESIAAVPGRRGRRDGEVDATASSIPELERQIEKLSKRQLFFRKKLLHSSQMLRAVSLGQDRYRRRYWVLPYLAGIFVEGTEGNLVPEEVIKKETDSLKVAAHASLNPALFSMKMELAGSNTTASSPARARGRPRKTKPGSMQPRHLKSPVRGQDSEQPQAQLQPEAQLHAPAQPQPQLQLQLQSHKGFLEQEGSPLSLGQSQHDLSQSAFLSWLSQTQSHSSLLSSSVLTPDSSPGKLDPAPSQPPEEPEPDEAESSPDPQALWFNISAQMPCNAAPTPPPAVSEDQPTPSPQQLASSKPMNRPSAANPCSPVQFSSTPLAGLAPKRRAGDPGEMPQSPTGLGQPKRRGRPPSKFFKQMEQRYLTQLTAQPVPPEMCSGWWWIRDPEMLDAMLKALHPRGIREKALHKHLNKHRDFLQEVCLRPSADPIFEPRQLPAFQEGIMSWSPKEKTYETDLAVLQWVEELEQRVIMSDLQIRGWTCPSPDSTREDLAYCEHLSDSQEDITWRGRGREGLAPQRKTTNPLDLAVMRLAALEQNVERRYLREPLWPTHEVVLEKALLSTPNGAPEGTTTEISYEITPRIRVWRQTLERCRSAAQVCLCLGQLERSIAWEKSVNKVTCLVCRKGDNDEFLLLCDGCDRGCHIYCHRPKMEAVPEGDWFCTVCLAQQVEGEFTQKPGFPKRGQKRKSGYSLNFSEGDGRRRRVLLRGRESPAAGPRYSEEGLSPSKRRRLSMRNHHSDLTFCEIILMEMESHDAAWPFLEPVNPRLVSGYRRIIKNPMDFSTMRERLLRGGYTSSEEFAADALLVFDNCQTFNEDDSEVGKAGHIMRRFFESRWEEFYQGKQANL

SEQ ID NO: 9735 - protein, 116 aa, Homo sapiens
  Payload ID: 1974;
  Gene Symbol: BAZ2A;
  Gene Name: bromodomain adjacent to zinc finger domain, 2A;
  ENSP ID: ENSP00000447248
MEANDHFNFTGLPPAPAASGLKPSPSSGEGLYTNGSPMNFPQQGKSLNGDVNVNGLSTVSHTTTSGILNSAPHSSSTSHLHHPSVAYDCLWNYSQYPSANPGSNLKDPPLLSQFSG

SEQ ID NO: 9736 - protein, 162 aa, Homo sapiens
  Payload ID: 1974;
  Gene Symbol: BAZ2A;
  Gene Name: bromodomain adjacent to zinc finger domain, 2A;
  ENSP ID: ENSP00000447314
  MOD_RES (1)..(1): Any amino acid
XNAAPTPPPAVSEDQPTPSPQQLASSKPMNRPSAANPCSPVQFSSTPLAGLAPKRRAGDPGEMPQSPTGLGQPKRRGRPPKMCSGWWWIRDPEMLDAMLKALHPRGIREKALHKHLNKHRDFLQEVCLRPSADPIFEPRQLPAFQEGIMSWSPKEKTYETDL

SEQ ID NO: 9737 - protein, 277 aa, Homo sapiens
  Payload ID: 1974;
  Gene Symbol: BAZ2A;
  Gene Name: bromodomain adjacent to zinc finger domain, 2A;
  ENSP ID: ENSP00000447591
  MOD_RES (1)..(1): Any amino acid
XLADDSQTSTSIFASPTSPPVLGESVLQDNSFDLNNGSDAEQEEMETQSSDFPPSLTQPAPDQSSTIQLHPATSPAVSPTTSPAVSLVVSPAASPEISPEVCPAASTVVSPAVFSVVSPASSAVLPAVSLEVPLTASVTSPKASPVTSPAAAFPTASPANKDVSSFLETTADVEEITGEGLTASGSGDVMRRRIATPEEVRLPLQHGAHVLLWQVAERGAHQEGQPPMAGGDLVLWPLWEEDEAISRSDQVPEPQRGTQCPPRALQLQSPYACWRFL

SEQ ID NO: 9738 - protein, 1903 aa, Homo sapiens
  Payload ID: 1974;
  Gene Symbol: BAZ2A;
  Gene Name: bromodomain adjacent to zinc finger domain, 2A;
  ENSP ID: ENSP00000447941
MEANDHFNFTGLPPAPAASGLKPSPSSGEGLYTNGSPMNFPQQGKSLNGDVNVNGLSTVSHTTTSGILNSAPHSSSTSHLHHPSVAYDCLWNYSQYPSANPGSNLKDPPLLSQFSGGQYPLNGILGGSRQPSSPSHNTNLRAGSQEFWANGTQSPMGLNFDSQELYDSFPDQNFEVMPNGPPSFFTSPQTSPMLGSSIQTFAPSQEVGSGIHPDEAAEKEMTSVVAENGTGLVGSLELEEEQPELKMCGYNGSVPSVESLHQEVSVLVPDPTVSCLDDPSHLPDQLEDTPILSEDSLEPFNSLAPEPVSGGLYGIDDTELMGAEDKLPLEDSPVISALDCPSLNNATAFSLLADDSQTSTSIFASPTSPPVLGESVLQDNSFDLNNGSDAEQEEMETQSSDFPPSLTQPAPDQSSTIQLHPATSPAVSPTTSPAVSLVVSPAASPEISPEVCPAASTVVSPAVFSVVSPASSAVLPAVSLEVPLTASVTSPKASPVTSPAAAFPTASPANKDVSSFLETTADVEEITGEGLTASGSGDVMRRRIATPEEVRLPLQHGWRREVRIKKGSHRWQGETWYYGPCGKRMKQFPEVIKYLSRNVVHSVRREHFSFSPRMPVGDFFEERDTPEGLQWVQLSAEEIPSRIQAITGKRGRPRNTEKAKTKEVPKVKRGRGRPPKVKITELLNKTDNRPLKKLEAQETLNEEDKAKIAKSKKKMRQKVQRGECQTTIQGQARNKRKQETKSLKQKEAKKKSKAEKEKGKTKQEKLKEKVKREKKEKVKMKEKEEVTKAKPACKADKTLATQRRLEERQRQQMILEEMKKPTEDMCLTDHQPLPDFSRVPGLTLPSGAFSDCLTIVEFLHSFGKVLGFDPAKDVPSLGVLQEGLLCQGDSLGEVQDLLVRLLKAALHDPGFPSYCQSLKILGEKVSEIPLTRDNVSEILRCFLMAYGVEPALCDRLRTQPFQAQPPQQKAAVLAFLVHELNGSTLIINEIDKTLESMSSYRKNKWIVEGRLRRLKTVLAKRTGRSEVEMEGPEECLGRRRSSRIMEETSGMEEEEEEESIAAVPGRRGRRDGEVDATASSIPELERQIEKLSKRQLFFRKKLLHSSQMLRAVSLGQDRYRRRYWVLPYLAGIFVEGTEGNLVPEEVIKKETDSLKVAAHASLNPALFSMKMELAGSNTTASSPARARGRPRKTKPGSMQPRHLKSPVRGQDSEQPQAQLQPEAQLHAPAQPQPQLQLQLQSHKGFLEQEGSPLSLGQSQHDLSQSAFLSWLSQTQSHSSLLSSSVLTPDSSPGKLDPAPSQPPEEPEPDEAESSPDPQALWFNISAQMPCNAAPTPPPAVSEDQPTPSPQQLASSKPMNRPSAANPCSPVQFSSTPLAGLAPKRRAGDPGEMPQSPTGLGQPKRRGRPPSKFFKQMEQRYLTQLTAQPVPPEMCSGWWWIRDPEMLDAMLKALHPRGIREKALHKHLNKHRDFLQEVCLRPSADPIFEPRQLPAFQEGIMSWSPKEKTYETDLAVLQWVEELEQRVIMSDLQIRGWTCPSPDSTREDLAYCEHLSDSQEDITWRGRGREGLAPQRKTTNPLDLAVMRLAALEQNVERRYLREPLWPTHEVVLEKALLSTPNGAPEGTTTEISYEITPRIRVWRQTLERCRSAAQVCLCLGQLERSIAWEKSVNKVTCLVCRKGDNDEFLLLCDGCDRGCHIYCHRPKMEAVPEGDWFCTVCLAQQVEGEFTQKPGFPKRGQKRKSGYSLNFSEGDGRRRRVLLRGRESPAAGPRYSEEGLSPSKRRRLSMRNHHSDLTFCEIILMEMESHDAAWPFLEPVNPRLVSGYRRIIKNPMDFSTMRERLLRGGYTSSEEFAADALLVFDNCQTFNEDDSEVGKAGHIMRRFFESRWEEFYQGKQANL

SEQ ID NO: 9739 - protein, 837 aa, Homo sapiens
  Payload ID: 1974;
  Gene Symbol: BAZ2A;
  Gene Name: bromodomain adjacent to zinc finger domain, 2A;
  ENSP ID: ENSP00000448760
VPGRRGRRDGEVDATASSIPELERQIEKLSKRQLFFRKKLLHSSQMLRAVSLGQDRYRRRYWVLPYLAGIFVEGTEGNLVPEEVIKKETDSLKVAAHASLNPALFSMKMELAGSNTTASSPARARGRPRKTKPGSMQPRHLKSPVRGQDSEQPQAQLQPEAQLHAPAQPQPQLQLQLQSHKGFLEQEGSPLSLGQSQHDLSQSAFLSWLSQTQSHSSLLSSSVLTPDSSPGKLDPAPSQPPEEPEPDEAESSPDPQALWFNISAQMPCNAAPTPPPAVSEDQPTPSPQQLASSKPMNRPSAANPCSPVQFSSTPLAGLAPKRRAGDPGEMPQSPTGLGQPKRRGRPPSKFFKQMEQRYLTQLTAQPVPPGWWWIRDPEMLDAMLKALHPRGIREKALHKHLNKHRDFLQEVCLRPSADPIFEPRQLPAFQEGIMSWSPKEKTYETDLAVLQWVEELEQRVIMSDLQIRGWTCPSPDSTREDLAYCEHLSDSQEDITWRGRGREGLAPQRKTTNPLDLAVMRLAALEQNVERRYLREPLWPTHEVVLEKALLSTPNGAPEGTTTEISYEITPRIRVWRQTLERCRSAAQVCLCLGQLERSIAWEKSVNKVTCLVCRKGDNDEFLLLCDGCDRGCHIYCHRPKMEAVPEGDWFCTVCLAQQVEGEFTQKPGFPKRGQKRKSGYSLNFSEGDGRRRRVLLRGRESPAAGPRYSEEGLSPSKRRRLSMRNHHSDLTFCEIILMEMESHDAAWPFLEPVNPRLVSGYRRIIKNPMDFSTMRERLLRGGYTSSEEFAADALLVFDNCQTFNEDDSEVGKAGHIMRRFFESRWEEFYQGKQANL

SEQ ID NO: 9740 - protein, 205 aa, Homo sapiens
  Payload ID: 1974;
  Gene Symbol: BAZ2A;
  Gene Name: bromodomain adjacent to zinc finger domain, 2A;
  ENSP ID: ENSP00000449473
  MOD_RES (1)..(1): Any amino acid
XWQGETWYYGPCGKRMKQFPEVIKYLSRNVVHSVRREHFSFSPRMPVGDFFEERDTPEWVQLSAEEIPSRIQAITGKRGRPRNTEKAKTKEVPKVKRGRGRPPKVKITELLNKTDNRPLKKLEAQETLNEEDKAKIAKSKKKMRQKVQRGECQTTIQGQARNKRKQETKSLKQKEAKKKSKAEKEKGKTKQEKLKEKVKREKKEK

SEQ ID NO: 9741 - protein, 131 aa, Homo sapiens
  Payload ID: 1974;
  Gene Symbol: BAZ2A;
  Gene Name: bromodomain adjacent to zinc finger domain, 2A;
  ENSP ID: ENSP00000449496
MEANDHFNFTGLPPAPAASGLKPSPSSGEGLYTNGSPMNFPQQGKSLNGDVNVNGLSTVSHTTTSGILNSAPHSSSTSHLHHPSVAYDCLWNYSQYPSANPGSNLKDPPLLSQFSGGQYPLNGILGGSRQP

SEQ ID NO: 9742 - protein, 211 aa, Homo sapiens
  Payload ID: 1975;
  Gene Symbol: BAZ2B;
  Gene Name: bromodomain adjacent to zinc finger domain, 2B;
  ENSP ID: ENSP00000294905
  MOD_RES (1)..(1): Any amino acid
XIQQIRMEKELRAQQILEAKKKKKEEAANAKLLEAEKRIKEKEMRRQQAVLLKHQELERHRLDMERERRRQHMMLMKAMEARKKAEEKERLKQEKRDEKRLNKERKLEQRRLELEMAKELKKPNEDMCLADQKPLPELPRIPGLVLSGSTFSDCLMVVQFLRNFGKVLGFDVNIDVPNLSVLQEGLLNIGDSMGEVQDLLVRLLSAAVCDP

SEQ ID NO: 9743 - protein, 643 aa, Homo sapiens
  Payload ID: 1975;
  Gene Symbol: BAZ2B;
  Gene Name: bromodomain adjacent to zinc finger domain, 2B;
  ENSP ID: ENSP00000339670
MGQTKSTSSGGGNRKCNQEQSKNQPLDARVDKIKDKKPRKKAMESSSNSDSDSGTSSDTSSEGISSSDSDDLEEDEEEEDQSIEESEDDDSDSESEAQHKSNNQVLLHGISDPKADGQKATEKAQEKRIHQPLPLASESQTHSFQSQQKQPQVLSQQLPFIFQSSQAKEESVNKHTSVIQSTGLVSNVKPLSLVNQAKKETYMKLIVPSPDVLKAGNKNTSEESSLLTSELRSKREQYKQAFPSQLKKQESSKSLKKVIAALSNPKATSSSPAHPKQTLENNHPNPFLTNALLGNHQPNGVIQSVIQEAPLALTTKTKMQSKINENIAAASSTPFSSPVNLSTSGRRTPGNQTPVMPSASPILHSQGKEKAVSNNVNPVKTQHHSHPAKSLVEQFRGTDSDIPSSKDSEDSNEDEEEDDEEEDEEDDEDDESDDSQSGTSKRRRVTDERELRIPLEYGWQRETRIRNFGGRLQGEVAYYAPCGKKLRQYPEVIKYLSRNGIMDISRDNFSFSAKIRVGDFYEARDGPQGMQWCLLKEEDVIPRIRAMEGRRGRPPNPDRQRAREESRMRRRKGRPPNVGNAEFLDNADAKLLRKLQAQEIARQAAQIKLLRKLQKQEQARVAKEAKKQQAIMLLRRSGSKKNR

SEQ ID NO: 9744 - protein, 2132 aa, Homo sapiens
  Payload ID: 1975;
  Gene Symbol: BAZ2B;
  Gene Name: bromodomain adjacent to zinc finger domain, 2B;
  Uniprot ID:  Q9UIF8;
  ENSP ID: ENSP00000376533
MESGERLPSSAASSTTPTSSSTPSVASVVSKGGLSTGVASLSSTINPCGHLFRTAGDQPFNLSTVSSAFPMVSHPVFGLHSASSGHSEFGGLGTLGTPTALAAHPQLASFPEWWRTTDAHTRTGATFFPPLLGIPPLFAPPAQNHDSSSFHSRTSGKSNRNGPEKGVNGSINGSNTSSVIGINTSVLSTTASSSMGQTKSTSSGGGNRKCNQEQSKNQPLDARVDKIKDKKPRKKAMESSSNSDSDSGTSSDTSSEGISSSDSDDLEEDEEEEDQSIEESEDDDSDSESEAQHKSNNQVLLHGISDPKADGQKATEKAQEKRIHQPLPLASESQTHSFQSQQKQPQVLSQQLPFIFQSSQAKEESVNKHTSVIQSTGLVSNVKPLSLVNQAKKETYMKLIVPSPDVLKAGNKNTSEESSLLTSELRSKREQYKQAFPSQLKKQESSKSLKKVIAALSNPKATSSSPAHPKQTLENNHPNPFLTNALLGNHQPNGVIQSVIQEAPLALTTKTKMQSKINENIAAASSTPFSSPVNLSTSGRRTPGNQTPVMPSASPILHSQGKEKAVSNNVNPVKTQHHSHPAKSLVEQFRGTDSDIPSSKDSEDSNEDEEEDDEEEDEEDDEDDESDDSQSESDSNSESDTEGSEEEDDDDKDQDESDSDTEGEKTSMKLNKTTSSVKSPSMSLTGHSTPRNLHIAKAPGSAPAALCSESQSPAFLGTSSSTLTSSPHSGTSKRRRVTDERELRIPLEYGWQRETRIRNFGGRLQGEVAYYAPCGKKLRQYPEVIKGMQWCLLKEEDVIPRIRAMEGRRGRPPNPDRQRAREESRMRRRKGRPPNVGNAEFLDNADAKLLRKLQAQEIARQAAQIKLLRKLQKQEQARVAKEAKKQQAIMAAEEKRKQKEQIKIMKQQEKIKRIQQIRMEKELRAQQILEAKKKKKEEAANAKLLEAEKRIKEKEMRRQQAVLLKHQERERRRQHMMLMKAMEARKKAEEKERLKQEKRDEKRLNKERKLEQRRLELEMAKELKKPNEDMCLADQKPLPELPRIPGLVLSGSTFSDCLMVVQFLRNFGKVLGFDVNIDVPNLSVLQEGLLNIGDSMGEVQDLLVRLLSAAVCDPGLITGYKAKTALGEHLLNVGVNRDNVSEILQIFMEAHCGQTELTESLKTKAFQAHTPAQKASVLAFLINELACSKSVVSEIDKNIDYMSNLRRDKWVVEGKLRKLRIIHAKKTGKRDTSGGIDLGEEQHPLGTPTPGRKRRRKGGDSDYDDDDDDDSDDQGDEDDEDEEDKEDKKGKKTDICEDEDEGDQAASVEELEKQIEKLSKQQSQYRRKLFDASHSLRSVMFGQDRYRRRYWILPQCGGIFVEGMESGEGLEEIAKEREKLKKAESVQIKEEMFETSGDSLNCSNTDHCEQKEDLKEKDNTNLFLQKPGSFSKLSKLLEVAKMPPESEVMTPKPNAGANGCTLSYQNSGKHSLGSVQSTATQSNVEKADSNNLFNTGSSGPGKFYSPLPNDQLLKTLTEKNRQWFSLLPRTPCDDTSLTHADMSTASLVTPQSQPPSKSPSPTPAPLGSSAQNPVGLNPFALSPLQVKGGVSMMGLQFCGWPTGVVTSNIPFTSSVPSLGSGLGLSEGNGNSFLTSNVASSKSESPVPQNEKATSAQPAAVEVAKPVDFPSPKPIPEEMQFGWWRIIDPEDLKALLKVLHLRGIREKALQKQIQKHLDYITQACLKNKDVAIIELNENEENQVTRDIVENWSVEEQAMEMDLSVLQQVEDLERRVASASLQVKGWMCPEPASEREDLVYFEHKSFTKLCKEHDGEFTGEDESSAHALERKSDNPLDIAVTRLADLERNIERRIEEDIAPGLRVWRRALSEARSAAQVALCIQQLQKSIAWEKSIMKVYCQICRKGDNEELLLLCDGCDKGCHTYCHRPKITTIPDGDWFCPACIAKASGQTLKIKKLHVKGKKTNESKKGKKVTLTGDTEDEDSASTSSSLKRGNKDLKKRKMEENTSINLSKQESFTSVKKPKRDDSKDLALCSMILTEMETHEDAWPFLLPVNLKLVPGYKKVIKKPMDFSTIREKLSSGQYPNLETFALDVRLVFDNCETFNEDDSDIGRAGHNMRKYFEKKWTDTFKVS

SEQ ID NO: 9745 - protein, 2168 aa, Homo sapiens
  Payload ID: 1975;
  Gene Symbol: BAZ2B;
  Gene Name: bromodomain adjacent to zinc finger domain, 2B;
  Uniprot ID:  Q9UIF8;
  ENSP ID: ENSP00000376534
MESGERLPSSAASSTTPTSSSTPSVASVVSKGGLSTGVASLSSTINPCGHLFRTAGDQPFNLSTVSSAFPMVSHPVFGLHSASSGHSEFGGLGTLGTPTALAAHPQLASFPGAEWWRTTDAHTRTGATFFPPLLGIPPLFAPPAQNHDSSSFHSRTSGKSNRNGPEKGVNGSINGSNTSSVIGINTSVLSTTASSSMGQTKSTSSGGGNRKCNQEQSKNQPLDARVDKIKDKKPRKKAMESSSNSDSDSGTSSDTSSEGISSSDSDDLEEDEEEEDQSIEESEDDDSDSESEAQHKSNNQVLLHGISDPKADGQKATEKAQEKRIHQPLPLASESQTHSFQSQQKQPQVLSQQLPFIFQSSQAKEESVNKHTSVIQSTGLVSNVKPLSLVNQAKKETYMKLIVPSPDVLKAGNKNTSEESSLLTSELRSKREQYKQAFPSQLKKQESSKSLKKVIAALSNPKATSSSPAHPKQTLENNHPNPFLTNALLGNHQPNGVIQSVIQEAPLALTTKTKMQSKINENIAAASSTPFSSPVNLSTSGRRTPGNQTPVMPSASPILHSQGKEKAVSNNVNPVKTQHHSHPAKSLVEQFRGTDSDIPSSKDSEDSNEDEEEDDEEEDEEDDEDDESDDSQSESDSNSESDTEGSEEEDDDDKDQDESDSDTEGEKTSMKLNKTTSSVKSPSMSLTGHSTPRNLHIAKAPGSAPAALCSESQSPAFLGTSSSTLTSSPHSGTSKRRRVTDERELRIPLEYGWQRETRIRNFGGRLQGEVAYYAPCGKKLRQYPEVIKYLSRNGIMDISRDNFSFSAKIRVGDFYEARDGPQGMQWCLLKEEDVIPRIRAMEGRRGRPPNPDRQRAREESRMRRRKGRPPNVGNAEFLDNADAKLLRKLQAQEIARQAAQIKLLRKLQKQEQARVAKEAKKQQAIMAAEEKRKQKEQIKIMKQQEKIKRIQQIRMEKELRAQQILEAKKKKKEEAANAKLLEAEKRIKEKEMRRQQAVLLKHQERERRRQHMMLMKAMEARKKAEEKERLKQEKRDEKRLNKERKLEQRRLELEMAKELKKPNEDMCLADQKPLPELPRIPGLVLSGSTFSDCLMVVQFLRNFGKVLGFDVNIDVPNLSVLQEGLLNIGDSMGEVQDLLVRLLSAAVCDPGLITGYKAKTALGEHLLNVGVNRDNVSEILQIFMEAHCGQTELTESLKTKAFQAHTPAQKASVLAFLINELACSKSVVSEIDKNIDYMSNLRRDKWVVEGKLRKLRIIHAKKTGKRDTSGGIDLGEEQHPLGTPTPGRKRRRKGGDSDYDDDDDDDSDDQGDEDDEDEEDKEDKKGKKTDICEDEDEGDQAASVEELEKQIEKLSKQQSQYRRKLFDASHSLRSVMFGQDRYRRRYWILPQCGGIFVEGMESGEGLEEIAKEREKLKKAESVQIKEEMFETSGDSLNCSNTDHCEQKEDLKEKDNTNLFLQKPGSFSKLSKLLEVAKMPPESEVMTPKPNAGANGCTLSYQNSGKHSLGSVQSTATQSNVEKADSNNLFNTGSSGPGKFYSPLPNDQLLKTLTEKNRQWFSLLPRTPCDDTSLTHADMSTASLVTPQSQPPSKSPSPTPAPLGSSAQNPVGLNPFALSPLQVKGGVSMMGLQFCGWPTGVVTSNIPFTSSVPSLGSGLGLSEGNGNSFLTSNVASSKSESPVPQNEKATSAQPAAVEVAKPVDFPSPKPIPEEMQFGWWRIIDPEDLKALLKVLHLRGIREKALQKQIQKHLDYITQACLKNKDVAIIELNENEENQVTRDIVENWSVEEQAMEMDLSVLQQVEDLERRVASASLQVKGWMCPEPASEREDLVYFEHKSFTKLCKEHDGEFTGEDESSAHALERKSDNPLDIAVTRLADLERNIERRIEEDIAPGLRVWRRALSEARSAAQVALCIQQLQKSIAWEKSIMKVYCQICRKGDNEELLLLCDGCDKGCHTYCHRPKITTIPDGDWFCPACIAKASGQTLKIKKLHVKGKKTNESKKGKKVTLTGDTEDEDSASTSSSLKRGNKDLKKRKMEENTSINLSKQESFTSVKKPKRDDSKDLALCSMILTEMETHEDAWPFLLPVNLKLVPGYKKVIKKPMDFSTIREKLSSGQYPNLETFALDVRLVFDNCETFNEDDSDIGRAGHNMRKYFEKKWTDTFKVS

SEQ ID NO: 9746 - protein, 194 aa, Homo sapiens
  Payload ID: 1975;
  Gene Symbol: BAZ2B;
  Gene Name: bromodomain adjacent to zinc finger domain, 2B;
  ENSP ID: ENSP00000393565
  MOD_RES (1)..(1): Any amino acid
XNNVNPVKTQHHSHPAKSLVEQFRGTDSDIPSSKDSEDSNEDEEEDDEEEDEEDDEDDESDDSQSGTSKRRRVTDERELRIPLEYGWQRETRIRNFGGRLQGEVAYYAPCGKKLRQYPEVIKYLSRNGIMDISRDNFSFSAKIRVGDFYEARDGPQGMQWCLLKEEDVIPRIRAMEGRRGRPPNPDRQRAREES

SEQ ID NO: 9747 - protein, 179 aa, Homo sapiens
  Payload ID: 1975;
  Gene Symbol: BAZ2B;
  Gene Name: bromodomain adjacent to zinc finger domain, 2B;
  ENSP ID: ENSP00000400505
VENWSVEEQAMEMDLSVLQQVEDLERRVASASLQVKGWMCPEPASEREDLVYFEHKSFTKLCKEHDGEFTGEDESSAHALERKSDNPLDIAVTRLADLERNIERRYLKSPLSTTIQIKLDNVGTVTVPAPAPSVSGDGDGIEEDIAPGLRVWRRALSEARSAAQVALCIQQLQKSIAWE

SEQ ID NO: 9748 - protein, 142 aa, Homo sapiens
  Payload ID: 1975;
  Gene Symbol: BAZ2B;
  Gene Name: bromodomain adjacent to zinc finger domain, 2B;
  ENSP ID: ENSP00000415613
MESGERLPSSAASSTTPTSSSTPSVASVVSKGGLSTGVASLSSTINPCGHLFRTAGDQPFNLSTVSSAFPMVSHPVFGLHSASSGHSEFGGLGTLGTPTALAAHPQLASFPGAEWWRTTDAHTRTGATFFPPLLGIPPLFAP

SEQ ID NO: 9749 - protein, 95 aa, Homo sapiens
  Payload ID: 1975;
  Gene Symbol: BAZ2B;
  Gene Name: bromodomain adjacent to zinc finger domain, 2B;
  ENSP ID: ENSP00000441341
MESGERLPSSAASSTTPTSSSTPSVASVVSKGGLSTGVASLSSTINPCGVNGSINGSNTSSVIGINTSVLSTTASSSMGQTKSTSSGGGNRKCNQ

SEQ ID NO: 9750 - protein, 1220 aa, Homo sapiens
  Payload ID: 1976;
  Gene Symbol: BRPF1;
  Gene Name: bromodomain and PHD finger containing, 1;
  Uniprot ID:  P55201;
  ENSP ID: ENSP00000373340
MGVDFDVKTFCHNLRATKPPYECPVETCRKVYKSYSGIEYHLYHYDHDNPPPPQQTPLRKHKKKGRQSRPANKQSPSPSEVSQSPGREVMSYAQAQRMVEVDLHGRVHRISIFDNLDVVSEDEEAPEEAPENGSNKENTETPAATPKSGKHKNKEKRKDSNHHHHHNVSASTTPKLPEVVYRELEQDTPDAPPRPTSYYRYIEKSAEELDEEVEYDMDEEDYIWLDIMNERRKTEGVSPIPQEIFEYLMDRLEKESYFESHNKGDPNALVDEDAVCCICNDGECQNSNVILFCDMCNLAVHQECYGVPYIPEGQWLCRRCLQSPSRAVDCALCPNKGGAFKQTDDGRWAHVVCALWIPEVCFANTVFLEPIDSIEHIPPARWKLTCYICKQRGSGACIQCHKANCYTAFHVTCAQQAGLYMKMEPVRETGANGTSFSVRKTAYCDIHTPPGSARRLPALSHSEGEEDEDEEEDEGKGWSSEKVKKAKAKSRIKMKKARKILAEKRAAAPVVSVPCIPPHRLSKITNRLTIQRKSQFMQRLHSYWTLKRQSRNGVPLLRRLQTHLQSQRNCDQVGRDSEDKNWALKEQLKSWQRLRHDLERARLLVELIRKREKLKRETIKVQQIAMEMQLTPFLILLRKTLEQLQEKDTGNIFSEPVPLSEVTELDEVPDYLDHIKKPMDFFTMKQNLEAYRYLNFDDFEEDFNLIVSNCLKYNAKDTIFYRAAVRLREQGGAVLRQARRQAEKMGIDFETGMHIPHSLAGDEATHHTEDAAEEERLVLLENQKHLPVEEQLKLLLERLDEVNASKQSVGRSRRAKMIKKEMTALRRKLAHQRETGRDGPERHGPSSRGSLTPHPAACDKDGQTDSAAEESSSQETSKGLGPNMSSTPAHEVGRRTSVLFSKKNPKTAGPPKRPGRPPKNRESQMTPSHGGSPVGPPQLPIMSSLRQRKRGRSPRPSSSSDSDSDKSTEDPPMDLPANGFSGGNQPVKKSFLVYRNDCSLPRSSSDSESSSSSSSSAASDRTSTTPSKQGRGKPSFSRGTFPEDSSEDTSGTENEAYSVGTGRGVGHSMVRKSLGRGAGWLSEDEDSPLDALDLVWAKCRGYPSYPALIIDPKMPREGMFHHGVPIPVPPLEVLKLGEQMTQEAREHLYLVLFFDNKRTWQWLPRTKLVPLGVNQDLDKEKMLEGRKSNIRKSVQIAYHRALQHRSKVQGEQSSETSDSD

SEQ ID NO: 9751 - protein, 1213 aa, Homo sapiens
  Payload ID: 1976;
  Gene Symbol: BRPF1;
  Gene Name: bromodomain and PHD finger containing, 1;
  Uniprot ID:  P55201;
  ENSP ID: ENSP00000398863
MGVDFDVKTFCHNLRATKPPYECPVETCRKVYKSYSGIEYHLYHYDHDNPPPPQQTPLRKHKKKGRQSRPANKQSPSPSEVSQSPGREVMSYAQAQRMVEVDLHGRVHRISIFDNLDVVSEDEEAPEEAPENGSNKENTETPAATPKSGKHKNKEKRKDSNHHHHHNVSASTTPKLPEVVYRELEQDTPDAPPRPTSYYRYIEKSAEELDEEVEYDMDEEDYIWLDIMNERRKTEGVSPIPQEIFEYLMDRLEKESYFESHNKGDPNALVDEDAVCCICNDGECQNSNVILFCDMCNLAVHQECYGVPYIPEGQWLCRRCLQSPSRAVDCALCPNKGGAFKQTDDGRWAHVVCALWIPEVCFANTVFLEPIDSIEHIPPARWKLTCYICKQRGSGACIQCHKANCYTAFHVTCAQQAGLYMKMEPVRETGANGTSFSVRKTAYCDIHTPPGSARRLPALSHSEGEEDEDEEEDEGKGWSSEKVKKAKAKSRIKMKKARKILAEKRAAAPVVSVPCIPPHRLSKITNRLTIQRKSQFMQRLHSYWTLKRQSRNGVPLLRRLQTHLQSQRNCDQVGRDSEDKNWALKEQLKSWQRLRHDLERARLLVELIRKREKLKRETIKVQQIAMEMQLTPFLILLRKTLEQLQEKDTGNIFSEPVPLSEVPDYLDHIKKPMDFFTMKQNLEAYRYLNFDDFEEDFNLIVSNCLKYNAKDTIFYRAAVRLREQGGAVLRQARRQAEKMGIDFETGMHIPHSLAGDEATHHTEDAEEERLVLLENQKHLPVEEQLKLLLERLDEVNASKQSVGRSRRAKMIKKEMTALRRKLAHQRETGRDGPERHGPSSRGSLTPHPAACDKDGQTDSAAEESSSQETSKGLGPNMSSTPAHEVGRRTSVLFSKKNPKTAGPPKRPGRPPKNRESQMTPSHGGSPVGPPQLPIMSSLRQRKRGRSPRPSSSSDSDSDKSTEDPPMDLPANGFSGGNQPVKKSFLVYRNDCSLPRSSSDSESSSSSSSSAASDRTSTTPSKQGRGKPSFSRGTFPEDSSEDTSGTENEAYSVGTGRGVGHSMVRKSLGRGAGWLSEDEDSPLDALDLVWAKCRGYPSYPALIIDPKMPREGMFHHGVPIPVPPLEVLKLGEQMTQEAREHLYLVLFFDNKRTWQWLPRTKLVPLGVNQDLDKEKMLEGRKSNIRKSVQIAYHRALQHRSKVQGEQSSETSDSD

SEQ ID NO: 9752 - protein, 1119 aa, Homo sapiens
  Payload ID: 1976;
  Gene Symbol: BRPF1;
  Gene Name: bromodomain and PHD finger containing, 1;
  Uniprot ID:  P55201;
  ENSP ID: ENSP00000402485
MGVDFDVKTFCHNLRATKPPYECPVETCRKVYKSYSGIEYHLYHYDHDNPPPPQQTPLRKHKKKGRQSRPANKQSPSPSEVSQSPGREVMSYAQAQRMVEVDLHGRVHRISIFDNLDVVSEDEEAPEEAPENGSNKENTETPAATPKSGKHKNKEKRKDSNHHHHHNVSASTTPKLPEVVYRELEQDTPDAPPRPTSYYRYIEKSAEELDEEVEYDMDEEDYIWLDIMNERRKTEGVSPIPQEIFEYLMDRLEKESYFESHNKGDPNALVDEDAVCCICNDGECQNSNVILFCDMCNLAVHQECYGVPYIPEGQWLCRRCLQSPSRAVDCALCPNKGGAFKQTDDGRWAHVVCALWIPEVCFANTVFLEPIDSIEHIPPARWKLTCYICKQRGSGACIQCHKANCYTAFHVTCAQQAGLYMKMEPVRETGANGTSFSVRKTAYCDIHTPPGSARRLPALSHSEGEEDEDEEEDEGKGWSSEKVKKAKAKSRIKMKKARKILAEKRAAAPVVSVPCIPPHRLSKITNRLTIQRKSQFMQRLHSYWTLKRQSRNGVPLLRRLQTHLQSQRNCDQVGRDSEDKNWALKEQLKSWQRLRHDLERARLLVELIRKREKLKRETIKVQQIAMEMQLTPFLILLRKTLEQLQEKDTGNIFSEPVPLSEVPDYLDHIKKPMDFFTMKQNLEAYRYLNFDDFEEDFNLIVSNCLKYNAKDTIFYRAAVRLREQGGAVLRQARRQAEKMGIDFETGMHIPHSLAGDEATHHTEDAAEEERLVLLENQKHLPVEEQLKLLLERLDEVNASKQSVGRSRRAKMIKKEMTALRRKLAHQRETGRDGPERHGPSSRGSLTPHPAACDKDGQTDSAAEESSSQETSKDLPANGFSGGNQPVKKSFLVYRNDCSLPRSSSDSESSSSSSSSAASDRTSTTPSKQGRGKPSFSRGTFPEDSSEDTSGTENEAYSVGTGRGVGHSMVRKSLGRGAGWLSEDEDSPLDALDLVWAKCRGYPSYPALIIDPKMPREGMFHHGVPIPVPPLEVLKLGEQMTQEAREHLYLVLFFDNKRTWQWLPRTKLVPLGVNQDLDKEKMLEGRKSNIRKSVQIAYHRALQHRSKVQGEQSSETSDSD

SEQ ID NO: 9753 - protein, 105 aa, Homo sapiens
  Payload ID: 1976;
  Gene Symbol: BRPF1;
  Gene Name: bromodomain and PHD finger containing, 1;
  ENSP ID: ENSP00000404235
MGVDFDVKTFCHNLRATKPPYECPVETCRKVYKSYSGIEYHLYHYDHDNPPPPQQTPLRKHKKKGRQSRPANKQSPSPSEVSQSPGREVMSYAQAQRMVEVDLHG

SEQ ID NO: 9754 - protein, 1214 aa, Homo sapiens
  Payload ID: 1976;
  Gene Symbol: BRPF1;
  Gene Name: bromodomain and PHD finger containing, 1;
  Uniprot ID:  P55201;
  ENSP ID: ENSP00000410210
MGVDFDVKTFCHNLRATKPPYECPVETCRKVYKSYSGIEYHLYHYDHDNPPPPQQTPLRKHKKKGRQSRPANKQSPSPSEVSQSPGREVMSYAQAQRMVEVDLHGRVHRISIFDNLDVVSEDEEAPEEAPENGSNKENTETPAATPKSGKHKNKEKRKDSNHHHHHNVSASTTPKLPEVVYRELEQDTPDAPPRPTSYYRYIEKSAEELDEEVEYDMDEEDYIWLDIMNERRKTEGVSPIPQEIFEYLMDRLEKESYFESHNKGDPNALVDEDAVCCICNDGECQNSNVILFCDMCNLAVHQECYGVPYIPEGQWLCRRCLQSPSRAVDCALCPNKGGAFKQTDDGRWAHVVCALWIPEVCFANTVFLEPIDSIEHIPPARWKLTCYICKQRGSGACIQCHKANCYTAFHVTCAQQAGLYMKMEPVRETGANGTSFSVRKTAYCDIHTPPGSARRLPALSHSEGEEDEDEEEDEGKGWSSEKVKKAKAKSRIKMKKARKILAEKRAAAPVVSVPCIPPHRLSKITNRLTIQRKSQFMQRLHSYWTLKRQSRNGVPLLRRLQTHLQSQRNCDQVGRDSEDKNWALKEQLKSWQRLRHDLERARLLVELIRKREKLKRETIKVQQIAMEMQLTPFLILLRKTLEQLQEKDTGNIFSEPVPLSEVPDYLDHIKKPMDFFTMKQNLEAYRYLNFDDFEEDFNLIVSNCLKYNAKDTIFYRAAVRLREQGGAVLRQARRQAEKMGIDFETGMHIPHSLAGDEATHHTEDAAEEERLVLLENQKHLPVEEQLKLLLERLDEVNASKQSVGRSRRAKMIKKEMTALRRKLAHQRETGRDGPERHGPSSRGSLTPHPAACDKDGQTDSAAEESSSQETSKGLGPNMSSTPAHEVGRRTSVLFSKKNPKTAGPPKRPGRPPKNRESQMTPSHGGSPVGPPQLPIMSSLRQRKRGRSPRPSSSSDSDSDKSTEDPPMDLPANGFSGGNQPVKKSFLVYRNDCSLPRSSSDSESSSSSSSSAASDRTSTTPSKQGRGKPSFSRGTFPEDSSEDTSGTENEAYSVGTGRGVGHSMVRKSLGRGAGWLSEDEDSPLDALDLVWAKCRGYPSYPALIIDPKMPREGMFHHGVPIPVPPLEVLKLGEQMTQEAREHLYLVLFFDNKRTWQWLPRTKLVPLGVNQDLDKEKMLEGRKSNIRKSVQIAYHRALQHRSKVQGEQSSETSDSD

SEQ ID NO: 9755 - protein, 100 aa, Homo sapiens
  Payload ID: 1976;
  Gene Symbol: BRPF1;
  Gene Name: bromodomain and PHD finger containing, 1;
  ENSP ID: ENSP00000416728
MGVDFDVKTFCHNLRATKPPYECPVETCRKVYKSYSGIEYHLYHYDHDNPPPPQQTPLRKHKKKGRQSRPANKQSPSPSEVSQSPGREVMSYAQAQRMVE

SEQ ID NO: 9756 - protein, 935 aa, Homo sapiens
  Payload ID: 1977;
  Gene Symbol: BRPF3;
  Gene Name: bromodomain and PHD finger containing, 3;
  Uniprot ID:  Q9ULD4;
  ENSP ID: ENSP00000345419
MRKPRRKSRQNAEGRRSPSPYSLKCSPTRETLTYAQAQRIVEVDIDGRLHRISIYDPLKIITEDELTAQDITECNSNKENSEQPQFPGKSKKPSSKGKKKESCSKHASGTSFHLPQPSFRMVDSGIQPEAPPLPAAYYRYIEKPPEDLDAEVEYDMDEEDLAWLDMVNEKRRVDGHSLVSADTFELLVDRLEKESYLESRSSGAQQSLIDEDAFCCVCLDDECHNSNVILFCDICNLAVHQECYGVPYIPEGQWLCRCCLQSPSRPVDCILCPNKGGAFKQTSDGHWAHVVCAIWIPEVCFANTVFLEPIEGIDNIPPARWKLTCYICKQKGLGAAIQCHKVNCYTAFHVTCAQRAGLFMKIEPMRETSLNGTIFTVRKTAYCEAHSPPGAATARRKGDSPRSISETGDEEGLKEGDGEEEEEEEVEEEEQEAQGGVSGSLKGVPKKSKMSLKQKIKKEPEEAGQDTPSTLPMLAVPQIPSYRLNKICSGLSFQRKNQFMQRLHNYWLLKRQARNGVPLIRRLHSHLQSQRNAEQREQDEKTSAVKEELKYWQKLRHDLERARLLIELIRKREKLKREQVKVQQAAMELELMPFNVLLRTTLDLLQEKDPAHIFAEPVNLSEVPDYLEFISKPMDFSTMRRKLESHLYRTLEEFEEDFNLIVTNCMKYNAKDTIFHRAAVRLRDLGGAILRHARRQAENIGYDPERGTHLPESPKLEDFYRFSWEDGMTNGFGKHTESGSDSECSLGLSGGLAFEACSGLTPPKRSRGKPALSRVPFLEGVNGDSDYNGSGRSLLLPFEDRGDLEPLELVWAKCRGYPSYPALIIDPKMPREGLLHNGVPIPVPPLDVLKLGEQKQAEAGEKLFLVLFFDNKRTWQWLPRDKVLPLGVEDTVDKLKMLEGRKTSIRKSVQVAYDRAMIHLSRVRGPHSFVTSSYL

SEQ ID NO: 9757 - protein, 1205 aa, Homo sapiens
  Payload ID: 1977;
  Gene Symbol: BRPF3;
  Gene Name: bromodomain and PHD finger containing, 3;
  Uniprot ID:  Q9ULD4;
  ENSP ID: ENSP00000350267
MRKPRRKSRQNAEGRRSPSPYSLKCSPTRETLTYAQAQRIVEVDIDGRLHRISIYDPLKIITEDELTAQDITECNSNKENSEQPQFPGKSKKPSSKGKKKESCSKHASGTSFHLPQPSFRMVDSGIQPEAPPLPAAYYRYIEKPPEDLDAEVEYDMDEEDLAWLDMVNEKRRVDGHSLVSADTFELLVDRLEKESYLESRSSGAQQSLIDEDAFCCVCLDDECHNSNVILFCDICNLAVHQECYGVPYIPEGQWLCRCCLQSPSRPVDCILCPNKGGAFKQTSDGHWAHVVCAIWIPEVCFANTVFLEPIEGIDNIPPARWKLTCYICKQKGLGAAIQCHKVNCYTAFHVTCAQRAGLFMKIEPMRETSLNGTIFTVRKTAYCEAHSPPGAATARRKGDSPRSISETGDEEGLKEGDGEEEEEEEVEEEEQEAQGGVSGSLKGVPKKSKMSLKQKIKKEPEEAGQDTPSTLPMLAVPQIPSYRLNKICSGLSFQRKNQFMQRLHNYWLLKRQARNGVPLIRRLHSHLQSQRNAEQREQDEKTSAVKEELKYWQKLRHDLERARLLIELIRKREKLKREQVKVQQAAMELELMPFNVLLRTTLDLLQEKDPAHIFAEPVNLSEVPDYLEFISKPMDFSTMRRKLESHLYRTLEEFEEDFNLIVTNCMKYNAKDTIFHRAAVRLRDLGGAILRHARRQAENIGYDPERGTHLPESPKLEDFYRFSWEDVDNILIPENRAHLSPEVQLKELLEKLDLVSAMRSSGARTRRVRLLRREINALRQKLAQPPPPQPPSLNKTVSNGELPAGPQGDAAVLEQALQEEPEDDGDRDDSKLPPPPTLEPTGPAPSLSEQESPPEPPTLKPINDSKPPSRFLKPRKVEEDELLEKSPLQLGNEPLQRLLSDNGINRLSLMAPDTPAGTPLSGVGRRTSVLFKKAKNGVKLQRSPDRVLENGEDHGVAGSPASPASIEEERHSRKRPRSRSCSESEGERSPQQEEETGMTNGFGKHTESGSDSECSLGLSGGLAFEACSGLTPPKRSRGKPALSRVPFLEGVNGDSDYNGSGRSLLLPFEDRGDLEPLELVWAKCRGYPSYPALIIDPKMPREGLLHNGVPIPVPPLDVLKLGEQKQAEAGEKLFLVLFFDNKRTWQWLPRDKVLPLGVEDTVDKLKMLEGRKTSIRKSVQVAYDRAMIHLSRVRGPHSFVTSSYL

SEQ ID NO: 9758 - protein, 95 aa, Homo sapiens
  Payload ID: 1977;
  Gene Symbol: BRPF3;
  Gene Name: bromodomain and PHD finger containing, 3;
  ENSP ID: ENSP00000410669
MRKPRRKSRQNAEGRRSPSPYSLKCSPTRETLTYAQAQRIVEVDIDGRLHRISIYDPLKIITEDELTAQDITECNSNKENSEQPQFPGKSKKPSS

SEQ ID NO: 9759 - protein, 599 aa, Homo sapiens
  Payload ID: 1977;
  Gene Symbol: BRPF3;
  Gene Name: bromodomain and PHD finger containing, 3;
  ENSP ID: ENSP00000411558
  MOD_RES (1)..(1): Any amino acid
XRETLTYAQAQRIVEVDIDGRLHRISIYDPLKIITEDELTAQDITECNSNKENSEQPQFPGKSKKPSSKGKKKESCSKHASGTSFHLPQPSFRMVDSGIQPEAPPLPAAYYRYIEKPPEDLDAEVEYDMDEEDLAWLDMVNEKRRVDGHSLVSADTFELLVDRLEKESYLESRSSGAQQSLIDEDAFCCVCLDDECHNSNVILFCDICNLAVHQECYGVPYIPEGQWLCRCCLQSPSRPVDCILCPNKGGAFKQTSDGHWAHVVCAIWIPEVCFANTVFLEPIEGIDNIPPARWKLTCYICKQKGLGAAIQCHKVNCYTAFHVTCAQRAGLFMKIEPMRETSLNGTIFTVRKTAYCEAHSPPGAATARRKGDSPRSISETGDEEGLKEGDGEEEEEEEVEEEEQEAQGGVSGSLKGVPKKSKMSLKQKIKKEPEEAGQDTPSTLPMLAVPQIPSYRLNKICSGLSFQRKNQFMQRLHNYWLLKRQARNGVPLIRRLHSHLQSQRNAEQREQDEKTSAVKEELKYWQKLRHDLERARLLIELIRKREKLKREQVKVQQAAMELELMPFNVLLRTTLDLLQEKDPAHIFAEPVNLSEVLYV

SEQ ID NO: 9760 - protein, 246 aa, Homo sapiens
  Payload ID: 1977;
  Gene Symbol: BRPF3;
  Gene Name: bromodomain and PHD finger containing, 3;
  ENSP ID: ENSP00000413022
  MOD_RES (1)..(1): Any amino acid
XPSLNKTVSNGELPAGPQGDAAVLEQALQEEPEDDGDRDDSKLPPPPTLEPTGPAPSLSEQESPPEPPTLKPINDSKPPSRFLKPRKVEEDELLEKSPLQLGNEPLQRLLSDNGINRLSLMAPDTPAGTPLSGVGRRTSVLFKKAKNGVKLQRSPDRVLENGEDHGVAGSPASPASIEEERHSRKRPRSRSCSESEGERSPQQEEETGMTNGFGKHTESGSDSECSLGLSGGLAFEACRQKPPAAL

SEQ ID NO: 9761 - protein, 129 aa, Homo sapiens
  Payload ID: 1977;
  Gene Symbol: BRPF3;
  Gene Name: bromodomain and PHD finger containing, 3;
  ENSP ID: ENSP00000413655
MRKPRRKSRQNAEGRRSPSPYSLKCSPTRETLTYAQAQRIVEVDIDGRLHRISIYDPLKIITEDELTAQDITECNSNKENSEQPQFPGKSKKPSSKGKKKESCSKHASGTSFHLPQPSFRMVDSGIQPE

SEQ ID NO: 9762 - protein, 821 aa, Homo sapiens
  Payload ID: 1977;
  Gene Symbol: BRPF3;
  Gene Name: bromodomain and PHD finger containing, 3;
  ENSP ID: ENSP00000416842
MRKPRRKSRQNAEGRRSPSPYSLKCSPTRETLTYAQAQRIVEVDIDGRLHRISIYDPLKIITEDELTAQDITECNSNKENSEQPQFPGKSKKPSSKGKKKESCSKHASGTSFHLPQPSFRMVDSGIQPEAPPLPAAYYRYIEKPPEDLDAEVEYDMDEEDLAWLDMVNEKRRVDGHSLVSADTFELLVDRLEKESYLESRSSGAQQSLIDEDAFCCVCLDDECHNSNVILFCDICNLAVHQECYGVPYIPEGQWLCRCCLQSPSRPVDCILCPNKGGAFKQTSDGHWAHVVCAIWIPEVCFANTVFLEPIEGIDNIPPARWKLTCYICKQKGLGAAIQCHKVNCYTAFHVTCAQRAGLFMKIEPMRETSLNGTIFTVRKTAYCEAHSPPGAATARRKGDSPRSISETGDEEGLKEGDGEEEEEEEVEEEEQEAQGGVSGSLKGVPKKSKMSLKQKIKKEPEEAGQDTPSTLPMLAVPQIPSYRLNKICSGLSFQRKNQFMQRLHNYWLLKRQARNGVPLIRRLHSHLQSQRNAEQREQDEKTSAVKEELKYWQKLRHDLERARLLIELIRKREKLKREQVKVQQAAMELELMPFNVLLRTTLDLLQEKDPAHIFAEPVNLSEVPDYLEFISKPMDFSTMRRKLESHLYRTLEEFEEDFNLIVTNCMKYNAKDTIFHRAAVRLRDLGGAILRHARRQAENIGYDPERGTHLPESPKLEDFYRFSWEDGMTNGFGKHTESGSDSECSLGLSGGLAFEACSGLTPPKRSRGKPALSRVPFLEGVNGDSDYNGSEASCCPLKTAETWSPWSWCGPSAEATPPTLP

SEQ ID NO: 9763 - protein, 93 aa, Homo sapiens
  Payload ID: 1977;
  Gene Symbol: BRPF3;
  Gene Name: bromodomain and PHD finger containing, 3;
  ENSP ID: ENSP00000431894
MNQVWIGCTGCNLGCPLTLSFTSVCLYSRLNKICSGLSFQRKNQFMQRLHNYWLLKRQARNGVPLIRRLHSHLQSQRNAEQREQDEKTSAVKE

SEQ ID NO: 9764 - protein, 871 aa, Homo sapiens
  Payload ID: 1977;
  Gene Symbol: BRPF3;
  Gene Name: bromodomain and PHD finger containing, 3;
  Uniprot ID:  Q9ULD4;
  ENSP ID: ENSP00000434501
MRKPRRKSRQNAEGRRSPSPYSLKCSPTRETLTYAQAQRIVEVDIDGRLHRISIYDPLKIITEDELTAQDITECNSNKENSEQPQFPGKSKKPSSKGKKKESCSKHASGTSFHLPQPSFRMVDSGIQPEAPPLPAAYYRYIEKPPEDLDAEVEYDMDEEDLAWLDMVNEKRRVDGHSLVSADTFELLVDRLEKESYLESRSSGAQQSLIDEDAFCCVCLDDECHNSNVILFCDICNLAVHQECYGVPYIPEGQWLCRCCLQSPSRPVDCILCPNKGGAFKQTSDGHWAHVVCAIWIPEVCFANTVFLEPIEGIDNIPPARWKLTCYICKQKGLGAAIQCHKVNCYTAFHVTCAQRAGLFMKIEPMRETSLNGTIFTVRKTAYCEAHSPPGAATARRKGDSPRSISETGDEEGLKEGDGEEEEEEEVEEEEQEAQGGVSGSLKGVPKKSKMSLKQKIKKEPEEAGQDTPSTLPMLAVPQIPSYRLNKICSGLSFQRKNQFMQRLHNYWLLKRQARNGVPLIRRLHSHLQSQRNAEQREQDEKTSAVKEELKYWQKLRHDLERARLLIELIRKREKLKREQVKVQQAAMELELMPFNVLLRTTLDLLQEKDPAHIFAEPVNLSEVPDYLEFISKPMDFSTMRRKLESHLYRTLEEFEEDFNLIVTNCMKYNAKDTIFHRAAVRLRDLGGAILRHARRQAENIGYDPERGTHLPESPKLEDFYRFSWEDGRSLLLPFEDRGDLEPLELVWAKCRGYPSYPALIIDPKMPREGLLHNGVPIPVPPLDVLKLGEQKQAEAGEKLFLVLFFDNKRTWQWLPRDKVLPLGVEDTVDKLKMLEGRKTSIRKSVQVAYDRAMIHLSRVRGPHSFVTSSYL

SEQ ID NO: 9765 - protein, 1106 aa, Homo sapiens
  Payload ID: 1977;
  Gene Symbol: BRPF3;
  Gene Name: bromodomain and PHD finger containing, 3;
  ENSP ID: ENSP00000436504
MRKPRRKSRQNAEGRRSPSPYSLKCSPTRETLTYAQAQRIVEVDIDGRLHRISIYDPLKIITEDELTAQDITECNSNKENSEQPQFPGKSKKPSSKGKKKESCSKHASGTSFHLPQPSFRMVDSGIQPEAPPLPAAYYRYIEKPPEDLDAEVEYDMDEEDLAWLDMVNEKRRVDGHSLVSADTFELLVDRLEKESYLESRSSGAQQSLIDEDAFCCVCLDDECHNSNVILFCDICNLAVHQECYGVPYIPEGQWLCRCCLQSPSRPVDCILCPNKGGAFKQTSDGHWAHVVCAIWIPEVCFANTVFLEPIEGIDNIPPARWKLTCYICKQKGLGAAIQCHKVNCYTAFHVTCAQRAGLFMKIEPMRETSLNGTIFTVRKTAYCEAHSPPGAATARRKGDSPRSISETGDEEGLKEGDGEEEEEEEVEEEEQEAQGGVSGSLKGVPKKSKMSLKQKIKKEPEEAGQDTPSTLPMLAVPQIPSYRLNKICSGLSFQRKNQFMQRLHNYWLLKRQARNGVPLIRRLHSHLQSQRNAEQREQDEKTSAVKEELKYWQKLRHDLERARLLIELIRKREKLKREQVKVQQAAMELELMPFNVLLRTTLDLLQEKDPAHIFAEPVNLSEVPDYLEFISKPMDFSTMRRKLESHLYRTLEEFEEDFNLIVTNCMKYNAKDTIFHRAAVRLRDLGGAILRHARRQAENIGYDPERGTHLPESPKLEDFYRFSWEDVDNILIPENRAHLSPEVQLKELLEKLDLVSAMRSSGARTRRVRLLRREINALRQKLAQPPPPQPPSLNKTVSNGELPAGPQGDAAVLEQALQEEPEDDGDRDDSKLPPPPTLEPTGPAPSLSEQESPPEPPTLKPINDSKPPSRFLKPRKVEEDELLEKSPLQLGNEPLQRLLSDNGINRLSLMAPDTPAGTPLSGVGRRTSVLFKKAKNGVKLQRSPDRVLENGEDHGVAGSPASPASIEEERHSRKRPRSRSCSESEGERSPQQEEETGMTNGFGKHTESGSDSECSLGLSGGLAFEACSGLTPPKRSRGKPALSRVPFLEGVNGDSDYNGSDHRSQDAPGGPPAQWRSHPCPPAGRAEAGRAETGRGWREALPCPLL

SEQ ID NO: 9766 - protein, 626 aa, Homo sapiens
  Payload ID: 1977;
  Gene Symbol: BRPF3;
  Gene Name: bromodomain and PHD finger containing, 3;
  ENSP ID: ENSP00000437087
MRKPRRKSRQNAEGRRSPSPYSLKCSPTRETLTYAQAQRIVEVDIDGRLHRISIYDPLKIITEDELTAQDITECNSNKENSEQPQFPGKSKKPSSKGKKKESCSKHASGTSFHLPQPSFRMVDSGIQPEAPPLPAAYYRYIEKPPEDLDAEVEYDMDEEDLAWLDMVNEKRRVDGHSLVSADTFELLVDRLEKESYLESRSSGAQQSLIDEDAFCCVCLDDECHNSNVILFCDICNLAVHQECYGVPYIPEGQWLCRCCLQSPSRPVDCILCPNKGGAFKQTSDGHWAHVVCAIWIPEVCFANTVFLEPIEGIDNIPPARWKLTCYICKQKGLGAAIQCHKVNCYTAFHVTCAQRAGLFMKIEPMRETSLNGTIFTVRKTAYCEAHSPPGAATARRKGDSPRSISETGDEEGLKEGDGEEEEEEEVEEEEQEAQGGVSGSLKGVPKKSKMSLKQKIKKEPEEAGQDTPSTLPMLAVPQIPSYRLNKICSGLSFQRKNQFMQRLHNYWLLKRQARNGVPLIRRLHSHLQSQRNAEQREQDEKTSAVKEELKYWQKLRHDLERARLLIELIRKREKLKREQVKVQQAAMELELMPFNVLLRTTLDLLQEKDPAHIFAEPVNLSEVLYV

SEQ ID NO: 9767 - protein, 2320 aa, Homo sapiens
  Payload ID: 1978;
  Gene Symbol: BRWD1;
  Gene Name: bromodomain and WD repeat domain containing 1;
  Uniprot ID:  Q9NSI6;
  ENSP ID: ENSP00000330753
MAEPSSARRPVPLIESELYFLIARYLSAGPCRRAAQVLVQELEQYQLLPKRLDWEGNEHNRSYEELVLSNKHVAPDHLLQICQRIGPMLDKEIPPSISRVTSLLGAGRQSLLRTAKDCRHTVWKGSAFAALHRGRPPEMPVNYGSPPNLVEIHRGKQLTGCSTFSTAFPGTMYQHIKMHRRILGHLSAVYCVAFDRTGHRIFTGSDDCLVKIWSTHNGRLLSTLRGHSAEISDMAVNYENTMIAAGSCDKIIRVWCLRTCAPVAVLQGHTGSITSLQFSPMAKGSQRYMVSTGADGTVCFWQWDLESLKFSPRPLKFTEKPRPGVQMLCSSFSVGGMFLATGSTDHVIRMYFLGFEAPEKIAELESHTDKVDSIQFCNNGDRFLSGSRDGTARIWRFEQLEWRSILLDMATRISGDLSSEEERFMKPKVTMIAWNQNDSIVVTAVNDHVLKVWNSYTGQLLHNLMGHADEVFVLETHPFDSRIMLSAGHDGSIFIWDITKGTKMKHYFNMIEGQGHGAVFDCKFSQDGQHFACTDSHGHLLIFGFGCSKPYEKIPDQMFFHTDYRPLIRDSNNYVLDEQTQQAPHLMPPPFLVDVDGNPHPTKYQRLVPGRENSADEHLIPQLGYVATSDGEVIEQIISLQTNDNDERSPESSILDGMIRQLQQQQDQRMGADQDTIPRGLSNGEETPRRGFRRLSLDIQSPPNIGLRRSGQVEGVRQMHQNAPRSQIATERDLQAWKRRVVVPEVPLGIFRKLEDFRLEKGEEERNLYIIGRKRKTLQLSHKSDSVVLVSQSRQRTCRRKYPNYGRRNRSWRELSSGNESSSSVRHETSCDQSEGSGSSEEDEWRSDRKSESYSESSSDSSSRYSDWTADAGINLQPPLRTSCRRRITRFCSSSEDEISTENLSPPKRRRKRKKENKPKKENLRRMTPAELANMEHLYEFHPPVWITDTTLRKSPFVPQMGDEVIYFRQGHEAYIEAVRRNNIYELNPNKEPWRKMDLRDQELVKIVGIRYEVGPPTLCCLKLAFIDPATGKLMDKSFSIRYHDMPDVIDFLVLRQFYDEARQRNWQSCDRFRSIIDDAWWFGTVLSQEPYQPQYPDSHFQCYIVRWDNTEIEKLSPWDMEPIPDNVDPPEELGASISVTTDELEKLLYKPQAGEWGQKSRDEECDRIISGIDQLLNLDIAAAFAGPVDLCTYPKYCTVVAYPTDLYTIRMRLVNRFYRRLSALVWEVRYIEHNARTFNEPESVIARSAKKITDQLLKFIKNQHCTNISELSNTSENDEQNAEDLDDSDLPKTSSGRRRVHDGKKSIRATNYVESNWKKQCKELVNLIFQCEDSEPFRQPVDLVEYPDYRDIIDTPMDFGTVRETLDAGNYDSPLEFCKDIRLIFSNAKAYTPNKRSKIYSMTLRLSALFEEKMKKISSDFKIGQKFNEKLRRSQRFKQRQNCKGDSQPNKSIRNLKPKRLKSQTKIIPELVGSPTQSTSSRTAYLGTHKTSAGISSGVTSGDSSDSAESSERRKRNRPITNGSTLSESEVEDSLATSLSSSASSSSEESKESSRARESSSRSGLSRSSNLRVTRTRAAQRKTGPVSLANGCGRKATRKRVYLSDSDNNSLETGEILKARAGNNRKVLRKCAAVAANKIKLMSDVEENSSSESVCSGRKLPHRNASAVARKKLLHNSEDEQSLKSEIEEEELKDENQLLPVSSSHTAQSNVDESENRDSESESDLRVARKNWHANGYKSHTPAPSKTKFLKIESSEEDSKSHDSDHACNRTAGPSTSVQKLKAESISEEADSEPGRSGGRKYNTFHKNASFFKKTKILSDSEDSESEEQDREDGKCHKMEMNPISGNLNCDPIAMSQCSSDHGCETDLDSDDDKIEKPNNFMKDSASQDNGLSRKISRKRVCSSDSDSSLQVVKKSSKARTGLLRITRRCAATAANKIKLMSDVEDVSLENVHTRSKNGRKKPLHLACTTAKKKLSDCEGSVHCEVPSEQYACEGKPPDPDSEGSTKVLSQALNGDSDSEDMLNSEHKHRHTNIHKIDAPSKRKSSSVTSSGEDSKSHIPGSETDRTFSSESTLAQKATAENNFEVELNYGLRRWNGRRLRTYGKAPFSKTKVIHDSQETAEKEVKRKRSHPELENVKISETTGNSKFRPDTSSKSSDLGSVTESDIDCTDNTKTKRRKTKGKAKVVRKEFVPRDREPNTKVRTCMHNQKDAVQMPSETLKAKMVPEKVPRRCATVAANKIKIMSNLKETISGPENVWIRKSSRKLPHRNASAAAKKKLLNVYKEDDTTINSESEKELEDINRKMLFLRGFRSWKENAQ

SEQ ID NO: 9768 - protein, 120 aa, Homo sapiens
  Payload ID: 1978;
  Gene Symbol: BRWD1;
  Gene Name: bromodomain and WD repeat domain containing 1;
  Uniprot ID:  Q9NSI6;
  ENSP ID: ENSP00000342106
MAEPSSARRPVPLIESELYFLIARYLSAGPCRRAAQVLVQELEQYQLLPKRLDWEGNEHNRSYEELVLSNKHVAPDHLLQICQRIGPMLDKEIPPSISRVTSLLGAGRQSLLRTAKGTLI

SEQ ID NO: 9769 - protein, 2269 aa, Homo sapiens
  Payload ID: 1978;
  Gene Symbol: BRWD1;
  Gene Name: bromodomain and WD repeat domain containing 1;
  Uniprot ID:  Q9NSI6;
  ENSP ID: ENSP00000344333
MAEPSSARRPVPLIESELYFLIARYLSAGPCRRAAQVLVQELEQYQLLPKRLDWEGNEHNRSYEELVLSNKHVAPDHLLQICQRIGPMLDKEIPPSISRVTSLLGAGRQSLLRTAKDCRHTVWKGSAFAALHRGRPPEMPVNYGSPPNLVEIHRGKQLTGCSTFSTAFPGTMYQHIKMHRRILGHLSAVYCVAFDRTGHRIFTGSDDCLVKIWSTHNGRLLSTLRGHSAEISDMAVNYENTMIAAGSCDKIIRVWCLRTCAPVAVLQGHTGSITSLQFSPMAKGSQRYMVSTGADGTVCFWQWDLESLKFSPRPLKFTEKPRPGVQMLCSSFSVGGMFLATGSTDHVIRMYFLGFEAPEKIAELESHTDKVDSIQFCNNGDRFLSGSRDGTARIWRFEQLEWRSILLDMATRISGDLSSEEERFMKPKVTMIAWNQNDSIVVTAVNDHVLKVWNSYTGQLLHNLMGHADEVFVLETHPFDSRIMLSAGHDGSIFIWDITKGTKMKHYFNMIEGQGHGAVFDCKFSQDGQHFACTDSHGHLLIFGFGCSKPYEKIPDQMFFHTDYRPLIRDSNNYVLDEQTQQAPHLMPPPFLVDVDGNPHPTKYQRLVPGRENSADEHLIPQLGYVATSDGEVIEQIISLQTNDNDERSPESSILDGMIRQLQQQQDQRMGADQDTIPRGLSNGEETPRRGFRRLSLDIQSPPNIGLRRSGQVEGVRQMHQNAPRSQIATERDLQAWKRRVVVPEVPLGIFRKLEDFRLEKGEEERNLYIIGRKRKTLQLSHKSDSVVLVSQSRQRTCRRKYPNYGRRNRSWRELSSGNESSSSVRHETSCDQSEGSGSSEEDEWRSDRKSESYSESSSDSSSRYSDWTADAGINLQPPLRTSCRRRITRFCSSSEDEISTENLSPPKRRRKRKKENKPKKENLRRMTPAELANMEHLYEFHPPVWITDTTLRKSPFVPQMGDEVIYFRQGHEAYIEAVRRNNIYELNPNKEPWRKMDLRDQELVKIVGIRYEVGPPTLCCLKLAFIDPATGKLMDKSFSIRYHDMPDVIDFLVLRQFYDEARQRNWQSCDRFRSIIDDAWWFGTVLSQEPYQPQYPDSHFQCYIVRWDNTEIEKLSPWDMEPIPDNVDPPEELGASISVTTDELEKLLYKPQAGEWGQKSRDEECDRIISGIDQLLNLDIAAAFAGPVDLCTYPKYCTVVAYPTDLYTIRMRLVNRFYRRLSALVWEVRYIEHNARTFNEPESVIARSAKKITDQLLKFIKNQHCTNISELSNTSENDEQNAEDLDDSDLPKTSSGRRRVHDGKKSIRATNYVESNWKKQCKELVNLIFQCEDSEPFRQPVDLVEYPDYRDIIDTPMDFGTVRETLDAGNYDSPLEFCKDIRLIFSNAKAYTPNKRSKIYSMTLRLSALFEEKMKKISSDFKIGQKFNEKLRRSQRFKQRQNCKGDSQPNKSIRNLKPKRLKSQTKIIPELVGSPTQSTSSRTAYLGTHKTSAGISSGVTSGDSSDSAESSERRKRNRPITNGSTLSESEVEDSLATSLSSSASSSSEESKESSRARESSSRSGLSRSSNLRVTRTRAAQRKTGPVSLANGCGRKATRKRVYLSDSDNNSLETGEILKARAGNNRKVLRKCAAVAANKIKLMSDVEENSSSESVCSGRKLPHRNASAVARKKLLHNSEDEQSLKSEIEEEELKDENQLLPVSSSHTAQSNVDESENRDSESESDLRVARKNWHANGYKSHTPAPSKTKFLKIESSEEDSKSHDSDHACNRTAGPSTSVQKLKAESISEEADSEPGRSGGRKYNTFHKNASFFKKTKILSDSEDSESEEQDREDGKCHKMEMNPISGNLNCDPIAMSQCSSDHGCETDLDSDDDKIEKPNNFMKDSASQDNGLSRKISRKRVCSSDSDSSLQVVKKSSKARTGLLRITRRCAATAANKIKLMSDVEDVSLENVHTRSKNGRKKPLHLACTTAKKKLSDCEGSVHCEVPSEQYACEGKPPDPDSEGSTKVLSQALNGDSDSEDMLNSEHKHRHTNIHKIDAPSKRKSSSVTSSGEDSKSHIPGSETDRTFSSESTLAQKATAENNFEVELNYGLRRWNGRRLRTYGKAPFSKTKVIHDSQETAEKEVKRKRSHPELENVKISETTGNSKFRPDTSSKSSDLGSVTESDIDCTDNTKTKRRKTKGKAKVVRKGKTFTANISKTVRRQRQSKRPRLSVDDNDWEDLDYAKSKRVLRRSKIKTRNQGRRTVRYHDGDDDRSLENVLDFNGCTL

SEQ ID NO: 9770 - protein, 2199 aa, Homo sapiens
  Payload ID: 1978;
  Gene Symbol: BRWD1;
  Gene Name: bromodomain and WD repeat domain containing 1;
  Uniprot ID:  Q9NSI6;
  ENSP ID: ENSP00000370178
MAEPSSARRPVPLIESELYFLIARYLSAGPCRRAAQVLVQELEQYQLLPKRLDWEGNEHNRSYEELVLSNKHVAPDHLLQICQRIGPMLDKEIPPSISRVTSLLGAGRQSLLRTAKDCRHTVWKGSAFAALHRGRPPEMPVNYGSPPNLVEIHRGKQLTGCSTFSTAFPGTMYQHIKMHRRILGHLSAVYCVAFDRTGHRIFTGSDDCLVKIWSTHNGRLLSTLRGHSAEISDMAVNYENTMIAAGSCDKIIRVWCLRTCAPVAVLQGHTGSITSLQFSPMAKGSQRYMVSTGADGTVCFWQWDLESLKFSPRPLKFTEKPRPGVQMLCSSFSVGGMFLATGSTDHVIRMYFLGFEAPEKIAELESHTDKVDSIQFCNNGDRFLSGSRDGTARIWRFEQLEWRSILLDMATRISGDLSSEEERFMKPKVTMIAWNQNDSIVVTAVNDHVLKVWNSYTGQLLHNLMGHADEVFVLETHPFDSRIMLSAGHDGSIFIWDITKGTKMKHYFNMIEGQGHGAVFDCKFSQDGQHFACTDSHGHLLIFGFGCSKPYEKIPDQMFFHTDYRPLIRDSNNYVLDEQTQQAPHLMPPPFLVDVDGNPHPTKYQRLVPGRENSADEHLIPQLGYVATSDGEVIEQIISLQTNDNDERSPESSILDGMIRQLQQQQDQRMGADQDTIPRGLSNGEETPRRGFRRLSLDIQSPPNIGLRRSGQVEGVRQMHQNAPRSQIATERDLQAWKRRVVVPEVPLGIFRKLEDFRLEKGEEERNLYIIGRKRKTLQLSHKSDSVVLVSQSRQRTCRRKYPNYGRRNRSWRELSSGNESSSSVRHETSCDQSEGSGSSEEDEWRSDRKSESYSESSSDSSSRYSDWTADAGINLQPPLRTSCRRRITRFCSSSEDEISTENLSPPKRRRKRKKENKPKKENLRRMTPAELANMEHLYEFHPPVWITDTTLRKSPFVPQMGDEVIYFRQGHEAYIEAVRRNNIYELNPNKEPWRKMDLRDQELVKIVGIRYEVGPPTLCCLKLAFIDPATGKLMDKSFSIRYHDMPDVIDFLVLRQFYDEARQRNWQSCDRFRSIIDDAWWFGTVLSQEPYQPQYPDSHFQCYIVRWDNTEIEKLSPWDMEPIPDNVDPPEELGASISVTTDELEKLLYKPQAGEWGQKSRDEECDRIISGIDQLLNLDIAAAFAGPVDLCTYPKYCTVVAYPTDLYTIRMRLVNRFYRRLSALVWEVRYIEHNARTFNEPESVIARSAKKITDQLLKFIKNQHCTNISELSNTSENDEQNAEDLDDSDLPKTSSGRRRVHDGKKSIRATNYVESNWKKQCKELVNLIFQCEDSEPFRQPVDLVEYPDYRDIIDTPMDFGTVRETLDAGNYDSPLEFCKDIRLIFSNAKAYTPNKRSKIYSMTLRLSALFEEKMKKISSDFKIGQKFNEKLRRSQRFKQRQNCKGDSQPNKSIRNLKPKRLKSQTKIIPELVGSPTQSTSSRTAYLGTHKTSAGISSGVTSGDSSDSAESSERRKRNRPITNGSTLSESEVEDSLATSLSSSASSSSEESKESSRARESSSRSGLSRSSNLRVTRTRAAQRKTGPVSLANGCGRKATRKRVYLSDSDNNSLETGEILKARAGNNRKVLRKCAAVAANKIKLMSDVEENSSSESVCSGRKLPHRNASAVARKKLLHNSEDEQSLKSEIEEEELKDENQLLPVSSSHTAQSNVDESENRDSESESDLRVARKNWHANGYKSHTPAPSKTKFLKIESSEEDSKSHDSDHACNRTAGPSTSVQKLKAESISEEADSEPGRSGGRKYNTFHKNASFFKKTKILSDSEDSESEEQDREDGKCHKMEMNPISGNLNCDPIAMSQCSSDHGCETDLDSDDDKIEKPNNFMKDSASQDNGLSRKISRKRVCSSDSDSSLQVVKKSSKARTGLLRITRRCAATAANKIKLMSDVEDVSLENVHTRSKNGRKKPLHLACTTAKKKLSDCEGSVHCEVPSEQYACEGKPPDPDSEGSTKVLSQALNGDSDSEDMLNSEHKHRHTNIHKIDAPSKRKSSSVTSSGEDSKSHIPGSETDRTFSSESTLAQKATAENNFEVELNYGLRRWNGRRLRTYGKAPFSKTKVIHDSQETAEKEVKRKRSHPELENVKISETTGNSKFRPDTSSKSSDLGSVTESDIDCTDNTKTKRRKTKGKAKVVRKDKTFSPVYL

SEQ ID NO: 9771 - protein, 548 aa, Homo sapiens
  Payload ID: 1978;
  Gene Symbol: BRWD1;
  Gene Name: bromodomain and WD repeat domain containing 1;
  ENSP ID: ENSP00000389882
  MOD_RES (1)..(1): Any amino acid
XVSTGADGTVCFWQWDLESLKFSPRPLKFTEKPRPGVQMLCSSFSVGGMFLATGSTDHVIRMYFLGFEAPEKIAELESHTDKVDSIQFCNNGDRFLSGSRDGTARIWRFEQLEWRSILLDMATRISGDLSSEEERFMKPKVTMIAWNQNDSIVVTAVNDHVLKVWNSYTGQLLHNLMGHADEVFVLETHPFDSRIMLSAGHDGSIFIWDITKGTKMKHYFNMIEGQGHGAVFDCKFSQDGQHFACTDSHGHLLIFGFGCSKPYEKIPDQMFFHTDYRPLIRDSNNYVLDEQTQQAPHLMPPPFLVDVDGNPHPTKYQRLVPGRENSADEHLIPQLGYVATSDGEVIEQIISLQTNDNDERSPESSILDGMIRQLQQQQDQRMGADQDTIPRGLSNGEETPRRGFRRLSLDIQSPPNIGLRRSGQVEGVRQMHQNAPRSQIATERDLQAWKRRVVVPEVPLGIFRKLEDFRLEKGEEERNLYIIGRKRKTLQLSHKETSCDQSEGSGSSEEDEWRSDRKSESYSESSSDSSSRYSDWTADAGINLQPPL

SEQ ID NO: 9772 - protein, 235 aa, Homo sapiens
  Payload ID: 1978;
  Gene Symbol: BRWD1;
  Gene Name: bromodomain and WD repeat domain containing 1;
  ENSP ID: ENSP00000390684
  MOD_RES (1)..(1): Any amino acid
XVSTGADGTVCFWQWDLESLKFSPRPLKFTEKPRPGVQMLCSSFSVGGMFLATGSTDHVIRMYFLGFEAPEKIAELESHTDKVDSIQFCNNGDRFLSGSRDGTARIWRFEQLEWRSILLDMATRISGDLSSEEERFMKPKVTMIAWNQNDSIVVTAVNDHVLKVWNSYTGQLLHNLMGHADEVFVLETHPFDSRIMLSAGHDGSIFIWDITKGTKMKHYFNMIEGQGHGAVFDYS

SEQ ID NO: 9773 - protein, 640 aa, Homo sapiens
  Payload ID: 1978;
  Gene Symbol: BRWD1;
  Gene Name: bromodomain and WD repeat domain containing 1;
  ENSP ID: ENSP00000391014
HGHLLIFGFGCSKPYEKIPDQMFFHTDYRPLIRDSNNYVLDEQTQQAPHLMPPPFLVDVDGNPHPTKYQRLVPGRENSADEHLIPQLGYVATSDGEVIEQIISLQTNDNDERSPESSILDGMIRQLQQQQDQRMGADQDTIPRGLSNGEETPRRGFRRLSLDIQSPPNIGLRRSGQVEGVRQMHQNAPRSQIATERDLQAWKRRVVVPEVPLGIFRKLEDFRLEKGEEERNLYIIGRKRKTLQLSHKSDSVVLVSQSRQRTCRRKYPNYGRRNRSWRELSSGNESSSSVRHETSCDQSEGSGSSEEDEWRSDRKSESYSESSSDSSSRYSDWTADAGINLQPPLRTSCRRRITRFCSSSEDEISTENLSPPKRRRKRKKENKPKKENLRRMTPAELANMEHLYEFHPPVWITDTTLRKSPFVPQMGDEVIYFRQGHEAYIEAVRRNNIYELNPNKEPWRKMDLRDQELVKIVGIRYEVGPPTLCCLKLAFIDPATGKLMDKSFSIRYHDMPDVIDFLVLRQFYDEARQRNWQSCDRFRSIIDDAWWFGTVLSQEPYQPQYPDSHFQCYIVRWDNTEIEKLSPWDMEPIPDNVDPPEELGASISVTTDELEKLLYKPQAGEWGQKSRDEECDRIISGGCLR

SEQ ID NO: 9774 - protein, 266 aa, Homo sapiens
  Payload ID: 1978;
  Gene Symbol: BRWD1;
  Gene Name: bromodomain and WD repeat domain containing 1;
  ENSP ID: ENSP00000393702
  MOD_RES (1)..(1): Any amino acid
XVSTGADGTVCFWQWDLESLKFSPRPLKFTEKPRPGVQMLCSSFSVGGMFLATGSTDHVIRMYFLGFEAPEKIAELESHTDKVDSIQFCNNGDRFLSGSRDGTARIWRFEQLEWRSILLDMATRISGDLSSEEERFMKPKVTMIAWNQNDSIVVTAVNDHVLKVWNSYTGQLLHNLMGHADEVFVLETHPFDSRIMLSAGHDGSIFIWDITKGTKMKHYFNMIEGQGHGAVFDCKFSQDGQHFACTDSHGHLLIFGFGCSKPYEKM

SEQ ID NO: 9775 - protein, 409 aa, Homo sapiens
  Payload ID: 1978;
  Gene Symbol: BRWD1;
  Gene Name: bromodomain and WD repeat domain containing 1;
  ENSP ID: ENSP00000395575
  MOD_RES (1)..(1): Any amino acid
XVSTGADGTVCFWQWDLESLKFSPRPLKFTEKPRPGVQMLCSSFSVGGMFLATGSTDHVIRMYFLGFEAPEKIAELESHTDKVDSIQFCNNGDRFLSGSRDGTARIWRFEQLEWRSILLDMATRISGDLSSEEERFMKPKVTMIAWNQNDSIVVTAVNDHVLKVWNSYTGQLLHNLMGHADEVFVLETHPFDSRIMLSAGHDGSIFIWDITKGTKMKHYFNMIEGQGHGAVFDCKFSQDGQHFACTDSHGHLLIFGFGCSKPYEKIPDQMFFHTDYRPLIRDSNNYVLDEQTQQAPHLMPPPFLVDVDGNPHPTKYQRLVPGRENSADEHLIPQLGYVATSDGEVIEQIISLQTNDNDERSPESSILDGMIRQLQQQQDQRMGADQDTIPRGLSNGEETPRRGSWKTSD

SEQ ID NO: 9776 - protein, 467 aa, Homo sapiens
  Payload ID: 1978;
  Gene Symbol: BRWD1;
  Gene Name: bromodomain and WD repeat domain containing 1;
  ENSP ID: ENSP00000398900
  MOD_RES (1)..(1): Any amino acid
XVSTGADGTVCFWQWDLESLKFSPRPLKFTEKPRPGVQMLCSSFSVGGMFLATGSTDHVIRMYFLGFEAPEKIAELESHTDKVDSIQFCNNGDRFLSGSRDGTARIWRFEQLEWRSILLDMATRISGDLSSEEERFMKPKVTMIAWNQNDSIVVTAVNDHVLKVWNSYTGQLLHNLMGHADEVFVLETHPFDSRIMLSAGHDGSIFIWDITKGTKMKHYFNMIEGQGHGAVFDCKFSQDGQHFACTDSHGHLLIFGFGCSKPYEKIPDQMFFHTDYRPLIRDSNNYVLDEQTQQAPHLMPPPFLVDVDGNPHPTKYQRLVPGRENSADEHLIPQLGYVATSDGEVIEQIISLQTNDNDERSPESSILDGMIRQLQQQQDQRMGADQDTIPRGLSNGEETPRRGFRRLSLDIQSPPNIGLRRSGQVEGVRQMHQNAPRSQIATERDLQAWKRRVVVPEEAGRLPIRER

SEQ ID NO: 9777 - protein, 452 aa, Homo sapiens
  Payload ID: 1978;
  Gene Symbol: BRWD1;
  Gene Name: bromodomain and WD repeat domain containing 1;
  ENSP ID: ENSP00000415066
  MOD_RES (1)..(1): Any amino acid
XPPTLCCLKLAFIDPATGKLMDKSFSIRYHDMPDVIDFLVLRQFYDEARQRNWQSCDRFRSIIDDAWWFGTVLSQEPYQPQYPDSHFQCYIVRWDNTEIEKLSPWDMEPIPDNVDPPEELGASISVTTDELEKLLYKPQAGEWGQKSRDEECDRIISGIDQLLNLDIAAAFAGPVDLCTYPKYCTVVAYPTDLYTIRMRLVNRFYRRLSALVWEVRYIEHNARTFNEPESVIARSAKKITDQLLKFIKNQHCTNISELSNTSENDEQNAEDLDDSDLPKTSSGRRRDYRDIIDTPMDFGTVRETLDAGNYDSPLEFCKDIRLIFSNAKAYTPNKRSKIYSMTLRLSALFEEKMKKISSDFKIGQKFNEKLRRSQRFKQRQNCKGDSQPNKSIRNLKPKRLKSQTKIIPELVGSPTQSTSSRTAYLGTHKTSAGISSGVTSGDSSDSAESSER

SEQ ID NO: 9778 - protein, 1802 aa, Homo sapiens
  Payload ID: 1979;
  Gene Symbol: BRWD3;
  Gene Name: bromodomain and WD repeat domain containing 3;
  Uniprot ID:  Q6RI45;
  ENSP ID: ENSP00000362372
MAAAPTQIEAELYYLIARFLQSGPCNKSAQVLVQELEEHQLIPRRLDWEGKEHRRSFEDLVAANAHIPPDYLLKICERIGPLLDKEIPQSVPGVQTLLGVGRQSLLRDAKDCKSTLWNGSAFAALHRGRPPELPVNYVKPPNVVNITSARQLTGCSRFGHIFPSSAYQHIKMHKRILGHLSSVYCVAFDRSGRRIFTGSDDCLVKIWATDDGRLLATLRGHSAEISDMAVNYENTLIAAGSCDKVVRVWCLRTCAPVAVLQGHSASITSIQFCPSTKGTNRYLTSTGADGTICFWQWHVKTMKFRDRPVKFTERSRPGVQISCSSFSSGGMFITTGSTDHVIRIYYLGSEVPEKIAELESHTDKVVAVQFCNNGDSLRFVSGSRDGTARIWQYQQQEWKSIVLDMATKMTGNNLPSGEDKITKLKVTMVAWDRYDTTVITAVNNFLLKVWNSITGQLLHTLSGHDDEVFVLEAHPFDQRIILSAGHDGNIFIWDLDRGTKIRNYFNMIEGQGHGAVFDCKFSPDGNHFACTDSHGHLLLFGFGCSKYYEKIPDQMFFHTDYRPLIRDANNYVLDEQTQQAPHLMPPPFLVDVDGNPHPTKFQRLVPGRENCKDEQLIPQLGYVANGDGEVVEQVIGQQTNDQDESILDGIIRELQREQDLRLINEGDVPHLPVNRAYSVNGALRSPNMDISSSPNIRLRRHSSQIEGVRQMHNNAPRSQMATERDLMAWSRRVVVNELNNGVSRVQEECRTAKGDIEISLYTVEKKKKPSYTTQRNDYEPSCGRSLRRTQRKRQHTYQTRSNIEHNSQASCQNSGVQEDSDSSSEEDETVGTSDASVEDPVVEWQSESSSSDSSSEYSDWTADAGINLQPPKRQTRQTTRKICSSSDEENLKSLEERQKKPKQTRKKKGGLVSIAGEPNEEWFAPQWILDTIPRRSPFVPQMGDELIYFRQGHEAYVRAVRKSKIYSVNLQKQPWNKMDLREQEFVKIVGIKYEVGPPTLCCLKLAFLDPISGKMTGESFSIKYHDMPDVIDFLVLHQFYNEAKERNWQIGDRFRSIIDDAWWFGTVESQQPFQPEYPDSSFQCYSVHWDNNEREKMSPWDMEPIPEGTAFPDEVGAGVPVSQEELTALLYKPQEGEWGAHSRDEECERVIQGINHLLSLDFASPFAVPVDLSAYPLYCTVVAYPTDLNTIRRRLENRFYRRISALMWEVRYIEHNARTFNEPDSPIVKAAKIVTDVLLRFIGDQSCTDILDTYNKIKAEERNSTDAEEDTEIVDLDSDGPGTSSGRKVKCRGRRQSLKCNPDAWKKQCKELLSLIYEREDSEPFRQPADLLSYPGHQEQEGESSESVVPERQQDSSLSEDYQDVIDTPVDFSTVKETLEAGNYGSPLEFYKDVRQIFNNSKAYTSNKKSRIYSMMLRLSALFESHIKNIISEYKSAIQSQKRRRPRYRKRLRSSSSSLSSSGAPSPKGKQKQMKLQPKNDQNTSVSHARTSSPFSSPVSDAAEGLSLYLLDDEPDGPFSSSSFGGYSRSGNSHDPGKAKSFRNRVLPVKQDHSLDGPLTNGDGREPRTGIKRKLLSASEEDENMGGEDKEKKETKEKSHLSTSESGELGSSLSSESTCGSDSDSESTSRTDQDYVDGDHDYSKFIQTRPKRKLRKQHGNGKRNWKTRGTGGRGRWGRWGRWSRGGRGRGGRGRGSRGRGGGGTRGRGRGRGGRGASRGATRAKRARIADDEFDTMFSGRFSRLPRIKTRNQGRRTVLYNDDSDNDNFVSTEDPLNLGTSRSGRVRKMTEKARVSHLMGWNY

SEQ ID NO: 9779 - protein, 1058 aa, Homo sapiens
  Payload ID: 1980;
  Gene Symbol: BRD1;
  Gene Name: bromodomain containing 1;
  Uniprot ID:  O95696;
  ENSP ID: ENSP00000216267
MRRKGRCHRGSAARHPSSPCSVKHSPTRETLTYAQAQRMVEIEIEGRLHRISIFDPLEIILEDDLTAQEMSECNSNKENSERPPVCLRTKRHKNNRVKKKNEALPSAHGTPASASALPEPKVRIVEYSPPSAPRRPPVYYKFIEKSAEELDNEVEYDMDEEDYAWLEIVNEKRKGDCVPAVSQSMFEFLMDRFEKESHCENQKQGEQQSLIDEDAVCCICMDGECQNSNVILFCDMCNLAVHQECYGVPYIPEGQWLCRHCLQSRARPADCVLCPNKGGAFKKTDDDRWGHVVCALWIPEVGFANTVFIEPIDGVRNIPPARWKLTCYLCKQKGVGACIQCHKANCYTAFHVTCAQKAGLYMKMEPVKELTGGGTTFSVRKTAYCDVHTPPGCTRRPLNIYGDVEMKNGVCRKESSVKTVRSTSKVRKKAKKAKKALAEPCAVLPTVCAPYIPPQRLNRIANQVAIQRKKQFVERAHSYWLLKRLSRNGAPLLRRLQSSLQSQRSSQQRENDEEMKAAKEKLKYWQRLRHDLERARLLIELLRKREKLKREQVKVEQVAMELRLTPLTVLLRSVLDQLQDKDPARIFAQPVSLKEVPDYLDHIKHPMDFATMRKRLEAQGYKNLHEFEEDFDLIIDNCMKYNARDTVFYRAAVRLRDQGGVVLRQARREVDSIGLEEASGMHLPERPAAAPRRPFSWEDVDRLLDPANRAHLGLEEQLRELLDMLDLTCAMKSSGSRSKRAKLLKKEIALLRNKLSQQHSQPLPTGPGLEGFEEDGAALGPEAGEEVLPRLETLLQPRKRSRSTCGDSEVEEESPGKRLDAGLTNGFGGARSEQEPGGGLGRKATPRRRCASESSISSSNSPLCDSSFNAPKCGRGKPALVRRHTLEDRSELISCIENGNYAKAARIAAEVGQSSMWISTDAAASVLEPLKVVWAKCSGYPSYPALIIDPKMPRVPGHHNGVTIPAPPLDVLKIGEHMQTKSDEKLFLVLFFDNKRSWQWLPKSKMVPLGIDETIDKLKMMEGRNSSIRKAVRIAFDRAMNHLSRVHGEPTSDLSDID

SEQ ID NO: 9780 - protein, 1058 aa, Homo sapiens; identical to SEQ ID NO: 9779
  Payload ID: 1980;
  Gene Symbol: BRD1;
  Gene Name: bromodomain containing 1;
  Uniprot ID:  O95696;
  ENSP ID: ENSP00000384076

SEQ ID NO: 9781 - protein, 1189 aa, Homo sapiens
  Payload ID: 1980;
  Gene Symbol: BRD1;
  Gene Name: bromodomain containing 1;
  Uniprot ID:  O95696;
  ENSP ID: ENSP00000385858
MRRKGRCHRGSAARHPSSPCSVKHSPTRETLTYAQAQRMVEIEIEGRLHRISIFDPLEIILEDDLTAQEMSECNSNKENSERPPVCLRTKRHKNNRVKKKNEALPSAHGTPASASALPEPKVRIVEYSPPSAPRRPPVYYKFIEKSAEELDNEVEYDMDEEDYAWLEIVNEKRKGDCVPAVSQSMFEFLMDRFEKESHCENQKQGEQQSLIDEDAVCCICMDGECQNSNVILFCDMCNLAVHQECYGVPYIPEGQWLCRHCLQSRARPADCVLCPNKGGAFKKTDDDRWGHVVCALWIPEVGFANTVFIEPIDGVRNIPPARWKLTCYLCKQKGVGACIQCHKANCYTAFHVTCAQKAGLYMKMEPVKELTGGGTTFSVRKTAYCDVHTPPGCTRRPLNIYGDVEMKNGVCRKESSVKTVRSTSKVRKKAKKAKKALAEPCAVLPTVCAPYIPPQRLNRIANQVAIQRKKQFVERAHSYWLLKRLSRNGAPLLRRLQSSLQSQRSSQQRENDEEMKAAKEKLKYWQRLRHDLERARLLIELLRKREKLKREQVKVEQVAMELRLTPLTVLLRSVLDQLQDKDPARIFAQPVSLKEVPDYLDHIKHPMDFATMRKRLEAQGYKNLHEFEEDFDLIIDNCMKYNARDTVFYRAAVRLRDQGGVVLRQARREVDSIGLEEASGMHLPERPAAAPRRPFSWEDVDRLLDPANRAHLGLEEQLRELLDMLDLTCAMKSSGSRSKRAKLLKKEIALLRNKLSQQHSQPLPTGPGLEGFEEDGAALGPEAGEEGDKSPPKLEPSDALPLPSNSETNSEPPTLKPVELNPEQSKLFKRVTFDNESHSACTQSALVSGRPPEPTRASSGDVPAAAASAVAEPASDVNRRTSVLFCKSKSVSPPKSAKNTETQPTSPQLGTKTFLSVVLPRLETLLQPRKRSRSTCGDSEVEEESPGKRLDAGLTNGFGGARSEQEPGGGLGRKATPRRRCASESSISSSNSPLCDSSFNAPKCGRGKPALVRRHTLEDRSELISCIENGNYAKAARIAAEVGQSSMWISTDAAASVLEPLKVVWAKCSGYPSYPALIIDPKMPRVPGHHNGVTIPAPPLDVLKIGEHMQTKSDEKLFLVLFFDNKRSWQWLPKSKMVPLGIDETIDKLKMMEGRNSSIRKAVRIAFDRAMNHLSRVHGEPTSDLSDID

SEQ ID NO: 9782 - protein, 509 aa, Homo sapiens
  Payload ID: 1980;
  Gene Symbol: BRD1;
  Gene Name: bromodomain containing 1;
  ENSP ID: ENSP00000388027
ELTGGGTTFSVRKTAYCDVHTPPGCTRRPLNIYGDVEMKNGVCRKESSVKTVRSTSKVRKKAKKAKKALAEPCAVLPTVCAPYIPPQRLNRIANQVAIQRKKQFVERAHSYWLLKRLSRNGAPLLRRLQSSLQSQRSSQQRENDEEMKAAKEKLKYWQRLRHDLERARLLIELLRKREKLKREQVKVEQVAMELRLTPLTVLLRSVLDQLQDKDPARIFAQPVSLKEVPDYLDHIKHPMDFATMRKRLEAQGYKNLHEFEEDFDLIIDNCMKYNARDTVFYRAAVRLRDQGGVVLRQARREVDSIGLEEASGMHLPERPAAAPRRPFSWEDVDRLLDPANRAHLGLEEQLRELLDMLDLTCAMKSSGSRSKRAKLLKKEIALLRNKLSQQHSQPLPTGPGLEGFEEDGAALGPEAGEEARDQNLFVCSPSEVGDSSAAKEKVAEHMRRLRGGGGVPRKAPGRRSHQRLWGCEERAGAGRRPGEEGHTPTTLCLRVQHLLQQQPALRLEL

SEQ ID NO: 9783 - protein, 1189 aa, Homo sapiens; identical to SEQ ID NO: 9781
  Payload ID: 1980;
  Gene Symbol: BRD1;
  Gene Name: bromodomain containing 1;
  Uniprot ID:  O95696;
  ENSP ID: ENSP00000410042

SEQ ID NO: 9784 - protein, 801 aa, Homo sapiens
  Payload ID: 1981;
  Gene Symbol: BRD2;
  Gene Name: bromodomain containing 2;
  Uniprot ID:  P25440;
  ENSP ID: ENSP00000363958
MLQNVTPHNKLPGEGNAGLLGLGPEAAAPGKRIRKPSLLYEGFESPTMASVPALQLTPANPPPPEVSNPKKPGRVTNQLQYLHKVVMKALWKHQFAWPFRQPVDAVKLGLPDYHKIIKQPMDMGTIKRRLENNYYWAASECMQDFNTMFTNCYIYNKPTDDIVLMAQTLEKIFLQKVASMPQEEQELVVTIPKNSHKKGAKLAALQGSVTSAHQVPAVSSVSHTALYTPPPEIPTTVLNIPHPSVISSPLLKSLHSAGPPLLAVTAAPPAQPLAKKKGVKRKADTTTPTPTAILAPGSPASPPGSLEPKAARLPPMRRESGRPIKPPRKDLPDSQQQHQSSKKGKLSEQLKHCNGILKELLSKKHAAYAWPFYKPVDASALGLHDYHDIIKHPMDLSTVKRKMENRDYRDAQEFAADVRLMFSNCYKYNPPDHDVVAMARKLQDVFEFRYAKMPDEPLEPGPLPVSTAMPPGLAKSSSESSSEESSSESSSEEEEEEDEEDEEEEESESSDSEEERAHRLAELQEQLRAVHEQLAALSQGPISKPKRKREKKEKKKKRKAEKHRGRAGADEDDKGPRAPRPPQPKKSKKASGSGGGSAALGPSGFGPSGGSGTKLPKKATKTAPPALPTGYDSEEEEESRPMSYDEKRQLSLDINKLPGEKLGRVVHIIQAREPSLRDSNPEEIEIDFETLKPSTLRELERYVLSCLRKKPRKPYTIKKPVGKTKEELALEKKRELEKRLQDVSGQLNSTKKPPKKANEKTESSSAQQVAVSRLSASSSSSDSSSSSSSSSSSDTSDSDSG

SEQ ID NO: 9785 - protein, 801 aa, Homo sapiens; identical to SEQ ID NO: 9784
  Payload ID: 1981;
  Gene Symbol: BRD2;
  Gene Name: bromodomain containing 2;
  Uniprot ID:  P25440;
  ENSP ID: ENSP00000363964

SEQ ID NO: 9786 - protein, 801 aa, Homo sapiens; identical to SEQ ID NO: 9784
  Payload ID: 1981;
  Gene Symbol: BRD2;
  Gene Name: bromodomain containing 2;
  Uniprot ID:  P25440;
  ENSP ID: ENSP00000372588

SEQ ID NO: 9787 - protein, 836 aa, Homo sapiens
  Payload ID: 1981;
  Gene Symbol: BRD2;
  Gene Name: bromodomain containing 2;
  Uniprot ID:  P25440;
  ENSP ID: ENSP00000378702
MLQNVTPHNKLPGEGNAGLLGLGPEAAAPGKRIRKPSLLYEGFESPTMASVPALQLTPANPPPPEVSNPKKPGRVTNQLQYLHKVVMKALWKHQFAWPFRQPVDAVKLGLPDYHKIIKQPMDMGTIKRRLENNYYWAASECMQDFNTMFTNCYIYNKPTDDIVLMAQTLEKIFLQKVASMPQEEQELVVTIPKNSHKKGAKLAALQGSVTSAHQVPAVSSVSHTALYTPPPEIPTTVLNIPHPSVISSPLLKSLHSAGPPLLAVTAAPPAQPLAKKKGVKRKADTTTPTPTAILAPGSPASPPGSLEPKAARLPPMRRESGRPIKPPRKDLPDSQQQHQSSKKGKLSEQLKHCNGILKELLSKKHAAYAWPFYKPVDASALGLHDYHDIIKHPMDLSTVKRKMENRDYRDAQEFAADVRLMFSNCYKYNPPDHDVVAMARKLQDVFEFRYAKMPDEPLEPGPLPVSTAMPPGLAKSSSESSSEESSSESSSEEEEEEDEEDEEEEESESSDSEEERAHRLAELQEQLRAVHEQLAALSQGPISKPKRKREKKEKKKKRKAEKHRGRAGADEDDKGPRAPRPPQPKKSKKASGSGGGSAALGPSGFGPSGGSGTKLQAGVQWRDLGLLQPPLLGFKRFSCLSLPSSQDYRLPKKATKTAPPALPTGYDSEEEEESRPMSYDEKRQLSLDINKLPGEKLGRVVHIIQAREPSLRDSNPEEIEIDFETLKPSTLRELERYVLSCLRKKPRKPYTIKKPVGKTKEELALEKKRELEKRLQDVSGQLNSTKKPPKKANEKTESSSAQQVAVSRLSASSSSSDSSSSSSSSSSSDTSDSDSG

SEQ ID NO: 9788 - protein, 836 aa, Homo sapiens; identical to SEQ ID NO: 9787
  Payload ID: 1981;
  Gene Symbol: BRD2;
  Gene Name: bromodomain containing 2;
  Uniprot ID:  P25440;
  ENSP ID: ENSP00000382443

SEQ ID NO: 9789 - protein, 801 aa, Homo sapiens; identical to SEQ ID NO: 9784
  Payload ID: 1981;
  Gene Symbol: BRD2;
  Gene Name: bromodomain containing 2;
  Uniprot ID:  P25440;
  ENSP ID: ENSP00000382444

SEQ ID NO: 9790 - protein, 801 aa, Homo sapiens; identical to SEQ ID NO: 9784
  Payload ID: 1981;
  Gene Symbol: BRD2;
  Gene Name: bromodomain containing 2;
  Uniprot ID:  P25440;
  ENSP ID: ENSP00000382445

SEQ ID NO: 9791 - protein, 613 aa, Homo sapiens
  Payload ID: 1981;
  Gene Symbol: BRD2;
  Gene Name: bromodomain containing 2;
  ENSP ID: ENSP00000390267
MLQNVTPHNKLPGEGNAGLLGLGPEAAAPGKRIRKPSLLYEGFESPTMASVPALQLTPANPPPPEVSNPKKPGRVTNQLQYLHKVVMKALWKHQFAWPFRQPVDAVKLGLPDYHKIIKQPMDMGTIKRRLENNYYWAASECMQDFNTMFTNCYIYNKPTDDIVLMAQTLEKIFLQKVASMPQEEQELVVTIPKNSHKKGAKLAALQGSVTSAHQVPAVSSVSHTALYTPPPEIPTTVLNIPHPSVISSPLLKSLHSAGPPLLAVTAAPPAQPLAKKKGVKRKADTTTPTPTAILAPGSPASPPGSLEPKAARLPPMRRESGRPIKPPRKDLPDSQQQHQSSKKGKLSEQLKHCNGILKELLSKKHAAYAWPFYKPVDASALGLHDYHDIIKHPMDLSTVKRKMENRDYRDAQEFAADVRLMFSNCYKYNPPDHDVVAMARKLQDVFEFRYAKMPDEPLEPGPLPVSTAMPPGLAKSSSESSSEESSSESSSEEEEEEDEEDEEEEESESSDSEEERAHRLAELQEQLRAVHEQLAALSQGPISKPKRKREKKEKKKKRKAEKHRGRAGADEDDKGPRAPRPPQPKKSKKASGSGGGSAALGPSGFGPSGGSGT

SEQ ID NO: 9792 - protein, 328 aa, Homo sapiens
  Payload ID: 1981;
  Gene Symbol: BRD2;
  Gene Name: bromodomain containing 2;
  ENSP ID: ENSP00000391113
  MOD_RES (1)..(1): Any amino acid
XAKSSSESSSEESSSESSSEEEEEEDEDEEEEESESSDSEEERAHRLAELQEQLRAVHEQLAALSQGPISKPKRKREKKEKKKKRKAEKHRGRAGADEDDKGPRAPRPPQPKKSKKASGSGGGSAALGPSGFGPSGGSGTKLPKKATKTAPPALPTGYDSEEEEESRPMSYDEKRQLSLDINKLPGEKLGRVVHIIQAREPSLRDSNPEEIEIDFETLKPSTLRELERYVLSCLRKKPRKPYTIKKPVGKTKEELALEKKRELEKRLQDVSGQLNSTKKPPKKANEKTESSSAQQVAVSRLSASSSSSDSSSSSSSSSSSDTSDSDSG

SEQ ID NO: 9793 - protein, 801 aa, Homo sapiens [sequence omitted]

SEQ ID NO: 9794 - protein, 296 aa, Homo sapiens
  Payload ID: 1981;
  Gene Symbol: BRD2;
  Gene Name: bromodomain containing 2;
  ENSP ID: ENSP00000391758
  MOD_RES (1)..(1): Any amino acid
XRPLGVQQPGARLPGEGNAGLLGLGPEAAAPGKRIRKPSLLYEGFESPTMASVPALQLTPANPPPPEVSNPKKPGRVTNQLQYLHKVVMKALWKHQFAWPFRQPVDAVKLGLPDYHKIIKQPMDMGTIKRRLENNYYWAASECMQDFNTMFTNCYIYNKPTDDIVLMAQTLEKIFLQKVASMPQEEQELVVTIPKNSHKKGAKLAALQGSVTSAHQVPAVSSVSHTALYTPPPEIPTTVLNIPHPSVISSPLLKSLHSAGPPLLAVTAAPPAQPLAKKKGVKRKADTTTPTPTAIL

SEQ ID NO: 9795 - protein, 328 aa, Homo sapiens; identical to SEQ ID NO: 9792
  Payload ID: 1981;
  Gene Symbol: BRD2;
  Gene Name: bromodomain containing 2;
  ENSP ID: ENSP00000393706
  MOD_RES (1)..(1): Any amino acid

SEQ ID NO: 9796 - protein, 801 aa, Homo sapiens [sequence omitted]

SEQ ID NO: 9797 - protein, 613 aa, Homo sapiens; identical to SEQ ID NO: 9791
  Payload ID: 1981;
  Gene Symbol: BRD2;
  Gene Name: bromodomain containing 2;
  ENSP ID: ENSP00000400369

SEQ ID NO: 9798 - protein, 807 aa, Homo sapiens
  Payload ID: 1981;
  Gene Symbol: BRD2;
  Gene Name: bromodomain containing 2;
  ENSP ID: ENSP00000400737
  MOD_RES (1)..(1): Any amino acid
XNGGGGSATARGGEYRLPGEGNAGLLGLGPEAAAPGKRIRKPSLLYEGFESPTMASVPALQLTPANPPPPEVSNPKKPGRVTNQLQYLHKVVMKALWKHQFAWPFRQPVDAVKLGLPDYHKIIKQPMDMGTIKRRLENNYYWAASECMQDFNTMFTNCYIYNKPTDDIVLMAQTLEKIFLQKVASMPQEEQELVVTIPKNSHKKGAKLAALQGSVTSAHQVPAVSSVSHTALYTPPPEIPTTVFNIPHPSVISSPLLKSLHSAGPPLLAVTAAPPAQPLAKKKGVKRKADTTTPTPTAILAPGSPASPPGSLEPKAARLPPMRRESGRPIKPPRKDLPDSQQQHQSSKKGKLSEQLKHCNGILKELLSKKHAAYAWPFYKPVDASALGLHDYHDIIKHPMDLSTVKRKMENRDYRDAQEFAADVRLMFSNCYKYNPPDHDVVAMARKLQDVFEFRYAKMPDEPLEPGPLPVSTAMPPGLAKSSSESSSEESSSESSSEEEEEEDEEDEEEEESESSDSEEERAHRLAELQEQLRAVHEQLAALSQGPISKPKRKREKKEKKKKRKAEKHRGRAGADEDDKGPRAPRPPQPKKSKKASGSGGGSAALGPSGFGPSGGSGTKLPKKATKTAPPALPTGYDSEEEEESRPMSYDEKRQLSLDINKLPGEKLGRVVHIIQAREPSLRDSNPEEIEIDFETLKPSTLRELERYVLSCLRKKPRKPYTIKKPVGKTKEELALEKKRELEKRLQDVSGQLNSTKKPPKKANEKTESSSAQQVAVSRLSASSSSSDSSSSSSSSSSSDTSDSDSG

SEQ ID NO: 9799 - protein, 801 aa, Homo sapiens; identical to SEQ ID NO: 9784
  Payload ID: 1981;
  Gene Symbol: BRD2;
  Gene Name: bromodomain containing 2;
  Uniprot ID:  P25440;
  ENSP ID: ENSP00000401791

SEQ ID NO: 9800 - protein, 619 aa, Homo sapiens
  Payload ID: 1981;
  Gene Symbol: BRD2;
  Gene Name: bromodomain containing 2;
  ENSP ID: ENSP00000402220
  MOD_RES (1)..(1): Any amino acid
XNGGGGSATARGGEYRLPGEGNAGLLGLGPEAAAPGKRIRKPSLLYEGFESPTMASVPALQLTPANPPPPEVSNPKKPGRVTNQLQYLHKVVMKALWKHQFAWPFRQPVDAVKLGLPDYHKIIKQPMDMGTIKRRLENNYYWAASECMQDFNTMFTNCYIYNKPTDDIVLMAQTLEKIFLQKVASMPQEEQELVVTIPKNSHKKGAKLAALQGSVTSAHQVPAVSSVSHTALYTPPPEIPTTVLNIPHPSVISSPLLKSLHSAGPPLLAVTAAPPAQPLAKKKGVKRKADTTTPTPTAILAPGSPASPPGSLEPKAARLPPMRRESGRPIKPPRKDLPDSQQQHQSSKKGKLSEQLKHCNGILKELLSKKHAAYAWPFYKPVDASALGLHDYHDIIKHPMDLSTVKRKMENRDYRDAQEFAADVRLMFSNCYKYNPPDHDVVAMARKLQDVFEFRYAKMPDEPLEPGPLPVSTAMPPGLAKSSSESSSEESSSESSSEEEEEEDEEDEEEEESESSDSEEERAHRLAELQEQLRAVHEQLAALSQGPISKPKRKREKKEKKKKRKAEKHRGRAGADEDDKGPRAPRPPQPKKSKKASGSGGGSAALGPSGFGPSGGSGT

SEQ ID NO: 9801 - protein, 363 aa, Homo sapiens
  Payload ID: 1981;
  Gene Symbol: BRD2;
  Gene Name: bromodomain containing 2;
  ENSP ID: ENSP00000403393
  MOD_RES (1)..(1): Any amino acid
XAKSSSESSSEESSSESSSEEEEEEDEDEEEEESESSDSEEERAHRLAELQEQLRAVHEQLAALSQGPISKPKRKREKKEKKKKRKAEKHRGRAGADEDDKGPRAPRPPQPKKSKKASGSGGGSAALGPSGFGPSGGSGTKLQAGVQWRDLGLLQPPLLGFKRFSCLSLPSSQDYRLPKKATKTAPPALPTGYDSEEEEESRPMSYDEKRQLSLDINKLPGEKLGRVVHIIQAREPSLRDSNPEEIEIDFETLKPSTLRELERYVLSCLRKKPRKPYTIKKPVGKTKEELALEKKRELEKRLQDVSGQLNSTKKPPKKANEKTESSSAQQVAVSRLSASSSSSDSSSSSSSSSSSDTSDSDSG

SEQ ID NO: 9802 - protein, 807 aa, Homo sapiens
  Payload ID: 1981;
  Gene Symbol: BRD2;
  Gene Name: bromodomain containing 2;
  ENSP ID: ENSP00000404221
  MOD_RES (1)..(1): Any amino acid
XNGGGGSATARGGEYRLPGEGNAGLLGLGPEAAAPGKRIRKPSLLYEGFESPTMASVPALQLTPANPPPPEVSNPKKPGRVTNQLQYLHKVVMKALWKHQFAWPFRQPVDAVKLGLPDYHKIIKQPMDMGTIKRRLENNYYWAASECMQDFNTMFTNCYIYNKPTDDIVLMAQTLEKIFLQKVASMPQEEQELVVTIPKNSHKKGAKLAALQGSVTSAHQVPAVSSVSHTALYTPPPEIPTTVLNIPHPSVISSPLLKSLHSAGPPLLAVTAAPPAQPLAKKKGVKRKADTTTPTPTAILAPGSPASPPGSLEPKAARLPPMRRESGRPIKPPRKDLPDSQQQHQSSKKGKLSEQLKHCNGILKELLSKKHAAYAWPFYKPVDASALGLHDYHDIIKHPMDLSTVKRKMENRDYRDAQEFAADVRLMFSNCYKYNPPDHDVVAMARKLQDVFEFRYAKMPDEPLEPGPLPVSTAMPPGLAKSSSESSSEESSSESSSEEEEEEDEEDEEEEESESSDSEEERAHRLAELQEQLRAVHEQLAALSQGPISKPKRKREKKEKKKKRKAEKHRGRAGADEDDKGPRAPRPPQPKKSKKASGSGGGSAALGPSGFGPSGGSGTKLPKKATKTAPPALPTGYDSEEEEESRPMSYDEKRQLSLDINKLPGEKLGRVVHIIQAREPSLRDSNPEEIEIDFETLKPSTLRELERYVLSCLRKKPRKPYTIKKPVGKTKEELALEKKRELEKRLQDVSGQLNSTKKPPKKANEKTESSSAQQVAVSRLSASSSSSDSSSSSSSSSSSDTSDSDSG

SEQ ID NO: 9803 - protein, 296 aa, Homo sapiens; identical to SEQ ID NO: 9794
  Payload ID: 1981;
  Gene Symbol: BRD2;
  Gene Name: bromodomain containing 2;
  ENSP ID: ENSP00000405050
  MOD_RES (1)..(1): Any amino acid

SEQ ID NO: 9804 - protein, 754 aa, Homo sapiens
  Payload ID: 1981;
  Gene Symbol: BRD2;
  Gene Name: bromodomain containing 2;
  Uniprot ID:  P25440;
  ENSP ID: ENSP00000405634
MASVPALQLTPANPPPPEVSNPKKPGRVTNQLQYLHKVVMKALWKHQFAWPFRQPVDAVKLGLPDYHKIIKQPMDMGTIKRRLENNYYWAASECMQDFNTMFTNCYIYNKPTDDIVLMAQTLEKIFLQKVASMPQEEQELVVTIPKNSHKKGAKLAALQGSVTSAHQVPAVSSVSHTALYTPPPEIPTTVLNIPHPSVISSPLLKSLHSAGPPLLAVTAAPPAQPLAKKKGVKRKADTTTPTPTAILAPGSPASPPGSLEPKAARLPPMRRESGRPIKPPRKDLPDSQQQHQSSKKGKLSEQLKHCNGILKELLSKKHAAYAWPFYKPVDASALGLHDYHDIIKHPMDLSTVKRKMENRDYRDAQEFAADVRLMFSNCYKYNPPDHDVVAMARKLQDVFEFRYAKMPDEPLEPGPLPVSTAMPPGLAKSSSESSSEESSSESSSEEEEEEDEEDEEEEESESSDSEEERAHRLAELQEQLRAVHEQLAALSQGPISKPKRKREKKEKKKKRKAEKHRGRAGADEDDKGPRAPRPPQPKKSKKASGSGGGSAALGPSGFGPSGGSGTKLPKKATKTAPPALPTGYDSEEEEESRPMSYDEKRQLSLDINKLPGEKLGRVVHIIQAREPSLRDSNPEEIEIDFETLKPSTLRELERYVLSCLRKKPRKPYTIKKPVGKTKEELALEKKRELEKRLQDVSGQLNSTKKPPKKANEKTESSSAQQVAVSRLSASSSSSDSSSSSSSSSSSDTSDSDSG

SEQ ID NO: 9805 - protein, 296 aa, Homo sapiens; identical to SEQ ID NO: 9794
  Payload ID: 1981;
  Gene Symbol: BRD2;
  Gene Name: bromodomain containing 2;
  ENSP ID: ENSP00000405661
  MOD_RES (1)..(1): Any amino acid

SEQ ID NO: 9806 - protein, 807 aa, Homo sapiens; identical to SEQ ID NO: 9802
  Payload ID: 1981;
  Gene Symbol: BRD2;
  Gene Name: bromodomain containing 2;
  ENSP ID: ENSP00000406118
  MOD_RES (1)..(1): Any amino acid

SEQ ID NO: 9807 - protein, 754 aa, Homo sapiens; identical to SEQ ID NO: 9804
  Payload ID: 1981;
  Gene Symbol: BRD2;
  Gene Name: bromodomain containing 2;
  Uniprot ID:  P25440;
  ENSP ID: ENSP00000409145

SEQ ID NO: 9808 - protein, 807 aa, Homo sapiens; identical to SEQ ID NO: 9802
  Payload ID: 1981;
  Gene Symbol: BRD2;
  Gene Name: bromodomain containing 2;
  ENSP ID: ENSP00000409613
  MOD_RES (1)..(1): Any amino acid

SEQ ID NO: 9809 - protein, 836 aa, Homo sapiens; identical to SEQ ID NO: 9787
  Payload ID: 1981;
  Gene Symbol: BRD2;
  Gene Name: bromodomain containing 2;
  Uniprot ID:  P25440;
  ENSP ID: ENSP00000410994

SEQ ID NO: 9810 - protein, 296 aa, Homo sapiens; identical to SEQ ID NO: 9794
  Payload ID: 1981;
  Gene Symbol: BRD2;
  Gene Name: bromodomain containing 2;
  ENSP ID: ENSP00000411074
  MOD_RES (1)..(1): Any amino acid

SEQ ID NO: 9811 - protein, 296 aa, Homo sapiens; identical to SEQ ID NO: 9794
  Payload ID: 1981;
  Gene Symbol: BRD2;
  Gene Name: bromodomain containing 2;
  ENSP ID: ENSP00000411195
  MOD_RES (1)..(1): Any amino acid

SEQ ID NO: 9812 - protein, 836 aa, Homo sapiens; identical to SEQ ID NO: 9787
  Payload ID: 1981;
  Gene Symbol: BRD2;
  Gene Name: bromodomain containing 2;
  Uniprot ID:  P25440;
  ENSP ID: ENSP00000412885

SEQ ID NO: 9813 - protein, 328 aa, Homo sapiens; identical to SEQ ID NO: 9792
  Payload ID: 1981;
  Gene Symbol: BRD2;
  Gene Name: bromodomain containing 2;
  ENSP ID: ENSP00000413125
  MOD_RES (1)..(1): Any amino acid

SEQ ID NO: 9814 - protein, 836 aa, Homo sapiens
  Payload ID: 1981;
  Gene Symbol: BRD2;
  Gene Name: bromodomain containing 2;
  ENSP ID: ENSP00000413845
MLQNVTPHNKLPGEGNAGLLGLGPEAAAPGKRIRKPSLLYEGFESPTMASVPALQLTPANPPPPEVSNPKKPGRVTNQLQYLHKVVMKALWKHQFAWPFRQPVDAVKLGLPDYHKIIKQPMDMGTIKRRLENNYYWAASECMQDFNTMFTNCYIYNKPTDDIVLMAQTLEKIFLQKVASMPQEEQELVVTIPKNSHKKGAKLAALQGSVTSAHQVPAVSSVSHTALYTPPPEIPTTVFNIPHPSVISSPLLKSLHSAGPPLLAVTAAPPAQPLAKKKGVKRKADTTTPTPTAILAPGSPASPPGSLEPKAARLPPMRRESGRPIKPPRKDLPDSQQQHQSSKKGKLSEQLKHCNGILKELLSKKHAAYAWPFYKPVDASALGLHDYHDIIKHPMDLSTVKRKMENRDYRDAQEFAADVRLMFSNCYKYNPPDHDVVAMARKLQDVFEFRYAKMPDEPLEPGPLPVSTAMPPGLAKSSSESSSEESSSESSSEEEEEEDEEDEEEEESESSDSEEERAHRLAELQEQLRAVHEQLAALSQGPISKPKRKREKKEKKKKRKAEKHRGRAGADEDDKGPRAPRPPQPKKSKKASGSGGGSAALGPSGFGPSGGSGTKLQAGVQWRDLGLLQPPLLGFKRFSCLSLPSSQNYRLPKKATKTAPPALPTGYDSEEEEESRPMSYDEKRQLSLDINKLPGEKLGRVVHIIQAREPSLRDSNPEEIEIDFETLKPSTLRELERYVLSCLRKKPRKPYTIKKPVGKTKEELALEKKRELEKRLQDVSGQLNSTKKPPKKANEKTESSSAQQVAVSRLSASSSSSDSSSSSSSSSSSDTSDSDSG

SEQ ID NO: 9815 - protein, 648 aa, Homo sapiens
  Payload ID: 1981;
  Gene Symbol: BRD2;
  Gene Name: bromodomain containing 2;
  ENSP ID: ENSP00000414641
MLQNVTPHNKLPGEGNAGLLGLGPEAAAPGKRIRKPSLLYEGFESPTMASVPALQLTPANPPPPEVSNPKKPGRVTNQLQYLHKVVMKALWKHQFAWPFRQPVDAVKLGLPDYHKIIKQPMDMGTIKRRLENNYYWAASECMQDFNTMFTNCYIYNKPTDDIVLMAQTLEKIFLQKVASMPQEEQELVVTIPKNSHKKGAKLAALQGSVTSAHQVPAVSSVSHTALYTPPPEIPTTVLNIPHPSVISSPLLKSLHSAGPPLLAVTAAPPAQPLAKKKGVKRKADTTTPTPTAILAPGSPASPPGSLEPKAARLPPMRRESGRPIKPPRKDLPDSQQQHQSSKKGKLSEQLKHCNGILKELLSKKHAAYAWPFYKPVDASALGLHDYHDIIKHPMDLSTVKRKMENRDYRDAQEFAADVRLMFSNCYKYNPPDHDVVAMARKLQDVFEFRYAKMPDEPLEPGPLPVSTAMPPGLAKSSSESSSEESSSESSSEEEEEEDEEDEEEEESESSDSEEERAHRLAELQEQLRAVHEQLAALSQGPISKPKRKREKKEKKKKRKAEKHRGRAGADEDDKGPRAPRPPQPKKSKKASGSGGGSAALGPSGFGPSGGSGTKLQAGVQWRDLGLLQPPLLGFKRFSCLSLPSSQDY

SEQ ID NO: 9816 - protein, 296 aa, Homo sapiens
  Payload ID: 1981;
  Gene Symbol: BRD2;
  Gene Name: bromodomain containing 2;
  ENSP ID: ENSP00000416399
  MOD_RES (1)..(1): Any amino acid
XRPLGVQQPGARLPGEGNAGLLGLGPEAAAPGKRIRKPSLLYEGFESPTMASVPALQLTPANPPPPEVSNPKKPGRVTNQLQYLHKVVMKALWKHQFAWPFRQPVDAVKLGLPDYHKIIKQPMDMGTIKRRLENNYYWAASECMQDFNTMFTNCYIYNKPTDDIVLMAQTLEKIFLQKVASMPQEEQELVVTIPKNSHKKGAKLAALQGSVTSAHQVPAVSSVSHTALYTPPPEIPTTVFNIPHPSVISSPLLKSLHSAGPPLLAVTAAPPAQPLAKKKGVKRKADTTTPTPTAIL

SEQ ID NO: 9817 - protein, 328 aa, Homo sapiens; identical to SEQ ID NO: 9792
  Payload ID: 1981;
  Gene Symbol: BRD2;
  Gene Name: bromodomain containing 2;
  ENSP ID: ENSP00000428080
  MOD_RES (1)..(1): Any amino acid

SEQ ID NO: 9818 - protein, 147 aa, Homo sapiens
  Payload ID: 1981;
  Gene Symbol: BRD2;
  Gene Name: bromodomain containing 2;
  ENSP ID: ENSP00000431499
MLQNVTPHNKLPGEGNAGLLGLGPEAAAPGKRIRKPSLLYEGFESPTMASVPALQLTPANPPPPEVSNPKKPGRVTNQLQYLHKVVMKALWKHQFAWPFRQPVDAVKLGLPIPTSGWERTTVAKILSFFLSLMQPMDSQPQRIITKL

SEQ ID NO: 9819 - protein, 147 aa, Homo sapiens; identical to SEQ ID NO: 9818
  Payload ID: 1981;
  Gene Symbol: BRD2;
  Gene Name: bromodomain containing 2;
  ENSP ID: ENSP00000431514

SEQ ID NO: 9820 - protein, 137 aa, Homo sapiens
  Payload ID: 1981;
  Gene Symbol: BRD2;
  Gene Name: bromodomain containing 2;
  ENSP ID: ENSP00000432478
  MOD_RES (1)..(1): Any amino acid
XVKRKADTTTPTPTAILAPGSPASPPGSLEPKAARLPPMRRESGRPIKPPRKDLPDSQQQHQSSKKGKLSEQLKHCNGILKELLSKKHAAYAWPFYKPVDASALGLHDYHDIIKHPMDLSTVKLLMLPPSAAEDGEP

SEQ ID NO: 9821 - protein, 137 aa, Homo sapiens; identical to SEQ ID NO: 9820
  Payload ID: 1981;
  Gene Symbol: BRD2;
  Gene Name: bromodomain containing 2;
  ENSP ID: ENSP00000433751
  MOD_RES (1)..(1): Any amino acid

SEQ ID NO: 9822 - protein, 147 aa, Homo sapiens; identical to SEQ ID NO: 9818
  Payload ID: 1981;
  Gene Symbol: BRD2;
  Gene Name: bromodomain containing 2;
  ENSP ID: ENSP00000434155

SEQ ID NO: 9823 - protein, 147 aa, Homo sapiens; identical to SEQ ID NO: 9818
  Payload ID: 1981;
  Gene Symbol: BRD2;
  Gene Name: bromodomain containing 2;
  ENSP ID: ENSP00000434843

SEQ ID NO: 9824 - protein, 401 aa, Homo sapiens
  Payload ID: 1981;
  Gene Symbol: BRD2;
  Gene Name: bromodomain containing 2;
  ENSP ID: ENSP00000434978
MLQNVTPHNKLPGEGNAGLLGLGPEAAAPGKRIRKPSLLYEGFESPTMASVPALQLTPANPPPPEVSNPKKPGRVTNQLQYLHKVVMKALWKHQFAWPFRQPVDAVKLGLPDYHKIIKQPMDMGTIKRRLENNYYWAASECMQDFNTMFTNCYIYNKPTDDIVLMAQTLEKIFLQKVASMPQEEQELVVTIPKNSHKKGAKLAALQGSVTSAHQVPAVSSVSHTALYTPPPEIPTTVLNIPHPSVISSPLLKSLHSAGPPLLAVTAAPPAQPLAKKKGVKRKADTTTPTPTAILAPGSPASPPGSLEPKAARLPPMRRESGRPIKPPRKDLPDSQQQHQSSKKGKLSEQLKHCNGILKELLSKKHAAYAWPFYKPVDASALGLHDYHDIIKHPMDLSTVKT

SEQ ID NO: 9825 - protein, 401 aa, Homo sapiens; identical to SEQ ID NO: 9824
  Payload ID: 1981;
  Gene Symbol: BRD2;
  Gene Name: bromodomain containing 2;
  ENSP ID: ENSP00000435693

SEQ ID NO: 9826 - protein, 401 aa, Homo sapiens; identical to SEQ ID NO: 9824
  Payload ID: 1981;
  Gene Symbol: BRD2;
  Gene Name: bromodomain containing 2;
  ENSP ID: ENSP00000436322

SEQ ID NO: 9827 - protein, 147 aa, Homo sapiens; identical to SEQ ID NO: 9818
  Payload ID: 1981;
  Gene Symbol: BRD2;
  Gene Name: bromodomain containing 2;
  ENSP ID: ENSP00000437126

SEQ ID NO: 9828 - protein, 801 aa, Homo sapiens; identical to SEQ ID NO: 9784
  Payload ID: 1981;
  Gene Symbol: BRD2;
  Gene Name: bromodomain containing 2;
  Uniprot ID:  P25440;
  ENSP ID: ENSP00000449380

SEQ ID NO: 9829 - protein, 801 aa, Homo sapiens; identical to SEQ ID NO: 9784
  Payload ID: 1981;
  Gene Symbol: BRD2;
  Gene Name: bromodomain containing 2;
  Uniprot ID:  P25440;
  ENSP ID: ENSP00000449609

SEQ ID NO: 9830 - protein, 162 aa, Homo sapiens
  Payload ID: 1981;
  Gene Symbol: BRD2;
  Gene Name: bromodomain containing 2;
  ENSP ID: ENSP00000464077
MASLMPPYPLEGKGVRGRCGPPYSIRPLGVQQPGARFFAAAALPPRTTTRQASCGHTPGGFRQATPTRPLPFPCFGQWRSYEWHDLLELGSLQLGCAWKLGKTLLEGEAGRECWRLWGDGFRTSSNHPLSLESADHSSANWLGDVAGCHFPVGLCGTLLPGD

SEQ ID NO: 9831 - protein, 159 aa, Homo sapiens
  Payload ID: 1981;
  Gene Symbol: BRD2;
  Gene Name: bromodomain containing 2;
  ENSP ID: ENSP00000475288
  MOD_RES (1)..(1): Any amino acid
XPPLLAVTAAPPAQPLAKKKGVKRKADTTTPTPTAILAPGSPASPPGSLEPKAARLPPMRRESGRPIKPPRKDLPDSQQQHQSSKKGKLSEQLKHCNGILKELLSKKHAAYAWPFYKPVDASALGLHDYHDIIKHPMDLSTVKVPTAWGRWDAQAVMGA

SEQ ID NO: 9832 - protein, 552 aa, Homo sapiens
  Payload ID: 1981;
  Gene Symbol: BRD2;
  Gene Name: bromodomain containing 2;
  ENSP ID: ENSP00000475691
MLQNVTPHNKLPGEGNAGLLGLGPEAAAPGKRIRKPSLLYEGFESPTMASVPALQLTPANPPPPEVSNPKKPGRVTNQLQYLHKVVMKALWKHQFAWPFRQPVDAVKLGLPDYHKIIKQPMDMGTIKRRLENNYYWAASECMQDFNTMFTNCYIYNKPTDDIVLMAQTLEKIFLQKVASMPQEEQELVVTIPKNSHKKGAKLAALQGSVTSAHQVPAVSSVSHTALYTPPPEIPTTVLNIPHPSVISSPLLKSLHSAGPPLLAVTAAPPAQPLAKKKGVKRKADTTTPTPTAILAPGSPASPPGSLEPKAARLPPMRRESGRPIKPPRKDLPDSQQQHQSSKKGKLSEQLKHCNGILKELLSKKHAAYAWPFYKPVDASALGLHDYHDIIKHPMDLSTVKRKMENRDYRDAQEFAADVRLMFSNCYKYNPPDHDVVAMARKLQDVFEFRYAKMPDEPLEPGPLPVSTAMPPGLAKSSSESSSEESSSESSSEEEEEEDEEDEEEEESESSDSEEERAHRLAELQEQLRAVHEQLAALSQGPISKPKRKREKK

SEQ ID NO: 9833 - protein, 726 aa, Homo sapiens
  Payload ID: 1982;
  Gene Symbol: BRD3;
  Gene Name: bromodomain containing 3;
  Uniprot ID:  Q15059;
  ENSP ID: ENSP00000305918
MSTATTVAPAGIPATPGPVNPPPPEVSNPSKPGRKTNQLQYMQNVVVKTLWKHQFAWPFYQPVDAIKLNLPDYHKIIKNPMDMGTIKKRLENNYYWSASECMQDFNTMFTNCYIYNKPTDDIVLMAQALEKIFLQKVAQMPQEEVELLPPAPKGKGRKPAAGAQSAGTQQVAAVSSVSPATPFQSVPPTVSQTPVIAATPVPTITANVTSVPVPPAAAPPPPATPIVPVVPPTPPVVKKKGVKRKADTTTPTTSAITASRSESPPPLSDPKQAKVVARRESGGRPIKPPKKDLEDGEVPQHAGKKGKLSEHLRYCDSILREMLSKKHAAYAWPFYKPVDAEALELHDYHDIIKHPMDLSTVKRKMDGREYPDAQGFAADVRLMFSNCYKYNPPDHEVVAMARKLQDVFEMRFAKMPDEPVEAPALPAPAAPMVSKGAESSRSSEESSSDSGSSDSEEERATRLAELQEQLKAVHEQLAALSQAPVNKPKKKKEKKEKEKKKKDKEKEKEKHKVKAEEEKKAKVAPPAKQAQQKKAPAKKANSTTTAGRQLKKGGKQASASYDSEEEEEGLPMSYDEKRQLSLDINRLPGEKLGRVVHIIQSREPSLRDSNPDEIEIDFETLKPTTLRELERYVKSCLQKKQRKPFSASGKKQAAKSKEELAQEKKKELEKRLQDVSGQLSSSKKPARKEKPGSAPSGGPSRLSSSSSSESGSSSSSGSSSDSSDSE

SEQ ID NO: 9834 - protein, 556 aa, Homo sapiens
  Payload ID: 1982;
  Gene Symbol: BRD3;
  Gene Name: bromodomain containing 3;
  Uniprot ID:  Q15059;
  ENSP ID: ENSP00000360900
MSTATTVAPAGIPATPGPVNPPPPEVSNPSKPGRKTNQLQYMQNVVVKTLWKHQFAWPFYQPVDAIKLNLPDYHKIIKNPMDMGTIKKRLENNYYWSASECMQDFNTMFTNCYIYNKPTDDIVLMAQALEKIFLQKVAQMPQEEVELLPPAPKGKGRKPAAGAQSAGTQQVAAVSSVSPATPFQSVPPTVSQTPVIAATPVPTITANVTSVPVPPAAAPPPPATPIVPVVPPTPPVVKKKGVKRKADTTTPTTSAITASRSESPPPLSDPKQAKVVARRESGGRPIKPPKKDLEDGEVPQHAGKKGKLSEHLRYCDSILREMLSKKHAAYAWPFYKPVDAEALELHDYHDIIKHPMDLSTVKRKMDGREYPDAQGFAADVRLMFSNCYKYNPPDHEVVAMARKLQDVFEMRFAKMPDEPVEAPALPAPAAPMVSKGAESSRSSEESSSDSGSSDSEEERATRLAELQEQLKAVHEQLAALSQAPVNKPKKKKEKKEKEKKKKDKEKEKEKHKVKAEEEKKAKVAPPAKQAQQKKAPAKKANSTTTAGRDHFLTCGV

SEQ ID NO: 9835 - protein, 74 aa, Homo sapiens
  Payload ID: 1982;
  Gene Symbol: BRD3;
  Gene Name: bromodomain containing 3;
  ENSP ID: ENSP00000360908
MSTATTVAPAGIPATPGPVNPPPPEVSNPSKPGRKTNQLQYMQNVVVKTLWKHQFAWPFYQPVDAIKLNLPDYH

SEQ ID NO: 9836 - protein, 20 aa, Homo sapiens
  Payload ID: 1982;
  Gene Symbol: BRD3;
  Gene Name: bromodomain containing 3;
  ENSP ID: ENSP00000406749
MSTATTVAPAGIPATPGPVN

SEQ ID NO: 9837 - protein, 1362 aa, Homo sapiens
  Payload ID: 1983;
  Gene Symbol: BRD4;
  Gene Name: bromodomain containing 4;
  Uniprot ID:  O60885;
  ENSP ID: ENSP00000263377
MSAESGPGTRLRNLPVMGDGLETSQMSTTQAQAQPQPANAASTNPPPPETSNPNKPKRQTNQLQYLLRVVLKTLWKHQFAWPFQQPVDAVKLNLPDYYKIIKTPMDMGTIKKRLENNYYWNAQECIQDFNTMFTNCYIYNKPGDDIVLMAEALEKLFLQKINELPTEETEIMIVQAKGRGRGRKETGTAKPGVSTVPNTTQASTPPQTQTPQPNPPPVQATPHPFPAVTPDLIVQTPVMTVVPPQPLQTPPPVPPQPQPPPAPAPQPVQSHPPIIAATPQPVKTKKGVKRKADTTTPTTIDPIHEPPSLPPEPKTTKLGQRRESSRPVKPPKKDVPDSQQHPAPEKSSKVSEQLKCCSGILKEMFAKKHAAYAWPFYKPVDVEALGLHDYCDIIKHPMDMSTIKSKLEAREYRDAQEFGADVRLMFSNCYKYNPPDHEVVAMARKLQDVFEMRFAKMPDEPEEPVVAVSSPAVPPPTKVVAPPSSSDSSSDSSSDSDSSTDDSEEERAQRLAELQEQLKAVHEQLAALSQPQQNKPKKKEKDKKEKKKEKHKRKEEVEENKKSKAKEPPPKKTKKNNSSNSNVSKKEPAPMKSKPPPTYESEEEDKCKPMSYEEKRQLSLDINKLPGEKLGRVVHIIQSREPSLKNSNPDEIEIDFETLKPSTLRELERYVTSCLRKKRKPQAEKVDVIAGSSKMKGFSSSESESSSESSSSDSEDSETEMAPKSKKKGHPGREQKKHHHHHHQQMQQAPAPVPQQPPPPPQQPPPPPPPQQQQQPPPPPPPPSMPQQAAPAMKSSPPPFIATQVPVLEPQLPGSVFDPIGHFTQPILHLPQPELPPHLPQPPEHSTPPHLNQHAVVSPPALHNALPQQPSRPSNRAAALPPKPARPPAVSPALTQTPLLPQPPMAQPPQVLLEDEEPPAPPLTSMQMQLYLQQLQKVQPPTPLLPSVKVQSQPPPPLPPPPHPSVQQQLQQQPPPPPPPQPQPPPQQQHQPPPRPVHLQPMQFSTHIQQPPPPQGQQPPHPPPGQQPPPPQPAKPQQVIQHHHSPRHHKSDPYSTGHLREAPSPLMIHSPQMSQFQSLTHQSPPQQNVQPKKQELRAASVVQPQPLVVVKEEKIHSPIIRSEPFSPSLRPEPPKHPESIKAPVHLPQRPEMKPVDVGRPVIRPPEQNAPPPGAPDKDKQKQEPKTPVAPKKDLKIKNMGSWASLVQKHPTTPSSTAKSSSDSFEQFRRAAREKEEREKALKAQAEHAEKEKERLRQERMRSREDEDALEQARRAHEEARRRQEQQQQQRQEQQQQQQQQAAAVAAAATPQAQSSQPQSMLDQQRELARKREQERRRREAMAATIDMNFQSDLLSIFEENLF

SEQ ID NO: 9838 - protein, 794 aa, Homo sapiens
  Payload ID: 1983;
  Gene Symbol: BRD4;
  Gene Name: bromodomain containing 4;
  Uniprot ID:  O60885;
  ENSP ID: ENSP00000353112
MSAESGPGTRLRNLPVMGDGLETSQMSTTQAQAQPQPANAASTNPPPPETSNPNKPKRQTNQLQYLLRVVLKTLWKHQFAWPFQQPVDAVKLNLPDYYKIIKTPMDMGTIKKRLENNYYWNAQECIQDFNTMFTNCYIYNKPGDDIVLMAEALEKLFLQKINELPTEETEIMIVQAKGRGRGRKETGTAKPGVSTVPNTTQASTPPQTQTPQPNPPPVQATPHPFPAVTPDLIVQTPVMTVVPPQPLQTPPPVPPQPQPPPAPAPQPVQSHPPIIAATPQPVKTKKGVKRKADTTTPTTIDPIHEPPSLPPEPKTTKLGQRRESSRPVKPPKKDVPDSQQHPAPEKSSKVSEQLKCCSGILKEMFAKKHAAYAWPFYKPVDVEALGLHDYCDIIKHPMDMSTIKSKLEAREYRDAQEFGADVRLMFSNCYKYNPPDHEVVAMARKLQDVFEMRFAKMPDEPEEPVVAVSSPAVPPPTKVVAPPSSSDSSSDSSSDSDSSTDDSEEERAQRLAELQEQLKAVHEQLAALSQPQQNKPKKKEKDKKEKKKEKHKRKEEVEENKKSKAKEPPPKKTKKNNSSNSNVSKKEPAPMKSKPPPTYESEEEDKCKPMSYEEKRQLSLDINKLPGEKLGRVVHIIQSREPSLKNSNPDEIEIDFETLKPSTLRELERYVTSCLRKKRKPQAEKVDVIAGSSKMKGFSSSESESSSESSSSDSEDSETAFCTSGDFVSPGPSPYHSHVQCGRFREMLRWFLVDVEQTAAGQPHRQSAAGPAITWAPAIAYPSPECARCCVGCS

SEQ ID NO: 9839 - protein, 722 aa, Homo sapiens
  Payload ID: 1983;
  Gene Symbol: BRD4;
  Gene Name: bromodomain containing 4;
  Uniprot ID:  O60885;
  ENSP ID: ENSP00000360901
MSAESGPGTRLRNLPVMGDGLETSQMSTTQAQAQPQPANAASTNPPPPETSNPNKPKRQTNQLQYLLRVVLKTLWKHQFAWPFQQPVDAVKLNLPDYYKIIKTPMDMGTIKKRLENNYYWNAQECIQDFNTMFTNCYIYNKPGDDIVLMAEALEKLFLQKINELPTEETEIMIVQAKGRGRGRKETGTAKPGVSTVPNTTQASTPPQTQTPQPNPPPVQATPHPFPAVTPDLIVQTPVMTVVPPQPLQTPPPVPPQPQPPPAPAPQPVQSHPPIIAATPQPVKTKKGVKRKADTTTPTTIDPIHEPPSLPPEPKTTKLGQRRESSRPVKPPKKDVPDSQQHPAPEKSSKVSEQLKCCSGILKEMFAKKHAAYAWPFYKPVDVEALGLHDYCDIIKHPMDMSTIKSKLEAREYRDAQEFGADVRLMFSNCYKYNPPDHEVVAMARKLQDVFEMRFAKMPDEPEEPVVAVSSPAVPPPTKVVAPPSSSDSSSDSSSDSDSSTDDSEEERAQRLAELQEQLKAVHEQLAALSQPQQNKPKKKEKDKKEKKKEKHKRKEEVEENKKSKAKEPPPKKTKKNNSSNSNVSKKEPAPMKSKPPPTYESEEEDKCKPMSYEEKRQLSLDINKLPGEKLGRVVHIIQSREPSLKNSNPDEIEIDFETLKPSTLRELERYVTSCLRKKRKPQAEKVDVIAGSSKMKGFSSSESESSSESSSSDSEDSETGPA

SEQ ID NO: 9840 - protein, 146 aa, Homo sapiens
  Payload ID: 1983;
  Gene Symbol: BRD4;
  Gene Name: bromodomain containing 4;
  ENSP ID: ENSP00000470108
MSAESGPGTRLRNLPVMGDGLETSQMSTTQAQAQPQPANAASTNPPPPETSNPNKPKRQTNQLQYLLRVVLKTLWKHQFAWPFQQPVDAVKLNLPDYYKIIKTPMDMGTIKKRLENNYYWNAQECIQDFNTMFTNCYIYNKFRPQM

SEQ ID NO: 9841 - protein, 572 aa, Homo sapiens
  Payload ID: 1983;
  Gene Symbol: BRD4;
  Gene Name: bromodomain containing 4;
  ENSP ID: ENSP00000470481
MSAESGPGTRLRNLPVMGDGLETSQMSTTQAQAQPQPANAASTNPPPPETSNPNKPKRQTNQLQYLLRVVLKTLWKHQFAWPFQQPVDAVKLNLPDYYKIIKTPMDMGTIKKRLENNYYWNAQECIQDFNTMFTNCYIYNKPGDDIVLMAEALEKLFLQKINELPTEETEIMIVQAKGRGRGRKETGTAKPGVSTVPNTTQASTPPQTQTPQPNPPPVQATPHPFPAVTPDLIVQTPVMTVVPPQPLQTPPPVPPQPQPPPAPAPQPVQSHPPIIAATPQPVKTKKGVKRKADTTTPTTIDPIHEPPSLPPEPKTTKLGQRRESSRPVKPPKKDVPDSQQHPAPEKSSKVSEQLKCCSGILKEMFAKKHAAYAWPFYKPVDVEALGLHDYCDIIKHPMDMSTIKSKLEAREYRDAQEFGADVRLMFSNCYKYNPPDHEVVAMARKLQDVFEMRFAKMPDEPEEPVVAVSSPAVPPPTKVVAPPSSSDSSSDSSSDSDSSTDDSEEERAQRLAELQEQLKAVHEQLAALSQPQQNKPKKKEKDKKEKKKEKHKRKEEVEENKKSKAKEPPPKK

SEQ ID NO: 9842 - protein, 105 aa, Homo sapiens
  Payload ID: 1983;
  Gene Symbol: BRD4;
  Gene Name: bromodomain containing 4;
  ENSP ID: ENSP00000471240
MSAESGPGTRLRNLPVMGDGLETSQMSTTQAQAQPQPANAASTNPPPPETSNPNKPKRQTNQLQYLLRVVLKTLWKHQFAWPFQQPVDAVKLNLPDYYKIIKTPM

SEQ ID NO: 9843 - protein, 146 aa, Homo sapiens; identical to SEQ ID NO: 9840
  Payload ID: 1983;
  Gene Symbol: BRD4;
  Gene Name: bromodomain containing 4;
  ENSP ID: ENSP00000486621

SEQ ID NO: 9844 - protein, 651 aa, Homo sapiens
  Payload ID: 1984;
  Gene Symbol: BRD7;
  Gene Name: bromodomain containing 7;
  Uniprot ID:  Q9NPI1;
  ENSP ID: ENSP00000378180
MGKKHKKHKSDKHLYEEYVEKPLKLVLKVGGNEVTELSTGSSGHDSSLFEDKNDHDKHKDRKRKKRKKGEKQIPGEEKGRKRRRVKEDKKKRDRDRVENEAEKDLQCHAPVRLDLPPEKPLTSSLAKQEEVEQTPLQEALNQLMRQLQRKDPSAFFSFPVTDFIAPGYSMIIKHPMDFSTMKEKIKNNDYQSIEELKDNFKLMCTNAMIYNKPETIYYKAAKKLLHSGMKILSQERIQSLKQSIDFMADLQKTRKQKDGTDTSQSGEDGGCWQREREDSGDAEAHAFKSPSKENKKKDKDMLEDKFKSNNLEREQEQLDRIVKESGGKLTRRLVNSQCEFERRKPDGTTTLGLLHPVDPIVGEPGYCPVRLGMTTGRLQSGVNTLQGFKEDKRNKVTPVLYLNYGPYSSYAPHYDSTFANISKDDSDLIYSTYGEDSDLPSDFSIHEFLATCQDYPYVMADSLLDVLTKGGHSRTLQEMEMSLPEDEGHTRTLDTAKEMEITEVEPPGRLDSSTQDRLIALKAVTNFGVPVEVFDSEEAEIFQKKLDETTRLLRELQEAQNERLSTRPPPNMICLLGPSYREMHLAEQVTNNLKELAQQVTPGDIVSTYGVRKAMGISIPSPVMENNFVDLTEDTEEPKKTDVAECGPGGS

SEQ ID NO: 9845 - protein, 652 aa, Homo sapiens
  Payload ID: 1984;
  Gene Symbol: BRD7;
  Gene Name: bromodomain containing 7;
  Uniprot ID:  Q9NPI1;
  ENSP ID: ENSP00000378181
MGKKHKKHKSDKHLYEEYVEKPLKLVLKVGGNEVTELSTGSSGHDSSLFEDKNDHDKHKDRKRKKRKKGEKQIPGEEKGRKRRRVKEDKKKRDRDRVENEAEKDLQCHAPVRLDLPPEKPLTSSLAKQEEVEQTPLQEALNQLMRQLQRKDPSAFFSFPVTDFIAPGYSMIIKHPMDFSTMKEKIKNNDYQSIEELKDNFKLMCTNAMIYNKPETIYYKAAKKLLHSGMKILSQERIQSLKQSIDFMADLQKTRKQKDGTDTSQSGEDGGCWQREREDSGDAEAHAFKSPSKENKKKDKDMLEDKFKSNNLEREQEQLDRIVKESGGKLTRRLVNSQCEFERRKPDGTTTLGLLHPVDPIVGEPGYCPVRLGMTTGRLQSGVNTLQGFKEDKRNKVTPVLYLNYGPYSSYAPHYDSTFANISKDDSDLIYSTYGEDSDLPSDFSIHEFLATCQDYPYVMADSLLDVLTKGGHSRTLQEMEMSLPEDEGHTRTLDTAKEMEQITEVEPPGRLDSSTQDRLIALKAVTNFGVPVEVFDSEEAEIFQKKLDETTRLLRELQEAQNERLSTRPPPNMICLLGPSYREMHLAEQVTNNLKELAQQVTPGDIVSTYGVRKAMGISIPSPVMENNFVDLTEDTEEPKKTDVAECGPGGS

SEQ ID NO: 9846 - protein, 32 aa, Homo sapiens
  Payload ID: 1984;
  Gene Symbol: BRD7;
  Gene Name: bromodomain containing 7;
  ENSP ID: ENSP00000458430
PSPVMENNFVDLTEDTEEPKKTDVAECGPGGS

SEQ ID NO: 9847 - protein, 109 aa, Homo sapiens
  Payload ID: 1984;
  Gene Symbol: BRD7;
  Gene Name: bromodomain containing 7;
  ENSP ID: ENSP00000461556
QKKLDETTRLLRELQEAQNERLSTRPPPNMICLLGPSYREMHLAEQVTNNLKELAQQVTPGDIVSTYGVRKAMGISIPSPVMENNFVDLTEDTEEPKKTDVAECGPGGS

SEQ ID NO: 9848 - protein, 951 aa, Homo sapiens
  Payload ID: 1985;
  Gene Symbol: BRD8;
  Gene Name: bromodomain containing 8;
  Uniprot ID:  Q9H0E9;
  ENSP ID: ENSP00000230901
MATGTGKHKLLSTGPTEPWSIREKLCLASSVMRSGDQNWVSVSRAIKPFAEPGRPPDWFSQKHCASQYSELLETTETPKRKRGEKGEVVETVEDVIVRKLTAERVEELKKVIKETQERYRRLKRDAELIQAGHMDSRLDELCNDIATKKKLEEEEAEVKRKATDAAYQARQAVKTPPRRLPTVMVRSPIDSASPGGDYPLGDLTPTTMEEATSGVTPGTLPSTPVTSFPGIPDTLPPGSAPLEAPMTPVTDDSPQKKMLGQKATPPPSPLLSELLKKGSLLPTSPRLVNESEMAVASGHLNSTGVLLEVGGVLPMIHGGEIQQTPNTVAASPAASGAPTLSRLLEAGPTQFTTPLASFTTVASEPPVKLVPPPVESVSQATIVMMPALPAPSSAPAVSTTESVAPVSQPDNCVPMEAVGDPHTVTVSMDSSEISMIINSIKEECFRSGVAEAPVGSKAPSIDGKEELDLAEKMDIAVSYTGEELDFETVGDIIAIIEDKVDDHPEVLDVAAVEAALSFCEENDDPQSLPGPWEHPIQQERDKPVPLPAPEMTVKQERLDFEETENKGIHELVDIREPSAEIKVEPAEPEPVISGAEIVAGVVPATSMEPPELRSQDLDEELGSTAAGEIVEADVAIGKGDETPLTNVKTEASPESMLSPSHGSNPIEDPLEAETQHKFEMSDSLKEESGTIFGSQIKDAPGEDEEEDGVSEAASLEEPKEEDQGEGYLSEMDNEPPVSESDDGFSIHNATLQSHTLADSIPSSPASSQFSVCSEDQEAIQAQKIWKKAIMLVWRAAANHRYANVFLQPVTDDIAPGYHSIVQRPMDLSTIKKNIENGLIRSTAEFQRDIMLMFQNAVMYNSSDHDVYHMAVEMQRDVLEQIQQFLATQLIMQTSESGISAKSLRGRDSTRKQDASEKDSVPMGSPAFLLSLFDGGTRGRRCAIEADMKMKK

SEQ ID NO: 9849 - protein, 1235 aa, Homo sapiens
  Payload ID: 1985;
  Gene Symbol: BRD8;
  Gene Name: bromodomain containing 8;
  Uniprot ID:  Q9H0E9;
  ENSP ID: ENSP00000254900
MATGTGKHKLLSTGPTEPWSIREKLCLASSVMRSGDQNWVSVSRAIKPFAEPGRPPDWFSQKHCASQYSELLETTETPKRKRGEKGEVVETVEDVIVRKLTAERVEELKKVIKETQERYRRLKRDAELIQAGHMDSRLDELCNDIATKKKLEEEEAEVKRKATDAAYQARQAVKTPPRRLPTVMVRSPIDSASPGGDYPLGDLTPTTMEEATSGVNESEMAVASGHLNSTGVLLEVGGVLPMIHGGEIQQTPNTVAASPAASGAPTLSRLLEAGPTQFTTPLASFTTVASEPPVKLVPPPVESVSQATIVMMPALPAPSSAPAVSTTESVAPVSQPDNCVPMEAVGDPHTVTVSMDSSEISMIINSIKEECFRSGVAEAPVGSKAPSIDGKEELDLAEKMDIAVSYTGEELDFETVGDIIAIIEDKVDDHPEVLDVAAVEAALSFCEENDDPQSLPGPWEHPIQQERDKPVPLPAPEMTVKQERLDFEETENKGIHELVDIREPSAEIKVEPAEPEPVISGAEIVAGVVPATSMEPPELRSQDLDEELGSTAAGEIVEADVAIGKGDETPLTNVKTEASPESMLSPSHGSNPIEDPLEAETQHKFEMSDSLKEESGTIFGSQIKDAPGEDEEEDGVSEAASLEEPKEEDQGEGYLSEMDNEPPVSESDDGFSIHNATLQSHTLADSIPSSPASSQFSVCSEDQEAIQAQKIWKKAIMLVWRAAANHRYANVFLQPVTDDIAPGYHSIVQRPMDLSTIKKNIENGLIRSTAEFQRDIMLMFQNAVMYNSSDHDVYHMAVEMQRDVLEQIQQFLATQLIMQTSESGISAKSLRGRDSTRKQDASEKDSVPMGSPAFLLSLFMGHEWVWLDSEQDHPNDSELSNDCRSLFSSWDSSLDLDVGNWRETEDPEAEELEESSPEREPSELLVGDGGSEESQEAARKASHQNLLHFLSEVAYLMEPLCISSNESSEGCCPPSGTRQEGREIKASEGERELCRETEELSAKGDPLVAEKPLGENGKPEVASAPSVICTVQGLLTESEEGEAQQESKGEDQGEVYVSEMEDQPPSGECDDAFNIKETPLVDTLFSHATSSKLTDLSQDDPVQDHLLFKKTLLPVWKMIASHRFSSPFLKPVSERQAPGYKDVVKRPMDLTSLKRNLSKGRIRTMAQFLRDLMLMFQNAVMYNDSDHHVYHMAVEMRQEVLEQIQVLNIWLDKRKGSSSLEGEPANPVDDGKPVF

SEQ ID NO: 9850 - protein, 878 aa, Homo sapiens
  Payload ID: 1985;
  Gene Symbol: BRD8;
  Gene Name: bromodomain containing 8;
  ENSP ID: ENSP00000384845
MATGTGKHKLLSTGPTEPWSIREKLCLASSVMRSGDQNWVSVSRAIKPFAEPGRPPDWFSQKHCASQYSELLETTETPKRKRGEKGEVVETVEDVIVRKLTAERVEELKKVIKETQERYRRLKRDAELIQAGHMDSRLDELCNDIATKKKLEEEEAEVKRKATDAAYQARQAVKTPPRRLPTVMVRSPIDSASPGGDYPLGDLTPTTMEEATSGVNESEMAVASGHLNSTGVLLEVGGVLPMIHGGEIQQTPNTVAASPAASGAPTLSRLLEAGPTQFTTPLASFTTVASEPPVKLVPPPVESVSQATIVMMPALPAPSSAPAVSTTESVAPVSQPDNCVPMEAVGDPHTVTVSMDSSEISMIINSIKEECFRSGVAEAPVGSKAPSIDGKEELDLAEKMDIAVSYTGEELDFETVGDIIAIIEDKVDDHPEVLDVAAVEAALSFCEENDDPQSLPGPWEHPIQQERDKPVPLPAPEMTVKQERLDFEETENKGIHELVDIREPSAEIKVEPAEPEPVISGAEIVAGVVPATSMEPPELRSQDLDEELGSTAAGEIVEADVAIGKGDETPLTNVKTEASPESMLSPSHGSNPIEDPLEAETQHKFEMSDSLKEESGTIFGSQIKDAPGEDEEEDGVSEAASLEEPKEEDQGEGYLSEMDNEPPVSESDDGFSIHNATLQSHTLADSIPSSPASSQFSVCSEDQEAIQAQKIWKKAIMLVWRAAANHRYANVFLQPVTDDIAPGYHSIVQRPMDLSTIKKNIENGLIRSTAEFQRDIMLMFQNAVMYNSSDHDVYHMAVEMQRDVLEQIQQFLATQLIMQTSESGISAKSLRGRDSTRKQDASEKDSVPMGSPAFLLSLFDGGTRGRRCAIEADMKMKK

SEQ ID NO: 9851 - protein, 336 aa, Homo sapiens
  Payload ID: 1985;
  Gene Symbol: BRD8;
  Gene Name: bromodomain containing 8;
  ENSP ID: ENSP00000392646
DLDVGNWRETEDPEAEELEESSPEREPSELLVGDGGSEESQEAARKASHQNLLHFLSEVAYLMEPLCISSNESSEGCCPPSGTRQEGREIKASEGERELCRETEELSAKGDPLVAEKPLGENGKPEVASAPSVICTVQGLLTESEEGEAQQESKGEDQGEVYVSEMEDQPPSGECDDAFNIKETPLVDTLFSHATSSKLTDLSQDDPVQDHLLFKKTLLPVWKMIASHRFSSPFLKPVSERQAPGYKDVVKRPMDLTSLKRNLSKGRIRTMAQFLRDLMLMFQNAVMYNDSDHHVYHMAVEMRQEVLEQIQVLYADTCSLWNLDFRTPMRIKVISR

SEQ ID NO: 9852 - protein, 866 aa, Homo sapiens
  Payload ID: 1985;
  Gene Symbol: BRD8;
  Gene Name: bromodomain containing 8;
  Uniprot ID:  Q9H0E9;
  ENSP ID: ENSP00000394330
MATGTGKHKLLSTGPTEPWSIREKLCLASSVMRSGDQNWVSVSRAIKPFAEPGRPPDWFSQKHCASQYSELLETTETPKRKRGEKGEVVETVEDVIVRKLTAERVEELKKVIKETQERYRRLKRDAELIQAGHMDSRLDELCNDIATKKKLEEEEAEVKRKATDAAYQARQAVKTPPRRLPTVMVRSPIDSASPGGDYPLGDLTPTTMEEATSGVTPGTLPSTPVTSFPGIPDTLPPGSAPLEAPMTPVTDDSPQKKMLGQKATPPPSPLLSELLKKGSLLPTSPRLVNESEMAVASGHLNSTGVLLEVGGVLPMIHGGEIQQTPNTVAASPAASVSQPDNCVPMEAVGDPHTVTVSMDSSEISMIINSIKEECFRSGVAEAPVGSKAPSIDGKEELDLAEKMDIAVSYTGEELDFETVGDIIAIIEDKVDDHPEVLDVAAVEAALSFCEENDDPQSLPGPWEHPIQQERDKPVPLPAPEMTVKQERLDFEETENKGIHELVDIREPSAEIKVEPAEPEPVISGAEIVAGVVPATSMEPPELRSQDLDEELGSTAAGEIVEADVAIGKGDETPLTNVKTEASPESMLSPSHGSNPIEDPLEAETQHKFEMSDSLKEESGTIFGSQIKDAPGEDEEEDGVSEAASLEEPKEEDQGEGYLSEMDNEPPVSESDDGFSIHNATLQSHTLADSIPSSPASSQFSVCSEDQEAIQAQKIWKKAIMLVWRAAANHRYANVFLQPVTDDIAPGYHSIVQRPMDLSTIKKNIENGLIRSTAEFQRDIMLMFQNAVMYNSSDHDVYHMAVEMQRDVLEQIQQFLATQLIMQTSESGISAKSLRGRDSTRKQDASEKDGGTRGRRCAIEADMKMKK

SEQ ID NO: 9853 - protein, 67 aa, Homo sapiens
  Payload ID: 1985;
  Gene Symbol: BRD8;
  Gene Name: bromodomain containing 8;
  ENSP ID: ENSP00000396487
MATGTGKHKLLSTGPTEPWSIREKLCLASSVMRSGDQNWLECSGAIWAHCSLLTSWAQGILLPQLPK

SEQ ID NO: 9854 - protein, 892 aa, Homo sapiens
  Payload ID: 1985;
  Gene Symbol: BRD8;
  Gene Name: bromodomain containing 8;
  ENSP ID: ENSP00000398067
GKHKLLSTGPTEPWSIREKLCLASSVMRSGDQNWVSVSRAIKPFAEPGRPPDWFSQKHCASQYSELLETTETPKRKRGEKGEVVETVEDVIVRKLTAERVEELKKVIKETQERYRRLKRDAELIQAGHMDSRLDELCNDIATKKKLEEEEAEVKRKATDAAYQARQAVKTPPRRLPTVMVRSPIDSASPGGDYPLGDLTPTTMEEATSGVTPGTLPSTPVTSFPGIPDTLPPGSAPLEAPMTPVTDDSPQKKMLGQKATPPPSPLLSELLKKGSLLPTSPRLVNESEMAVASGHLNSTGVLLEVGGVLPMIHGGEIQQTPNTVAASPAASESVSQATIVMMPALPAPSSAPAVSTTESVAPVSQPDNCVPMEAVGDPHTVTVSMDSSEISMIINSIKEECFRSGVAEAPVGSKAPSIDGKEELDLAEKMDIAVSYTGEELDFETVGDIIAIIEDKVDDHPEVLDVAAVEAALSFCEENDDPQSLPGPWEHPIQQERDKPVPLPAPEMTVKQERLDFEETENKGIHELVDIREPSAEIKVEPAEPEPVISGAEIVAGVVPATSMEPPELRSQDLDEELGSTAAGEIVEADVAIGKGDETPLTNVKTEASPESMLSPSHGSNPIEDPLEAETQHKFEMSDSLKEESGTIFGSQIKDAPGEDEEEDGVSEAASLEEPKEEDQGEGYLSEMDNEPPVSESDDGFSIHNATLQSHTLADSIPSSPASSQFSVCSEDQEAIQAQKIWKKAIMLVWRAAANHRYANVFLQPVTDDIAPGYHSIVQRPMDLSTIKKNIENGLIRSTAEFQRDIMLMFQNAVMYNSSDHDVYHMAVEMQRDVLEQIQQFLATQLIMQTSESGISAKSLRGRDSTRKQDASEKDGGTRGRRCAIEADMKMKK

SEQ ID NO: 9855 - protein, 857 aa, Homo sapiens
  Payload ID: 1985;
  Gene Symbol: BRD8;
  Gene Name: bromodomain containing 8;
  ENSP ID: ENSP00000398084
  MOD_RES (1)..(1): Any amino acid
XHKLLSTGPTEPWSIREKLCLASSVMRSGDQNWVSVSRAIKPFAEPGRPPDWFSQKHCASQYSELLETTETPKRKRGEKGEVVETVEDVIVRKLTAERVEELKKVIKETQERYRRLKRDAELIQAGHMDSRLDELCNDIATKKKLEEEEAEVKRKATDAAYQAVKTPPRRLPTVMVRSPIDSASPGGDYPLGDLTPTTMEEATSGVTPGTLPSTPVTSFPGIPDTLPPGSAPLEAPMTPVTDDSPQKKMLGQKATPPPSPLLSELLKKGSLLPTSPRLVNESEMAVASGHLNSTGVLLEVGGVLPMIHGGEIQQTPNTVAASPAASVSQPDNCVPMEAVGDPHTVTVSMDSSEISMIINSIKEECFRSGVAEAPVGSKAPSIDGKEELDLAEKMDIAVSYTGEELDFETVGDIIAIIEDKVDDHPEVLDVAAVEAALSFCEENDDPQSLPGPWEHPIQQERDKPVPLPAPEMTVKQERLDFEETENKGIHELVDIREPSAEIKVEPAEPEPVISGAEIVAGVVPATSMEPPELRSQDLDEELGSTAAGEIVEADVAIGKGDETPLTNVKTEASPESMLSPSHGSNPIEDPLEAETQHKFEMSDSLKEESGTIFGSQIKDAPGEDEEEDGVSEAASLEEPKEEDQGEGYLSEMDNEPPVSESDDGFSIHNATLQSHTLADSIPSSPASSQFSVCSEDQEAIQAQKIWKKAIMLVWRAAANHRYANVFLQPVTDDIAPGYHSIVQRPMDLSTIKKNIENGLIRSTAEFQRDIMLMFQNAVMYNSSDHDVYHMAVEMQRDVLEQIQQFLATQLIMQTSESGISAKSLRGRDSTRKQDASEKDGGTRGRRCAIEADMKMKK

SEQ ID NO: 9856 - protein, 79 aa, Homo sapiens
  Payload ID: 1985;
  Gene Symbol: BRD8;
  Gene Name: bromodomain containing 8;
  ENSP ID: ENSP00000398676
MATGTGKHKLLSTGPTEPWSIREKLCLASSVMRSGDQNWVSVSRAIKPFAEPGRPPDWFSQKHCASQYSELLETTETPK

SEQ ID NO: 9857 - protein, 861 aa, Homo sapiens
  Payload ID: 1985;
  Gene Symbol: BRD8;
  Gene Name: bromodomain containing 8;
  ENSP ID: ENSP00000398873
GKHKLLSTGPTEPWSIREKLCLASSVMRSGDQNWVSVSRAIKPFAEPGRPPDWFSQKHCASQYSELLETTETPKRKRGEKGEVVETVEDVIVRKLTAERVEELKKVIKETQERYRRLKRDAELIQAGHMDSRLDELCNDIATKKKLEEEEAEVKRKATDAAYQARQAVKTPPRRLPTVMVRSPIDSASPGGDYPLGDLTPTTMEEATSGVTPGTLPSTPVTSFPGIPDTLPPGSAPLEAPMTPVTDDSPQKKMLGQKATPPPSPLLSELLKKGSLLPTSPRLVNESEMAVASGHLNSTGVLLEVGGVLPMIHGGEIQQTPNTVAASPAASVSQPDNCVPMEAVGDPHTVTVSMDSSEISMIINSIKEECFRSGVAEAPVGSKAPSIDGKEELDLAEKMDIAVSYTGEELDFETVGDIIAIIEDKVDDHPEVLDVAAVEAALSFCEENDDPQSLPGPWEHPIQQERDKPVPLPAPEMTVKQERLDFEETENKGIHELVDIREPSAEIKVEPAEPEPVISGAEIVAGVVPATSMEPPELRSQDLDEELGSTAAGEIVEADVAIGKGDETPLTNVKTEASPESMLSPSHGSNPIEDPLEAETQHKFEMSDSLKEESGTIFGSQIKDAPGEDEEEDGVSEAASLEEPKEEDQGEGYLSEMDNEPPVSESDDGFSIHNATLQSHTLADSIPSSPASSQFSVCSEDQEAIQAQKIWKKAIMLVWRAAANHRYANVFLQPVTDDIAPGYHSIVQRPMDLSTIKKNIENGLIRSTAEFQRDIMLMFQNAVMYNSSDHDVYHMAVEMQRDVLEQIQQFLATQLIMQTSESGISAKSLRGRDSTRKQDASEKDGGTRGRRCAIEADMKMKK

SEQ ID NO: 9858 - protein, 187 aa, Homo sapiens
  Payload ID: 1985;
  Gene Symbol: BRD8;
  Gene Name: bromodomain containing 8;
  ENSP ID: ENSP00000407129
KETQERYRRLKRDAELIQAGHMDSRLDELCNDIATKKKLEEEEAEVKRKATDAAYQARQAVKTPPRRLPTVMVRSPIDSASPGGDYPLGDLTPTTMEEATSGVNESEMAVASGHLNSTGVLLEVGGVLPMIHGGEIQQTPNTVAASPAASVSQPDNCVPMEAVGDPHTVTVSMDSSEISMIINSIKE

SEQ ID NO: 9859 - protein, 122 aa, Homo sapiens
  Payload ID: 1985;
  Gene Symbol: BRD8;
  Gene Name: bromodomain containing 8;
  ENSP ID: ENSP00000407414
MATGTGKHKLLSTGPTEPWSIREKLCLASSVMRSGDQNWGWSYSVTQAGVQWRDLGSLQPLDFLGSRDPPTSAAQVAGTTGRRVSVSRAIKPFAEPGRPPDWFSQKHCASQYSELLETTETP

SEQ ID NO: 9860 - protein, 39 aa, Homo sapiens
  Payload ID: 1985;
  Gene Symbol: BRD8;
  Gene Name: bromodomain containing 8;
  ENSP ID: ENSP00000414625
MATGTGKHKLLSTGPTEPWSIREKLCLASSVMRSGDQNW

SEQ ID NO: 9861 - protein, 36 aa, Homo sapiens
  Payload ID: 1985;
  Gene Symbol: BRD8;
  Gene Name: bromodomain containing 8;
  ENSP ID: ENSP00000420884
  MOD_RES (1)..(1): Any amino acid
XISAKSLRGRDSTRKQDASEKDSVPMGSPAFLLSLF

SEQ ID NO: 9862 - protein, 195 aa, Homo sapiens
  Payload ID: 1985;
  Gene Symbol: BRD8;
  Gene Name: bromodomain containing 8;
  ENSP ID: ENSP00000426385
GSKAPSIDGKEELDLAEKMDIAVSYTGEELDFETVGDIIAIIEDKASPESMLSPSHGSNPIEDPLEAETQHKFEMSDSLKEESGTIFGSQIKDAPGEDEEEDGVSEAASLEEPKEEDQGEGYLSEMDNEPPVSESDDGFSIHNATLQSHTLADSIPSSPASSQFSVCSEDQEAIQAQKIWKKAIMLVWRAAANHR

SEQ ID NO: 9863 - protein, 292 aa, Homo sapiens
  Payload ID: 1985;
  Gene Symbol: BRD8;
  Gene Name: bromodomain containing 8;
  ENSP ID: ENSP00000427126
HTVTVSMDSSEISMIINSIKEECFRSGVAEAPVGSKAPSIDGKEELDLAEKMDIAVSYTGEELDFETVGDIIAIIEDKVDDHPEVLDVAAVEAALSFCEENDDPQSLPGPWEHPIQQERDKPVPLPAPEMTVKQERLDFEETENKGIHELVDIREPSAEIKVEPAEPEPVISGAEIVAGVVPATSMEPPELRSQDLDEELGSTAAGEIVEADVAIGKGDETPLTNVKTEASPESMLSPSHGSNPIEDPLEAETQHKFEMSDSLKEESGTIFGSQIKGQSYSRARGKKERLLA

SEQ ID NO: 9864 - protein, 48 aa, Homo sapiens
  Payload ID: 1985;
  Gene Symbol: BRD8;
  Gene Name: bromodomain containing 8;
  ENSP ID: ENSP00000427475
MATGTGKHKLLSTGPTEPWSIREKLCLASSVMRSGDQNCIVLPSTRSF

SEQ ID NO: 9865 - protein, 90 aa, Homo sapiens
  Payload ID: 1986;
  Gene Symbol: BRD9;
  Gene Name: bromodomain containing 9;
  ENSP ID: ENSP00000417431
MMTGQTMSERGTKKRKRRRRRSPRRRSIWTMRKEGSERKRRSGSERGSTVTRRERLTTLILGRRWRWSRPQIGQSERAGHSQFSVELKML

SEQ ID NO: 9866 - protein, 90 aa, Homo sapiens; identical to SEQ ID NO: 9865
  Payload ID: 1986;
  Gene Symbol: BRD9;
  Gene Name: bromodomain containing 9;
  ENSP ID: ENSP00000419752

SEQ ID NO: 9867 - protein, 597 aa, Homo sapiens
  Payload ID: 1986;
  Gene Symbol: BRD9;
  Gene Name: bromodomain containing 9;
  Uniprot ID:  Q9H8M2;
  ENSP ID: ENSP00000419765
MGKKHKKHKAEWRSSYEDYADKPLEKPLKLVLKVGGSEVTELSGSGHDSSYYDDRSDHERERHKEKKKKKKKKSEKEKHLDDEERRKRKEEKKRKREREHCDTEGEADDFDPGKKVEVEPPPDRPVRACRTQPAENESTPIQQLLEHFLRQLQRKDPHGFFAFPVTDAIAPGYSMIIKHPMDFGTMKDKIVANEYKSVTEFKADFKLMCDNAMTYNRPDTVYYKLAKKILHAGFKMMSKQAALLGNEDTAVEEPVPEVVPVQVETAKKSKKPSREVISCMFEPEGNACSLTDSTAEEHVLALVEHAADEARDRINRFLPGGKMGYLKRNGDGSLLYSVVNTAEPDADEEETHPVDLSSLSSKLLPGFTTLGFKDERRNKVTFLSSATTALSMQNNSVFGDLKSDEMELLYSAYGDETGVQCALSLQEFVKDAGSYSKKVVDDLLDQITGGDHSRTLFQLKQRRNVPMKPPDEAKVGDTLGDSSSSVLEFMSMKSYPDVSVDISMLSSLGKVKKELDPDDSHLNLDETTKLLQDLHEAQAERGGSRPSSNLSSLSNASERDQHHLGSPSRLSVGEQPDVTHDPYEFLQSPEPAASAKT

SEQ ID NO: 9868 - protein, 544 aa, Homo sapiens
  Payload ID: 1986;
  Gene Symbol: BRD9;
  Gene Name: bromodomain containing 9;
  Uniprot ID:  Q9H8M2;
  ENSP ID: ENSP00000419845
MMTGQTMSERGTKKRKRRRRRSPRRRSIWTMRKEGSERKRRSGSERGSTVTRRERLTTLILGRRWRWSRPQIGQSERAGHSQPKMRAHLFSNSWNTSSASFRDPHGFFAFPVTDAIAPGYSMIIKHPMDFGTMKDKIVANEYKSVTEFKADFKLMCDNAMTYNRPDTVYYKLAKKILHAGFKMMSKQAALLGNEDTAVEEPVPEVVPVQVETAKKSKKPSREVISCMFEPEGNACSLTDSTAEEHVLALVEHAADEARDRINRFLPGGKMGYLKRNGDGSLLYSVVNTAEPDADEEETHPVDLSSLSSKLLPGFTTLGFKDERRNKVTFLSSATTALSMQNNSVFGDLKSDEMELLYSAYGDETGVQCALSLQEFVKDAGSYSKKVVDDLLDQITGGDHSRTLFQLKQRRNVPMKPPDEAKVGDTLGDSSSSVLEFMSMKSYPDVSVDISMLSSLGKVKKELDPDDSHLNLDETTKLLQDLHEAQAERGGSRPSSNLSSLSNASERDQHHLGSPSRLSVGEQPDVTHDPYEFLQSPEPAASAKT

SEQ ID NO: 9869 - protein, 90 aa, Homo sapiens; identical to SEQ ID NO: 9865
  Payload ID: 1986;
  Gene Symbol: BRD9;
  Gene Name: bromodomain containing 9;
  ENSP ID: ENSP00000420080

SEQ ID NO: 9870 - protein, 90 aa, Homo sapiens; identical to SEQ ID NO: 9865
  Payload ID: 1986;
  Gene Symbol: BRD9;
  Gene Name: bromodomain containing 9;
  ENSP ID: ENSP00000420397

SEQ ID NO: 9871 - protein, 90 aa, Homo sapiens; identical to SEQ ID NO: 9865
  Payload ID: 1986;
  Gene Symbol: BRD9;
  Gene Name: bromodomain containing 9;
  ENSP ID: ENSP00000420492

SEQ ID NO: 9872 - protein, 225 aa, Homo sapiens
  Payload ID: 1986;
  Gene Symbol: BRD9;
  Gene Name: bromodomain containing 9;
  ENSP ID: ENSP00000420722
MKGYQSLVFNFFFLKLSAENESTPIQQLLEHFLRQLQRKDPHGFFAFPVTDAIAPGYSMIIKHPMDFGTMKDKIVANEYKSVTEFKADFKLMCDNAMTYNRPDTVYYKLAKKILHAGFKMMSKERLLALKRSMSFMQDMDFSQQAALLGNEDTAVEEPVPEVVPVQVETAKKSKKPSREVISCMFEPEGNACSLTDSTAEEHVLALVEHAADEARDRINRFLPGG

SEQ ID NO: 9873 - protein, 123 aa, Homo sapiens
  Payload ID: 1986;
  Gene Symbol: BRD9;
  Gene Name: bromodomain containing 9;
  ENSP ID: ENSP00000428194
SVFGDLKSDEMELLYSAYGDETGVQCALSLQEFVKDAGSYSKKVVDDLLDQITGGDHSRTLFQLKQRRNVPMKPPDEAKVGDTLGDSSSSVLEFMSMKSYPDVSVDISMLSSLGPAIYHVMLY

SEQ ID NO: 9874 - protein, 174 aa, Homo sapiens
  Payload ID: 1986;
  Gene Symbol: BRD9;
  Gene Name: bromodomain containing 9;
  ENSP ID: ENSP00000429353
  MOD_RES (1)..(1): Any amino acid
XTFLSSATTALSMQNNSVFGDLKSDEMELLYSAYGDETGVQCALSLQEFVKDAGSYSKKVVDDLLDQITGGDHSRTLFQLKQRRNVPMKPPDEAKVGDTLGDSSSSVLEFMSMKSYPDVSVDISMLSSLVSFRACHLSRDAVLKSDRNLVSYYHGVCFVNLQISVLKLMLVSCA

SEQ ID NO: 9875 - protein, 92 aa, Homo sapiens
  Payload ID: 1986;
  Gene Symbol: BRD9;
  Gene Name: bromodomain containing 9;
  ENSP ID: ENSP00000430170
  MOD_RES (1)..(1): Any amino acid
XFVKDAGSYSKKVVDDLLDQITGGDHSRTLFQLKQRRNVPMKPPDEAKVGDTLGDSSSSVLEFMSMKSYPDVSVDISMLSSLGPAIYHVMLY

SEQ ID NO: 9876 - protein, 72 aa, Homo sapiens
  Payload ID: 1986;
  Gene Symbol: BRD9;
  Gene Name: bromodomain containing 9;
  ENSP ID: ENSP00000430510
  MOD_RES (1)..(1): Any amino acid
XSSSVLEFMSMKSYPDVSVDISMLSSLVSFRACHLSRDAVLKSDRNLVSYYHGVCFVNLQISVLKLMLVSCA

SEQ ID NO: 9877 - protein, 2920 aa, Homo sapiens
  Payload ID: 1987;
  Gene Symbol: BPTF;
  Gene Name: bromodomain PHD finger transcription factor;
  Uniprot ID:  Q12830;
  ENSP ID: ENSP00000307208
MRGRRGRPPKQPAAPAAERCAPAPPPPPPPPTSGPIGGLRSRHRGSSRGRWAAAQAEVAPKTRLSSPRGGSSSRRKPPPPPPAPPSTSAPGRGGRGGGGGRTGGGGGGGHLARTTAARRAVNKVVYDDHESEEEEEEEDMVSEEEEEEDGDAEETQDSEDDEEDEMEEDDDDSDYPEEMEDDDDDASYCTESSFRSHSTYSSTPGRRKPRVHRPRSPILEEKDIPPLEFPKSSEDLMVPNEHIMNVIAIYEVLRNFGTVLRLSPFRFEDFCAALVSQEQCTLMAEMHVVLLKAVLREEDTSNTTFGPADLKDSVNSTLYFIDGMTWPEVLRVYCESDKEYHHVLPYQEAEDYPYGPVENKIKVLQFLVDQFLTTNIAREELMSEGVIQYDDHCRVCHKLGDLLCCETCSAVYHLECVKPPLEEVPEDEWQCEVCVAHKVPGVTDCVAEIQKNKPYIRHEPIGYDRSRRKYWFLNRRLIIEEDTENENEKKIWYYSTKVQLAELIDCLDKDYWEAELCKILEEMREEIHRHMDITEDLTNKARGSNKSFLAAANEEILESIRAKKGDIDNVKSPEETEKDKNETENDSKDAEKNREEFEDQSLEKDSDDKTPDDDPEQGKSEVGDFKSEKSNGELSESPGAGKGASGSTRIITRLRNPDSKLSQLKSQQVAAAAHEANKLFKEGKEVLVVNSQGEISRLSTKKEVIMKGNINNYFKLGQEGKYRVYHNQYSTNSFALNKHQHREDHDKRRHLAHKFCLTPAGEFKWNGSVHGSKVLTISTLRLTITQLENNIPSSFLHPNWASHRANWIKAVQMCSKPREFALALAILECAVKPVVMLPIWRESLGHTRLHRMTSIEREEKEKVKKKEKKQEEEETMQQATWVKYTFPVKHQVWKQKGEEYRVTGYGGWSWISKTHVYRFVPKLPGNTNVNYRKSLEGTKNNMDENMDESDKRKCSRSPKKIKIEPDSEKDEVKGSDAAKGADQNEMDISKITEKKDQDVKELLDSDSDKPCKEEPMEVDDDMKTESHVNCQESSQVDVVNVSEGFHLRTSYKKKTKSSKLDGLLERRIKQFTLEEKQRLEKIKLEGGIKGIGKTSTNSSKNLSESPVITKAKEGCQSDSMRQEQSPNANNDQPEDLIQGCSESDSSVLRMSDPSHTTNKLYPKDRVLDDVSIRSPETKCPKQNSIENDIEEKVSDLASRGQEPSKSKTKGNDFFIDDSKLASADDIGTLICKNKKPLIQEESDTIVSSSKSALHSSVPKSTNDRDATPLSRAMDFEGKLGCDSESNSTLENSSDTVSIQDSSEEDMIVQNSNESISEQFRTREQDVEVLEPLKCELVSGESTGNCEDRLPVKGTEANGKKPSQQKKLEERPVNKCSDQIKLKNTTDKKNNENRESEKKGQRTSTFQINGKDNKPKIYLKGECLKEISESRVVSGNVEPKVNNINKIIPENDIKSLTVKESAIRPFINGDVIMEDFNERNSSETKSHLLSSSDAEGNYRDSLETLPSTKESDSTQTTTPSASCPESNSVNQVEDMEIETSEVKKVTSSPITSEEESNLSNDFIDENGLPINKNENVNGESKRKTVITEVTTMTSTVATESKTVIKVEKGDKQTVVSSTENCAKSTVTTTTTTVTKLSTPSTGGSVDIISVKEQSKTVVTTTVTDSLTTTGGTLVTSMTVSKEYSTRDKVKLMKFSRPKKTRSGTALPSYRKFVTKSSKKSIFVLPNDDLKKLARKGGIREVPYFNYNAKPALDIWPYPSPRPTFGITWRYRLQTVKSLAGVSLMLRLLWASLRWDDMAAKAPPGGGTTRTETSETEITTTEIIKRRDVGPYGIRSEYCIRKIICPIGVPETPKETPTPQRKGLRSSALRPKRPETPKQTGPVIIETWVAEEELELWEIRAFAERVEKEKAQAVEQQAKKRLEQQKPTVIATSTTSPTSSTTSTISPAQKVMVAPISGSVTTGTKMVLTTKVGSPATVTFQQNKNFHQTFATWVKQGQSNSGVVQVQQKVLGIIPSSTGTSQQTFTSFQPRTATVTIRPNTSGSGGTTSNSQVITGPQIRPGMTVIRTPLQQSTLGKAIIRTPVMVQPGAPQQVMTQIIRGQPVSTAVSAPNTVSSTPGQKSLTSATSTSNIQSSASQPPRPQQGQVKLTMAQLTQLTQGHGGNQGLTVVIQGQGQTTGQLQLIPQGVTVLPGPGQQLMQAAMPNGTVQRFLFTPLATTATTASTTTTTVSTTAAGTGEQRQSKLSPQMQVHQDKTLPPAQSSSVGPAEAQPQTAQPSAQPQPQTQPQSPAQPEVQTQPEVQTQTTVSSHVPSEAQPTHAQSSKPQVAAQSQPQSNVQGQSPVRVQSPSQTRIRPSTPSQLSPGQQSQVQTTTSQPIPIQPHTSLQIPSQGQPQSQPQVQSSTQTLSSGQTLNQVTVSSPSRPQLQIQQPQPQVIAVPQLQQQVQVLSQIQSQVVAQIQAQQSGVPQQIKLQLPIQIQQSSAVQTHQIQNVVTVQAASVQEQLQRVQQLRDQQQKKKQQQIEIKREHTLQASNQSEIIQKQVVMKHNAVIEHLKQKKSMTPAEREENQRMIVCNQVMKYILDKIDKEEKQAAKKRKREESVEQKRSKQNATKLSALLFKHKEQLRAEILKKRALLDKDLQIEVQEELKRDLKIKKEKDLMQLAQATAVAAPCPPVTPAPPAPPAPPPSPPPPPAVQHTGLLSTPTLPAASQKRKREEEKDSSSKSKKKKMISTTSKETKKDTKLYCICKTPYDESKFYIGCDRCQNWYHGRCVGILQSEAELIDEYVCPQCQSTEDAMTVLTPLTEKDYEGLKRVLRSLQAHKMAWPFLEPVDPNDAPDYYGVIKEPMDLATMEERVQRRYYEKLTEFVADMTKIFDNCRYYNPSDSPFYQCAEVLESFFVQKLKGFKASRSHNNKLQSTAS

SEQ ID NO: 9878 - protein, 3046 aa, Homo sapiens
  Payload ID: 1987;
  Gene Symbol: BPTF;
  Gene Name: bromodomain PHD finger transcription factor;
  Uniprot ID:  Q12830;
  ENSP ID: ENSP00000315454
MRGRRGRPPKQPAAPAAERCAPAPPPPPPPPTSGPIGGLRSRHRGSSRGRWAAAQAEVAPKTRLSSPRGGSSSRRKPPPPPPAPPSTSAPGRGGRGGGGGRTGGGGGGGHLARTTAARRAVNKVVYDDHESEEEEEEEDMVSEEEEEEDGDAEETQDSEDDEEDEMEEDDDDSDYPEEMEDDDDDASYCTESSFRSHSTYSSTPGRRKPRVHRPRSPILEEKDIPPLEFPKSSEDLMVPNEHIMNVIAIYEVLRNFGTVLRLSPFRFEDFCAALVSQEQCTLMAEMHVVLLKAVLREEDTSNTTFGPADLKDSVNSTLYFIDGMTWPEVLRVYCESDKEYHHVLPYQEAEDYPYGPVENKIKVLQFLVDQFLTTNIAREELMSEGVIQYDDHCRVCHKLGDLLCCETCSAVYHLECVKPPLEEVPEDEWQCEVCVAHKVPGVTDCVAEIQKNKPYIRHEPIGYDRSRRKYWFLNRRLIIEEDTENENEKKIWYYSTKVQLAELIDCLDKDYWEAELCKILEEMREEIHRHMDITEDLTNKARGSNKSFLAAANEEILESIRAKKGDIDNVKSPEETEKDKNETENDSKDAEKNREEFEDQSLEKDSDDKTPDDDPEQGKSEEPTEVGDKGNSVSANLGDNTTNATSEETSPSEGRSPVGCLSETPDSSNMAEKKVASELPQDVPEEPNKTCESSNTSATTTSIQPNLENSNSSSELNSSQSESAKAADDPENGERESHTPVSIQEEIVGDFKSEKSNGELSESPGAGKGASGSTRIITRLRNPDSKLSQLKSQQVAAAAHEANKLFKEGKEVLVVNSQGEISRLSTKKEVIMKGNINNYFKLGQEGKYRVYHNQYSTNSFALNKHQHREDHDKRRHLAHKFCLTPAGEFKWNGSVHGSKVLTISTLRLTITQLENNIPSSFLHPNWASHRANWIKAVQMCSKPREFALALAILECAVKPVVMLPIWRESLGHTRLHRMTSIEREEKEKVKKKEKKQEEEETMQQATWVKYTFPVKHQVWKQKGEEYRVTGYGGWSWISKTHVYRFVPKLPGNTNVNYRKSLEGTKNNMDENMDESDKRKCSRSPKKIKIEPDSEKDEVKGSDAAKGADQNEMDISKITEKKDQDVKELLDSDSDKPCKEEPMEVDDDMKTESHVNCQESSQVDVVNVSEGFHLRTSYKKKTKSSKLDGLLERRIKQFTLEEKQRLEKIKLEGGIKGIGKTSTNSSKNLSESPVITKAKEGCQSDSMRQEQSPNANNDQPEDLIQGCSESDSSVLRMSDPSHTTNKLYPKDRVLDDVSIRSPETKCPKQNSIENDIEEKVSDLASRGQEPSKSKTKGNDFFIDDSKLASADDIGTLICKNKKPLIQEESDTIVSSSKSALHSSVPKSTNDRDATPLSRAMDFEGKLGCDSESNSTLENSSDTVSIQDSSEEDMIVQNSNESISEQFRTREQDVEVLEPLKCELVSGESTGNCEDRLPVKGTEANGKKPSQQKKLEERPVNKCSDQIKLKNTTDKKNNENRESEKKGQRTSTFQINGKDNKPKIYLKGECLKEISESRVVSGNVEPKVNNINKIIPENDIKSLTVKESAIRPFINGDVIMEDFNERNSSETKSHLLSSSDAEGNYRDSLETLPSTKESDSTQTTTPSASCPESNSVNQVEDMEIETSEVKKVTSSPITSEEESNLSNDFIDENGLPINKNENVNGESKRKTVITEVTTMTSTVATESKTVIKVEKGDKQTVVSSTENCAKSTVTTTTTTVTKLSTPSTGGSVDIISVKEQSKTVVTTTVTDSLTTTGGTLVTSMTVSKEYSTRDKVKLMKFSRPKKTRSGTALPSYRKFVTKSSKKSIFVLPNDDLKKLARKGGIREVPYFNYNAKPALDIWPYPSPRPTFGITWRYRLQTVKSLAGVSLMLRLLWASLRWDDMAAKAPPGGGTTRTETSETEITTTEIIKRRDVGPYGIRSEYCIRKIICPIGVPETPKETPTPQRKGLRSSALRPKRPETPKQTGPVIIETWVAEEELELWEIRAFAERVEKEKAQAVEQQAKKRLEQQKPTVIATSTTSPTSSTTSTISPAQKVMVAPISGSVTTGTKMVLTTKVGSPATVTFQQNKNFHQTFATWVKQGQSNSGVVQVQQKVLGIIPSSTGTSQQTFTSFQPRTATVTIRPNTSGSGGTTSNSQVITGPQIRPGMTVIRTPLQQSTLGKAIIRTPVMVQPGAPQQVMTQIIRGQPVSTAVSAPNTVSSTPGQKSLTSATSTSNIQSSASQPPRPQQGQVKLTMAQLTQLTQGHGGNQGLTVVIQGQGQTTGQLQLIPQGVTVLPGPGQQLMQAAMPNGTVQRFLFTPLATTATTASTTTTTVSTTAAGTGEQRQSKLSPQMQVHQDKTLPPAQSSSVGPAEAQPQTAQPSAQPQPQTQPQSPAQPEVQTQPEVQTQTTVSSHVPSEAQPTHAQSSKPQVAAQSQPQSNVQGQSPVRVQSPSQTRIRPSTPSQLSPGQQSQVQTTTSQPIPIQPHTSLQIPSQGQPQSQPQVQSSTQTLSSGQTLNQVTVSSPSRPQLQIQQPQPQVIAVPQLQQQVQVLSQIQSQVVAQIQAQQSGVPQQIKLQLPIQIQQSSAVQTHQIQNVVTVQAASVQEQLQRVQQLRDQQQKKKQQQIEIKREHTLQASNQSEIIQKQVVMKHNAVIEHLKQKKSMTPAEREENQRMIVCNQVMKYILDKIDKEEKQAAKKRKREESVEQKRSKQNATKLSALLFKHKEQLRAEILKKRALLDKDLQIEVQEELKRDLKIKKEKDLMQLAQATAVAAPCPPVTPAPPAPPAPPPSPPPPPAVQHTGLLSTPTLPAASQKRKREEEKDSSSKSKKKKMISTTSKETKKDTKLYCICKTPYDESKFYIGCDRCQNWYHGRCVGILQSEAELIDEYVCPQCQSTEDAMTVLTPLTEKDYEGLKRVLRSLQAHKMAWPFLEPVDPNDAPDYYGVIKEPMDLATMEERVQRRYYEKLTEFVADMTKIFDNCRYYNPSDSPFYQCAEVLESFFVQKLKGFKASRSHNNKLQSTAS

SEQ ID NO: 9879 - protein, 810 aa, Homo sapiens
  Payload ID: 1987;
  Gene Symbol: BPTF;
  Gene Name: bromodomain PHD finger transcription factor;
  ENSP ID: ENSP00000334351
MVSEEEEEEDGDAEETQDSEDDEEDEMEEDDDDSDYPEEMEDDDDDASYCTESSFRSHSTYSSTPGRRKPRVHRPRSPILEEKDIPPLEFPKSSEDLMVPNEHIMNVIAIYEVLRNFGTVLRLSPFRFEDFCAALVSQEQCTLMAEMHVVLLKAVLREEDTSNTTFGPADLKDSVNSTLYFIDGMTWPEVLRVYCESDKEYHHVLPYQEAEDYPYGPVENKIKVLQFLVDQFLTTNIAREELMSEGVIQYDDHCRVCHKLGDLLCCETCSAVYHLECVKPPLEEVPEDEWQCEVCVAHKVPGVTDCVAEIQKNKPYIRHEPIGYDRSRRKYWFLNRRLIIEEDTENENEKKIWYYSTKVQLAELIDCLDKDYWEAELCKILEEMREEIHRHMDITEDLTNKARGSNKSFLAAANEEILESIRAKKGDIDNVKSPEETEKDKNETENDSKDAEKNREEFEDQSLEKDSDDKTPDDDPEQGKSEEPTEVGDKGNSVSANLGDNTTNATSEETSPSEGRSPVGCLSETPDSSNMAEKKVASELPQDVPEEPNKTCESSNTSATTTSIQPNLENSNSSSELNSSQSESAKAADDPENGERESHTPVSIQEEIVGDFKSEKSNGELSESPGAGKGASGSTRIITRLRNPDSKLSQLKSQQVAAAAHEANKLFKEGKEVLVVNSQGEISRLSTKKEVIMKGNINNYFKLGQEGKYRVYHNQYSTNSFALNKHQHREDHDKRRHLAHKFCLTPAGEFKWNGSVHGSKVLTISTLRLTITQLETTSLHPFFIPTGHHIGQIGSRQFRCVANPENLHWL

SEQ ID NO: 9880 - protein, 650 aa, Homo sapiens
  Payload ID: 1987;
  Gene Symbol: BPTF;
  Gene Name: bromodomain PHD finger transcription factor;
  ENSP ID: ENSP00000343837
  MOD_RES (1)..(1): Any amino acid
XTVLPGPGQQLMQAAMPNGTVQRFLFTPLATTATTASTTTTTVSTTAAGTGEQRQSKLSPQMQVHQDKTLPPAQSSSVGPAEAQPQTAQPSAQPQPQTQPQSPAQPEVQTQPEVQTQTTVSSHVPSEAQPTHAQSSKPQVAAQSQPQSNVQGQSPVRVQSPSQTRIRPSTPSQLSPGQQSQVQTTTSQPIPIQPHTSLQIPSQGQPQSQPQVVMKHNAVIEHLKQKKSMTPAEREENQRMIVCNQVMKYILDKIDKEEKQAAKKRKREESVEQKRSKQNATKLSALLFKHKEQLRAEILKKRALLDKDLQIEVQEELKRDLKIKKEKDLMQLAQATAVAAPCPPVTPAPPAPPAPPPSPPPPPAVQHTGLLSTPTLPAASQKRKREEEKDSSSKSKKKKMISTTSKETKKDTKLYCICKTPYDESKFYIGCDLCTNWYHGECVGITEKEAKKMDVYICNDCKRAQEGSSEELYCICRTPYDESQFYIGCDRCQNWYHGRCVGILQSEAELIDEYVCPQCQSTEDAMTVLTPLTEKDYEGLKRVLRSLQAHKMAWPFLEPVDPNDAPDYYGVIKEPMDLATMEERVQRRYYEKLTEFVADMTKIFDNCRYYNPSDSPFYQCAEVLESFFVQKLKGFKASRSHNNKLQSTAS

SEQ ID NO: 9881 - protein, 2764 aa, Homo sapiens
  Payload ID: 1987;
  Gene Symbol: BPTF;
  Gene Name: bromodomain PHD finger transcription factor;
  ENSP ID: ENSP00000388405
MVSEEEEEEDGDAEETQDSEDDEEDEMEEDDDDSDYPEEMEDDDDDASYCTESSFRSHSTYSSTPGRRKPRVHRPRSPILEEKDIPPLEFPKSSEDLMVPNEHIMNVIAIYEVLRNFGTVLRLSPFRFEDFCAALVSQEQCTLMAEMHVVLLKAVLREEDTSNTTFGPADLKDSVNSTLYFIDGMTWPEVLRVYCESDKEYHHVLPYQEAEDYPYGPVENKIKVLQFLVDQFLTTNIAREELMSEGVIQYDDHCRVCHKLGDLLCCETCSAVYHLECVKPPLEEVPEDEWQCEVCVAHKVPGVTDCVAEIQKNKPYIRHEPIGYDRSRRKYWFLNRRLIIEEDTENENEKKIWYYSTKVQLAELIDCLDKDYWEAELCKILEEMREEIHRHMDITEDLTNKARGSNKSFLAAANEEILESIRAKKGDIDNVKSPEETEKDKNETENDSKDAEKNREEFEDQSLEKDSDDKTPDDDPEQGKSEEPTEVGDKGNSVSANLGDNTTNATSEETSPSEGRSPVGCLSETPDSSNMAEKKVASELPQDVPEEPNKTCESSNTSATTTSIQPNLENSNSSSELNSSQSESAKAADDPENGERESHTPVSIQEEIVGDFKSEKSNGELSESPGAGKGASGSTRIITRLRNPDSKLSQLKSQQVAAAAHEANKLFKEGKEVLVVNSQGEISRLSTKKEVIMKGNINNYFKLGQEGKYRVYHNQYSTNSFALNKHQHREDHDKRRHLAHKFCLTPAGEFKWNGSVHGSKVLTISTLRLTITQLENNIPSSFLHPNWASHRANWIKAVQMCSKPREFALALAILECAVKPVVMLPIWRESLGHTRLHRMTSIEREEKEKVKKKEKKQEEEETMQQATWVKYTFPVKHQVWKQKGEEYRVTGYGGWSWISKTHVYRFVPKLPGNTNVNYRKSLEGTKNNMDENMDESDKRKCSRSPKKIKIEPDSEKDEVKGSDAAKGADQNEMDISKITEKKDQDVKELLDSDSDKPCKEEPMEVDDDMKTESHVNCQESSQVDVVNVSEGFHLRTSYKKKTKSSKLDGLLERRIKQFTLEEKQRLEKIKLEGGIKGIGKTSTNSSKNLSESPVITKAKEGCQSDSMRQEQSPNANNDQPEDLIQGCSESDSSVLRMSDPSHTTNKLYPKDRVLDDVSIRSPETKCPKQNSIENDIEEKVSDLASRGQEPSKSKTKGNDFFIDDSKLASADDIGTLICKNKKPLIQEESDTIVSSSKSALHSSVPKSTNDRDATPLSRAMDFEGKLGCDSESNSTLENSSDTVSIQDSSEEDMIVQNSNESISEQFRTREQDVEVLEPLKCELVSGESTGNCEDRLPVKGTEANGKKPSQQKKLEERPVNKCSDQIKLKNTTDKKNNENRESEKKGQRTSTFQINGKDNKPKIYLKGECLKEISESRVVSGNVEPKVNNINKIIPENDIKSLTVKESAIRPFINGDVIMEDFNERNSSETKSHLLSSSDAEGNYRDSLETLPSTKESDSTQTTTPSASCPESNSVNQVEDMEIETSEVKKVTSSPITSEEESNLSNDFIDENGLPINKNENVNGESKRKTVITEVTTMTSTVATESKTVIKVEKGDKQTVVSSTENCAKSTVTTTTTTVTKLSTPSTGGSVDIISVKEQSKTVVTTTVTDSLTTTGGTLVTSMTVSKEYSTRDKVKLMKFSRPKKTRSGTALPSYRKFVTKSSKKSIFVLPNDDLKKLARKGGIREVPYFNYNAKPALDIWPYPSPRPTFGITWRYRLQTVKSLAGVSLMLRLLWASLRWDDMAAKAPPGGGTTRTETSETEITTTEIIKRRDVGPYGIRSEYCIRKIICPIGVPETPKETPTPQRKGLRSSALRPKRPETPKQTGPVIIETWVAEEELELWEIRAFAERVEKEKAQAVEQQAKKRLEQQKPTVIATSTTSPTSSTTSTISPAQKVMVAPISGSVTTGTKMVLTTKVGSPATVTFQQNKNFHQTFATWVKQGQSNSGVVQVQQKVLGIIPSSTGTSQQTFTSFQPRTATVTIRPNTSGSGGTTSNSQVITGPQIRPGMTVIRTPLQQSTLGKAIIRTPVMVQPGAPQQVMTQIIRGQPVSTAVSAPNTVSSTPGQKSLTSATSTSNIQSSASQPPRPQQGQVKLTMAQLTQLTQGHGGNQGLTVVIQGQGQTTGQLQLIPQGVTVLPGPGQQLMQAAMPNGTVQRFLFTPLATTATTASTTTTTVSTTAAGTGEQRQSKLSPQMQVHQDKTLPPAQSSSVGPAEAQPQTAQPSAQPQPQTQPQSPAQPEVQTQPEVQTQTTVSSHVPSEAQPTHAQSSKPQVAAQSQPQSNVQGQSPVRVQSPSQTRIRPSTPSQLSPGQQSQVQTTTSQPIPIQPHTSLQIPSQGQPQSQPQVVMKHNAVIEHLKQKKSMTPAEREENQRMIVCNQVMKYILDKIDKEEKQAAKKRKREESVEQKRSKQNATKLSALLFKHKEQLRAEILKKRALLDKDLQIEVQEELKRDLKIKKEKDLMQLAQATAVAAPCPPVTPAPPAPPAPPPSPPPPPAVQHTGLLSTPTLPAASQKRKREEEKDSSSKSKKKKMISTTSKETKKDTKLYCICKTPYDESKFYIGCDRCQNWYHGRCVGILQSEAELIDEYVCPQCQSTEDAMTVLTPLTEKDYEGLKRVLRSLQAHKMAWPFLEPVDPNDAPDYYGVIKEPMDLATMEERVQRRYYEKLTEFVADMTKIFDNCRYYNPSDSPFYQCAEVLESFFVQKLKGFKASRSHNNKLQSTAS

SEQ ID NO: 9882 - protein, 2457 aa, Homo sapiens
  Payload ID: 1987;
  Gene Symbol: BPTF;
  Gene Name: bromodomain PHD finger transcription factor;
  ENSP ID: ENSP00000440854
MRGRRGRPPKQPAAPAAERCAPAPPPPPPPPTSGPIGGLRSRHRGSSRGRWAAAQAEVAPKTRLSSPRGGSSSRRKPPPPPPAPPSTSAPGRGGRGGGGGRTGGGGGGGHLARTTAARRAVNKVVYDDHESEEEEEEEDMVSEEEEEEDGDAEETQDSEDDEEDEMEEDDDDSDYPEEMEDDDDDASYCTESSFRSHSTYSSTPGRRKPRVHRPRSPILEEKDIPPLEFPKSSEDLMVPNEHIMNVIAIYEVLRNFGTVLRLSPFRFEDFCAALVSQEQCTLMAEMHVVLLKAVLREEDTSNTTFGPADLKDSVNSTLYFIDGMTWPEVLRVYCESDKEYHHVLPYQEAEDYPYGPVENKIKVLQFLVDQFLTTNIAREELMSEGVIQYDDHCRVCHKLGDLLCCETCSAVYHLECVKPPLEEVPEDEWQCEVCVAHKVPGVTDCVAEIQKNKPYIRHEPIGYDRSRRKYWFLNRRLIIEEDTENENEKKIWYYSTKVQLAELIDCLDKDYWEAELCKILEEMREEIHRHMDITEDLTNKARGSNKSFLAAANEEILESIRAKKGDIDNVKSPEETEKDKNETENDSKDAEKNREEFEDQSLEKDSDDKTPDDDPEQGKSEEPTEVGDKGNSVSANLGDNTTNATSEETSPSEGRSPVGCLSETPDSSNMAEKKVASELPQDVPVGDFKSEKSNGELSESPGAGKGASGSTRIITRLRNPDSKLSQLKSQQVAAAAHEANKLFKEGKEVLVVNSQGEISRLSTKKEVIMKGNINNYFKLGQEGKYRVYHNQYSTNSFALNKHQHREDHDKRRHLAHKFCLTPAGEFKWNGSVHGSKVLTISTLRLTITQLENNIPSSFLHPNWASHRANWIKAVQMCSKPREFALALAILECAVKPVVMLPIWRESLGHTRLHRMTSIEREEKEKVKKKEKKQEEEETMQQATWVKYTFPVKHQVWKQKGEEYRVTGYGGWSWISKTHVYRFVPKLPGNTNVNYRKSLEGTKNNMDENMDESDKRKCSRSPKKIKIEPDSEKDEVKGSDAAKGADQNEMDISKITEKKDQDVKELLDSDSDKPCKEEPMEVDDDMKTESHVNCQESSQVDVVNVSEGFHLRTSYKKKTKSSKLDGLLERRIKQFTLEEKQRLEKIKLEGGIKGIGKTSTNSSKNLSESPVITKAKEGCQSDSMRQEQSPNANNDQPEDLIQGCSESDSSVLRMSDPSHTTNKLYPKDRVLDDVSIRSPETKCPKQNSIENDIEEKVSDLASRGQEPSKSKTKGNDFFIDDSKLASADDIGTLICKNKKPLIQEESDTIVSSSKSALHSSVPKSTNDRDATPLSRAMDFEGKLGCDSESNSTLENSSDTVSIQDSSEEDMIVQNSNESISEQFRTREQDVEVLEPLKCELVSGESTGNCEDRLPVKGTEANGKKPSQQKKLEERPVNKCSDQIKLKNTTDKKNNENRESEKKGQRTSTFQINGKDNKPKIYLKGECLKEISESRVVSGNVEPKVNNINKIIPENDIKSLTVKESAIRPFINGDVIMEDFNERNSSETKSHLLSSSDAEGNYRDSLETLPSTKESDSTQTTTPSASCPESNSVNQVEDMEIETSEVKKVTSSPITSEEESNLSNDFIDENGLPINKNENVNGESKRKTVITEVTTMTSTVATESKTVIKVEKGDKQTVVSSTENCAKSTVTTTTTTVTKLSTPSTGGSVDIISVKEQSKTVVTTTVTDSLTTTGGTLVTSMTVSKEYSTRDKVKLMKFSRPKKTRSGTALPSYRKFVTKSSKKSIFVLPNDDLKKLARKGGIREVPYFNYNAKPALDIWPYPSPRPTFGITWRYRLQTVKSLAGVSLMLRLLWASLRWDDMAAKAPPGGGTTRTETSETEITTTEIIKRRDVGPYGIRSEYCIRKIICPIGVPETPKETPTPQRKGLRSSALRPKRPETPKQTGPVIIETWVAEEELELWEIRAFAERVEKEKAQAVEQQAKKRLEQQKPTVIATSTTSPTSSTTSTISPAQKVMVAPISGSVTTGTKMVLTTKVGSPATVTFQQNKNFHQTFATWVKQGQSNSGVVQVQQKVLGIIPSSTGTSQQTFTSFQPRTATVTIRPNTSGSGGTTSNSQVITGPQIRPGMTVIRTPLQQSTLGKAIIRTPVMVQPGAPQQVMTQIIRGQPVSTAVSAPNTVSSTPGQKSLTSATSTSNIQSSASQPPRPQQGQVKLTMAQLTQLTQGHGGNQGLTVVIQGQGQTTGQLQLIPQGVTVLPGPGQQLMQAAMPNGTVQRFLFTPLATTATTASTTTTTVSTTAAGTGEQRQSKLSPQMQVHQDKTLPPAQSSSVGPAEAQPQTAQPSAQPQPQTQPQSPAQPEVQTQPEVQTQTTVSSHVPSEAQPTHAQSSKPQVAAQSQPQSNVQGQSPVRVQSPSQTRIRPSTPSQLSPGQQSQVQTTTSQPIPIQPHTSLQIPSQGQPQSQ

SEQ ID NO: 9883 - protein, 137 aa, Homo sapiens
  Payload ID: 1987;
  Gene Symbol: BPTF;
  Gene Name: bromodomain PHD finger transcription factor;
  ENSP ID: ENSP00000443949
  MOD_RES (1)..(1): Any amino acid
XDAEKNREEFEDQSLEKDSDDKTPDDDPEQGKSEEEPNKTCESSNTSATTTSIQPNLENSNSSSELNSSQSESAKAADDPENGERESHTPVSIQEEIVGDFKSEKSNGELSESPGAGKGASGSTRIITRLRNPDSKL

SEQ ID NO: 9884 - protein, 484 aa, Homo sapiens
  Payload ID: 1987;
  Gene Symbol: BPTF;
  Gene Name: bromodomain PHD finger transcription factor;
  ENSP ID: ENSP00000462535
  MOD_RES (1)..(1): Any amino acid
XNIQSSASQPPRPQQGQVKLTMAQLTQLTQGHGGNQGLTVVIQGQGQTTGQLQLIPQGVTVLPGPGQQLMQAAMPNGTVQRFLFTPLATTATTASTTTTTVSTTAAGTGEQRQSKLSPQMQVHQDKTLPPAQSSSVGPAEAQPQTAQPSAQPQPQTQPQSPAQPEVQTQPEVQTQTTVSSHVPSEAQPTHAQSSKPQVAAQSQPQSNVQGQSPVRVQSPSQTRIRPSTPSQLSPGQQSQVQTTTSQPIPIQPHTSLQIPSQGQPQSQPQVVMKHNAVIEHLKQKKSMTPAEREENQRMIVCNQVMKYILDKIDKEEKQAAKKRKREESVEQKRSKQNATKLSALLFKHKEQLRAEILKKRALLDKDLQIEVQEELKRDLKIKKEKDLMQLAQATAVAAPCPPVTPAPPAPPAPPPSPPPPPAVQHTGLLSTPTLPAASQKRKREEEKDSSSKSKKKKMISTTSKETKKDTKLYCICKTPYDESK

SEQ ID NO: 9885 - protein, 64 aa, Homo sapiens
  Payload ID: 1987;
  Gene Symbol: BPTF;
  Gene Name: bromodomain PHD finger transcription factor;
  ENSP ID: ENSP00000462703
  MOD_RES (1)..(1): Any amino acid
XRYYEKLTEFVADMTKIFDNCRYYNPSDSPFYQCAEVLESFFVQKLKGFKASRVNERTWLLLPD

SEQ ID NO: 9886 - protein, 69 aa, Homo sapiens
  Payload ID: 1987;
  Gene Symbol: BPTF;
  Gene Name: bromodomain PHD finger transcription factor;
  ENSP ID: ENSP00000463736
  MOD_RES (1)..(1): Any amino acid
XLTPLTEKDYEGLKRVLRSLQAHKMAWPFLEPVDPNDAPDYYGVIKEPMGLITTNCSLQLLKVQRVNLT

SEQ ID NO: 9887 - protein, 339 aa, Homo sapiens
  Payload ID: 1987;
  Gene Symbol: BPTF;
  Gene Name: bromodomain PHD finger transcription factor;
  ENSP ID: ENSP00000463776
  MOD_RES (1)..(1): Any amino acid
XRKIICPIGVPETPKETPTPQRKGLRSSALRPKRPETPKQTGPVIIETWVAEEELELWEIRAFAERVEKEKAQAVEQQAKKRLEQQKPTVIATSTTSPTSSTTSTISPAQKVMVAPISGSVTTGTKMVLTTKVGSPATVTFQQNKNFHQTFATWVKQGQSNSATSTAATSATTIASTGQTFQITGNPVTMAGKVITKLPLPANSKIVAVNVPATQGGVVQVQQKVLGIIPSSTGTSQQTFTSFQPRTATVTIRPNTSGSGGTTSNSQVITGPQIRPGMTVIRTPLQQSTLGKAIIRTPVMVQPGAPQQVMTQIIRGQPVSTAVSAPNTVSSTPGQKSLT

SEQ ID NO: 9888 - protein, 420 aa, Homo sapiens
  Payload ID: 1987;
  Gene Symbol: BPTF;
  Gene Name: bromodomain PHD finger transcription factor;
  ENSP ID: ENSP00000463845
  MOD_RES (1)..(1): Any amino acid
XHLKQKKSMTPAEREENQRMIVCNQVMKYILDKIDKEEKQAAKKRKREESVEQKRSKQNATKLSALLFKHKEQLRAEILKKRALLDKDLQIEVQEELKRDLKIKKEKDLMQLAQATAVAAPCPPVTPAPPAPPAPPPSPPPPPAVQHTGLLSTPTLPAASQKRKREEEKDSSSKSKKKKMISTTSKETKKDTKLYCICKTPYDESKFYIGCDLCTNWYHGECVGITEKEAKKMDVYICNDCKRAQEGSSEELYCICRTPYDESQFYIGCDRCQNWYHGRCVGILQSEAELIDEYVCPQCQSTEDAMTVLTPLTEKDYEGLKRVLRSLQAHKMAWPFLEPVDPNDAPDYYGVIKEPMDLATMEERVQRRYYEKLTEFVADMTKIFDNCRYYNPSDSPFYQCAEVLESFFVQKLKGFKASRL

SEQ ID NO: 9889 - protein, 947 aa, Homo sapiens
  Payload ID: 1988;
  Gene Symbol: BRDT;
  Gene Name: bromodomain, testis-specific;
  Uniprot ID:  Q58F21;
  ENSP ID: ENSP00000354568
MSLPSRQTAIIVNPPPPEYINTKKNGRLTNQLQYLQKVVLKDLWKHSFSWPFQRPVDAVKLQLPDYYTIIKNPMDLNTIKKRLENKYYAKASECIEDFNTMFSNCYLYNKPGDDIVLMAQALEKLFMQKLSQMPQEEQVVGVKERIKKGTQQNIAVSSAKEKSSPSATEKVFKQQEIPSVFPKTSISPLNVVQGASVNSSSQTAAQVTKGVKRKADTTTPATSAVKASSEFSPTFTEKSVALPPIKENMPKNVLPDSQQQYNVVKTVKVTEQLRHCSEILKEMLAKKHFSYAWPFYNPVDVNALGLHNYYDVVKNPMDLGTIKEKMDNQEYKDAYKFAADVRLMFMNCYKYNPPDHEVVTMARMLQDVFETHFSKIPIEPVESMPLCYIKTDITETTGRENTNEASSEGNSSDDSEDERVKRLAKLQEQLKAVHQQLQVLSQVPFRKLNKKKEKSKKEKKKEKVNNSNENPRKMCEQMRLKEKSKRNQPKKRKQQFIGLKSEDEDNAKPMNYDEKRQLSLNINKLPGDKLGRVVHIIQSREPSLSNSNPDEIEIDFETLKASTLRELEKYVSACLRKRPLKPPAKKIMMSKEELHSQKKQELEKRLLDVNNQLNSRKRQTKSDKTQPSKAVENVSRLSESSSSSSSSSESESSSSDLSSSDSSDSESEMFPKFTEVKPNDSPSKENVKKMKNECIPPEGRTGVTQIGYCVQDTTSANTTLVHQTTPSHVMPPNHHQLAFNYQELEHLQTVKNISPLQILPPSGDSEQLSNGITVMHPSGDSDTTMLESECQAPVQKDIKIKNADSWKSLGKPVKPSGVMKSSDELFNQFRKAAIEKEVKARTQELIRKHLEQNTKELKASQENQRDLGNGLTVESFSNKIQNKCSGEEQKEHQQSSEAQDKSKLWLLKDRDLARQKEQERRRREAMVGTIDMTLQSDIMTMFENNFD

SEQ ID NO: 9890 - protein, 874 aa, Homo sapiens
  Payload ID: 1988;
  Gene Symbol: BRDT;
  Gene Name: bromodomain, testis-specific;
  Uniprot ID:  Q58F21;
  ENSP ID: ENSP00000359416
MDLNTIKKRLENKYYAKASECIEDFNTMFSNCYLYNKPGDDIVLMAQALEKLFMQKLSQMPQEEQVVGVKERIKKGTQQNIAVSSAKEKSSPSATEKVFKQQEIPSVFPKTSISPLNVVQGASVNSSSQTAAQVTKGVKRKADTTTPATSAVKASSEFSPTFTEKSVALPPIKENMPKNVLPDSQQQYNVVKTVKVTEQLRHCSEILKEMLAKKHFSYAWPFYNPVDVNALGLHNYYDVVKNPMDLGTIKEKMDNQEYKDAYKFAADVRLMFMNCYKYNPPDHEVVTMARMLQDVFETHFSKIPIEPVESMPLCYIKTDITETTGRENTNEASSEGNSSDDSEDERVKRLAKLQEQLKAVHQQLQVLSQVPFRKLNKKKEKSKKEKKKEKVNNSNENPRKMCEQMRLKEKSKRNQPKKRKQQFIGLKSEDEDNAKPMNYDEKRQLSLNINKLPGDKLGRVVHIIQSREPSLSNSNPDEIEIDFETLKASTLRELEKYVSACLRKRPLKPPAKKIMMSKEELHSQKKQELEKRLLDVNNQLNSRKRQTKSDKTQPSKAVENVSRLSESSSSSSSSSESESSSSDLSSSDSSDSESEMFPKFTEVKPNDSPSKENVKKMKNECIPPEGRTGVTQIGYCVQDTTSANTTLVHQTTPSHVMPPNHHQLAFNYQELEHLQTVKNISPLQILPPSGDSEQLSNGITVMHPSGDSDTTMLESECQAPVQKDIKIKNADSWKSLGKPVKPSGVMKSSDELFNQFRKAAIEKEVKARTQELIRKHLEQNTKELKASQENQRDLGNGLTVESFSNKIQNKCSGEEQKEHQQSSEAQDKSKLWLLKDRDLARQKEQERRRREAMVGTIDMTLQSDIMTMFENNFD

SEQ ID NO: 9891 - protein, 901 aa, Homo sapiens
  Payload ID: 1988;
  Gene Symbol: BRDT;
  Gene Name: bromodomain, testis-specific;
  Uniprot ID:  Q58F21;
  ENSP ID: ENSP00000378038
MSLPSRQTAIIVNPPPPEYINTKKNGRLTNQLQYLQKVVLKDLWKHSFSWPFQRPVDAVKLQLPPGDDIVLMAQALEKLFMQKLSQMPQEEQVVGVKERIKKGTQQNIAVSSAKEKSSPSATEKVFKQQEIPSVFPKTSISPLNVVQGASVNSSSQTAAQVTKGVKRKADTTTPATSAVKASSEFSPTFTEKSVALPPIKENMPKNVLPDSQQQYNVVKTVKVTEQLRHCSEILKEMLAKKHFSYAWPFYNPVDVNALGLHNYYDVVKNPMDLGTIKEKMDNQEYKDAYKFAADVRLMFMNCYKYNPPDHEVVTMARMLQDVFETHFSKIPIEPVESMPLCYIKTDITETTGRENTNEASSEGNSSDDSEDERVKRLAKLQEQLKAVHQQLQVLSQVPFRKLNKKKEKSKKEKKKEKVNNSNENPRKMCEQMRLKEKSKRNQPKKRKQQFIGLKSEDEDNAKPMNYDEKRQLSLNINKLPGDKLGRVVHIIQSREPSLSNSNPDEIEIDFETLKASTLRELEKYVSACLRKRPLKPPAKKIMMSKEELHSQKKQELEKRLLDVNNQLNSRKRQTKSDKTQPSKAVENVSRLSESSSSSSSSSESESSSSDLSSSDSSDSESEMFPKFTEVKPNDSPSKENVKKMKNECIPPEGRTGVTQIGYCVQDTTSANTTLVHQTTPSHVMPPNHHQLAFNYQELEHLQTVKNISPLQILPPSGDSEQLSNGITVMHPSGDSDTTMLESECQAPVQKDIKIKNADSWKSLGKPVKPSGVMKSSDELFNQFRKAAIEKEVKARTQELIRKHLEQNTKELKASQENQRDLGNGLTVESFSNKIQNKCSGEEQKEHQQSSEAQDKSKLWLLKDRDLARQKEQERRRREAMVGTIDMTLQSDIMTMFENNFD

SEQ ID NO: 9892 - protein, 947 aa, Homo sapiens; identical to SEQ ID NO: 9889
  Payload ID: 1988;
  Gene Symbol: BRDT;
  Gene Name: bromodomain, testis-specific;
  Uniprot ID:  Q58F21;
  ENSP ID: ENSP00000384051

SEQ ID NO: 9893 - protein, 951 aa, Homo sapiens
  Payload ID: 1988;
  Gene Symbol: BRDT;
  Gene Name: bromodomain, testis-specific;
  Uniprot ID:  Q58F21;
  ENSP ID: ENSP00000387822
MSLPSRQTAIIVNPPPPEYINTKKNGRLTNQLQYLQKVVLKDLWKHSFSWPFQRPVDAVKLQLPDYYTIIKNPMDLNTIKKRLENKYYAKASECIEDFNTMFSNCYLYNKPGDDIVLMAQALEKLFMQKLSQMPQEEQVVGVKERIKKGKAGGTQQNIAVSSAKEKSSPSATEKVFKQQEIPSVFPKTSISPLNVVQGASVNSSSQTAAQVTKGVKRKADTTTPATSAVKASSEFSPTFTEKSVALPPIKENMPKNVLPDSQQQYNVVKTVKVTEQLRHCSEILKEMLAKKHFSYAWPFYNPVDVNALGLHNYYDVVKNPMDLGTIKEKMDNQEYKDAYKFAADVRLMFMNCYKYNPPDHEVVTMARMLQDVFETHFSKIPIEPVESMPLCYIKTDITETTGRENTNEASSEGNSSDDSEDERVKRLAKLQEQLKAVHQQLQVLSQVPFRKLNKKKEKSKKEKKKEKVNNSNENPRKMCEQMRLKEKSKRNQPKKRKQQFIGLKSEDEDNAKPMNYDEKRQLSLNINKLPGDKLGRVVHIIQSREPSLSNSNPDEIEIDFETLKASTLRELEKYVSACLRKRPLKPPAKKIMMSKEELHSQKKQELEKRLLDVNNQLNSRKRQTKSDKTQPSKAVENVSRLSESSSSSSSSSESESSSSDLSSSDSSDSESEMFPKFTEVKPNDSPSKENVKKMKNECIPPEGRTGVTQIGYCVQDTTSANTTLVHQTTPSHVMPPNHHQLAFNYQELEHLQTVKNISPLQILPPSGDSEQLSNGITVMHPSGDSDTTMLESECQAPVQKDIKIKNADSWKSLGKPVKPSGVMKSSDELFNQFRKAAIEKEVKARTQELIRKHLEQNTKELKASQENQRDLGNGLTVESFSNKIQNKCSGEEQKEHQQSSEAQDKSKLWLLKDRDLARQKEQERRRREAMVGTIDMTLQSDIMTMFENNFD

SEQ ID NO: 9894 - protein, 176 aa, Homo sapiens
  Payload ID: 1988;
  Gene Symbol: BRDT;
  Gene Name: bromodomain, testis-specific;
  ENSP ID: ENSP00000396351
MSLPSRQTAIIVNPPPPEYINTKKNGRLTNQLQYLQKVVLKDLWKHSFSWPFQRPVDAVKLQLPDYYTIIKNPMDLNTIKKRLENKYYAKASECIEDFNTMFSNCYLYNKPGDDIVLMAQALEKLFMQKLSQMPQEEQVVGVKERIKKGTQQNIAVSSAKEKSSPSATEKVFKQQE

SEQ ID NO: 9895 - protein, 155 aa, Homo sapiens
  Payload ID: 1988;
  Gene Symbol: BRDT;
  Gene Name: bromodomain, testis-specific;
  ENSP ID: ENSP00000400002
MSLPSRQTAIIVNPPPPEYINTKKNGRLTNQLQYLQKVVLKDLWKHSFSWPFQRPVDAVKLQLPDYYTIIKNPMDLNTIKKRLENKYYAKASECIEDFNTMFSNCYLYNKPGDDIVLMAQALEKLFMQKLSQMPQEEQVVGVKERIKKGTQQNIA

SEQ ID NO: 9896 - protein, 14 aa, Homo sapiens
  Payload ID: 1988;
  Gene Symbol: BRDT;
  Gene Name: bromodomain, testis-specific;
  ENSP ID: ENSP00000400199
MSLPSRQTAIIVNP

SEQ ID NO: 9897 - protein, 462 aa, Homo sapiens
  Payload ID: 1988;
  Gene Symbol: BRDT;
  Gene Name: bromodomain, testis-specific;
  ENSP ID: ENSP00000404969
MSLPSRQTAIIVNPPPPEYINTKKNGRLTNQLQYLQKVVLKDLWKHSFSWPFQRPVDAVKLQLPDYYTIIKNPMDLNTIKKRLENKYYAKASECIEDFNTMFSNCYLYNKPGDDIVLMAQALEKLFMQKLSQMPQEEQVVGVKERIKKGTQQNIAVSSAKEKSSPSATEKVFKQQEIPSVFPKTSISPLNVVQGASVNSSSQTAAQVTKGVKRKADTTTPATSAVKASSEFSPTFTEKSVALPPIKENMPKNVLPDSQQQYNVVKTVKVTEQLRHCSEILKEMLAKKHFSYAWPFYNPVDVNALGLHNYYDVVKNPMDLGTIKEKMDNQEYKDAYKFAADVRLMFMNCYKYNPPDHEVVTMARMLQDVFETHFSKIPIEPVESMPLCYIKTDITETTGRENTNEASSEGNSSDDSEDERVKRLAKLQEQLKAVHQQLQVLSQVPFRKLNKKKEKSKKEKKKE

SEQ ID NO: 9898 - protein, 31 aa, Homo sapiens
  Payload ID: 1988;
  Gene Symbol: BRDT;
  Gene Name: bromodomain, testis-specific;
  ENSP ID: ENSP00000408138
MSLPSRQTAIIVNPPPPEYINTKKNGRLTNQ

SEQ ID NO: 9899 - protein, 52 aa, Homo sapiens
  Payload ID: 1988;
  Gene Symbol: BRDT;
  Gene Name: bromodomain, testis-specific;
  ENSP ID: ENSP00000408625
MSLPSRQTAIIVNPPPPEYINTKKNGRLTNQLQYLQKVVLKDLWKHSFSWPF

SEQ ID NO: 9900 - protein, 155 aa, Homo sapiens; identical to SEQ ID NO: 9895
  Payload ID: 1988;
  Gene Symbol: BRDT;
  Gene Name: bromodomain, testis-specific;
  ENSP ID: ENSP00000410587

SEQ ID NO: 9901 - protein, 96 aa, Homo sapiens
  Payload ID: 1988;
  Gene Symbol: BRDT;
  Gene Name: bromodomain, testis-specific;
  ENSP ID: ENSP00000414349
MSLPSRQTAIIVNPPPPEYINTKKNGRLTNQLQYLQKVVLKDLWKHSFSWPFQRPVDAVKLQLPDYYTIIKNPMDLNTIKKRLENKYYAKASECIE

SEQ ID NO: 9902 - protein, 200 aa, Homo sapiens
  Payload ID: 1988;
  Gene Symbol: BRDT;
  Gene Name: bromodomain, testis-specific;
  ENSP ID: ENSP00000416714
MSLPSRQTAIIVNPPPPEYINTKKNGRLTNQLQYLQKVVLKDLWKHSFSWPFQRPVDAVKLQLPDYYTIIKNPMDLNTIKKRLENKYYAKASECIEDFNTMFSNCYLYNKPGDDIVLMAQALEKLFMQKLSQMPQEEQVVGVKERIKKGTQQNIAVSSAKEKSSPSATEKVFKQQEIPSVFPKTSISPLNVVQGASVNSS

SEQ ID NO: 9903 - protein, 63 aa, Homo sapiens
  Payload ID: 1988;
  Gene Symbol: BRDT;
  Gene Name: bromodomain, testis-specific;
  ENSP ID: ENSP00000446599
MDLNTIKKRLENKYYAKASECIEDFNTMFSNCYLYNKPGDDIVLMAQALEKLFMQKLSQMPQE

SEQ ID NO: 9904 - protein, 100 aa, Homo sapiens
  Payload ID: 1988;
  Gene Symbol: BRDT;
  Gene Name: bromodomain, testis-specific;
  ENSP ID: ENSP00000447394
MSLPSRQTAIIVNPPPPEYINTKKNGRLTNQLQYLQKVVLKDLWKHSFSWPFQRPVDAVKLQLPDYYTIIKNPMDLNTIKKRLENKYYAKASECIEDFNT

SEQ ID NO: 9905 - protein, 659 aa, Homo sapiens
  Payload ID: 1989;
  Gene Symbol: BTK;
  Gene Name: Bruton agammaglobulinemia tyr kinase;
  Uniprot ID:  Q06187;
  ENSP ID: ENSP00000308176
MAAVILESIFLKRSQQKKKTSPLNFKKRLFLLTVHKLSYYEYDFERGRRGSKKGSIDVEKITCVETVVPEKNPPPERQIPRRGEESSEMEQISIIERFPYPFQVVYDEGPLYVFSPTEELRKRWIHQLKNVIRYNSDLVQKYHPCFWIDGQYLCCSQTAKNAMGCQILENRNGSLKPGSSHRKTKKPLPPTPEEDQILKKPLPPEPAAAPVSTSELKKVVALYDYMPMNANDLQLRKGDEYFILEESNLPWWRARDKNGQEGYIPSNYVTEAEDSIEMYEWYSKHMTRSQAEQLLKQEGKEGGFIVRDSSKAGKYTVSVFAKSTGDPQGVIRHYVVCSTPQSQYYLAEKHLFSTIPELINYHQHNSAGLISRLKYPVSQQNKNAPSTAGLGYGSWEIDPKDLTFLKELGTGQFGVVKYGKWRGQYDVAIKMIKEGSMSEDEFIEEAKVMMNLSHEKLVQLYGVCTKQRPIFIITEYMANGCLLNYLREMRHRFQTQQLLEMCKDVCEAMEYLESKQFLHRDLAARNCLVNDQGVVKVSDFGLSRYVLDDEYTSSVGSKFPVRWSPPEVLMYSKFSSKSDIWAFGVLMWEIYSLGKMPYERFTNSETAEHIAQGLRLYRPHLASEKVYTIMYSCWHEKADERPTFKILLSNILDVMDEES

SEQ ID NO: 9906 - protein, 483 aa, Homo sapiens
  Payload ID: 1989;
  Gene Symbol: BTK;
  Gene Name: Bruton agammaglobulinemia tyr kinase;
  ENSP ID: ENSP00000361971
MAAVILESIFLKRSQQKKKTSPLNFKKRLFLLTVHKLSYYEYDFERGRRGSKKGSIDVEKITCVETVVPEKNPPPERQIPRRGEESSEMEQISIIERFPYPFQVVYDEGPLYVFSPTEELRKRWIHQLKNVIRYNSDLVQKYHPCFWIDGQYLCCSQTAKNAMGCQILENRNGSLKPGSSHRKTKKPLPPTPEEDQILKKPLPPEPAAAPVSTSELKKVVALYDYMPMNANDLQLRKGDEYFILEESNLPWWRARDKNGQEGYIPSNYVTEAEDSIEMYEWYSKHMTRSQAEQLLKQEGKEGGFIVRDSSKAGKYTVSVFAKSTGDPQGVIRHYVVCSTPQSQYYLAARNCLVNDQGVVKVSDFGLSRYVLDDEYTSSVGSKFPVRWSPPEVLMYSKFSSKSDIWAFGVLMWEIYSLGKMPYERFTNSETAEHIAQGLRLYRPHLASEKVYTIMYSCWHEKADERPTFKILLSNILDVMDEES

SEQ ID NO: 9907 - protein, 568 aa, Homo sapiens [sequence omitted]

SEQ ID NO: 9908 - protein, 693 aa, Homo sapiens
  Payload ID: 1989;
  Gene Symbol: BTK;
  Gene Name: Bruton agammaglobulinemia tyr kinase;
  Uniprot ID:  Q06187;
  ENSP ID: ENSP00000483570
MASWSIQQMVIGCPLCGRHCSGGEHTGELQKEEAMAAVILESIFLKRSQQKKKTSPLNFKKRLFLLTVHKLSYYEYDFERGRRGSKKGSIDVEKITCVETVVPEKNPPPERQIPRRGEESSEMEQISIIERFPYPFQVVYDEGPLYVFSPTEELRKRWIHQLKNVIRYNSDLVQKYHPCFWIDGQYLCCSQTAKNAMGCQILENRNGSLKPGSSHRKTKKPLPPTPEEDQILKKPLPPEPAAAPVSTSELKKVVALYDYMPMNANDLQLRKGDEYFILEESNLPWWRARDKNGQEGYIPSNYVTEAEDSIEMYEWYSKHMTRSQAEQLLKQEGKEGGFIVRDSSKAGKYTVSVFAKSTGDPQGVIRHYVVCSTPQSQYYLAEKHLFSTIPELINYHQHNSAGLISRLKYPVSQQNKNAPSTAGLGYGSWEIDPKDLTFLKELGTGQFGVVKYGKWRGQYDVAIKMIKEGSMSEDEFIEEAKVMMNLSHEKLVQLYGVCTKQRPIFIITEYMANGCLLNYLREMRHRFQTQQLLEMCKDVCEAMEYLESKQFLHRDLAARNCLVNDQGVVKVSDFGLSRYVLDDEYTSSVGSKFPVRWSPPEVLMYSKFSSKSDIWAFGVLMWEIYSLGKMPYERFTNSETAEHIAQGLRLYRPHLASEKVYTIMYSCWHEKADERPTFKILLSNILDVMDEES

SEQ ID NO: 9909 - protein, 353 aa, Homo sapiens
  Payload ID: 1990;
  Gene Symbol: BRIX1;
  Gene Name: BRX1, biogenesis of ribosomes;
  Uniprot ID:  Q8TDN6;
  ENSP ID: ENSP00000338862
MAATKRKRRGGFAVQAKKPKRNEIDAEPPAKRHATAEEVEEEERDRIPGPVCKGKWKNKERILIFSSRGINFRTRHLMQDLRMLMPHSKADTKMDRKDKLFVINEVCEMKNCNKCIYFEAKKKQDLYMWLSNSPHGPSAKFLVQNIHTLAELKMTGNCLKGSRPLLSFDPAFDELPHYALLKELLIQIFSTPRYHPKSQPFVDHVFTFTILDNRIWFRNFQIIEEDAALVEIGPRFVLNLIKIFQGSFGGPTLYENPHYQSPNMHRRVIRSITAAKYREKQQVKDVQKLRKKEPKTLLPHDPTADVFVTPAEEKPIEIQWVKPEPKVDLKARKKRIYKRQRKMKQRMDSGKTK

SEQ ID NO: 9910 - protein, 474 aa, Homo sapiens
  Payload ID: 1991;
  Gene Symbol: BSDC1;
  Gene Name: BSD domain containing 1;
  Uniprot ID:  Q9NW68;
  ENSP ID: ENSP00000344816
MAEGEDVGWWRSWLQQSYQAVKEKSSEALEFMKRDLTEFTQVVQHDTACTIAATASVVKEKLAIAACSRGACFLCPFSIQTEGSSGATEKMKKGLSDFLGVISDTFAPSPDKTIDCDVITLMGTPSGTAEPYDGTKARLYSLQSDPATYCNEPDGPPELFDAWLSQFCLEEKKGEISELLVGSPSIRALYTKMVPAAVSHSEFWHRYFYKVHQLEQEQARRDALKQRAEQSISEEPGWEEEEEELMGISPISPKEAKVPVAKISTFPEGEPGPQSPCEENLVTSVEPPAEVTPSESSESISLVTQIANPATAPEARVLPKDLSQKLLEASLEEQGLAVDVGETGPSPPIHSKPLTPAGHTGGPEPRPPARVETLREEAPTDLRVFELNSDSGKSTPSNNGKKGSSTDISEDWEKDFDLDMTEEEVQMALSKVDASGEVSGPGGSEGSEPNGPGCESSPQPAQLSPQEGPCSCLR

SEQ ID NO: 9911 - protein, 64 aa, Homo sapiens
  Payload ID: 1991;
  Gene Symbol: BSDC1;
  Gene Name: BSD domain containing 1;
  ENSP ID: ENSP00000362620
MAEGEDVGWWRSWLQQSYQAVKEKSSEALEFMKRDLTEFTQVVQHDTACTIAATASVVKEKLAG

SEQ ID NO: 9912 - protein, 447 aa, Homo sapiens
  Payload ID: 1991;
  Gene Symbol: BSDC1;
  Gene Name: BSD domain containing 1;
  Uniprot ID:  Q9NW68;
  ENSP ID: ENSP00000397759
MAEGEDVGWWRSWLQQSYQAVKEKSSEALEFMKRDLTEFTQVVQHDTACTIAATASVVKEKLAIAACSRGACFLCPFSIQTEGSSGATEKMKKGLSDFLGVISDTFAPSPDKTIDCDVITLMGTPSGTAEPYDGTKARLYSLQSDPATYCNEPDGPPELFDAWLSQFCLEEKKGEISELLVGSPSIRALYTKMVPAAVSHSEFWHRYFYKVHQLEQEQARRDALKQRAEQSISEEPGWEEEEEELMGISPISPKEAKVPVAKISTFPEGEPGPQSPCEENLVTSVEPPAEVTPSESSESISLVTQIANPATAPEARVLPKDLSQKLLEASLEEQGLAVDVGETGPSPPIHSKPLTPAGHTGGPEPRPPARVETLREEAPTDLRVFELNSDSGKSTPSNNGKKGSSTDISEDWEKDFDLDMTEEEVQMALSKVDASGELEDVEWEDWE

SEQ ID NO: 9913 - protein, 374 aa, Homo sapiens
  Payload ID: 1991;
  Gene Symbol: BSDC1;
  Gene Name: BSD domain containing 1;
  Uniprot ID:  Q9NW68;
  ENSP ID: ENSP00000405752
MAEGEDVGWWRSWLQQSYQAVKEKSSEALEFMKRDLTEFTQVVQHDTACTIAATASVVKEKLAARLYSLQSDPATYCNEPDGPPELFDAWLSQFCLEEKKGEISELLVGSPSIRALYTKMVPAAVSHSEFWHRYFYKVHQLEQEQARRDALKQRAEQSISEEPGWEEEEEELMGISPISPKEAKVPVAKISTFPEGEPGPQSPCEENLVTSVEPPAEVTPSESSESISLVTQIANPATAPEARVLPKDLSQKLLEASLEEQGLAVDVGETGPSPPIHSKPLTPAGHTGGPEPRPPARVETLREEAPTDLRVFELNSDSGKSTPSNNGKKGSSTDISEDWEKDFDLDMTEEEVQMALSKVDASGELEDVEWEDWE

SEQ ID NO: 9914 - protein, 430 aa, Homo sapiens
  Payload ID: 1991;
  Gene Symbol: BSDC1;
  Gene Name: BSD domain containing 1;
  Uniprot ID:  Q9NW68;
  ENSP ID: ENSP00000412173
MAEGEDVGWWRSWLQQSYQAVKEKSSEALEFMKRDLTEFTQVVQHDTACTIAATASVVKEKLATEGSSGATEKMKKGLSDFLGVISDTFAPSPDKTIDCDVITLMGTPSGTAEPYDGTKARLYSLQSDPATYCNEPDGPPELFDAWLSQFCLEEKKGEISELLVGSPSIRALYTKMVPAAVSHSEFWHRYFYKVHQLEQEQARRDALKQRAEQSISEEPGWEEEEEELMGISPISPKEAKVPVAKISTFPEGEPGPQSPCEENLVTSVEPPAEVTPSESSESISLVTQIANPATAPEARVLPKDLSQKLLEASLEEQGLAVDVGETGPSPPIHSKPLTPAGHTGGPEPRPPARVETLREEAPTDLRVFELNSDSGKSTPSNNGKKGSSTDISEDWEKDFDLDMTEEEVQMALSKVDASGELEDVEWEDWE

SEQ ID NO: 9915 - protein, 428 aa, Homo sapiens
  Payload ID: 1991;
  Gene Symbol: BSDC1;
  Gene Name: BSD domain containing 1;
  Uniprot ID:  Q9NW68;
  ENSP ID: ENSP00000414103
MAEGEDVGWWRSWLQQSYQAVKEKSSEALEFMKRDLTEFTQVVQHDTACTIAATASVVKEKLATEGSSGATEKMKKGLSDFLGVISDTFAPSPDKTIDCDVITLMGTPSGTAEPYDGTKARLYSLQSDPATYCNEPDGPPELFDAWLSQFCLEEKKGEISELLVGSPSIRALYTKMVPAAVSHSEFWHRYFYKVHQLEQEQARRDALKQRAEQSISEEPGWEEEEEELMGISPISPKEAKVPVAKISTFPEGEPGPQSPCEENLVTSVEPPAEVTPSESSESISLVTQIANPATAPEARVLPKDLSQKLLEASLEEQGLAVDVGETGPSPPIHSKPLTPAGHTGGPEPRPPARVETLREEAPTDLRVFELNSDSGKSTPSNNGKKETRSQFTVDFLWKISVTLLEPLGQSASPLFSNLPFPRLKHGHQ

SEQ ID NO: 9916 - protein, 335 aa, Homo sapiens
  Payload ID: 1991;
  Gene Symbol: BSDC1;
  Gene Name: BSD domain containing 1;
  Uniprot ID:  Q9NW68;
  ENSP ID: ENSP00000432382
MAEGEDVGWWRSWLQQSYQAVKEKARLYSLQSDPATYCNEPDGPPELFDAWLSQFCLEEKKGEISELLVGSPSIRALYTKMVPAAVSHSEFWHRYFYKVHQLEQEQARRDALKQRAEQSISEEPGWEEEEEELMGISPISPKEAKVPVAKISTFPEGEPGPQSPCEENLVTSVEPPAEVTPSESSESISLVTQIANPATAPEARVLPKDLSQKLLEASLEEQGLAVDVGETGPSPPIHSKPLTPAGHTGGPEPRPPARVETLREEAPTDLRVFELNSDSGKSTPSNNGKKGSSTDISEDWEKDFDLDMTEEEVQMALSKVDASGELEDVEWEDWE

SEQ ID NO: 9917 - protein, 177 aa, Homo sapiens
  Payload ID: 1991;
  Gene Symbol: BSDC1;
  Gene Name: BSD domain containing 1;
  ENSP ID: ENSP00000432524
MVAELAAAELPSSQREGVISDTFAPSPDKTIDCDVITLMGTPSGTAEPYDGTKARLYSLQSDPATYCNEPDGPPELFDAWLSQFCLEEKKGEISELLVGSPSIRALYTKMVPAAVSHSEFWHRYFYKVHQLEQEQARRDALKQRAEQSISEEPGWEEEEEELMGISPISPKEAKVPV

SEQ ID NO: 9918 - protein, 89 aa, Homo sapiens
  Payload ID: 1991;
  Gene Symbol: BSDC1;
  Gene Name: BSD domain containing 1;
  ENSP ID: ENSP00000432841
MAEGEDVGWWRSWLQQSYQAVKEKSSEALEFMKRDLTEFTQVVQHDTACTIAATASVVKEKLAGPRNCLTPGFPSSAWRRRRGRSQSSL

SEQ ID NO: 9919 - protein, 156 aa, Homo sapiens
  Payload ID: 1991;
  Gene Symbol: BSDC1;
  Gene Name: BSD domain containing 1;
  ENSP ID: ENSP00000435888
MAEGEDVGWWRSWLQQSYQAVKEKTEGSSGATEKMKKGLSDFLGVISDTFAPSPDKTIDCDVITLMGTPSGTAEPYDGTKARLYSLQSDPATYCNEPDGPPELFDAWLSQFCLEEKKGEISELLVGSPSIRALYTKMVPAAVSHSEFWHRYFYKVH

SEQ ID NO: 9920 - protein, 1849 aa, Homo sapiens
  Payload ID: 1992;
  Gene Symbol: BTAF1;
  Gene Name: BTAF1 RNA polymerase II, B-TFIID transcription factor-associated, 170kDa;
  Uniprot ID:  O14981;
  ENSP ID: ENSP00000265990
MAVSRLDRLFILLDTGTTPVTRKAAAQQLGEVVKLHPHELNNLLSKVLIYLRSANWDTRIAAGQAVEAIVKNVPEWNPVPRTRQEPTSESSMEDSPTTERLNFDRFDICRLLQHGASLLGSAGAEFEVQDEKSGEVDPKERIARQRKLLQKKLGLNMGEAIGMSTEELFNDEDLDYTPTSASFVNKQPTLQAAELIDSEFRAGMSNRQKNKAKRMAKLFAKQRSRDAVETNEKSNDSTDGEPEEKRRKIANVVINQSANDSKVLIDNIPDSSSLIEETNEWPLESFCEELCNDLFNPSWEVRHGAGTGLREILKAHGKSGGKMGDSTLEEMIQQHQEWLEDLVIRLLCVFALDRFGDFVSDEVVAPVRETCAQTLGVVLKHMNETGVHKTVDVLLKLLTQEQWEVRHGGLLGIKYALAVRQDVINTLLPKVLTRIIEGLQDLDDDVRAVAAASLVPVVESLVYLQTQKVPFIINTLWDALLELDDLTASTNSIMTLLSSLLTYPQVQQCSIQQSLTVLVPRVWPFLHHTISSVRRAALETLFTLLSTQDQNSSSWLIPILPDMLRHIFQFCVLESSQEILDLIHKVWMELLSKASVQYVVAAACPWMGAWLCLMMQPSHLPIDLNMLLEVKARAKEKTGGKVRQGQSQNKEVLQEYIAGADTIMEDPATRDFVVMRARMMAAKLLGALCCCICDPGVNVVTQEIKPAESLGQLLLFHLNSKSALQRISVALVICEWAALQKECKAVTLAVQPRLLDILSEHLYYDEIAVPFTRMQNECKQLISSLADVHIEVGNRVNNNVLTIDQASDLVTTVFNEATSSFDLNPQVLQQLDSKRQQVQMTVTETNQEWQVLQLRVHTFAACAVVSLQQLPEKLNPIIKPLMETIKKEENTLVQNYAAQCIAKLLQQCTTRTPCPNSKIIKNLCSSLCVDPYLTPCVTCPVPTQSGQENSKGSTSEKDGMHHTVTKHRGIITLYRHQKAAFAITSRRGPTPKAVKAQIADLPAGSSGNILVELDEAQKPYLVQRRGAEFALTTIVKHFGGEMAVKLPHLWDAMVGPLRNTIDINNFDGKSLLDKGDSPAQELVNSLQVFETAAASMDSELHPLLVQHLPHLYMCLQYPSTAVRHMAARCVGVMSKIATMETMNIFLEKVLPWLGAIDDSVKQEGAIEALACVMEQLDVGIVPYIVLLVVPVLGRMSDQTDSVRFMATQCFATLIRLMPLEAGIPDPPNMSAELIQLKAKERHFLEQLLDGKKLENYKIPVPINAELRKYQQDGVNWLAFLNKYKLHGILCDDMGLGKTLQSICILAGDHCHRAQEYARSKLAECMPLPSLVVCPPTLTGHWVDEVGKFCSREYLNPLHYTGPPTERIRLQHQVKRHNLIVASYDVVRNDIDFFRNIKFNYCILDEGHVIKNGKTKLSKAVKQLTANYRIILSGTPIQNNVLELWSLFDFLMPGFLGTERQFAARYGKPILASRDARSSSREQEAGVLAMDALHRQVLPFLLRRMKEDVLQDLPPKIIQDYYCTLSPLQVQLYEDFAKSRAKCDVDETVSSATLSEETEKPKLKATGHVFQALQYLRKLCNHPALVLTPQHPEFKTTAEKLAVQNSSLHDIQHAPKLSALKQLLLDCGLGNGSTSESGTESVVAQHRILIFCQLKSMLDIVEHDLLKPHLPSVTYLRLDGSIPPGQRHSIVSRFNNDPSIDVLLLTTHVGGLGLNLTGADTVVFVEHDWNPMRDLQAMDRAHRIGQKRVVNVYRLITRGTLEEKIMGLQKFKMNIANTVISQENSSLQSMGTDQLLDLFTLDKDGKAEKADTSTSGKASMKSILENLSDLWDQEQYDSEYSLENFMHSLK

SEQ ID NO: 9921 - protein, 1849 aa, Homo sapiens [sequence omitted]

SEQ ID NO: 9922 - protein, 482 aa, Homo sapiens
  Payload ID: 1993;
  Gene Symbol: BTBD1;
  Gene Name: BTB (POZ) domain containing 1;
  Uniprot ID:  Q9H0C5;
  ENSP ID: ENSP00000261721
MASLGPAAAGEQASGAEAEPGPAGPPPPPSPSSLGPLLPLQREPLYNWQATKASLKERFAFLFNSELLSDVRFVLGKGRGAAAAGGPQRIPAHRFVLAAGSAVFDAMFNGGMATTSAEIELPDVEPAAFLALLRFLYSDEVQIGPETVMTTLYTAKKYAVPALEAHCVEFLTKHLRADNAFMLLTQARLFDEPQLASLCLDTIDKSTMDAISAEGFTDIDIDTLCAVLERDTLSIRESRLFGAVVRWAEAECQRQQLPVTFGNKQKVLGKALSLIRFPLMTIEEFAAGPAQSGILSDREVVNLFLHFTVNPKPRVEYIDRPRCCLRGKECCINRFQQVESRWGYSGTSDRIRFTVNRRISIVGFGLYGSIHGPTDYQVNIQIIEYEKKQTLGQNDTGFSCDGTANTFRVMFKEPIEILPNVCYTACATLKGPDSHYGTKGLKKVVHETPAASKTVFFFFSSPGNNNGTSIEDGQIPEIIFYT

SEQ ID NO: 9923 - protein, 385 aa, Homo sapiens
  Payload ID: 1993;
  Gene Symbol: BTBD1;
  Gene Name: BTB (POZ) domain containing 1;
  Uniprot ID:  Q9H0C5;
  ENSP ID: ENSP00000368713
MASLGPAAAGEQASGAEAEPGPAGPPPPPSPSSLGPLLPLQREPLYNWQATKASLKERFAFLFNSELLSDVRFVLGKGRGAAAAGGPQRIPAHRFVLAAGSAVFDAMFNGGMATTSAEIELPDVEPAAFLALLRFLYSDEVQIGPETVMTTLYTAKKYAVPALEAHCVEFLTKHLRADNAFMLLTQARLFDEPQLASLCLDTIDKSTMDAISAEGFTDIDIDTLCAVLERDTLSIRESRLFGAVVRWAEAECQRQQLPVTFGNKQKVLGKALSLIRFPLMTIEEFAAGPAQSGILSDREVVNLFLHFTVNPKPRVEYIDRPRCCLRGKECCINRFQQVESRWGYSGTSDRIRSLNMRKSKPWDRMIPALVVMGQLTHSGSCSRNP

SEQ ID NO: 9924 - protein, 37 aa, Homo sapiens
  Payload ID: 1993;
  Gene Symbol: BTBD1;
  Gene Name: BTB (POZ) domain containing 1;
  ENSP ID: ENSP00000453104
  MOD_RES (1)..(1): Any amino acid
XKYAVPALEAHCVEFLTKHLRADNAFMLLTQIHSVQF

SEQ ID NO: 9925 - protein, 475 aa, Homo sapiens
  Payload ID: 1994;
  Gene Symbol: BTBD10;
  Gene Name: BTB (POZ) domain containing 10;
  Uniprot ID:  Q9BSF8;
  ENSP ID: ENSP00000278174
MAGRPHPYDGNSSDPENWDRKLHSRPRKLYKHSSTSSRIAKGGVDHTKMSLHGASGGHERSRDRRRSSDRSRDSSHERTESQLTPCIRNVTSPTRQHHVEREKDHSSSRPSSPRPQKASPNGSISSAGNSSRNSSQSSSDGSCKTAGEMVFVYENAKEGARNIRTSERVTLIVDNTRFVVDPSIFTAQPNTMLGRMFGSGREHNFTRPNEKGEYEVAEGIGSTVFRAILDYYKTGIIRCPDGISIPELREACDYLCISFEYSTIKCRDLSALMHELSNDGARRQFEFYLEEMILPLMVASAQSGERECHIVVLTDDDVVDWDEEYPPQMGEEYSQIIYSTKLYRFFKYIENRDVAKSVLKERGLKKIRLGIEGYPTYKEKVKKRPGGRPEVIYNYVQRPFIRMSWEKEEGKSRHVDFQCVKSKSITNLAAAAADIPQDQLVVMHPTPQVDELDILPIHPPSGNSDLDPDAQNPML

SEQ ID NO: 9926 - protein, 483 aa, Homo sapiens
  Payload ID: 1994;
  Gene Symbol: BTBD10;
  Gene Name: BTB (POZ) domain containing 10;
  Uniprot ID:  Q9BSF8;
  ENSP ID: ENSP00000431186
MPKDADLAFSASLFERAESLYTLISKFFSCFCVSTLAYTKGSTSSRIAKGGVDHTKMSLHGASGGHERSRDRRRSSDRSRDSSHERTESQLTPCIRNVTSPTRQHHVEREKDHSSSRPSSPRPQKASPNGSISSAGNSSRNSSQSSSDGSCKTAGEMVFVYENAKEGARNIRTSERVTLIVDNTRFVVDPSIFTAQPNTMLGRMFGSGREHNFTRPNEKGEYEVAEGIGSTVFRAILDYYKTGIIRCPDGISIPELREACDYLCISFEYSTIKCRDLSALMHELSNDGARRQFEFYLEEMILPLMVASAQSGERECHIVVLTDDDVVDWDEEYPPQMGEEYSQIIYSTKLYRFFKYIENRDVAKSVLKERGLKKIRLGIEGYPTYKEKVKKRPGGRPEVIYNYVQRPFIRMSWEKEEGKSRHVDFQCVKSKSITNLAAAAADIPQDQLVVMHPTPQVDELDILPIHPPSGNSDLDPDAQNPML

SEQ ID NO: 9927 - protein, 64 aa, Homo sapiens
  Payload ID: 1994;
  Gene Symbol: BTBD10;
  Gene Name: BTB (POZ) domain containing 10;
  ENSP ID: ENSP00000431572
MAGRPHPYDGNSSDPENWDRKLHSRPRKLYKHSSTSSRIAKGGVDHTKMSLHGASGGHERSRDR

SEQ ID NO: 9928 - protein, 66 aa, Homo sapiens
  Payload ID: 1994;
  Gene Symbol: BTBD10;
  Gene Name: BTB (POZ) domain containing 10;
  ENSP ID: ENSP00000434579
MAGRPHPYDGNSSDPENWDRKLHSRPRKLYKHSSTSSRIAKGGVDHTKMSLHGASGGHERSRDRRR

SEQ ID NO: 9929 - protein, 36 aa, Homo sapiens
  Payload ID: 1994;
  Gene Symbol: BTBD10;
  Gene Name: BTB (POZ) domain containing 10;
  ENSP ID: ENSP00000434857
MAGRPHPYDGNSSDPENWDRKLHSRPRKLYKHSRRS

SEQ ID NO: 9930 - protein, 427 aa, Homo sapiens
  Payload ID: 1994;
  Gene Symbol: BTBD10;
  Gene Name: BTB (POZ) domain containing 10;
  ENSP ID: ENSP00000435257
MSLHGASGGHERSRDRRRSSDRSRDSSHERTESQLTPCIRNVTSPTRQHHVEREKDHSSSRPSSPRPQKASPNGSISSAGNSSRNSSQSSSDGSCKTAGEMVFVYENAKEGARNIRTSERVTLIVDNTRFVVDPSIFTAQPNTMLGRMFGSGREHNFTRPNEKGEYEVAEGIGSTVFRAILDYYKTGIIRCPDGISIPELREACDYLCISFEYSTIKCRDLSALMHELSNDGARRQFEFYLEEMILPLMVASAQSGERECHIVVLTDDDVVDWDEEYPPQMGEEYSQIIYSTKLYRFFKYIENRDVAKSVLKERGLKKIRLGIEGYPTYKEKVKKRPGGRPEVIYNYVQRPFIRMSWEKEEGKSRHVDFQCVKSKSITNLAAAAADIPQDQLVVMHPTPQVDELDILPIHPPSGNSDLDPDAQNPML

SEQ ID NO: 9931 - protein, 202 aa, Homo sapiens
  Payload ID: 1994;
  Gene Symbol: BTBD10;
  Gene Name: BTB (POZ) domain containing 10;
  ENSP ID: ENSP00000435303
MAGRPHPYDGNSSDPENWDRKLHSRPRKLYKHSSTSSRIAKGGVDHTKMSLHGASGGHERSRDRRRSSDRSRDSSHERTESQLTPCIRNVTSPTRQHHVEREKDHSSSRPSSPRPQKASPNGSISSAGNSSRNSSQSSSDGSCKTAGEMVFVYENAKEGARNIRTSERVTLIVDNTRFVVDPSIFTAQPNTMLGRMFGSGLL

SEQ ID NO: 9932 - protein, 1104 aa, Homo sapiens
  Payload ID: 1995;
  Gene Symbol: BTBD11;
  Gene Name: BTB (POZ) domain containing 11;
  Uniprot ID:  A6QL63;
  ENSP ID: ENSP00000280758
MARRGKKPVVRTLEDLTLDSGYGGAADSVRSSNLSLCCSDSHPASPYGGSCWPPLADSMHSRHNSFDTVNTALVEDSEGLDCAGQHCSRLLPDLDEVPWTLQELEALLLRSRDPRAGPAVPGGLPKDALAKLSTLVSRALVRIAKEAQRLSLRFAKCTKYEIQSAMEIVLSWGLAAHCTAAALAALSLYNMSSAGGDRLGRGKSARCGLTFSVGRVYRWMVDSRVALRIHEHAAIYLTACMESLFRDIYSRVVASGVPRSCSGPGSGSGSGPGPSSGPGAAPAADKEREAPGGGAASGGACSAASSASGGSSCCAPPAAAAAAVPPAAAANHHHHHHHALHEAPKFTVETLEHTVNNDSEIWGLLQPYQHLICGKNASGVLCLPDSLNLHRDPQRSNKPGELPMFSQSELRTIEQSLLATRVGSIAELSDLVSRAMHHLQPLNAKHHGNGTPLHHKQGALYWEPEALYTLCYFMHCPQMEWENPNVEPSKVNLQVERPFLVLPPLMEWIRVAVAHAGHRRSFSMDSDDVRQAARLLLPGVDCEPRQLRADDCFCASRKLDAVAIEAKFKQDLGFRMLNCGRTDLVKQAVSLLGPDGINTMSEQGMTPLMYACVRGDEAMVQMLLDAGADLNVEVVSTPHKYPSVHPETRHWTALTFAVLHGHIPVVQLLLDAGAKVEGSVEHGEENYSETPLQLAAAVGNFELVSLLLERGADPLIGTMYRNGISTTPQGDMNSFSQAAAHGHRNVFRKLLAQPEKEKSDILSLEEILAEGTDLAETAPPPLCASRNSKAKLRALREAMYHSAEHGYVDVTIDIRSIGVPWTLHTWLESLRIAFQQHRRPLIQCLLKEFKTIQEEEYTEELVTQGLPLMFEILKASKNEVISQQLCVIFTHCYGPYPIPKLTEIKRKQTSRLDPHFLNNKEMSDVTFLVEGRPFYAHKVLLFTASPRFKALLSSKPTNDGTCIEIGYVKYSIFQLVMQYLYYGGPESLLIKNNEIMELLSAAKFFQLEALQRHCEIICAKSINTDNCVDIYNHAKFLGVTELSAYCEGYFLKNMMVLIENEAFKQLLYDKNGEGTGQDVLQDLQRTLAIRIQSIHLSSSKGSVV

SEQ ID NO: 9933 - protein, 641 aa, Homo sapiens
  Payload ID: 1995;
  Gene Symbol: BTBD11;
  Gene Name: BTB (POZ) domain containing 11;
  Uniprot ID:  A6QL63;
  ENSP ID: ENSP00000349690
MRKLRPKDSREPAPGSPVRSGCLQRLSHYSGIQRPFLVLPPLMEWIRVAVAHAGHRRSFSMDSDDVRQAARLLLPGVDCEPRQLRADDCFCASRKLDAVAIEAKFKQDLGFRMLNCGRTDLVKQAVSLLGPDGINTMSEQGMTPLMYACVRGDEAMVQMLLDAGADLNVEVVSTPHKYPSVHPETRHWTALTFAVLHGHIPVVQLLLDAGAKVEGSVEHGEENYSETPLQLAAAVGNFELVSLLLERGADPLIGTMYRNGISTTPQGDMNSFSQAAAHGHRNVFRKLLAQPEKEKSDILSLEEILAEGTDLAETAPPPLCASRNSKAKLRALREAMYHSAEHGYVDVTIDIRSIGVPWTLHTWLESLRIAFQQHRRPLIQCLLKEFKTIQEEEYTEELVTQGLPLMFEILKASKNEVISQQLCVIFTHCYGPYPIPKLTEIKRKQTSRLDPHFLNNKEMSDVTFLVEGRPFYAHKVLLFTASPRFKALLSSKPTNDGTCIEIGYVKYSIFQLVMQYLYYGGPESLLIKNNEIMELLSAAKFFQLEALQRHCEIICAKSINTDNCVDIYNHAKFLGVTELSAYCEGYFLKNMMVLIENEAFKQLLYDKNGEGTGQDVLQDLQRTLAIRIQSIHLSSSKGSVV

SEQ ID NO: 9934 - protein, 237 aa, Homo sapiens
  Payload ID: 1995;
  Gene Symbol: BTBD11;
  Gene Name: BTB (POZ) domain containing 11;
  ENSP ID: ENSP00000407416
MVESLHGLDSRKGVLCLPDSLNLHRDPQRSNKPGELPMFSQSELRTIEQSLLATRVGSIAELSDLVSRAMHHLQPLNAKHHGNGTPLHHKQGALYWEPEALYTLCYFMHCPQMEWENPNVEPSKVNLQVERPFLVLPPLMEWIRVAVAHAGHRRSFSMDSDDVRQAARLLLPGVDCEPRQLRADDCFCASRKLDAVAIEAKFKQDLGFRMLNCGRTDLVKQAVSLLGPDGINTMSEQ

SEQ ID NO: 9935 - protein, 985 aa, Homo sapiens
  Payload ID: 1995;
  Gene Symbol: BTBD11;
  Gene Name: BTB (POZ) domain containing 11;
  Uniprot ID:  A6QL63;
  ENSP ID: ENSP00000413889
MARRGKKPVVRTLEDLTLDSGYGGAADSVRSSNLSLCCSDSHPASPYGGSCWPPLADSMHSRHNSFDTVNTALVEDSEGLDCAGQHCSRLLPDLDEVPWTLQELEALLLRSRDPRAGPAVPGGLPKDALAKLSTLVSRALVRIAKEAQRLSLRFAKCTKYEIQSAMEIVLSWGLAAHCTAAALAALSLYNMSSAGGDRLGRGKSARCGLTFSVGRVYRWMVDSRVALRIHEHAAIYLTACMESLFRDIYSRVVASGVPRSCSGPGSGSGSGPGPSSGPGAAPAADKEREAPGGGAASGGACSAASSASGGSSCCAPPAAAAAAVPPAAAANHHHHHHHALHEAPKFTVETLEHTVNNDSEIWGLLQPYQHLICGKNASGVLCLPDSLNLHRDPQRSNKPGELPMFSQSELRTIEQSLLATRVGSIAELSDLVSRAMHHLQPLNAKHHGNGTPLHHKQGALYWEPEALYTLCYFMHCPQMEWENPNVEPSKVNLQVERPFLVLPPLMEWIRVAVAHAGHRRSFSMDSDDVRQAARLLLPGVDCEPRQLRADDCFCASRKLDAVAIEAKFKQDLGFRMLNCGRTDLVKQAVSLLGPDGINTMSEQGMTPLMYACVRGDEAMVQMLLDAGADLNVEVVSTPHKYPSVHPETRHWTALTFAVLHGHIPVVQLLLDAGAKVEGSVEHGEENYSETPLQLAAAVGVPWTLHTWLESLRIAFQQHRRPLIQCLLKEFKTIQEEEYTEELVTQGLPLMFEILKASKNEVISQQLCVIFTHCYGPYPIPKLTEIKRKQTSRLDPHFLNNKEMSDVTFLVEGRPFYAHKVLLFTASPRFKALLSSKPTNDGTCIEIGYVKYSIFQLVMQYLYYGGPESLLIKNNEIMELLSAAKFFQLEALQRHCEIICAKSINTDNCVDIYNHAKFLGVTELSAYCEGYFLKNMMVLIENEAFKQLLYDKNGEGTGQDVLQDLQRTLAIRIQSIHLSSSKGSVV

SEQ ID NO: 9936 - protein, 1007 aa, Homo sapiens
  Payload ID: 1995;
  Gene Symbol: BTBD11;
  Gene Name: BTB (POZ) domain containing 11;
  Uniprot ID:  A6QL63;
  ENSP ID: ENSP00000447319
MARRGKKPVVRTLEDLTLDSGYGGAADSVRSSNLSLCCSDSHPASPYGGSCWPPLADSMHSRHNSFDTVNTALVEDSEGLDCAGQHCSRLLPDLDEVPWTLQELEALLLRSRDPRAGPAVPGGLPKDALAKLSTLVSRALVRIAKEAQRLSLRFAKCTKYEIQSAMEIVLSWGLAAHCTAAALAALSLYNMSSAGGDRLGRGKSARCGLTFSVGRVYRWMVDSRVALRIHEHAAIYLTACMESLFRDIYSRVVASGVPRSCSGPGSGSGSGPGPSSGPGAAPAADKEREAPGGGAASGGACSAASSASGGSSCCAPPAAAAAAVPPAAAANHHHHHHHALHEAPKFTVETLEHTVNNDSEIWGLLQPYQHLICGKNASGVLCLPDSLNLHRDPQRSNKPGELPMFSQSELRTIEQSLLATRVGSIAELSDLVSRAMHHLQPLNAKHHGNGTPLHHKQGALYWEPEALYTLCYFMHCPQMEWENPNVEPSKVNLQVERPFLVLPPLMEWIRVAVAHAGHRRSFSMDSDDVRQAARLLLPGVDCEPRQLRADDCFCASRKLDAVAIEAKFKQDLGFRMLNCGRTDLVKQAVSLLGPDGINTMSEQGMTPLMYACVRGDEAMVQMLLDAGADLNVEVVSTPHKYPSVHPETRHWTALTFAVLHGHIPVVQLLLDAGAKVEGSVEHGEENYSETPLQLAAAVGNFELVSLLLERGADPLIGTMYRNGISTTPQGDMNSFSQAAAHGHRNVFRKLLAQPEKEKSDILSLEEILAEGTDLAETAPPPLCASRNSKAKLRALREAMYHSAEHGYVDVTIDIRSIGVPWTLHTWLESLRIAFQQHRRPLIQCLLKEFKTIQEEEYTEELVTQGLPLMFEILKASKNEVISQQLCVIFTHCYGPYPIPKLTEIKRKQTSRLDPHFLNNKEMSDVTFLVEGRPFYAHKVLLFTASPRFKALLSSKPTNDGTCIEIGYVKYSIFQLVMQYLYYGGPESLLIKNNEIMEVRDPLWCWLS

SEQ ID NO: 9937 - protein, 222 aa, Homo sapiens
  Payload ID: 1995;
  Gene Symbol: BTBD11;
  Gene Name: BTB (POZ) domain containing 11;
  ENSP ID: ENSP00000447606
AAAAVPPAAAANHHHHHHHALHEAPKFTVETLEHTVNNDSEIWGLLQPYQHLICGKNASGDLVSRAMHHLQPLNAKHHGNGTPLHHKQGALYWEPEALYTLCYFMHCPQMEWENPNVEPSKVNLQVERPFLVLPPLMEWIRVAVAHAGHRRSFSMDSDDVRQAARLLLPGVDCEPRQLRADDCFCASRKLDAVAIEAKFKQDLGFRMLNCGRTDLVKQAVSL

SEQ ID NO: 9938 - protein, 183 aa, Homo sapiens
  Payload ID: 1995;
  Gene Symbol: BTBD11;
  Gene Name: BTB (POZ) domain containing 11;
  Uniprot ID:  A6QL63;
  ENSP ID: ENSP00000448322
MSDVTFLVEGRPFYAHKVLLFTASPRFKALLSSKPTNDGTCIEIGYVKYSIFQLVMQYLYYGGPESLLIKNNEIMELLSAAKFFQLEALQRHCEIICAKSINTDNCVDIYNHAKFLGVTELSAYCEGYFLKNMMVLIENEAFKQLLYDKNGEGTGQDVLQDLQRTLAIRIQSIHLSSSKGSVV

SEQ ID NO: 9939 - protein, 506 aa, Homo sapiens
  Payload ID: 1996;
  Gene Symbol: BTBD16;
  Gene Name: BTB (POZ) domain containing 16;
  Uniprot ID:  Q32M84;
  ENSP ID: ENSP00000260723
MIMSNTHKARLERRVTGSTNRWRLPKQPFSGDLLSLSQMCKALSIDFEEALRNPDRLCISQIQKFFFENFKNKDIQSGEADVILECLGFKWELHQPQLFQSETLAKLYLKALAQGTTHPLRELEELLRAQSPKKTKEKSPAKRIIISLKINDPLVTKVAFATALKNLYMSEVEINLEDLLGVLASAHILQFSGLFQRCVDVMIARLKPSTIKKFYEAGCKYKEEQLTTGCEKWLEMNLVPLGGTQIHLHKIPQDLLHKVLKSPRLFTFSEFHLLKTMLLWVFLQLNYKIQAIPTYETVMTFFKSFPENCCFLDRDIGRSLRPLFLCLRLHGITKGKDLEVLRHLNFFPESWLDQVTVNHYHALENGGDMVHLKDLNTQAVRFGLLFNQENTTYSKTIALYGFFFKIKGLKHDTTSYSFYMQRIKHTDLESPSAVYEHNHVSLRAARLVKYEIRAEALVDGKWQEFRTNQIKQKFGLTTSSCKSHTLKIQTVGIPIYVSFAFIFPAS

SEQ ID NO: 9940 - protein, 478 aa, Homo sapiens
  Payload ID: 1997;
  Gene Symbol: BTBD17;
  Gene Name: BTB (POZ) domain containing 17;
  Uniprot ID:  A6NE02;
  ENSP ID: ENSP00000364515
MPRRGYSKPGSWGSFWAMLTLVGLVTHAAQRADVGGEAAGTSINHSQAVLQRLQELLRQGNASDVVLRVQAAGTDEVRVFHAHRLLLGLHSELFLELLSNQSEAVLQEPQDCAAVFDKFIRYLYCGELTVLLTQAIPLHRLATKYGVSSLQRGVADYMRAHLAGGAGPAVGWYHYAVGTGDEALRESCLQFLAWNLSAVAASTEWGAVSPELLWQLLQRSDLVLQDELELFHALEAWLGRARPPPAVAERALRAIRYPMIPPAQLFQLQARSAALARHGPAVADLLLQAYQFHAASPLHYAKFFDVNGSAFLPRNYLAPAWGAPWVINNPARDDRSTSFQTQLGPSGHDAGRRVTWNVLFSPRWLPVSLRPVYADAAGTALPAARPEDGRPRLVVTPASSGGDAAGVSFQKTVLVGARQQGRLLVRHAYSFHQSSEEAGDFLAHADLQRRNSEYLVENALHLHLIVKPVYHTLIRTPK

SEQ ID NO: 9941 - protein, 712 aa, Homo sapiens
  Payload ID: 1998;
  Gene Symbol: BTBD18;
  Gene Name: BTB (POZ) domain containing 18;
  Uniprot ID:  B2RXH4;
  ENSP ID: ENSP00000394472
MCSPASPKILYRNPRFLRLAFLQLHHQQQSDVFCDVLLQAEGEAVPAHCCILSACSPFFTERLERERPAQGGKVVLELGGLKISTLRKLVDFLYTSEMEVSQEEAQDVLSAARQLRVSELESLQLEGGKLVKAPQGRRLNRECLQPTSAAPISARVVTPSHHPHTPLPTNQTPCPLGAIRLKSLGKEEGPQENNRQNADNLSGTLLLKRKARACPTPQEKNSSPSSHSQEPRENKNDTALDPTVLSPPSLYPSVDKHLLPRKIRLSRSKPSPGICTSKPSSILSGSSSVPATPGRRLWRQRSVNKETPEDKPKPGRASPLQSTPNPSGLGKTGGSRKRSPEVRAPNSDSAEEGQVGRVKLRKIVNGTCWEVVQETPLKNTQDSPQIPDPGGDFQEPSGTQPFSSNEQEMSPTRTELCQDSPMCTKLQDILVSASHSPDHPVVKSEFESSPELVEKEPMLAIDCREPYAFDTALLEQPCEAEEYRITSAAATSELEEILDFMLCGSDIEPPIGSLESPGAEGCRTPTYHLTETGKNWIEGEEWCLPDMELWPRELTELEKEPAGENRGPTELLSPLVMPSEVSEVLSVGGRWTPDLEITSSQPLDGQEDKLLHVSSLDTPQRSYGDLSPPCSNWVETGLEVSLTTDELLYPSPKAGKEVSGHSELLGSLPASSEEEEIDVVDWTAEGRLVPTTVPSVWPDPSSESETEVDILT

SEQ ID NO: 9942 - protein, 712 aa, Homo sapiens; identical to SEQ ID NO: 9941
  Payload ID: 1998;
  Gene Symbol: BTBD18;
  Gene Name: BTB (POZ) domain containing 18;
  Uniprot ID:  B2RXH4;
  ENSP ID: ENSP00000397020

SEQ ID NO: 9943 - protein, 89 aa, Homo sapiens
  Payload ID: 1998;
  Gene Symbol: BTBD18;
  Gene Name: BTB (POZ) domain containing 18;
  ENSP ID: ENSP00000432341
MCSPASPKILYRNPRFLRLAFLQLHHQQQSDVFCDVLLQAEGEAVPAHCCILSACSPFFTERLERERPAQGGKVVLELGGLKISTLRKL

SEQ ID NO: 9944 - protein, 253 aa, Homo sapiens
  Payload ID: 1999;
  Gene Symbol: BTBD19;
  Gene Name: BTB (POZ) domain containing 19;
  ENSP ID: ENSP00000386506
MEPLGLVVHGKAEPFSAALRSLVNNPRYSDVCFVVGQERQEVFAHRCLLACRCNFFQRLLGTEPGPGVPSPVVLSTVPTEAFLAVLEFLYTNSVKLYRHSVAVTFGLGQLQERCVAFIEAHSQEALRTRGFLELSAAALLPLLRSDKLCVDEAELVRAARSWARVGAAVLERPVAEVAAPVVKELRLALLAPAELSALEEQNRQEPLIPVEQIVEAWKCHALRRGDEARGAPCRRRRGTLPREHHRFLDLSFK

SEQ ID NO: 9945 - protein, 291 aa, Homo sapiens
  Payload ID: 1999;
  Gene Symbol: BTBD19;
  Gene Name: BTB (POZ) domain containing 19;
  Uniprot ID:  C9JJ37;
  ENSP ID: ENSP00000395461
MEPLGLVVHGKAEPFSAALRSLVNNPRYSDVCFVVGQERQEVFAHRCLLACRCNFFQRLLGTEPGPGVPSPVVLSTVPTEAFLAVLEFLYTNSVKLYRHSVLEVLTAAVEYGLEELRELCLQFVVKVLDVDLVCEALQVAVTFGLGQLQERCVAFIEAHSQEALRTRGFLELSAAALLPLLRSDKLCVDEAELVRAARSWARVGAAVLERPVAEVAAPVVKELRLALLAPAELSALEEQNRQEPLIPVEQIVEAWKCHALRRGDEARGAPCRRRRGTLPREHHRFLDLSFK

SEQ ID NO: 9946 - protein, 162 aa, Homo sapiens
  Payload ID: 1999;
  Gene Symbol: BTBD19;
  Gene Name: BTB (POZ) domain containing 19;
  Uniprot ID:  C9JJ37;
  ENSP ID: ENSP00000410162
MEPLGLVVHGKAEPFSAALRSLVNNPRYSDVCFVVGQERQEVFAHRCLLACRCNFFQRLLGTEPGPGVPSPVVLSTVPTEAFLAVLEFLYTNSVKLYRHSVLEVLTAAVEYGLEELRELCLQFVVKVLDVDLVCEALQHFWRPRRADQEVRRSRPSWLTRWP

SEQ ID NO: 9947 - protein, 525 aa, Homo sapiens
  Payload ID: 2000;
  Gene Symbol: BTBD2;
  Gene Name: BTB (POZ) domain containing 2;
  Uniprot ID:  Q9BX70;
  ENSP ID: ENSP00000255608
MAAGGSGGRASCPPGVGVGPGTGGSPGPSANAAATPAPGNAAAAAAAAAAAAAAPGPTPPAPPGPGTDAQAAGAERAEEAAGPGAAALQREAAYNWQASKPTVQERFAFLFNNEVLCDVHFLVGKGLSSQRIPAHRFVLAVGSAVFDAMFNGGMATTSTEIELPDVEPAAFLALLKFLYSDEVQIGPETVMTTLYTAKKYAVPALEAHCVEFLKKNLRADNAFMLLTQARLFDEPQLASLCLENIDKNTADAITAEGFTDIDLDTLVAVLERDTLGIREVRLFNAVVRWSEAECQRQQLQVTPENRRKVLGKALGLIRFPLMTIEEFAAGPAQSGILVDREVVSLFLHFTVNPKPRVEFIDRPRCCLRGKECSINRFQQVESRWGYSGTSDRIRFSVNKRIFVVGFGLYGSIHGPTDYQVNIQIIHTDSNTVLGQNDTGFSCDGSASTFRVMFKEPVEVLPNVNYTACATLKGPDSHYGTKGLRKVTHESPTTGAKTCFTFCYAAGNNNGTSVEDGQIPEVIFYT

SEQ ID NO: 9948 - protein, 111 aa, Homo sapiens
  Payload ID: 2000;
  Gene Symbol: BTBD2;
  Gene Name: BTB (POZ) domain containing 2;
  ENSP ID: ENSP00000466686
  MOD_RES (1)..(1): Any amino acid
XLGRRRPPRRAPGQTRRPRARSGRRRRRARGRRRCSARPRTTGRPASPPCRSASPSSSTTRCCATCTSWWARGSARSASPRTGTLPLPPAPLCAKTPRPCSLRPPCCLQTQ

SEQ ID NO: 9949 - protein, 321 aa, Homo sapiens
  Payload ID: 2000;
  Gene Symbol: BTBD2;
  Gene Name: BTB (POZ) domain containing 2;
  ENSP ID: ENSP00000467113
  MOD_RES (1)..(1): Any amino acid
XFNGGMATTSTEIELPDVEPAAFLALLKFLYSDEVQIGPETVMTTLYTAKKYAVPALEAHCVEFLKKNLRADNAFMLLTQAGVQWHDLSSLQPPPPAFKRFSCLSLHSSWDYRPPPPRLAKKKEKKKPERTFSLSLRKCQARLFDEPQLASLCLENIDKNTADAITAEGFTDIDLDTLVAVLERDTLGIREVRLFNAVVRWSEAECQRQQLQVTPENRRKVLGKALGLIRFPLMTIEEFAAGPAQSGILVDREVVSLFLHFTVNPKPRVEFIDRPRCCLRGKECSINRFQQVESRWGYSGTSDRIRFSVNKRIFVVGFGLY

SEQ ID NO: 9950 - protein, 25 aa, Homo sapiens
  Payload ID: 2000;
  Gene Symbol: BTBD2;
  Gene Name: BTB (POZ) domain containing 2;
  ENSP ID: ENSP00000478992
MFNGGMATTSTEIELPDVEPAAFLA

SEQ ID NO: 9951 - protein, 116 aa, Homo sapiens
  Payload ID: 2000;
  Gene Symbol: BTBD2;
  Gene Name: BTB (POZ) domain containing 2;
  ENSP ID: ENSP00000481163
VQCRCPLVRGRVSAAAAAGPAQSGILVDREVVSLFLHFTVNPKPRVEFIDRPRCCLRGKECSINRFQQVESRWGYSGTSDRIRFSVNKRIFVVGFGLYGSIHGPTDYQVNIQIIHT

SEQ ID NO: 9952 - protein, 53 aa, Homo sapiens
  Payload ID: 2000;
  Gene Symbol: BTBD2;
  Gene Name: BTB (POZ) domain containing 2;
  ENSP ID: ENSP00000481529
MFNGGMATTSTEIELPDVEPAAFLALLKFLYSDEVQIGPETVMTTLYTAKKYA

SEQ ID NO: 9953 - protein, 35 aa, Homo sapiens
  Payload ID: 2000;
  Gene Symbol: BTBD2;
  Gene Name: BTB (POZ) domain containing 2;
  ENSP ID: ENSP00000483892
MFNGGMATTSTEIELPDVEPAAFLALLKFLYSDEV

SEQ ID NO: 9954 - protein, 461 aa, Homo sapiens
  Payload ID: 2001;
  Gene Symbol: BTBD3;
  Gene Name: BTB (POZ) domain containing 3;
  Uniprot ID:  Q9Y2F9;
  ENSP ID: ENSP00000254977
MAADIFPRKKPANSSSTSVQQYHQQNLSNNNLIPAPNWQGLYPTIRERNAMMFNNDLMADVHFVVGPPGGTQRLPGHKYVLAVGSSVFHAMFYGELAEDKDEIRIPDVEPAAFLAMLKYIYCDEIDLAADTVLATLYAAKKYIVPHLARACVNFLETSLSAKNACVLLSQSCLFEEPDLTQRCWEVIDAQAELALKSEGFCDIDFQTLESILRRETLNAKEIVVFEAALNWAEVECQRQDLALSIENKRKVLGKALYLIRIPTMALDDFANGAAQSGVLTLNETNDIFLWYTAAKKPELQFVSKARKGLVPQRCHRFQSCAYRSNQWRYRGRCDSIQFAVDKRVFIAGFGLYGSSCGSAEYSAKIELKRQGVVLGQNLSKYFSDGSSNTFPVWFEYPVQIEPDTFYTASVILDGNELSYFGQEGMTEVQCGKVTVQFQCSSDSTNGTGVQGGQIPELIFYA

SEQ ID NO: 9955 - protein, 522 aa, Homo sapiens
  Payload ID: 2001;
  Gene Symbol: BTBD3;
  Gene Name: BTB (POZ) domain containing 3;
  Uniprot ID:  Q9Y2F9;
  ENSP ID: ENSP00000367471
MVDDKEKNMKCLTFFLMLPETVKNRSKKSSKKANTSSSSSNSSKLPPVCYEIITLKTKKKKMAADIFPRKKPANSSSTSVQQYHQQNLSNNNLIPAPNWQGLYPTIRERNAMMFNNDLMADVHFVVGPPGGTQRLPGHKYVLAVGSSVFHAMFYGELAEDKDEIRIPDVEPAAFLAMLKYIYCDEIDLAADTVLATLYAAKKYIVPHLARACVNFLETSLSAKNACVLLSQSCLFEEPDLTQRCWEVIDAQAELALKSEGFCDIDFQTLESILRRETLNAKEIVVFEAALNWAEVECQRQDLALSIENKRKVLGKALYLIRIPTMALDDFANGAAQSGVLTLNETNDIFLWYTAAKKPELQFVSKARKGLVPQRCHRFQSCAYRSNQWRYRGRCDSIQFAVDKRVFIAGFGLYGSSCGSAEYSAKIELKRQGVVLGQNLSKYFSDGSSNTFPVWFEYPVQIEPDTFYTASVILDGNELSYFGQEGMTEVQCGKVTVQFQCSSDSTNGTGVQGGQIPELIFYA

SEQ ID NO: 9956 - protein, 461 aa, Homo sapiens; identical to SEQ ID NO: 9954
  Payload ID: 2001;
  Gene Symbol: BTBD3;
  Gene Name: BTB (POZ) domain containing 3;
  Uniprot ID:  Q9Y2F9;
  ENSP ID: ENSP00000381971

SEQ ID NO: 9957 - protein, 522 aa, Homo sapiens; identical to SEQ ID NO: 9955
  Payload ID: 2001;
  Gene Symbol: BTBD3;
  Gene Name: BTB (POZ) domain containing 3;
  Uniprot ID:  Q9Y2F9;
  ENSP ID: ENSP00000384545

SEQ ID NO: 9958 - protein, 135 aa, Homo sapiens
  Payload ID: 2001;
  Gene Symbol: BTBD3;
  Gene Name: BTB (POZ) domain containing 3;
  ENSP ID: ENSP00000397809
MAADIFPRKKPANSSSTSVQQYHQQNLSNNNLIPAPNWQGLYPTIRERNAMMFNNDLMADVHFVVGPPGGTQRLPGHKYVLAVGSSVFHAMFYGELAEDKDEIRIPDVEPAAFLAMLKYIYCDEIDLAADTVLAT

SEQ ID NO: 9959 - protein, 1 aa, Homo sapiens
  Payload ID: 2001;
  Gene Symbol: BTBD3;
  Gene Name: BTB (POZ) domain containing 3;
  ENSP ID: ENSP00000404268
M

SEQ ID NO: 9960 - protein, 99 aa, Homo sapiens
  Payload ID: 2001;
  Gene Symbol: BTBD3;
  Gene Name: BTB (POZ) domain containing 3;
  ENSP ID: ENSP00000404582
MMFNNDLMADVHFVVGPPGGTQRLPGHKYVLAVGSSVFHAMFYGELAEDKDEIRIPDVEPAAFLAMLKYIYCDEIDLAADTVLATLYAAKKYIVPHLAR

SEQ ID NO: 9961 - protein, 139 aa, Homo sapiens
  Payload ID: 2001;
  Gene Symbol: BTBD3;
  Gene Name: BTB (POZ) domain containing 3;
  ENSP ID: ENSP00000408817
MMFNNDLMADVHFVVGPPGGTQRLPGHKYVLAVGSSVFHAMFYGELAEDKDEIRIPDVEPAAFLAMLKYIYCDEIDLAADTVLATLYAAKKYIVPHLARACVNFLETSLSAKNACVLLSQSCLFEEPDLTQRCWEVIDA

SEQ ID NO: 9962 - protein, 50 aa, Homo sapiens
  Payload ID: 2001;
  Gene Symbol: BTBD3;
  Gene Name: BTB (POZ) domain containing 3;
  ENSP ID: ENSP00000410502
MAADIFPRKKPANSSSTSVQQYHQQNLSNNNLIPAPNWQGLYPTIRESMF

SEQ ID NO: 9963 - protein, 461 aa, Homo sapiens; identical to SEQ ID NO: 9954
  Payload ID: 2001;
  Gene Symbol: BTBD3;
  Gene Name: BTB (POZ) domain containing 3;
  Uniprot ID:  Q9Y2F9;
  ENSP ID: ENSP00000477589

SEQ ID NO: 9964 - protein, 461 aa, Homo sapiens; identical to SEQ ID NO: 9954
  Payload ID: 2001;
  Gene Symbol: BTBD3;
  Gene Name: BTB (POZ) domain containing 3;
  Uniprot ID:  Q9Y2F9;
  ENSP ID: ENSP00000483520

SEQ ID NO: 9965 - protein, 410 aa, Homo sapiens
  Payload ID: 2002;
  Gene Symbol: BTBD6;
  Gene Name: BTB (POZ) domain containing 6;
  Uniprot ID:  Q96KE9;
  ENSP ID: ENSP00000329361
MFNNELMADVHFVVGPPGATRTVPAHKYVLAVGSSVFYAMFYGDLAEVKSEIHIPDVEPAAFLILLKYMYSDEIDLEADTVLATLYAAKKYIVPALAKACVNFLETSLEAKNACVLLSQSRLFEEPELTQRCWEVIDAQAEMALRSEGFCEIDRQTLEIIVTREALNTKEAVVFEAVLNWAEAECKRQGLPITPRNKRHVLGRALYLVRIPTMTLEEFANGAAQSDILTLEETHSIFLWYTATNKPRLDFPLTKRKGLAPQRCHRFQSSAYRSNQWRYRGRCDSIQFAVDRRVFIAGLGLYGSSSGKAEYSVKIELKRLGVVLAQNLTKFMSDGSSNTFPVWFEHPVQVEQDTFYTASAVLDGSELSYFGQEGMTEVQCGKVAFQFQCSSDSTNGTGVQGGQIPELIFYA

SEQ ID NO: 9966 - protein, 485 aa, Homo sapiens
  Payload ID: 2002;
  Gene Symbol: BTBD6;
  Gene Name: BTB (POZ) domain containing 6;
  Uniprot ID:  Q96KE9;
  ENSP ID: ENSP00000376337
MAAELYAPASAAAADLANSNAGAAVGRKAGPRSPPSAPAPAPPPPAPAPPTLGNNHQESPGWRCCRPTLRERNALMFNNELMADVHFVVGPPGATRTVPAHKYVLAVGSSVFYAMFYGDLAEVKSEIHIPDVEPAAFLILLKYMYSDEIDLEADTVLATLYAAKKYIVPALAKACVNFLETSLEAKNACVLLSQSRLFEEPELTQRCWEVIDAQAEMALRSEGFCEIDRQTLEIIVTREALNTKEAVVFEAVLNWAEAECKRQGLPITPRNKRHVLGRALYLVRIPTMTLEEFANGAAQSDILTLEETHSIFLWYTATNKPRLDFPLTKRKGLAPQRCHRFQSSAYRSNQWRYRGRCDSIQFAVDRRVFIAGLGLYGSSSGKAEYSVKIELKRLGVVLAQNLTKFMSDGSSNTFPVWFEHPVQVEQDTFYTASAVLDGSELSYFGQEGMTEVQCGKVAFQFQCSSDSTNGTGVQGGQIPELIFYA

SEQ ID NO: 9967 - protein, 410 aa, Homo sapiens; identical to SEQ ID NO: 9965
  Payload ID: 2002;
  Gene Symbol: BTBD6;
  Gene Name: BTB (POZ) domain containing 6;
  Uniprot ID:  Q96KE9;
  ENSP ID: ENSP00000418150

SEQ ID NO: 9968 - protein, 485 aa, Homo sapiens; identical to SEQ ID NO: 9966
  Payload ID: 2002;
  Gene Symbol: BTBD6;
  Gene Name: BTB (POZ) domain containing 6;
  Uniprot ID:  Q96KE9;
  ENSP ID: ENSP00000443091

SEQ ID NO: 9969 - protein, 407 aa, Homo sapiens
  Payload ID: 2002;
  Gene Symbol: BTBD6;
  Gene Name: BTB (POZ) domain containing 6;
  ENSP ID: ENSP00000446223
MAAELYAPASAAAADLANSNAGAAVGRKAGPRSPPSAPAPAPPPPAPAPPTLGNNHQESPGWRCCRPTLRERNALMFNNELMADVHFVVGPPGATRTVPAHKYVLAVGSSVFYAMFYGDLAEVKSEIHIPDVEPAAFLILLKYMYSDEIDLEADTVLATLYAAKKYIVPALAKACVNFLETSLEAKNACVLLSQSRLFEEPELTQRCWEVIDAQAEMALRSEGFCEIDRQTLEIIVTREALNTKEAVVFEAVLNWAEAECKRQGLPITPRNKRHVLGRALYLVRIPTMTLEEFANGAAQSDILTLEETHSIFLWYTATNKPRLDFPLTKRKGLAPQRCHRFQSSAYRSNQWRYRGRCDSIQFAVDRRVFIAGLGLYGSSSGKAEYSVKIELKRLGVVLAQNLTKFMS

SEQ ID NO: 9970 - protein, 410 aa, Homo sapiens
  Payload ID: 2003;
  Gene Symbol: BTBD7;
  Gene Name: BTB (POZ) domain containing 7;
  Uniprot ID:  Q9P203;
  ENSP ID: ENSP00000298896
MGANASNYPHSCSPRVGGNSQAQQTFIGTSSYSQQGYGCESKLYSLDHGHEKPQDKKKRTSGLATLKKKFIKRRKSNRSADHAKQMRELLSGWDVRDVNALVEEYEGTSALKELSLQASLARPEARTLQKDMADLYEYKYCTDVDLIFQETCFPVHRAILAARCPFFKTLLSSSPEYGAEIIMDINTAGIDMPMFSALLHYLYTGEFGMEDSRFQNVDILVQLSEEFGTPNSLDVDMRGLFDYMCYYDVVLSFSSDSELVEAFGGNQNCLDEELKAHKAVISARSPFFRNLLQRRIRTGEEITDRTLRTPTRIILDESIIPKKYATVILHCMYTDVVDLSVLHCSPSVGSLSEVQALVAGKPNMTRAEEAMELYHIALFLEFNMLAQEETTVIRPACAAELSNSCLLPQS

SEQ ID NO: 9971 - protein, 1132 aa, Homo sapiens
  Payload ID: 2003;
  Gene Symbol: BTBD7;
  Gene Name: BTB (POZ) domain containing 7;
  Uniprot ID:  Q9P203;
  ENSP ID: ENSP00000335615
MGANASNYPHSCSPRVGGNSQAQQTFIGTSSYSQQGYGCESKLYSLDHGHEKPQDKKKRTSGLATLKKKFIKRRKSNRSADHAKQMRELLSGWDVRDVNALVEEYEGTSALKELSLQASLARPEARTLQKDMADLYEYKYCTDVDLIFQETCFPVHRAILAARCPFFKTLLSSSPEYGAEIIMDINTAGIDMPMFSALLHYLYTGEFGMEDSRFQNVDILVQLSEEFGTPNSLDVDMRGLFDYMCYYDVVLSFSSDSELVEAFGGNQNCLDEELKAHKAVISARSPFFRNLLQRRIRTGEEITDRTLRTPTRIILDESIIPKKYATVILHCMYTDVVDLSVLHCSPSVGSLSEVQALVAGKPNMTRAEEAMELYHIALFLEFNMLAQGCEDIIAESISLDTLIAILKWSSHPYGSKWVHRQALHFLCEEFSQVMTSDVFYELSKDHLLTAIQSDYLQASEQDILKYLIKWGEHQLMKRIADREPNLLSGTAHSVNKRGVKRRDLDMEELREILSSLLPFVRIEHILPINSEVLSDAMKRGLISTPPSDMLPTTEGGKSNAWLRQKNAGIYVRPRLFSPYVEEAKSVLDEMMVEQTDLVRLRMVRMSNVPDTLYMVNNAVPQCCHMISHQQISSNQSSPPSVVANEIPVPRLLIMKDMVRRLQELRHTEQVQRAYALNCGEGATVSYEIQIRVLREFGLADAAAELLQNPHKFFPDERFGDESPLLTMRQPGRCRVNSTPPAETMFTDLDSFVAFHPPLPPPPPPYHPPATPIHNQLKAGWKQRPPSQHPSRSFSYPCNHSLFHSRTAPKAGPPPVYLPSVKAAPPDCTSTAGLGRQTVAAAAATTTSTATAAAAAASEKQVRTQPVLNDLMPDIAVGVSTLSLKDRRLPELAVDTELSQSVSEAGPGPPQHLSCIPQRHTHTSRKKHTLEQKTDTRENPQEYPDFYDFSNAACRPSTPALSRRTPSPSQGGYFGPDLYSHNKASPSGLKSAYLPGQTSPKKQEEARREYPLSPDGHLHRQKNEPIHLDVVEQPPQRSDFPLAAPENASTGPAHVRGRTAVETDLTFGLTPNRPSLSACSSEAPEERSGRRLADSESLGHGAQRNTDLEREDSISRGRRSPSKPDFLYKKSAL

SEQ ID NO: 9972 - protein, 26 aa, Homo sapiens
  Payload ID: 2003;
  Gene Symbol: BTBD7;
  Gene Name: BTB (POZ) domain containing 7;
  ENSP ID: ENSP00000347246
  MOD_RES (1)..(1): Any amino acid
XTRAEEAMELYHIALFLEFNMLAQGK

SEQ ID NO: 9973 - protein, 55 aa, Homo sapiens
  Payload ID: 2003;
  Gene Symbol: BTBD7;
  Gene Name: BTB (POZ) domain containing 7;
  ENSP ID: ENSP00000450704
MGANASNYPHSCSPRVGGNSQAQQTFIGTSSYSQQGYGCESKLYSLDHGHEKPQD

SEQ ID NO: 9974 - protein, 747 aa, Homo sapiens
  Payload ID: 2003;
  Gene Symbol: BTBD7;
  Gene Name: BTB (POZ) domain containing 7;
  ENSP ID: ENSP00000450778
LLQRRIRTGEEITDRTLRTPTRIILDESIIPKKYATVILHCMYTDVVDLSVLHCSPSVGSLSEVQALVAGKPNMTRAEEAMELYHIALFLEFNMLAQEPNLLSGTAHSVNKRGVKRRDLDMEELREILSSLLPFVRIEHILPINSEVLSDAMKRGLISTPPSDMLPTTEGGKSNAWLRQKNAGIYVRPRLFSPYVEEAKSVLDEMMVEQTDLVRLRMVRMSNVPDTLYMVNNAVPQCCHMISHQQISSNQSSPPSVVANEIPVPRLLIMKDMVRRLQELRHTEQVQRAYALNCGEGATVSYEIQIRVLREFGLADAAAELLQNPHKFFPDERFGDESPLLTMRQPGRCRVNSTPPAETMFTDLDSFVAFHPPLPPPPPPYHPPATPIHNQLKAGWKQRPPSQHPSRSFSYPCNHSLFHSRTAPKAGPPPVYLPSVKAAPPDCTSTAGLGRQTVAAAAATTTSTATAAAAAASEKQVRTQPVLNDLMPDIAVGVSTLSLKDRRLPELAVDTELSQSVSEAGPGPPQHLSCIPQRHTHTSRKKHTLEQKTDTRENPQEYPDFYDFSNAACRPSTPALSRRTPSPSQGGYFGPDLYSHNKASPSGLKSAYLPGQTSPKKQEEARREYPLSPDGHLHRQKNEPIHLDVVEQPPQRSDFPLAAPENASTGPAHVRGRTAVETDLTFGLTPNRPSLSACSSEAPEERSGRRLADSESLGHGAQRNTDLEREDSISRGRRSPSKPDFLYKKSAL

SEQ ID NO: 9975 - protein, 781 aa, Homo sapiens
  Payload ID: 2003;
  Gene Symbol: BTBD7;
  Gene Name: BTB (POZ) domain containing 7;
  Uniprot ID:  Q9P203;
  ENSP ID: ENSP00000451010
MAGGAGAGADGGAGGGGGGGDGSGPSGSSSGGRSLRGCEDIIAESISLDTLIAILKWSSHPYGSKWVHRQALHFLCEEFSQVMTSDVFYELSKDHLLTAIQSDYLQASEQDILKYLIKWGEHQLMKRIADREPNLLSGTAHSVNKRGVKRRDLDMEELREILSSLLPFVRIEHILPINSEVLSDAMKRGLISTPPSDMLPTTEGGKSNAWLRQKNAGIYVRPRLFSPYVEEAKSVLDEMMVEQTDLVRLRMVRMSNVPDTLYMVNNAVPQCCHMISHQQISSNQSSPPSVVANEIPVPRLLIMKDMVRRLQELRHTEQVQRAYALNCGEGATVSYEIQIRVLREFGLADAAAELLQNPHKFFPDERFGDESPLLTMRQPGRCRVNSTPPAETMFTDLDSFVAFHPPLPPPPPPYHPPATPIHNQLKAGWKQRPPSQHPSRSFSYPCNHSLFHSRTAPKAGPPPVYLPSVKAAPPDCTSTAGLGRQTVAAAAATTTSTATAAAAAASEKQVRTQPVLNDLMPDIAVGVSTLSLKDRRLPELAVDTELSQSVSEAGPGPPQHLSCIPQRHTHTSRKKHTLEQKTDTRENPQEYPDFYDFSNAACRPSTPALSRRTPSPSQGGYFGPDLYSHNKASPSGLKSAYLPGQTSPKKQEEARREYPLSPDGHLHRQKNEPIHLDVVEQPPQRSDFPLAAPENASTGPAHVRGRTAVETDLTFGLTPNRPSLSACSSEAPEERSGRRLADSESLGHGAQRNTDLEREDSISRGRRSPSKPDFLYKKSAL

SEQ ID NO: 9976 - protein, 478 aa, Homo sapiens
  Payload ID: 2003;
  Gene Symbol: BTBD7;
  Gene Name: BTB (POZ) domain containing 7;
  ENSP ID: ENSP00000451408
MGANASNYPHSCSPRVGGNSQAQQTFIGTSSYSQQGYGCESKLYSLDHGHEKPQDKKKRTSGLATLKKKFIKRRKSNRSADHAKQMRELLSGWDVRDVNALVEEYEGTSALKELSLQASLARPEARTLQKDMADLYEYKYCTDVDLIFQETCFPVHRAILAARCPFFKTLLSSSPEYGAEIIMDINTAGIDMPMFSALLHYLYTGEFGMEDSRFQNVDILVQLSEEFGTPNSLDVDMRGLFDYMCYYDVVLSFSSDSELVEAFGGNQNCLDEELKAHKAVISARSPFFRNLLQRRIRTGEEITDRTLRTPTRIILDESIIPKKYATVILHCMYTDVVDLSVLHCSPSVGSLSEVQALVAGKPNMTRAEEAMELYHIALFLEFNMLAQACLPFVLQRRLQSSGLPVQQSFQTAAYCLNLKYENPSKDNWTFEESFQIETEIRAKRTKSWRKQTMKGAEENFSRIKISLYKRTFYGISET

SEQ ID NO: 9977 - protein, 26 aa, Homo sapiens
  Payload ID: 2003;
  Gene Symbol: BTBD7;
  Gene Name: BTB (POZ) domain containing 7;
  ENSP ID: ENSP00000478856
  MOD_RES (1)..(1): Any amino acid
XTRAEEAMELYHIALFLEFNMLAQGK

SEQ ID NO: 9978 - protein, 1132 aa, Homo sapiens; identical to SEQ ID NO: 9971
  Payload ID: 2003;
  Gene Symbol: BTBD7;
  Gene Name: BTB (POZ) domain containing 7;
  Uniprot ID:  Q9P203;
  ENSP ID: ENSP00000479193

SEQ ID NO: 9979 - protein, 410 aa, Homo sapiens; identical to SEQ ID NO: 9970
  Payload ID: 2003;
  Gene Symbol: BTBD7;
  Gene Name: BTB (POZ) domain containing 7;
  Uniprot ID:  Q9P203;
  ENSP ID: ENSP00000481899

SEQ ID NO: 9980 - protein, 747 aa, Homo sapiens; identical to SEQ ID NO: 9974
  Payload ID: 2003;
  Gene Symbol: BTBD7;
  Gene Name: BTB (POZ) domain containing 7;
  ENSP ID: ENSP00000486038

SEQ ID NO: 9981 - protein, 781 aa, Homo sapiens; identical to SEQ ID NO: 9975
  Payload ID: 2003;
  Gene Symbol: BTBD7;
  Gene Name: BTB (POZ) domain containing 7;
  Uniprot ID:  Q9P203;
  ENSP ID: ENSP00000486274

SEQ ID NO: 9982 - protein, 55 aa, Homo sapiens; identical to SEQ ID NO: 9973
  Payload ID: 2003;
  Gene Symbol: BTBD7;
  Gene Name: BTB (POZ) domain containing 7;
  ENSP ID: ENSP00000486412

SEQ ID NO: 9983 - protein, 478 aa, Homo sapiens; identical to SEQ ID NO: 9976
  Payload ID: 2003;
  Gene Symbol: BTBD7;
  Gene Name: BTB (POZ) domain containing 7;
  ENSP ID: ENSP00000486521

SEQ ID NO: 9984 - protein, 378 aa, Homo sapiens
  Payload ID: 2004;
  Gene Symbol: BTBD8;
  Gene Name: BTB (POZ) domain containing 8;
  Uniprot ID:  Q5XKL5;
  ENSP ID: ENSP00000343686
MARCGEGSAAPMVLLGSAGVCSKGLQRKGPCERRRLKATVSEQLSQDLLRLLREEFHTDVTFSVGCTLFKAHKAVLLARVPDFYFHTIGQTSNSLTNQEPIAVENVEALEFRTFLQIIYSSNRNIKNYEEEILRKKIMEIGISQKQLDISFPKCENSSDCSLQKHEIPEDISDRDDDFISNDNYDLEPASELGEDLLKLYVKPCCPDIDIFVDGKRFKAHRAILSARSSYFAAMLSGCWAESSQEYVTLQGISHVELNVMMHFIYGGTLDIPDKTNVGQILNMADMYGLEGLKEVAIYILRRDYCNFFQKPVPRTLTSILECLIIAHSVGVESLFADCMKWIVKHFARFWSERSFANIPPEIQKSCLNMLIQSLVSIT

SEQ ID NO: 9985 - protein, 305 aa, Homo sapiens
  Payload ID: 2004;
  Gene Symbol: BTBD8;
  Gene Name: BTB (POZ) domain containing 8;
  Uniprot ID:  Q5XKL5;
  ENSP ID: ENSP00000359408
MARCGEGSAAPMVLLGSAGVCSKGLQRKGPCERRRLKATVSEQLSQDLLRLLREEFHTDVTFSVGCTLFKAHKAVLLARVPDFYFHTIGQTSNSLTNQEPIAVENVEALEFRTFLQIIYSSNRNIKNYEEEILRKKIMEIGISQKQLDISFPKCENSSDCSLQKHEIPEDISDRDDDFISNDNYDLEPASELGEDLLKLYVKPCCPDIDIFVDGKRFKAHRAILSARSSYFAAMLSGCWAESSQEYVTLQGISHVELNVMMHFIYGGTLDIPDKTNVGYVFLFNNLKYKRVRFCFVELCCKVLMK

SEQ ID NO: 9986 - protein, 544 aa, Homo sapiens
  Payload ID: 2005;
  Gene Symbol: BTBD9;
  Gene Name: BTB (POZ) domain containing 9;
  Uniprot ID:  Q96Q07;
  ENSP ID: ENSP00000323408
MRESQPEAEIPLQDTTAEAFTMLLKYIYTGRATLTDEKEEVLLDFLSLAHKYGFPELEDSTSEYLCTILNIQNVCMTFDVASLYSLPKLTCMCCMFMDRNAQEVLSSEGFLSLSKTALLNIVLRDSFAAPEKDIFLALLNWCKHNSKENHAEIMQAVRLPLMSLTELLNVVRPSGLLSPDAILDAIKVRSESRDMDLNYRGMLIPEENIATMKYGAQVVKGELKSALLDGDTQNYDLDHGFSRHPIDDDCRSGIEIKLGQPSIINHIRILLWDRDSRSYSYFIEVSMDELDWVRVIDHSQYLCRSWQKLYFPARVCRYIRIVGTHNTVNKIFHIVAFECMFTNKTFTLEKGLIVPMENVATIADCASVIEGVSRSRNALLNGDTKNYDWDSGYTCHQLGSGAIVVQLAQPYMIGSIRLLLWDCDDRSYSYYVEVSTNQQQWTMVADRTKVSCKSWQSVTFERQPASFIRIVGTHNTANEVFHCVHFECPEQQSSQKEENSEESGTGDTSLAGQQLDSHALRAPSGSSLPSSPGSNSRSPNRQHQ

SEQ ID NO: 9987 - protein, 318 aa, Homo sapiens
  Payload ID: 2005;
  Gene Symbol: BTBD9;
  Gene Name: BTB (POZ) domain containing 9;
  ENSP ID: ENSP00000328328
MRESQPEAEIPLQDTTAEAFTMLLKYIYTGRATLTDEKEEVLLDFLSLAHKYGFPELEDSTSEYLCTILNIQNVCMTFDVASLYSLPKLTCMCCMFMDRNAQEVLSSEGFLSLSKTALLNIVLRDSFAAPEKDIFLALLNWCKHNSKENHAEIMQAVRLPLMSLTELLNVVRPSGLLSPDAILDAIKVRSESRDMDLNYRGMLIPEENIATMKYGAQVVKGELKSALLDGDTQNYDLDHGFSRHPIDDDCRSGIEIKLGQPSIINHIRILLWDRDSRSYSYFIEVSMDELDWVRVIDHSQYLCRSWQKLYFPARVCSL

SEQ ID NO: 9988 - protein, 385 aa, Homo sapiens
  Payload ID: 2005;
  Gene Symbol: BTBD9;
  Gene Name: BTB (POZ) domain containing 9;
  ENSP ID: ENSP00000386121
MSNSHPLRPFTAVGEIDHVHILSEHIGALLIGEEYGDVTFVVEKKRFPAHRVILAARCQYFRALLYGGMRESQPEAEIPLQDTTAEAFTMLLKYIYTGRATLTDEKEEVLLDFLSLAHKYGFPELEDSTSEYLCTILNIQNVCMTFDVASLYSLPKLTCMCCMFMDRNAQEVLSSEGFLSLSKTALLNIVLRDSFAAPEKDIFLALLNWCKHNSKENHAEIMQAVRLPLMSLTELLNVVRPSGLLSPDAILDAIKVRSESRDMDLNYRGMLIPEENIATMKYGAQVVKGELKSALLDGDTQNYDLDHGFSRHPIDDDCRSGIEIKLGQPSIINHIRILLWDRDSRSYSYFIEVSMDELDWVRVIDHSQYLCRSWQKLYFPARVCR

SEQ ID NO: 9989 - protein, 354 aa, Homo sapiens
  Payload ID: 2005;
  Gene Symbol: BTBD9;
  Gene Name: BTB (POZ) domain containing 9;
  ENSP ID: ENSP00000386211
MCRALLYGGMRESQPEAEIPLQDTTAEAFTMLLKYIYTGRATLTDEKEEVLLDFLSLAHKYGFPELEDSTSEYLCTILNIQNVCMTFDVASLYSLPKLTCMCCMFMDRNAQEVLSSEGFLSLSKTALLNIVLRDSFAAPEKDIFLALLNWCKHNSKENHAEIMQAVRLPLMSLTELLNVVRPSGLLSPDAILDAIKVRSESRDMDLNYRGMLIPEENIATMKYGAQVVKGELKSALLDGDTQNYDLDHGFSRHPIDDDCRSGIEIKLGQPSIINHIRILLWDRDSRSYSYFIEVSMDELDWVRVIDHSQYLCRSWQKLYFPARVCSRDGALPCCPGWSSTPGLKRSDCFSLTKC

SEQ ID NO: 9990 - protein, 582 aa, Homo sapiens
  Payload ID: 2005;
  Gene Symbol: BTBD9;
  Gene Name: BTB (POZ) domain containing 9;
  Uniprot ID:  Q96Q07;
  ENSP ID: ENSP00000415365
MCRALLYGGMRESQPEAEIPLQDTTAEAFTMLLKYIYTGRATLTDEKEEVLLDFLSLAHKYGFPELEDSTSEYLCTILNIQNVCMTFDVASLYSLPKLTCMCCMFMDRNAQEVLSSEGFLSLSKTALLNIVLRDSFAAPEKDIFLALLNWCKHNSKENHAEIMQAVRLPLMSLTELLNVVRPSGLLSPDAILDAIKVRSESRDMDLNYRGMLIPEENIATMKYGAQVVKGELKSALLDGDTQNYDLDHGFSRHPIDDDCRSGIEIKLGQPSIINHIRILLWDRDSRSYSYFIEVSMDELDWVRVIDHSQYLCRSWQKLYFPARVCSGDGVSLWCPLWSRTPELKQSSLLGLPKCRYIRIVGTHNTVNKIFHIVAFECMFTNKTFTLEKGLIVPMENVATIADCASVIEGVSRSRNALLNGDTKNYDWDSGYTCHQLGSGAIVVQLAQPYMIGSIRLLLWDCDDRSYSYYVEVSTNQQQWTMVADRTKVSCKSWQSVTFERQPASFIRIVGTHNTANEVFHCVHFECPEQQSSQKEENSEESGTGDTSLAGQQLDSHALRAPSGSSLPSSPGSNSRSPNRQHQ

SEQ ID NO: 9991 - protein, 115 aa, Homo sapiens
  Payload ID: 2005;
  Gene Symbol: BTBD9;
  Gene Name: BTB (POZ) domain containing 9;
  ENSP ID: ENSP00000418201
MRESQPEAEIPLQDTTAEAFTMLLKYIYTGRATLTDEKEEVLLDFLSLAHKYGFPELEDSTSEYLCTILNIQNVCMTFDVASLYSLPKLTCMCCMFMDRNAQEVLSSEGFLSLSK

SEQ ID NO: 9992 - protein, 612 aa, Homo sapiens
  Payload ID: 2005;
  Gene Symbol: BTBD9;
  Gene Name: BTB (POZ) domain containing 9;
  Uniprot ID:  Q96Q07;
  ENSP ID: ENSP00000418751
MSNSHPLRPFTAVGEIDHVHILSEHIGALLIGEEYGDVTFVVEKKRFPAHRVILAARCQYFRALLYGGMRESQPEAEIPLQDTTAEAFTMLLKYIYTGRATLTDEKEEVLLDFLSLAHKYGFPELEDSTSEYLCTILNIQNVCMTFDVASLYSLPKLTCMCCMFMDRNAQEVLSSEGFLSLSKTALLNIVLRDSFAAPEKDIFLALLNWCKHNSKENHAEIMQAVRLPLMSLTELLNVVRPSGLLSPDAILDAIKVRSESRDMDLNYRGMLIPEENIATMKYGAQVVKGELKSALLDGDTQNYDLDHGFSRHPIDDDCRSGIEIKLGQPSIINHIRILLWDRDSRSYSYFIEVSMDELDWVRVIDHSQYLCRSWQKLYFPARVCRYIRIVGTHNTVNKIFHIVAFECMFTNKTFTLEKGLIVPMENVATIADCASVIEGVSRSRNALLNGDTKNYDWDSGYTCHQLGSGAIVVQLAQPYMIGSIRLLLWDCDDRSYSYYVEVSTNQQQWTMVADRTKVSCKSWQSVTFERQPASFIRIVGTHNTANEVFHCVHFECPEQQSSQKEENSEESGTGDTSLAGQQLDSHALRAPSGSSLPSSPGSNSRSPNRQHQ

SEQ ID NO: 9993 - protein, 92 aa, Homo sapiens
  Payload ID: 2005;
  Gene Symbol: BTBD9;
  Gene Name: BTB (POZ) domain containing 9;
  ENSP ID: ENSP00000419382
MSNSHPLRPFTAVGEIDHVHILSEHIGALLIGEEYGDVTFVVEKKRFPAHRVILAARCQYFRALLYGGMRESQPEAEIPLQDTTAEAFTMLL

SEQ ID NO: 9994 - protein, 736 aa, Homo sapiens
  Payload ID: 2006;
  Gene Symbol: BACH1;
  Gene Name: BTB and CNC homology 1, basic leu zipper transcription factor 1;
  Uniprot ID:  O14867;
  ENSP ID: ENSP00000286800
MSLSENSVFAYESSVHSTNVLLSLNDQRKKDVLCDVTIFVEGQRFRAHRSVLAACSSYFHSRIVGQADGELNITLPEEVTVKGFEPLIQFAYTAKLILSKENVDEVCKCVEFLSVHNIEESCFQFLKFKFLDSTADQQECPRKKCFSSHCQKTDLKLSLLDQRDLETDEVEEFLENKNVQTPQCKLRRYQGNAKASPPLQDSASQTYESMCLEKDAALALPSLCPKYRKFQKAFGTDRVRTGESSVKDIHASVQPNERSENECLGGVPECRDLQVMLKCDESKLAMEPEETKKDPASQCPTEKSEVTPFPHNSSIDPHGLYSLSLLHTYDQYGDLNFAGMQNTTVLTEKPLSGTDVQEKTFGESQDLPLKSDLGTREDSSVASSDRSSVEREVAEHLAKGFWSDICSTDTPCQMQLSPAVAKDGSEQISQKRSECPWLGIRISESPEPGQRTFTTLSSVNCPFISTLSTEGCSSNLEIGNDDYVSEPQQEPCPYACVISLGDDSETDTEGDSESCSAREQECEVKLPFNAQRIISLSRNDFQSLLKMHKLTPEQLDCIHDIRRRSKNRIAAQRCRKRKLDCIQNLESEIEKLQSEKESLLKERDHILSTLGETKQNLTGLCQKVCKEAALSQEQIQILAKYSAADCPLSFLISEKDKSTPDGELALPSIFSLSDRPPAVLPPCARGNSEPGYARGQESQQMSTATSEQAGPAEQCRQSGGISDFCQQMTDKCTTDE

SEQ ID NO: 9995 - protein, 736 aa, Homo sapiens; identical to SEQ ID NO: 9994
  Payload ID: 2006;
  Gene Symbol: BACH1;
  Gene Name: BTB and CNC homology 1, basic leu zipper transcription factor 1;
  Uniprot ID:  O14867;
  ENSP ID: ENSP00000382805

SEQ ID NO: 9996 - protein, 170 aa, Homo sapiens
  Payload ID: 2006;
  Gene Symbol: BACH1;
  Gene Name: BTB and CNC homology 1, basic leu zipper transcription factor 1;
  ENSP ID: ENSP00000392202
MSLSENSVFAYESSVHSTNVLLSLNDQRKKDVLCDVTIFVEGQRFRAHRSVLAACSSYFHSRIVGQADGELNITLPEEVTVKGFEPLIQFAYTAKLILSKENVDEVCKCVEFLSVHNIEESCFQFLKFKFLDSTADQQECPRKKCFSSHCQKTDLKLSLLDQRDLETDEV

SEQ ID NO: 9997 - protein, 224 aa, Homo sapiens
  Payload ID: 2006;
  Gene Symbol: BACH1;
  Gene Name: BTB and CNC homology 1, basic leu zipper transcription factor 1;
  ENSP ID: ENSP00000400576
MSLSENSVFAYESSVHSTNVLLSLNDQRKKDVLCDVTIFVEGQRFRAHRSVLAACSSYFHSRIVGQADGELNITLPEEVTVKGFEPLIQFAYTAKLILSKENVDEVCKCVEFLSVHNIEESCFQFLKFKFLDSTADQQECPRKKCFSSHCQKTDLKLSLLDQRDLETDEVEEFLENKNVQTPQCKLRRYQGNAKASPPLQDSASQTYESMCLEKDAALALPSLC

SEQ ID NO: 9998 - protein, 220 aa, Homo sapiens
  Payload ID: 2006;
  Gene Symbol: BACH1;
  Gene Name: BTB and CNC homology 1, basic leu zipper transcription factor 1;
  ENSP ID: ENSP00000408605
MSLSENSVFAYESSVHSTNVLLSLNDQRKKDVLCDVTIFVEGQRFRAHRSVLAACSSYFHSRIVGQADGELNITLPEEVTVKGFEPLIQFAYTAKLILSKENVDEVCKCVEFLSVHNIEESCFQFLKFKFLDSTADQQECPRKKCFSSHCQKTDLKLSLLDQRDLETDEVEEFLENKNVQTPQCKLRRYQGNAKASPPLQDSASQTYESMCLEKDAALAL

SEQ ID NO: 9999 - protein, 218 aa, Homo sapiens
  Payload ID: 2006;
  Gene Symbol: BACH1;
  Gene Name: BTB and CNC homology 1, basic leu zipper transcription factor 1;
  ENSP ID: ENSP00000416569
  MOD_RES (1)..(1): Any amino acid
XPWLGIRISESPEPGQRTFTTLSSVNCPFISTLSTEGCSSNLEIGNDDYVSEPQQEPCPYACVISLGDDSETDTEGDSESCSAREQECEVKLPFNAQRIISLSRNDFQSLLKMHKLTPEQLDCIHDIRRRSKNRIAAQRCRKRKLDCIQNLESEIEKLNHGLWSLNQQPWFANIPCTIVETGWMPCALSGHVRPTEGQIRVKRKPEDGRDIFEGTSCQ

SEQ ID NO: 10000 - protein, 25 aa, Homo sapiens
  Payload ID: 2006;
  Gene Symbol: BACH1;
  Gene Name: BTB and CNC homology 1, basic leu zipper transcription factor 1;
  ENSP ID: ENSP00000447332
MSLSENSVFAYESSVHSTNVLLSLN

SEQ ID NO: 10001 - protein, 25 aa, Homo sapiens
  Payload ID: 2006;
  Gene Symbol: BACH1;
  Gene Name: BTB and CNC homology 1, basic leu zipper transcription factor 1;
  ENSP ID: ENSP00000448663
MSLSENSVFAYESSVHSTNVLLSLN

SEQ ID NO: 10002 - protein, 25 aa, Homo sapiens
  Payload ID: 2006;
  Gene Symbol: BACH1;
  Gene Name: BTB and CNC homology 1, basic leu zipper transcription factor 1;
  ENSP ID: ENSP00000448982
MSLSENSVFAYESSVHSTNVLLSLN

SEQ ID NO: 10003 - protein, 25 aa, Homo sapiens
  Payload ID: 2006;
  Gene Symbol: BACH1;
  Gene Name: BTB and CNC homology 1, basic leu zipper transcription factor 1;
  ENSP ID: ENSP00000449316
MSLSENSVFAYESSVHSTNVLLSLN

SEQ ID NO: 10004 - protein, 25 aa, Homo sapiens
  Payload ID: 2006;
  Gene Symbol: BACH1;
  Gene Name: BTB and CNC homology 1, basic leu zipper transcription factor 1;
  ENSP ID: ENSP00000449383
MSLSENSVFAYESSVHSTNVLLSLN

SEQ ID NO: 10005 - protein, 138 aa, Homo sapiens
  Payload ID: 2006;
  Gene Symbol: BACH1;
  Gene Name: BTB and CNC homology 1, basic leu zipper transcription factor 1;
  ENSP ID: ENSP00000470673
  MOD_RES (1)..(1): Any amino acid
XSEPQQEPCPYACVISLGDDSETDTEGDSESCSAREQECEVKLPFNAQRIISLSRNDFQSLLKMHKLTPEQLDCIHDIRRRSKNRIAAQRCRKRKLDCIQNLESEIEKLPTSHAPSWRLAGCPVLYQGMSDQQRGKSE

SEQ ID NO: 10006 - protein, 841 aa, Homo sapiens
  Payload ID: 2007;
  Gene Symbol: BACH2;
  Gene Name: BTB and CNC homology 1, basic leu zipper transcription factor 2;
  Uniprot ID:  Q9BYV9;
  ENSP ID: ENSP00000257749
MSVDEKPDSPMYVYESTVHCTNILLGLNDQRKKDILCDVTLIVERKEFRAHRAVLAACSEYFWQALVGQTKNDLVVSLPEEVTARGFGPLLQFAYTAKLLLSRENIREVIRCAEFLRMHNLEDSCFSFLQTQLLNSEDGLFVCRKDAACQRPHEDCENSAGEEEDEEEETMDSETAKMACPRDQMLPEPISFEAAAIPVAEKEEALLPEPDVPTDTKESSEKDALTQYPRYKKYQLACTKNVYNASSHSTSGFASTFREDNSSNSLKPGLARGQIKSEPPSEENEEESITLCLSGDEPDAKDRAGDVEMDRKQPSPAPTPTAPAGAACLERSRSVASPSCLRSLFSITKSVELSGLPSTSQQHFARSPACPFDKGITQGDLKTDYTPFTGNYGQPHVGQKEVSNFTMGSPLRGPGLEALCKQEGELDRRSVIFSSSACDQVSTSVHSYSGVSSLDKDLSEPVPKGLWVGAGQSLPSSQAYSHGGLMADHLPGRMRPNTSCPVPIKVCPRSPPLETRTRTSSSCSSYSYAEDGSGGSPCSLPLCEFSSSPCSQGARFLATEHQEPGLMGDGMYNQVRPQIKCEQSYGTNSSDESGSFSEADSESCPVQDRGQEVKLPFPVDQITDLPRNDFQMMIKMHKLTSEQLEFIHDVRRRSKNRIAAQRCRKRKLDCIQNLECEIRKLVCEKEKLLSERNQLKACMGELLDNFSCLSQEVCRDIQSPEQIQALHRYCPVLRPMDLPTASSINPAPLGAEQNIAASQCAVGENVPCCLEPGAAPPGPPWAPSNTSENCTSGRRLEGTDPGTFSERGPPLEPRSQTVTVDFCQEMTDKCTTDEQPRKDYT

SEQ ID NO: 10007 - protein, 841 aa, Homo sapiens; identical to SEQ ID NO: 10006
  Payload ID: 2007;
  Gene Symbol: BACH2;
  Gene Name: BTB and CNC homology 1, basic leu zipper transcription factor 2;
  Uniprot ID:  Q9BYV9;
  ENSP ID: ENSP00000345642

SEQ ID NO: 10008 - protein, 81 aa, Homo sapiens
  Payload ID: 2007;
  Gene Symbol: BACH2;
  Gene Name: BTB and CNC homology 1, basic leu zipper transcription factor 2;
  ENSP ID: ENSP00000384145
MSVDEKPDSPMYVYESTVHCTNILLGLNDQRKKDILCDVTLIVERKEFRAHRAVLAACSEYFWQALVGQTKNDLVVSLPEE

SEQ ID NO: 10009 - protein, 81 aa, Homo sapiens; identical to SEQ ID NO: 10008
  Payload ID: 2007;
  Gene Symbol: BACH2;
  Gene Name: BTB and CNC homology 1, basic leu zipper transcription factor 2;
  ENSP ID: ENSP00000397668

SEQ ID NO: 10010 - protein, 841 aa, Homo sapiens; identical to SEQ ID NO: 10006
  Payload ID: 2007;
  Gene Symbol: BACH2;
  Gene Name: BTB and CNC homology 1, basic leu zipper transcription factor 2;
  Uniprot ID:  Q9BYV9;
  ENSP ID: ENSP00000437473

SEQ ID NO: 10011 - protein, 158 aa, Homo sapiens
  Payload ID: 2008;
  Gene Symbol: BTG2;
  Gene Name: BTG family, member 2;
  Uniprot ID:  P78543;
  ENSP ID: ENSP00000290551
MSHGKGTDMLPEIAAAVGFLSSLLRTRGCVSEQRLKVFSGALQEALTEHYKHHWFPEKPSKGSGYRCIRINHKMDPIISRVASQIGLSQPQLHQLLPSELTLWVDPYEVSYRIGEDGSICVLYEEAPLAASCGLLTCKNQVLLGRSSPSKNYVMAVSS

SEQ ID NO: 10012 - protein, 158 aa, Homo sapiens; identical to SEQ ID NO: 10011
  Payload ID: 2008;
  Gene Symbol: BTG2;
  Gene Name: BTG family, member 2;
  Uniprot ID:  P78543;
  ENSP ID: ENSP00000433553

SEQ ID NO: 10013 - protein, 252 aa, Homo sapiens
  Payload ID: 2009;
  Gene Symbol: BTG3;
  Gene Name: BTG family, member 3;
  Uniprot ID:  Q14201;
  ENSP ID: ENSP00000284879
MKNEIAAVVFFFTRLVRKHDKLKKEAVERFAEKLTLILQEKYKNHWYPEKPSKGQAYRCIRVNKFQRVDPDVLKACENSCILYSDLGLPKELTLWVDPCEVCCRYGEKNNAFIVASFENKDENKDEISRKVTRALDKVTSDYHSGSSSSDEETSKEMEVKPSSVTAAASPVYQISELIFPPLPMWHPLPRKKPGMYRGNGHQNHYPPPVPFGYPNQGRKNKPYRPIPVTWVPPPGMHCDRNHWINPHMLAPH

SEQ ID NO: 10014 - protein, 296 aa, Homo sapiens
  Payload ID: 2009;
  Gene Symbol: BTG3;
  Gene Name: BTG family, member 3;
  Uniprot ID:  Q14201;
  ENSP ID: ENSP00000344609
MKNEIAAVVFFFTRLVRKHDKLKKEAVERFAEKLTLILQEKYKNHWYPEKPSKGQAYRCIRVNKFQRVDPDVLKACENSCILYSDLGLPKELTLWVDPCEVCCRRDGVSPCWPDCSQTPDLVIRPPWPPKALDYRREPLRPASSFLIMYGEKNNAFIVASFENKDENKDEISRKVTRALDKVTSDYHSGSSSSDEETSKEMEVKPSSVTAAASPVYQISELIFPPLPMWHPLPRKKPGMYRGNGHQNHYPPPVPFGYPNQGRKNKPYRPIPVTWVPPPGMHCDRNHWINPHMLAPH

SEQ ID NO: 10015 - protein, 46 aa, Homo sapiens
  Payload ID: 2009;
  Gene Symbol: BTG3;
  Gene Name: BTG family, member 3;
  ENSP ID: ENSP00000413799
MKNEIAAVVFFFTRLVRKHDKLKKEAVERFAEKLTLILQEKYKNHW

SEQ ID NO: 10016 - protein, 46 aa, Homo sapiens; identical to SEQ ID NO: 10015
  Payload ID: 2009;
  Gene Symbol: BTG3;
  Gene Name: BTG family, member 3;
  ENSP ID: ENSP00000486833

SEQ ID NO: 10017 - protein, 147 aa, Homo sapiens
  Payload ID: 2009;
  Gene Symbol: BTG3;
  Gene Name: BTG family, member 3;
  ENSP ID: ENSP00000487035
MKNEIAAVVFFFTRLVRKHDKLKKEAVERFAEKLTLILQEKYKNHWYPEKPSKGQAYRCIRVNKFQRVDPDVLKACENSCILYSDLGLPKELTLWVDPCEVCCRRDGVSPCWPDCSQTPDLVIRPPWPPKALDYRREPLRPASSFLI

SEQ ID NO: 10018 - protein, 103 aa, Homo sapiens
  Payload ID: 2009;
  Gene Symbol: BTG3;
  Gene Name: BTG family, member 3;
  ENSP ID: ENSP00000487043
MKNEIAAVVFFFTRLVRKHDKLKKEAVERFAEKLTLILQEKYKNHWYPEKPSKGQAYRCIRVNKFQRVDPDVLKACENSCILYSDLGLPKELTLWVDPCEVCC

SEQ ID NO: 10019 - protein, 519 aa, Homo sapiens
  Payload ID: 2010;
  Gene Symbol: BANP;
  Gene Name: BTG3 associated nuclear prt;
  Uniprot ID:  Q8N9N5;
  ENSP ID: ENSP00000286122
MMSEHDLADVVQIAVEDLSPDHPVVLENHVVTDEDEPALKRQRLEINCQDPSIKTICLRLDSIEAKLQALEATCKSLEEKLDLVTNKQHSPIQVPMVAGSPLGATQTCNKVRCVVPQTTVILNNDRQNAIVAKMEDPLSNRAPDSLENVISNAVPGRRQNTIVVKVPGQEDSHHEDGESGSEASDSVSSCGQAGSQSIGSNVTLITLNSEEDYPNGTWLGDENNPEMRVRCAIIPSDMLHISTNCRTAEKMALTLLDYLFHREVQAVSNLSGQGKHGKKQLDPLTIYGIRCHLFYKFGITESDWYRIKQSIDSKCRTAWRRKQRGQSLAVKSFSRRTPNSSSYCPSEPMMSTPPPASELPQPQPQPQALHYALANAQQVQIHQIGEDGQVQVGHLHIAQVPQGEQVQITQDSEGNLQIHHVGQDGQLLEATRIPCLLAPSVFKASSGQVLQGAQLIAVASSDPAAAGVDGSPLQGSDIQVQYVQLAPVSDHTAGAQTAEALQPTLQPEMQLEHGAIQIQ

SEQ ID NO: 10020 - protein, 469 aa, Homo sapiens
  Payload ID: 2010;
  Gene Symbol: BANP;
  Gene Name: BTG3 associated nuclear prt;
  Uniprot ID:  Q8N9N5;
  ENSP ID: ENSP00000347125
MMSEHDLADVVQIAVEDLSPDHPVVLENHVVTDEDEPALKRQRLEINCQDPSIKSFLYSINQTICLRLDSIEAKLQALEATCKSLEEKLDLVTNKQHSPIQVPMVAGSPLGATQTCNKVRCAVPGRRQNTIVVKVPGQEDSHHEDGESGSEASDSVSSCGQAGSQSIGSNVTLITLNSEEDYPNGTWLGDENNPEMRVRCAIIPSDMLHISTNCRTAEKMALTLLDYLFHREVQAVSNLSGQGKHGKKQLDPLTIYGIRCHLFYKFGITESDWYRIKQSIDSKCRTAWRRKQRGQSLAVKSFSRRTPNSSSYCPSEPMMSTPPPASELPQPQPQPQALHYALANAQQVQIHQIGEDGQVQVIPQGHLHIAQVPQGEQVQITQDSEGNLQIHHVGQDGQVLQGAQLIAVASSDPAAAGVDGSPLQGSDIQVQYVQLAPVSDHTAGAQTAEALQPTLQPEMQLEHGAIQIQ

SEQ ID NO: 10021 - protein, 250 aa, Homo sapiens
  Payload ID: 2010;
  Gene Symbol: BANP;
  Gene Name: BTG3 associated nuclear prt;
  ENSP ID: ENSP00000347290
MGSPEPTQGPRLSPILIPYSGRRYKVGRASGALCHQDSLPPILELGLTFLRASAGFSVPTSSSFALPEPLRSLCLGNGEGLGLSLTLTVLAWILGLSGTLGALVLFMVATGIFQEALWHLLLLSFSVEALPCFFFFPFFLLCRCLRAELQIQQRLDGTLSLDLMRLESDGETGCAAESSVLQGAQLIAVASSDPAAAGVDGSPLQGSDIQVQYVQLAPVSDHTAGAQTAEALQPTLQPEMQLEHGAIQIQ

SEQ ID NO: 10022 - protein, 519 aa, Homo sapiens; identical to SEQ ID NO: 10019
  Payload ID: 2010;
  Gene Symbol: BANP;
  Gene Name: BTG3 associated nuclear prt;
  Uniprot ID:  Q8N9N5;
  ENSP ID: ENSP00000376902

SEQ ID NO: 10023 - protein, 491 aa, Homo sapiens
  Payload ID: 2010;
  Gene Symbol: BANP;
  Gene Name: BTG3 associated nuclear prt;
  Uniprot ID:  Q8N9N5;
  ENSP ID: ENSP00000376903
MMSEHDLADVVQIAVEDLSPDHPVVLENHVVTDEDEPALKRQRLEINCQDPSIKSFLYSINQTICLRLDSIEAKLQALEATCKSLEEKLDLVTNKQHSPIQVPMVAGSPLGATQTCNKVRCAVPGRRQNTIVVKVPGQEDSHHEDGESGSEASDSVSSCGQAGSQSIGSNVTLITLNSEEDYPNGTWLGDENNPEMRVRCAIIPSDMLHISTNCRTAEKMALTLLDYLFHREVQAVSNLSGQGKHGKKQLDPLTIYGIRCHLFYKFGITESDWYRIKQSIDSKCRTAWRRKQRGQSLAVKSFSRRTPNSSSYCPSEPMMSTPPPASELPQPQPQPQALHYALANAQQVQIHQIGEDGQVQVIPQGHLHIAQVPQGEQVQITQDSEGNLQIHHVGQDGQLLEATRIPCLLAPSVFKASSGQVLQGAQLIAVASSDPAAAGVDGSPLQGSDIQVQYVQLAPVSDHTAGAQTAEALQPTLQPEMQLEHGAIQIQ

SEQ ID NO: 10024 - protein, 118 aa, Homo sapiens
  Payload ID: 2010;
  Gene Symbol: BANP;
  Gene Name: BTG3 associated nuclear prt;
  ENSP ID: ENSP00000390504
MMSEHDLADVVQIAVEDLSPDHPVVLENHVVTDEDEPALKRQRLEINCQDPSIKSFLYSINQTICLRLDSIEAKLQALEATCKSLEEKLDLVTNKQHSPIQVPMVAGSPLGATQTCNK

SEQ ID NO: 10025 - protein, 123 aa, Homo sapiens
  Payload ID: 2010;
  Gene Symbol: BANP;
  Gene Name: BTG3 associated nuclear prt;
  ENSP ID: ENSP00000399576
MMSEHDLADVVQIAVEDLSPDHPVVLENHVVTDEDEPALKRQRLEINCQDPSIKSFLYSINQTICLRLDSIEAKLQALEATCKSLEEKLDLVTNKQHSPIQVPMVAGSPLGATQTCNKVRCVV

SEQ ID NO: 10026 - protein, 95 aa, Homo sapiens
  Payload ID: 2010;
  Gene Symbol: BANP;
  Gene Name: BTG3 associated nuclear prt;
  ENSP ID: ENSP00000401454
MMSEHDLADVVQIAVEDLSPDHPVVLENHVVTDEDEPALKRQRLEINCQDPSIKSFLYSINQTICLRLDSIEAKLQALEATCKSLEEKLDLVTNK

SEQ ID NO: 10027 - protein, 28 aa, Homo sapiens
  Payload ID: 2010;
  Gene Symbol: BANP;
  Gene Name: BTG3 associated nuclear prt;
  ENSP ID: ENSP00000401718
MMSEHDLADVVQIAVEDLSPDHPVVLEN

SEQ ID NO: 10028 - protein, 119 aa, Homo sapiens
  Payload ID: 2010;
  Gene Symbol: BANP;
  Gene Name: BTG3 associated nuclear prt;
  ENSP ID: ENSP00000410089
MMSEHDLADVVQIAVEDLSPDHPVVLENHVVTDEDEPALKRQRLEINCQDPSIKSFLYSINQTICLRLDSIEAKLQALEATCKSLEEKLDLVTNKQHSPIQVPMVAGSPLGATQTCNKV

SEQ ID NO: 10029 - protein, 194 aa, Homo sapiens
  Payload ID: 2010;
  Gene Symbol: BANP;
  Gene Name: BTG3 associated nuclear prt;
  ENSP ID: ENSP00000411479
MMSEHDLADVVQIAVEDLSPDHPGTELWDIVLENHVVTDEDEPALKRQRLEINCQDPSIKSFLYSINQTICLRLDSIEAKLQALEATCKSLEEKLDLVTNKQHSPIQVPMVAGSPLGATQTCNKVRCAVPGRRQNTIVVKVPGQEDSHHEDGESGSEASDSVSSCGQAGSQSIGSNVTLITLNSEEDYPNGTWL

SEQ ID NO: 10030 - protein, 56 aa, Homo sapiens
  Payload ID: 2010;
  Gene Symbol: BANP;
  Gene Name: BTG3 associated nuclear prt;
  ENSP ID: ENSP00000413717
MRSLPVRSHEAEGIAVCCTQGTPAPQPLSSWDYPVVLENHVVTDEDEPALKRQRLE

SEQ ID NO: 10031 - protein, 128 aa, Homo sapiens
  Payload ID: 2010;
  Gene Symbol: BANP;
  Gene Name: BTG3 associated nuclear prt;
  ENSP ID: ENSP00000431812
MMSEHDLADVVQIAVEDLSPDHPVVLENHVVTDEDEPALKRQRLEINCQDPSIKSFLYSINQTICLRLDSIEAKLQALEATCKSLEEKLDLVTNKQHSPIQVPMVAGSPLGATQTCNKVRCLPQQSGP

SEQ ID NO: 10032 - protein, 466 aa, Homo sapiens
  Payload ID: 2010;
  Gene Symbol: BANP;
  Gene Name: BTG3 associated nuclear prt;
  Uniprot ID:  Q8N9N5;
  ENSP ID: ENSP00000432508
MMSEHDLADVVQIAVEDLSPDHPVVLENHVVTDEDEPALKRQRLEINCQDPSIKSFLYSINQTICLRLDSIEAKLQALEATCKSLEEKLDLVTNKQHSPIQVPMVAGSPLGATQTCNKVRCAVPGRRQNTIVVKVPGQEDSHHEDGESGSEASDSVSSCGQAGSQSIGSNVTLITLNSEEDYPNGTWLGDENNPEMRVRCAIIPSDMLHISTNCRTAEKMALTLLDYLFHREVQAVSNLSGQGKHGKKQLDPLTIYGIRCHLFYKFGITESDWYRIKQSIDSKCRTAWRRKQRGQSLAVKSFSRRTPNSSSYCPSEPMMSTPPPASELPQPQPQPQALHYALANAQQVQIHQIGEDGQVQVGHLHIAQVPQGEQVQITQDSEGNLQIHHVGQDGQVLQGAQLIAVASSDPAAAGVDGSPLQGSDIQVQYVQLAPVSDHTAGAQTAEALQPTLQPEMQLEHGAIQIQ

SEQ ID NO: 10033 - protein, 40 aa, Homo sapiens
  Payload ID: 2010;
  Gene Symbol: BANP;
  Gene Name: BTG3 associated nuclear prt;
  ENSP ID: ENSP00000435727
MMSEHDLADVVQIAVEDLSPDHPGTELWDSSCFGESCSDR

SEQ ID NO: 10034 - protein, 40 aa, Homo sapiens; identical to SEQ ID NO: 10033
  Payload ID: 2010;
  Gene Symbol: BANP;
  Gene Name: BTG3 associated nuclear prt;
  ENSP ID: ENSP00000436869

SEQ ID NO: 10035 - protein, 508 aa, Homo sapiens
  Payload ID: 2010;
  Gene Symbol: BANP;
  Gene Name: BTG3 associated nuclear prt;
  Uniprot ID:  Q8N9N5;
  ENSP ID: ENSP00000444352
MMSEHDLADVVQIAVEDLSPDHPVVLENHVVTDEDEPALKRQRLEINCQDPSIKSFLYSINQTICLRLDSIEAKLQALEATCKSLEEKLDLVTNKQHSPIQVPMVAGSPLGATQTCNKVRCVVPQTTVILNNDRQNAIVAKMEDPLSNRAPDSLENVISNAVPGRRQNTIVVKVPGQEDSHHEDGESGSEASDSVSSCGQAGSQSIGSNVTLITLNSEEDYPNGTWLGDENNPEMRVRCAIIPSDMLHISTNCRTAEKMALTLLDYLFHREVQAVSNLSGQGKHGKKQLDPLTIYGIRCHLFYKFGITESDWYRIKQSIDSKCRTAWRRKQRGQSLAVKSFSRRTPNSSSYCPSEPMMSTPPPASELPQPQPQPQALHYALANAQQVQIHQIGEDGQVQVIPQGHLHIAQVPQGEQVQITQDSEGNLQIHHVGQDGQVLQGAQLIAVASSDPAAAGVDGSPLQGSDIQVQYVQLAPVSDHTAGAQTAEALQPTLQPEMQLEHGAIQIQ

SEQ ID NO: 10036 - protein, 497 aa, Homo sapiens
  Payload ID: 2010;
  Gene Symbol: BANP;
  Gene Name: BTG3 associated nuclear prt;
  Uniprot ID:  Q8N9N5;
  ENSP ID: ENSP00000487304
MMSEHDLADVVQIAVEDLSPDHPGTELWDIVLENHVVTDEDEPALKRQRLEINCQDPSIKSFLYSINQTICLRLDSIEAKLQALEATCKSLEEKLDLVTNKQHSPIQVPMVAGSPLGATQTCNKVRCAVPGRRQNTIVVKVPGQEDSHHEDGESGSEASDSVSSCGQAGSQSIGSNVTLITLNSEEDYPNGTWLGDENNPEMRVRCAIIPSDMLHISTNCRTAEKMALTLLDYLFHREVQAVSNLSGQGKHGKKQLDPLTIYGIRCHLFYKFGITESDWYRIKQSIDSKCRTAWRRKQRGQSLAVKSFSRRTPNSSSYCPSEPMMSTPPPASELPQPQPQPQALHYALANAQQVQIHQIGEDGQVQVIPQGHLHIAQVPQGEQVQITQDSEGNLQIHHVGQDGQLLEATRIPCLLAPSVFKASSGQVLQGAQLIAVASSDPAAAGVDGSPLQGSDIQVQYVQLAPVSDHTAGAQTAEALQPTLQPEMQLEHGAIQIQ

SEQ ID NO: 10037 - protein, 1085 aa, Homo sapiens
  Payload ID: 2011;
  Gene Symbol: BUB1;
  Gene Name: BUB1 mitotic checkpoint serine/threonine kinase;
  Uniprot ID:  O43683;
  ENSP ID: ENSP00000302530
MDTPENVLQMLEAHMQSYKGNDPLGEWERYIQWVEENFPENKEYLITLLEHLMKEFLDKKKYHNDPRFISYCLKFAEYNSDLHQFFEFLYNHGIGTLSSPLYIAWAGHLEAQGELQHASAVLQRGIQNQAEPREFLQQQYRLFQTRLTETHLPAQARTSEPLHNVQVLNQMITSKSNPGNNMACISKNQGSELSGVISSACDKESNMERRVITISKSEYSVHSSLASKVDVEQVVMYCKEKLIRGESEFSFEELRAQKYNQRRKHEQWVNEDRHYMKRKEANAFEEQLLKQKMDELHKKLHQVVETSHEDLPASQERSEVNPARMGPSVGSQQELRAPCLPVTYQQTPVNMEKNPREAPPVVPPLANAISAALVSPATSQSIAPPVPLKAQTVTDSMFAVASKDAGCVNKSTHEFKPQSGAEIKEGCETHKVANTSSFHTTPNTSLGMVQATPSKVQPSPTVHTKEALGFIMNMFQAPTLPDISDDKDEWQSLDQNEDAFEAQFQKNVRSSGAWGVNKIISSLSSAFHVFEDGNKENYGLPQPKNKPTGARTFGERSVSRLPSKPKEEVPHAEEFLDDSTVWGIRCNKTLAPSPKSPGDFTSAAQLASTPFHKLPVESVHILEDKENVVAKQCTQATLDSCEENMVVPSRDGKFSPIQEKSPKQALSSHMYSASLLRLSQPAAGGVLTCEAELGVEACRLTDTDAAIAEDPPDAIAGLQAEWMQMSSLGTVDAPNFIVGNPWDDKLIFKLLSGLSKPVSSYPNTFEWQCKLPAIKPKTEFQLGSKLVYVHHLLGEGAFAQVYEATQGDLNDAKNKQKFVLKVQKPANPWEFYIGTQLMERLKPSMQHMFMKFYSAHLFQNGSVLVGELYSYGTLLNAINLYKNTPEKVMPQGLVISFAMRMLYMIEQVHDCEIIHGDIKPDNFILGNGFLEQDDEDDLSAGLALIDLGQSIDMKLFPKGTIFTAKCETSGFQCVEMLSNKPWNYQIDYFGVAATVYCMLFGTYMKVKNEGGECKPEGLFRRLPHLDMWNEFFHVMLNIPDCHHLPSLDLLRQKLKKVFQQHYTNKIRALRNRLIVLLLECKRSRK

SEQ ID NO: 10038 - protein, 1028 aa, Homo sapiens
  Payload ID: 2011;
  Gene Symbol: BUB1;
  Gene Name: BUB1 mitotic checkpoint serine/threonine kinase;
  Uniprot ID:  O43683;
  ENSP ID: ENSP00000386701
MDTPENVLQMLEAHMQSYKGNDPLGEWERYIQWVEENFPENKEYLITLLEHLMKEFLDKKKYHNDPRFISYCLKFAEYNSDLHQFFEFLYNHGIGTLSSPLYIAWAGHLEAQGELQHASAVLQRGIQNQAEPREFLQQQYRLFQTRLTETHLPAQARTSEPLHNVQVLNQMITSKSNPGNNMACISKNQGSELSGVISSACDKESNMERRVITISKSEYSVHSSLASKVDVEQVVMYCKEKLIRGESEFSFEELRAQKYNQRRKHEQWVNEDRHYMKRKEANAFEEQLLKQKMDELHKKLHQVVETSHEDLPASQERSEVNPARMGPSVGSQQELRAPCLPVTYQQTPVNMEKNPREAPPVVPPLANAISAALVSPATSQSIAPPVPLKAQTVTDSMFAVASKDAGCVNKSTHEFKPQSGAEIKEGCETHKVANTSSFHTTPNTSLGMVQATPSKVQPSPTVHTKEALGFIMNMFQAPTLPDISDDKDEWQSLDQNEDAFEAQFQKNVRSSGAWGVNKIISSLSSAFHVFEDGNKENYGLPQPKNKPTGARTFGERSVSRLPSKPKEEVPHAEEFLDDSTVWGIRCNKTLAPSPKSPGDFTSAAQLASTPFHKLPVESVHILEDKENVVAKQCTQATLDSCEENMVVPSRDGKFSPIQEKSPKQALSSHMYSASLLRLSQPAAGGVLTCEAELGVEACRLTDTDAAIAEDPPDAIAGLQAEWMQMSSLGTVDAPNFIVGNPWDDKLIFKLLSGLSKPVSSYPNTFEWQCKLPAIKPKTEFQLGSKLVYVHHLLGEGAFAQVYEATQGDLNDAKNKQKFVLKVQKPANPWEFYIGTQLMERLKPSMQHMFMKFYSAHLFQNGSVLVGELYSYGTLLDDEDDLSAGLALIDLGQSIDMKLFPKGTIFTAKCETSGFQCVEMLSNKPWNYQIDYFGVAATVYCMLFGTYMKVKNEGGECKPEGLFRRLPHLDMWNEFFHVMLNIPDCHHLPSLDLLRQKLKKVFQQHYTNKIRALRNRLIVLLLECKRSRK

SEQ ID NO: 10039 - protein, 56 aa, Homo sapiens
  Payload ID: 2011;
  Gene Symbol: BUB1;
  Gene Name: BUB1 mitotic checkpoint serine/threonine kinase;
  ENSP ID: ENSP00000392219
MLEAHMQSYKGNDPLGEWERYIQWVEENFPENKEYLITLLEHLMKEFLDKKKYHND

SEQ ID NO: 10040 - protein, 146 aa, Homo sapiens
  Payload ID: 2011;
  Gene Symbol: BUB1;
  Gene Name: BUB1 mitotic checkpoint serine/threonine kinase;
  ENSP ID: ENSP00000402883
MLEAHMQSYKGNDPLGEWERYIQWVEENFPENKEYLITLLEHLMKEFLDKKKYHNDPRFISYCLKFAEYNSDLHQFFEFLYNHGIGTLSSPLYIAWAGHLEAQGELQHASAVLQRGIQNQAEPREFLQQQYRLFQTRLTETHLPAQ

SEQ ID NO: 10041 - protein, 134 aa, Homo sapiens
  Payload ID: 2011;
  Gene Symbol: BUB1;
  Gene Name: BUB1 mitotic checkpoint serine/threonine kinase;
  ENSP ID: ENSP00000409713
MLEAHMQSYKGNDPLGEWERYIQWVEENFPENKEYLITLLEHLMKEFLDKKKYHNDPRFISYCLKFAEYNSDLHQFFEFLYNHGIGTLSSPLYIAWAGHLEAQGELQHASAVLQRGIQNQAEPREFLQQQYRLF

SEQ ID NO: 10042 - protein, 1065 aa, Homo sapiens
  Payload ID: 2011;
  Gene Symbol: BUB1;
  Gene Name: BUB1 mitotic checkpoint serine/threonine kinase;
  Uniprot ID:  O43683;
  ENSP ID: ENSP00000441013
MDTPENVLQYIQWVEENFPENKEYLITLLEHLMKEFLDKKKYHNDPRFISYCLKFAEYNSDLHQFFEFLYNHGIGTLSSPLYIAWAGHLEAQGELQHASAVLQRGIQNQAEPREFLQQQYRLFQTRLTETHLPAQARTSEPLHNVQVLNQMITSKSNPGNNMACISKNQGSELSGVISSACDKESNMERRVITISKSEYSVHSSLASKVDVEQVVMYCKEKLIRGESEFSFEELRAQKYNQRRKHEQWVNEDRHYMKRKEANAFEEQLLKQKMDELHKKLHQVVETSHEDLPASQERSEVNPARMGPSVGSQQELRAPCLPVTYQQTPVNMEKNPREAPPVVPPLANAISAALVSPATSQSIAPPVPLKAQTVTDSMFAVASKDAGCVNKSTHEFKPQSGAEIKEGCETHKVANTSSFHTTPNTSLGMVQATPSKVQPSPTVHTKEALGFIMNMFQAPTLPDISDDKDEWQSLDQNEDAFEAQFQKNVRSSGAWGVNKIISSLSSAFHVFEDGNKENYGLPQPKNKPTGARTFGERSVSRLPSKPKEEVPHAEEFLDDSTVWGIRCNKTLAPSPKSPGDFTSAAQLASTPFHKLPVESVHILEDKENVVAKQCTQATLDSCEENMVVPSRDGKFSPIQEKSPKQALSSHMYSASLLRLSQPAAGGVLTCEAELGVEACRLTDTDAAIAEDPPDAIAGLQAEWMQMSSLGTVDAPNFIVGNPWDDKLIFKLLSGLSKPVSSYPNTFEWQCKLPAIKPKTEFQLGSKLVYVHHLLGEGAFAQVYEATQGDLNDAKNKQKFVLKVQKPANPWEFYIGTQLMERLKPSMQHMFMKFYSAHLFQNGSVLVGELYSYGTLLNAINLYKNTPEKVMPQGLVISFAMRMLYMIEQVHDCEIIHGDIKPDNFILGNGFLEQDDEDDLSAGLALIDLGQSIDMKLFPKGTIFTAKCETSGFQCVEMLSNKPWNYQIDYFGVAATVYCMLFGTYMKVKNEGGECKPEGLFRRLPHLDMWNEFFHVMLNIPDCHHLPSLDLLRQKLKKVFQQHYTNKIRALRNRLIVLLLECKRSRK

SEQ ID NO: 10043 - protein, 1050 aa, Homo sapiens
  Payload ID: 2012;
  Gene Symbol: BUB1B;
  Gene Name: BUB1 mitotic checkpoint serine/threonine kinase B;
  Uniprot ID:  O60566;
  ENSP ID: ENSP00000287598
MAAVKKEGGALSEAMSLEGDEWELSKENVQPLRQGRIMSTLQGALAQESACNNTLQQQKRAFEYEIRFYTGNDPLDVWDRYISWTEQNYPQGGKESNMSTLLERAVEALQGEKRYYSDPRFLNLWLKLGRLCNEPLDMYSYLHNQGIGVSLAQFYISWAEEYEARENFRKADAIFQEGIQQKAEPLERLQSQHRQFQARVSRQTLLALEKEEEEEVFESSVPQRSTLAELKSKGKKTARAPIIRVGGALKAPSQNRGLQNPFPQQMQNNSRITVFDENADEASTAELSKPTVQPWIAPPMPRAKENELQAGPWNTGRSLEHRPRGNTASLIAVPAVLPSFTPYVEETARQPVMTPCKIEPSINHILSTRKPGKEEGDPLQRVQSHQQASEEKKEKMMYCKEKIYAGVGEFSFEEIRAEVFRKKLKEQREAELLTSAEKRAEMQKQIEEMEKKLKEIQTTQQERTGDQQEETMPTKETTKLQIASESQKIPGMTLSSSVCQVNCCARETSLAENIWQEQPHSKGPSVPFSIFDEFLLSEKKNKSPPADPPRVLAQRRPLAVLKTSESITSNEDVSPDVCDEFTGIEPLSEDAIITGFRNVTICPNPEDTCDFARAARFVSTPFHEIMSLKDLPSDPERLLPEEDLDVKTSEDQQTACGTIYSQTLSIKKLSPIIEDSREATHSSGFSGSSASVASTSSIKCLQIPEKLELTNETSENPTQSPWCSQYRRQLLKSLPELSASAELCIEDRPMPKLEIEKEIELGNEDYCIKREYLICEDYKLFWVAPRNSAELTVIKVSSQPVPWDFYINLKLKERLNEDFDHFCSCYQYQDGCIVWHQYINCFTLQDLLQHSEYITHEITVLIIYNLLTIVEMLHKAEIVHGDLSPRCLILRNRIHDPYDCNKNNQALKIVDFSYSVDLRVQLDVFTLSGFRTVQILEGQKILANCSSPYQVDLFGIADLAHLLLFKEHLQVFWDGSFWKLSQNISELKDGELWNKFFVRILNANDEATVSVLGELAAEMNGVFDTTFQSHLNKALWKVGKLTSPGALLFQ

SEQ ID NO: 10044 - protein, 1064 aa, Homo sapiens
  Payload ID: 2012;
  Gene Symbol: BUB1B;
  Gene Name: BUB1 mitotic checkpoint serine/threonine kinase B;
  Uniprot ID:  O60566;
  ENSP ID: ENSP00000398470
MAAVKKEGGALSEAMSLEGDEWELSKENVQPLRQGRIMSTLQGALAQESACNNTLQQQKRAFEYEIRFYTGNDPLDVWDRWVFLFHKDNRNINRYISWTEQNYPQGGKESNMSTLLERAVEALQGEKRYYSDPRFLNLWLKLGRLCNEPLDMYSYLHNQGIGVSLAQFYISWAEEYEARENFRKADAIFQEGIQQKAEPLERLQSQHRQFQARVSRQTLLALEKEEEEEVFESSVPQRSTLAELKSKGKKTARAPIIRVGGALKAPSQNRGLQNPFPQQMQNNSRITVFDENADEASTAELSKPTVQPWIAPPMPRAKENELQAGPWNTGRSLEHRPRGNTASLIAVPAVLPSFTPYVEETARQPVMTPCKIEPSINHILSTRKPGKEEGDPLQRVQSHQQASEEKKEKMMYCKEKIYAGVGEFSFEEIRAEVFRKKLKEQREAELLTSAEKRAEMQKQIEEMEKKLKEIQTTQQERTGDQQEETMPTKETTKLQIASESQKIPGMTLSSSVCQVNCCARETSLAENIWQEQPHSKGPSVPFSIFDEFLLSEKKNKSPPADPPRVLAQRRPLAVLKTSESITSNEDVSPDVCDEFTGIEPLSEDAIITGFRNVTICPNPEDTCDFARAARFVSTPFHEIMSLKDLPSDPERLLPEEDLDVKTSEDQQTACGTIYSQTLSIKKLSPIIEDSREATHSSGFSGSSASVASTSSIKCLQIPEKLELTNETSENPTQSPWCSQYRRQLLKSLPELSASAELCIEDRPMPKLEIEKEIELGNEDYCIKREYLICEDYKLFWVAPRNSAELTVIKVSSQPVPWDFYINLKLKERLNEDFDHFCSCYQYQDGCIVWHQYINCFTLQDLLQHSEYITHEITVLIIYNLLTIVEMLHKAEIVHGDLSPRCLILRNRIHDPYDCNKNNQALKIVDFSYSVDLRVQLDVFTLSGFRTVQILEGQKILANCSSPYQVDLFGIADLAHLLLFKEHLQVFWDGSFWKLSQNISELKDGELWNKFFVRILNANDEATVSVLGELAAEMNGVFDTTFQSHLNKALWKVGKLTSPGALLFQ

SEQ ID NO: 10045 - protein, 66 aa, Homo sapiens
  Payload ID: 2012;
  Gene Symbol: BUB1B;
  Gene Name: BUB1 mitotic checkpoint serine/threonine kinase B;
  ENSP ID: ENSP00000453643
  MOD_RES (1)..(1): Any amino acid
XQFQARVSRQTLLALEKEEEEEVFESSVPQRSTLAELKSKGKKTARAPIIRVGGALKGHHVKLNLV

SEQ ID NO: 10046 - protein, 96 aa, Homo sapiens
  Payload ID: 2012;
  Gene Symbol: BUB1B;
  Gene Name: BUB1 mitotic checkpoint serine/threonine kinase B;
  ENSP ID: ENSP00000453861
MAAVKKEGGALSEAMSLEGDEWELSKENVQPLRQGRIMSTLQGALAQESACNNTLQQQKRDGVSLFRPGWSAVARSWLTGSSASWVHANLLPQPPE

SEQ ID NO: 10047 - protein, 326 aa, Homo sapiens
  Payload ID: 2013;
  Gene Symbol: BUB3;
  Gene Name: BUB3 mitotic checkpoint prt;
  Uniprot ID:  O43684;
  ENSP ID: ENSP00000357851
MTGSNEFKLNQPPEDGISSVKFSPNTSQFLLVSSWDTSVRLYDVPANSMRLKYQHTGAVLDCAFYDPTHAWSGGLDHQLKMHDLNTDQENLVGTHDAPIRCVEYCPEVNVMVTGSWDQTVKLWDPRTPCNAGTFSQPEKVYTLSVSGDRLIVGTAGRRVLVWDLRNMGYVQQRRESSLKYQTRCIRAFPNKQGYVLSSIEGRVAVEYLDPSPEVQKKKYAFKCHRLKENNIEQIYPVNAISFHNIHNTFATGGSDGFVNIWDPFNKKRLCQFHRYPTSIASLAFSNDGTTLAIASSYMYEMDDTEHPEDGIFIRQVTDAETKPKST

SEQ ID NO: 10048 - protein, 145 aa, Homo sapiens
  Payload ID: 2013;
  Gene Symbol: BUB3;
  Gene Name: BUB3 mitotic checkpoint prt;
  ENSP ID: ENSP00000357852
MTGSNEFKLNQPPEDGISSVKFSPNTSQFLLVSSWDTSVRLYDVPANSMRLKYQHTGAVLDCAFYDPTHAWSGGLDHQLKMHDLNTDQENLVGTHDAPIRCVEYCPEVNVMVTGSWDQTVKLWDPRTPCNAGTFSQPEKVHLIIL

SEQ ID NO: 10049 - protein, 328 aa, Homo sapiens
  Payload ID: 2013;
  Gene Symbol: BUB3;
  Gene Name: BUB3 mitotic checkpoint prt;
  Uniprot ID:  O43684;
  ENSP ID: ENSP00000357858
MTGSNEFKLNQPPEDGISSVKFSPNTSQFLLVSSWDTSVRLYDVPANSMRLKYQHTGAVLDCAFYDPTHAWSGGLDHQLKMHDLNTDQENLVGTHDAPIRCVEYCPEVNVMVTGSWDQTVKLWDPRTPCNAGTFSQPEKVYTLSVSGDRLIVGTAGRRVLVWDLRNMGYVQQRRESSLKYQTRCIRAFPNKQGYVLSSIEGRVAVEYLDPSPEVQKKKYAFKCHRLKENNIEQIYPVNAISFHNIHNTFATGGSDGFVNIWDPFNKKRLCQFHRYPTSIASLAFSNDGTTLAIASSYMYEMDDTEHPEDGIFIRQVTDAETKPKSPCT

SEQ ID NO: 10050 - protein, 278 aa, Homo sapiens
  Payload ID: 2013;
  Gene Symbol: BUB3;
  Gene Name: BUB3 mitotic checkpoint prt;
  ENSP ID: ENSP00000383941
MTGSNEFKLNQPPEDGISSVKFSPNTSQFLLVSSWDTSVRLYDVPANSMRLKYQHTGAVLDCAFYDPTHAWSGGLDHQLKMHDLNTDQENLVGTHDAPIRCVEYCPEVNVMVTGSWDQTVKLWDPRTPCNAGTFSQPEKVYTLSVSGDRLIVGTAGRRVLVWDLRNMGYVQQRRESSLKYQTRCIRAFPNKQGYVLSSIEGRVAVEYLDPSPEVQKKKYAFKCHRLKENNIEQIYPVNAISFHNIHNTFATGGSDGFVNIWDPFNKKRLCQFHRYPTS

SEQ ID NO: 10051 - protein, 619 aa, Homo sapiens
  Payload ID: 2014;
  Gene Symbol: BUD13;
  Gene Name: BUD13 homolog;
  Uniprot ID:  Q9BRD0;
  ENSP ID: ENSP00000260210
MAAAPPLSKAEYLKRYLSGADAGVDRGSESGRKRRKKRPKPGGAGGKGMRIVDDDVSWTAISTTKLEKEEEEDDGDLPVVAEFVDERPEEVKQMEAFRSSAKWKLLGGHNEDLPSNRHFRHDTPDSSPRRVRHGTPDPSPRKDRHDTPDPSPRRARHDTPDPSPLRGARHDSDTSPPRRIRHDSSDTSPPRRARHDSPDPSPPRRPQHNSSGASPRRVRHDSPDPSPPRRARHGSSDISSPRRVHNNSPDTSRRTLGSSDTQQLRRARHDSPDLAPNVTYSLPRTKSGKAPERASSKTSPHWKESGASHLSFPKNSKYEYDPDISPPRKKQAKSHFGDKKQLDSKGDCQKATDSDLSSPRHKQSPGHQDSDSDLSPPRNRPRHRSSDSDLSPPRRRQRTKSSDSDLSPPRRSQPPGKKAAHMYSGAKTGLVLTDIQREQQELKEQDQETMAFEAEFQYAETVFRDKSGRKRNLKLERLEQRRKAEKDSERDELYAQWGKGLAQSRQQQQNVEDAMKEMQKPLARYIDDEDLDRMLREQEREGDPMANFIKKNKAKENKNKKVRPRYSGPAPPPNRFNIWPGYRWDGVDRSNGFEQKRFARLASKKAVEELAYKWSVEDM

SEQ ID NO: 10052 - protein, 485 aa, Homo sapiens
  Payload ID: 2014;
  Gene Symbol: BUD13;
  Gene Name: BUD13 homolog;
  Uniprot ID:  Q9BRD0;
  ENSP ID: ENSP00000364594
MAAAPPLSKAEYLKRYLSGADAGVDRGSESGRKRRKKRPKPGGAGGKGMRIVDDDVSWTAISTTKLEKEEEEDDGDLPVVAEFVDERPEEVKQMEAFRSSAKWKLLGGHNEDLPSNRHFRHDTPDSSPRRVRHGTPDPSPRKDRHDTPDPSPRRARHDTPDPSPLRGARHDSDTSPPRRIRHDSSDTSPPRRARHDSPDPSPPRRPQHNSSGDCQKATDSDLSSPRHKQSPGHQDSDSDLSPPRNRPRHRSSDSDLSPPRRRQRTKSSDSDLSPPRRSQPPGKKAAHMYSGAKTGLVLTDIQREQQELKEQDQETMAFEAEFQYAETVFRDKSGRKRNLKLERLEQRRKAEKDSERDELYAQWGKGLAQSRQQQQNVEDAMKEMQKPLARYIDDEDLDRMLREQEREGDPMANFIKKNKAKENKNKKVRPRYSGPAPPPNRFNIWPGYRWDGVDRSNGFEQKRFARLASKKAVEELAYKWSVEDM

SEQ ID NO: 10053 - protein, 118 aa, Homo sapiens
  Payload ID: 2014;
  Gene Symbol: BUD13;
  Gene Name: BUD13 homolog;
  ENSP ID: ENSP00000415748
  MOD_RES (1)..(1): Any amino acid
XSRRTLGSSDTQQLRRARHDSPDLAPNVTYSLPRTKSGKAPERASSKTSPHWKESGASHLSFPKNSKYEYDPDISPPRKKQAKSHFGDKKQLDSKEPATATKCGGCNERDAKASGPLY

SEQ ID NO: 10054 - protein, 144 aa, Homo sapiens
  Payload ID: 2015;
  Gene Symbol: BUD31;
  Gene Name: BUD31 homolog;
  Uniprot ID:  P41223;
  ENSP ID: ENSP00000222969
MPKVKRSRKAPPDGWELIEPTLDELDQKMREAETEPHEGKRKVESLWPIFRIHHQKTRYIFDLFYKRKAISRELYEYCIKEGYADKNLIAKWKKQGYENLCCLRCIQTRDTNFGTNCICRVPKSKLEVGRIIECTHCGCRGCSG

SEQ ID NO: 10055 - protein, 144 aa, Homo sapiens; identical to SEQ ID NO: 10054
  Payload ID: 2015;
  Gene Symbol: BUD31;
  Gene Name: BUD31 homolog;
  Uniprot ID:  P41223;
  ENSP ID: ENSP00000386023

SEQ ID NO: 10056 - protein, 103 aa, Homo sapiens
  Payload ID: 2015;
  Gene Symbol: BUD31;
  Gene Name: BUD31 homolog;
  ENSP ID: ENSP00000395269
MPKVKRSRKAPPDGWELIEPTLDELDQKMREELYEYCIKEGYADKNLIAKWKKQGYENLCCLRCIQTRDTNFGTNCICRVPKSKLEVGRIIECTHCGCRGCSG

SEQ ID NO: 10057 - protein, 115 aa, Homo sapiens
  Payload ID: 2015;
  Gene Symbol: BUD31;
  Gene Name: BUD31 homolog;
  ENSP ID: ENSP00000408269
MIAETEPHEGKRKVESLWPIFRIHHQKTRYIFDLFYKRKAISRELYEYCIKEGYADKNLIAKWKKQGYENLCCLRCIQTRDTNFGTNCICRVPKSKLEVGRIIECTHCGCRGCSG

SEQ ID NO: 10058 - protein, 37 aa, Homo sapiens
  Payload ID: 2015;
  Gene Symbol: BUD31;
  Gene Name: BUD31 homolog;
  ENSP ID: ENSP00000416698
MPKVKRSRKAPPDGWELIEPTLDELDQKMREGCSAVA

SEQ ID NO: 10059 - protein, 387 aa, Homo sapiens
  Payload ID: 2016;
  Gene Symbol: BBOX1;
  Gene Name: butyrobetaine (gamma), 2-oxoglutarate dioxygenase (gamma-butyrobetaine hydroxylase) 1;
  Uniprot ID:  O75936;
  ENSP ID: ENSP00000263182
MACTIQKAEALDGAHLMQILWYDEEESLYPAVWLRDNCPCSDCYLDSAKARKLLVEALDVNIGIKGLIFDRKKVYITWPDEHYSEFQADWLKKRCFSKQARAKLQRELFFPECQYWGSELQLPTLDFEDVLRYDEHAYKWLSTLKKVGIVRLTGASDKPGEVSKLGKRMGFLYLTFYGHTWQVQDKIDANNVAYTTGKLSFHTDYPALHHPPGVQLLHCIKQTVTGGDSEIVDGFNVCQKLKKNNPQAFQILSSTFVDFTDIGVDYCDFSVQSKHKIIELDDKGQVVRINFNNATRDTIFDVPVERVQPFYAALKEFVDLMNSKESKFTFKMNPGDVITFDNWRLLHGRRSYEAGTEISRHLEGAYADWDVVMSRLRILRQRVENGN

SEQ ID NO: 10060 - protein, 387 aa, Homo sapiens; identical to SEQ ID NO: 10059
  Payload ID: 2016;
  Gene Symbol: BBOX1;
  Gene Name: butyrobetaine (gamma), 2-oxoglutarate dioxygenase (gamma-butyrobetaine hydroxylase) 1;
  Uniprot ID:  O75936;
  ENSP ID: ENSP00000433772

SEQ ID NO: 10061 - protein, 387 aa, Homo sapiens; identical to SEQ ID NO: 10059
  Payload ID: 2016;
  Gene Symbol: BBOX1;
  Gene Name: butyrobetaine (gamma), 2-oxoglutarate dioxygenase (gamma-butyrobetaine hydroxylase) 1;
  Uniprot ID:  O75936;
  ENSP ID: ENSP00000434918

SEQ ID NO: 10062 - protein, 68 aa, Homo sapiens
  Payload ID: 2016;
  Gene Symbol: BBOX1;
  Gene Name: butyrobetaine (gamma), 2-oxoglutarate dioxygenase (gamma-butyrobetaine hydroxylase) 1;
  ENSP ID: ENSP00000435369
MACTIQKAEALDGAHLMQILWYDEEESLYPAVWLRDNCPCSDCYLDSAKARKLLVEALDVNIGIKGLI

SEQ ID NO: 10063 - protein, 387 aa, Homo sapiens; identical to SEQ ID NO: 10059
  Payload ID: 2016;
  Gene Symbol: BBOX1;
  Gene Name: butyrobetaine (gamma), 2-oxoglutarate dioxygenase (gamma-butyrobetaine hydroxylase) 1;
  Uniprot ID:  O75936;
  ENSP ID: ENSP00000435781

SEQ ID NO: 10064 - protein, 526 aa, Homo sapiens
  Payload ID: 2017;
  Gene Symbol: BTN1A1;
  Gene Name: butyrophilin, subfamily 1, member A1;
  Uniprot ID:  Q13410;
  ENSP ID: ENSP00000244513
MAVFPSSGLPRCLLTLILLQLPKLDSAPFDVIGPPEPILAVVGEDAELPCRLSPNASAEHLELRWFRKKVSPAVLVHRDGREQEAEQMPEYRGRATLVQDGIAKGRVALRIRGVRVSDDGEYTCFFREDGSYEEALVHLKVAALGSDPHISMQVQENGEICLECTSVGWYPEPQVQWRTSKGEKFPSTSESRNPDEEGLFTVAASVIIRDTSAKNVSCYIQNLLLGQEKKVEISIPASSLPRLTPWIVAVAVILMVLGLLTIGSIFFTWRLYNERPRERRNEFSSKERLLEELKWKKATLHAVDVTLDPDTAHPHLFLYEDSKSVRLEDSRQKLPEKTERFDSWPCVLGRETFTSGRHYWEVEVGDRTDWAIGVCRENVMKKGFDPMTPENGFWAVELYGNGYWALTPLRTPLPLAGPPRRVGIFLDYESGDISFYNMNDGSDIYTFSNVTFSGPLRPFFCLWSSGKKPLTICPIADGPERVTVIANAQDLSKEIPLSPMGEDSAPRDADTLHSKLIPTQPSQGAP

SEQ ID NO: 10065 - protein, 494 aa, Homo sapiens
  Payload ID: 2017;
  Gene Symbol: BTN1A1;
  Gene Name: butyrophilin, subfamily 1, member A1;
  ENSP ID: ENSP00000484707
MAVFPSSGLPRCLLTLILLQLPKLDSAPFDVIGPPEPILAVVGEDAELPCRLSPNASAEHLELRWFRKKVSPAVLVHRDGREQEAEQMPEYRGRATLVQDGIAKGRVALRIRGVRVSDDGEYTCFFREDGSYEEALVHLKVAALGSDPHISMQVQENGEICLECTSVGWYPEPQVQWRTSKGEKFPSTSESRNPDEEGLFTVAASVIIRDTSAKNVSCYIQNLLLGQEKKVEISIPASSLPRLTPWIVAVAVILMVLGLLTIGSIFFTWRLYNERPRERRNEFSSKERLLEELKWKKATLHAVDVTLDPDTAHPHLFLYEDSKSVRLEDSRQKLPEKTERFDSWPCVLGRETFTSGRHYWEVEVGDRTDWAIGVCRENVMKKGFDPMTPENGFWAVELYGNGYWALTPLRTPLPLAGPPRRVGIFLDYESGDISFYNMNDGSDIYTFSNVTVIANAQDLSKEIPLSPMGEDSAPRDADTLHSKLIPTQPSQGAP

SEQ ID NO: 10066 - protein, 527 aa, Homo sapiens
  Payload ID: 2018;
  Gene Symbol: BTN2A1;
  Gene Name: butyrophilin, subfamily 2, member A1;
  Uniprot ID:  Q7KYR7;
  ENSP ID: ENSP00000312158
MESAAALHFSRPASLLLLLLSLCALVSAQFIVVGPTDPILATVGENTTLRCHLSPEKNAEDMEVRWFRSQFSPAVFVYKGGRERTEEQMEEYRGRTTFVSKDISRGSVALVIHNITAQENGTYRCYFQEGRSYDEAILHLVVAGLGSKPLISMRGHEDGGIRLECISRGWYPKPLTVWRDPYGGVAPALKEVSMPDADGLFMVTTAVIIRDKSVRNMSCSINNTLLGQKKESVIFIPESFMPSVSPCAVALPIIVVILMIPIAVCIYWINKLQKEKKILSGEKEFERETREIALKELEKERVQKEEELQVKEKLQEELRWRRTFLHAVDVVLDPDTAHPDLFLSEDRRSVRRCPFRHLGESVPDNPERFDSQPCVLGRESFASGKHYWEVEVENVIEWTVGVCRDSVERKGEVLLIPQNGFWTLEMHKGQYRAVSSPDRILPLKESLCRVGVFLDYEAGDVSFYNMRDRSHIYTCPRSAFSVPVRPFFRLGCEDSPIFICPALTGANGVTVPEEGLTLHRVGTHQSL

SEQ ID NO: 10067 - protein, 151 aa, Homo sapiens
  Payload ID: 2018;
  Gene Symbol: BTN2A1;
  Gene Name: butyrophilin, subfamily 2, member A1;
  ENSP ID: ENSP00000366825
MESAAALHFSRPASLLLLLLSLCALVSAQFIVVGPTDPILATVGENTTLRCHLSPEKNAEDMEVRWFRSQFSPAVFVYKGGRERTEEQMEEYRGRTTFVSKDISRGSVALVIHNITAQENGTYRCYFQEGRSYDEAILHLVVAELLEAEVY

SEQ ID NO: 10068 - protein, 334 aa, Homo sapiens
  Payload ID: 2018;
  Gene Symbol: BTN2A1;
  Gene Name: butyrophilin, subfamily 2, member A1;
  Uniprot ID:  Q7KYR7;
  ENSP ID: ENSP00000416945
MESAAALHFSRPASLLLLLLSLCALVSAQFIVVGPTDPILATVGENTTLRCHLSPEKNAEDMEVRWFRSQFSPAVFVYKGGRERTEEQMEEYRGRTTFVSKDISRGSVALVIHNITAQENGTYRCYFQEGRSYDEAILHLVVAGLGSKPLISMRGHEDGGIRLECISRGWYPKPLTVWRDPYGGVAPALKEVSMPDADGLFMVTTAVIIRDKSVRNMSCSINNTLLGQKKESVIFIPESFMPSVSPCAVALPIIVVILMIPIAVCIYWINKLQKEKKILSGEKEFERETREIALKELEKERVQKEEELQVKEKLQEELRWRRTFLHAELQFFSN

SEQ ID NO: 10069 - protein, 78 aa, Homo sapiens
  Payload ID: 2018;
  Gene Symbol: BTN2A1;
  Gene Name: butyrophilin, subfamily 2, member A1;
  ENSP ID: ENSP00000418936
  MOD_RES (1)..(1): Any amino acid
XIIVVILMIPIAVCIYWINKLQKEKKILSGEKEFERETREIALKELEKERVQKEEELQVKEKLQEELRWRRTFLHAGW

SEQ ID NO: 10070 - protein, 330 aa, Homo sapiens
  Payload ID: 2018;
  Gene Symbol: BTN2A1;
  Gene Name: butyrophilin, subfamily 2, member A1;
  Uniprot ID:  Q7KYR7;
  ENSP ID: ENSP00000419043
MESAAALHFSRPASLLLLLLSLCALVSAQFIVVGPTDPILATVGENTTLRCHLSPEKNAEDMEVRWFRSQFSPAVFVYKGGRERTEEQMEEYRGRTTFVSKDISRGSVALVIHNITAQENGTYRCYFQEGRSYDEAILHLVVAGLGSKPLISMRGHEDGGIRLECISRGWYPKPLTVWRDPYGGVAPALKEVSMPDADGLFMVTTAVIIRDKSVRNMSCSINNTLLGQKKESVIFIPESFMPSVSPCAVALPIIVVILMIPIAVCIYWINKLQKEKKILSGEKEFERETREIALKELEKERVQKEEELQVKEKLQEELRWRRTFLHAGPV

SEQ ID NO: 10071 - protein, 85 aa, Homo sapiens
  Payload ID: 2018;
  Gene Symbol: BTN2A1;
  Gene Name: butyrophilin, subfamily 2, member A1;
  ENSP ID: ENSP00000420447
MEVRWFRSQFSPAVFVYKGGRERTEEQMEEYRGRTTFVSKDISRGSVALVIHNITAQENGTYRCYFQEGRSYDEAILHLVVAGLG

SEQ ID NO: 10072 - protein, 466 aa, Homo sapiens
  Payload ID: 2018;
  Gene Symbol: BTN2A1;
  Gene Name: butyrophilin, subfamily 2, member A1;
  Uniprot ID:  Q7KYR7;
  ENSP ID: ENSP00000443909
MEVRWFRSQFSPAVFVYKGGRERTEEQMEEYRGRTTFVSKDISRGSVALVIHNITAQENGTYRCYFQEGRSYDEAILHLVVAGLGSKPLISMRGHEDGGIRLECISRGWYPKPLTVWRDPYGGVAPALKEVSMPDADGLFMVTTAVIIRDKSVRNMSCSINNTLLGQKKESVIFIPESFMPSVSPCAVALPIIVVILMIPIAVCIYWINKLQKEKKILSGEKEFERETREIALKELEKERVQKEEELQVKEKLQEELRWRRTFLHAVDVVLDPDTAHPDLFLSEDRRSVRRCPFRHLGESVPDNPERFDSQPCVLGRESFASGKHYWEVEVENVIEWTVGVCRDSVERKGEVLLIPQNGFWTLEMHKGQYRAVSSPDRILPLKESLCRVGVFLDYEAGDVSFYNMRDRSHIYTCPRSAFSVPVRPFFRLGCEDSPIFICPALTGANGVTVPEEGLTLHRVGTHQSL

SEQ ID NO: 10073 - protein, 407 aa, Homo sapiens
  Payload ID: 2019;
  Gene Symbol: BTN2A2;
  Gene Name: butyrophilin, subfamily 2, member A2;
  Uniprot ID:  Q8WVV5;
  ENSP ID: ENSP00000337117
MEPAAALHFSLPASLLLLLLLLLLSLCALVSGLGSKPLIEIKAQEDGSIWLECISGGWYPEPLTVWRDPYGEVVPALKEVSIADADGLFMVTTAVIIRDKYVRNVSCSVNNTLLGQEKETVIFIPESFMPSASPWMVALAVILTASPWMVSMTVILAVFIIFMAVSICCIKKLQREKKILSGEKKVEQEEKEIAQQLQEELRWRRTFLHAADVVLDPDTAHPELFLSEDRRSVRRGPYRQRVPDNPERFDSQPCVLGWESFASGKHYWEVEVENVMVWTVGVCRHSVERKGEVLLIPQNGFWTLEMFGNQYRALSSPERILPLKESLCRVGVFLDYEAGDVSFYNMRDRSHIYTCPRSAFTVPVRPFFRLGSDDSPIFICPALTGASGVMVPEEGLKLHRVGTHQSL

SEQ ID NO: 10074 - protein, 523 aa, Homo sapiens
  Payload ID: 2019;
  Gene Symbol: BTN2A2;
  Gene Name: butyrophilin, subfamily 2, member A2;
  Uniprot ID:  Q8WVV5;
  ENSP ID: ENSP00000349143
MEPAAALHFSLPASLLLLLLLLLLSLCALVSAQFTVVGPANPILAMVGENTTLRCHLSPEKNAEDMEVRWFRSQFSPAVFVYKGGRERTEEQMEEYRGRITFVSKDINRGSVALVIHNVTAQENGIYRCYFQEGRSYDEAILRLVVAGLGSKPLIEIKAQEDGSIWLECISGGWYPEPLTVWRDPYGEVVPALKEVSIADADGLFMVTTAVIIRDKYVRNVSCSVNNTLLGQEKETVIFIPESFMPSASPWMVALAVILTASPWMVSMTVILAVFIIFMAVSICCIKKLQREKKILSGEKKVEQEEKEIAQQLQEELRWRRTFLHAADVVLDPDTAHPELFLSEDRRSVRRGPYRQRVPDNPERFDSQPCVLGWESFASGKHYWEVEVENVMVWTVGVCRHSVERKGEVLLIPQNGFWTLEMFGNQYRALSSPERILPLKESLCRVGVFLDYEAGDVSFYNMRDRSHIYTCPRSAFTVPVRPFFRLGSDDSPIFICPALTGASGVMVPEEGLKLHRVGTHQSL

SEQ ID NO: 10075 - protein, 256 aa, Homo sapiens
  Payload ID: 2019;
  Gene Symbol: BTN2A2;
  Gene Name: butyrophilin, subfamily 2, member A2;
  Uniprot ID:  Q8WVV5;
  ENSP ID: ENSP00000394241
MEPAAALHFSLPASLLLLLLLLLLSLCALVSAQFTVVGPANPILAMVGENTTLRCHLSPEKNAEDMEVRWFRSQFSPAVFVYKGGRERTEEQMEEYRGRITFVSKDINRGSVALVIHNVTAQENGIYRCYFQEGRSYDEAILRLVVAESFMPSASPWMVALAVILTASPWMVSMTVILAVFIIFMAVSICCIKKLQREKKILSGEKKVEQEEKEIAQQLQEELRWRRTFLHAGYELPGIRGPSWKRPLHGEPPSAF

SEQ ID NO: 10076 - protein, 523 aa, Homo sapiens; identical to SEQ ID NO: 10074
  Payload ID: 2019;
  Gene Symbol: BTN2A2;
  Gene Name: butyrophilin, subfamily 2, member A2;
  Uniprot ID:  Q8WVV5;
  ENSP ID: ENSP00000399308

SEQ ID NO: 10077 - protein, 56 aa, Homo sapiens
  Payload ID: 2019;
  Gene Symbol: BTN2A2;
  Gene Name: butyrophilin, subfamily 2, member A2;
  ENSP ID: ENSP00000417129
FIIFMAVSICCIKKLQREKKILSGEKKVEQEEKEIAQQLQEELRWRRTFLHAGECL

SEQ ID NO: 10078 - protein, 336 aa, Homo sapiens
  Payload ID: 2019;
  Gene Symbol: BTN2A2;
  Gene Name: butyrophilin, subfamily 2, member A2;
  Uniprot ID:  Q8WVV5;
  ENSP ID: ENSP00000417472
MEPAAALHFSLPASLLLLLLLLLLSLCALVSAQFTVVGPANPILAMVGENTTLRCHLSPEKNAEDMEVRWFRSQFSPAVFVYKGGRERTEEQMEEYRGRITFVSKDINRGSVALVIHNVTAQENGIYRCYFQEGRSYDEAILRLVVAGLGSKPLIEIKAQEDGSIWLECISGGWYPEPLTVWRDPYGEVVPALKEVSIADADGLFMVTTAVIIRDKYVRNVSCSVNNTLLGQEKETVIFIPESFMPSASPWMVALAVILTASPWMVSMTVILAVFIIFMAVSICCIKKLQREKKILSGEKKVEQEEKEIAQQLQEELRWRRTFLHADVNLTGLRNT

SEQ ID NO: 10079 - protein, 96 aa, Homo sapiens
  Payload ID: 2019;
  Gene Symbol: BTN2A2;
  Gene Name: butyrophilin, subfamily 2, member A2;
  ENSP ID: ENSP00000417511
MEPAAALHFSLPASLLLLLLLLLLSLCALVSAQFTVVGPANPILAMVGENTTLRCHLSPEKNAEDMEVRWFRSQFSPAVFVYKGGRERTEEQMEEY

SEQ ID NO: 10080 - protein, 80 aa, Homo sapiens
  Payload ID: 2019;
  Gene Symbol: BTN2A2;
  Gene Name: butyrophilin, subfamily 2, member A2;
  ENSP ID: ENSP00000417676
MVTTAVIIRDKYVRNVSCSVNNTLLGQEKETVIFIPESFMPSASPWMVALAVILTASPWMVSMTVILAVFIIFMAVSICC

SEQ ID NO: 10081 - protein, 184 aa, Homo sapiens
  Payload ID: 2019;
  Gene Symbol: BTN2A2;
  Gene Name: butyrophilin, subfamily 2, member A2;
  ENSP ID: ENSP00000418176
MEPAAALHFSLPASLLLLLLLLLLSLCALVSGLGSKPLIEIKAQEDGSIWLECISGGWYPEPLTVWRDPYGEVVPALKEVSIADADGLFMVTTAVIIRDKYVRNVSCSVNNTLLGQEKETVIFIPESFMPSASPWMVALAVILTASPWMVSMTVILAVFIIFMAVSICCIKKLQREKKILSGEK

SEQ ID NO: 10082 - protein, 39 aa, Homo sapiens
  Payload ID: 2019;
  Gene Symbol: BTN2A2;
  Gene Name: butyrophilin, subfamily 2, member A2;
  ENSP ID: ENSP00000418657
MEPAAALHFSLPASLLLLLLLLLLSLCALVSVLPRSVCV

SEQ ID NO: 10083 - protein, 239 aa, Homo sapiens
  Payload ID: 2019;
  Gene Symbol: BTN2A2;
  Gene Name: butyrophilin, subfamily 2, member A2;
  ENSP ID: ENSP00000418857
MEPAAALHFSLPASLLLLLLLLLLSLCALVSAQFTVVGPANPILAMVGENTTLRCHLSPEKNAEDMEVRWFRSQFSPAVFVYKGGRERTEEQMEEYRGRITFVSKDINRGSVALVIHNVTAQENGIYRCYFQEGRSYDEAILRLVVAGLGSKPLIEIKAQEDGSIWLECISGGWYPEPLTVWRDPYGEVVPALKEVSIADADGLFMVTTAVIIRDKYVRNVSCSVNNTLLGQEKETVIF

SEQ ID NO: 10084 - protein, 237 aa, Homo sapiens
  Payload ID: 2019;
  Gene Symbol: BTN2A2;
  Gene Name: butyrophilin, subfamily 2, member A2;
  ENSP ID: ENSP00000418965
MVTTAVIIRDKYVRNVSCSVNNTLLGQEKETVIFIPESFMPSASPWMVALAVILTASPWMVSMTVILAVFIIFMAVSICCIKKLQREKKILSGEKKVEQEEKEIAQQLQEELRWRRTFLHAADVVLDPDTAHPELFLSEDRRSVRRGPYRQRVPDNPERFDSQPCVLGWESFASGKHYWEVEVENVMVWTVGVCRHSVERKGEVLLIPQNGFWTLEMFGNQYRALSSPERILPLKES

SEQ ID NO: 10085 - protein, 110 aa, Homo sapiens
  Payload ID: 2019;
  Gene Symbol: BTN2A2;
  Gene Name: butyrophilin, subfamily 2, member A2;
  ENSP ID: ENSP00000419226
MEPAAALHFSLPASLLLLLLLLLLSLCALVSGLGSKPLIEIKAQEDGSIWLECISGGWYPEPLTVWRDPYGEVVPALKEVSIADADGLFMVTTAVIIRDKYVRNVSCSVN

SEQ ID NO: 10086 - protein, 313 aa, Homo sapiens
  Payload ID: 2019;
  Gene Symbol: BTN2A2;
  Gene Name: butyrophilin, subfamily 2, member A2;
  Uniprot ID:  Q8WVV5;
  ENSP ID: ENSP00000419451
MEPAAALHFSLPASLLLLLLLLLLSLCALVSESFMPSASPWMVALAVILTASPWMVSMTVILAVFIIFMAVSICCIKKLQREKKILSGEKKVEQEEKEIAQQLQEELRWRRTFLHAADVVLDPDTAHPELFLSEDRRSVRRGPYRQRVPDNPERFDSQPCVLGWESFASGKHYWEVEVENVMVWTVGVCRHSVERKGEVLLIPQNGFWTLEMFGNQYRALSSPERILPLKESLCRVGVFLDYEAGDVSFYNMRDRSHIYTCPRSAFTVPVRPFFRLGSDDSPIFICPALTGASGVMVPEEGLKLHRVGTHQSL

SEQ ID NO: 10087 - protein, 513 aa, Homo sapiens
  Payload ID: 2020;
  Gene Symbol: BTN3A1;
  Gene Name: butyrophilin, subfamily 3, member A1;
  Uniprot ID:  O00481;
  ENSP ID: ENSP00000289361
MKMASFLAFLLLNFRVCLLLLQLLMPHSAQFSVLGPSGPILAMVGEDADLPCHLFPTMSAETMELKWVSSSLRQVVNVYADGKEVEDRQSAPYRGRTSILRDGITAGKAALRIHNVTASDSGKYLCYFQDGDFYEKALVELKVAALGSDLHVDVKGYKDGGIHLECRSTGWYPQPQIQWSNNKGENIPTVEAPVVADGVGLYAVAASVIMRGSSGEGVSCTIRSSLLGLEKTASISIADPFFRSAQRWIAALAGTLPVLLLLLGGAGYFLWQQQEEKKTQFRKKKREQELREMAWSTMKQEQSTRVKLLEELRWRSIQYASRGERHSAYNEWKKALFKPADVILDPKTANPILLVSEDQRSVQRAKEPQDLPDNPERFNWHYCVLGCESFISGRHYWEVEVGDRKEWHIGVCSKNVQRKGWVKMTPENGFWTMGLTDGNKYRTLTEPRTNLKLPKPPKKVGVFLDYETGDISFYNAVDGSHIHTFLDVSFSEALYPVFRILTLEPTALTICPA

SEQ ID NO: 10088 - protein, 119 aa, Homo sapiens
  Payload ID: 2020;
  Gene Symbol: BTN3A1;
  Gene Name: butyrophilin, subfamily 3, member A1;
  ENSP ID: ENSP00000394937
MKMASFLAFLLLNFRVCLLLLQLLMPHSAQFSVLGPSGPILAMVGEDADLPCHLFPTMSAETMELKWVSSSLRQVVNVYADGKEVEDRQSAPYRGRTSILRDGITAGKAALRIHNVTAS

SEQ ID NO: 10089 - protein, 378 aa, Homo sapiens
  Payload ID: 2020;
  Gene Symbol: BTN3A1;
  Gene Name: butyrophilin, subfamily 3, member A1;
  Uniprot ID:  O00481;
  ENSP ID: ENSP00000396684
MKMASFLAFLLLNFRVCLLLLQLLMPHSAQFSVLGPSGPILAMVGEDADLPCHLFPTMSAETMELKWVSSSLRQVVNVYADGKEVEDRQSAPYRGRTSILRDGITAGKAALRIHNVTASDSGKYLCYFQDGDFYEKALVELKVAALGSDLHVDVKGYKDGGIHLECRSTGWYPQPQIQWSNNKGENIPTVEAPVVADGVGLYAVAASVIMRGSSGEGVSCTIRSSLLGLEKTASISIADPFFRSAQRWIAALAGTLPVLLLLLGGAGYFLWQQQEEKKTQFRKKKREQELREMAWSTMKQEQSTRVKLLEELRWRSIQYASRGERHSAYNEWKKALFKPGPPIGQTQQQTRGQGSPVALSQESAQRTDSWGPEEGGES

SEQ ID NO: 10090 - protein, 43 aa, Homo sapiens
  Payload ID: 2020;
  Gene Symbol: BTN3A1;
  Gene Name: butyrophilin, subfamily 3, member A1;
  ENSP ID: ENSP00000399393
MKMASFLAFLLLNFRVCLLLLQLLMPHSAQFSVLGPSGPILAM

SEQ ID NO: 10091 - protein, 461 aa, Homo sapiens
  Payload ID: 2020;
  Gene Symbol: BTN3A1;
  Gene Name: butyrophilin, subfamily 3, member A1;
  Uniprot ID:  O00481;
  ENSP ID: ENSP00000406667
MKMASFLAFLLLNFRVCLLLLQLLMPHSAQFSVLGPSGPILAMVGEDADLPCHLFPTMSAETMELKWVSSSLRQVVNVYADGKEVEDRQSAPYRGRTSILRDGITAGKAALRIHNVTASDSGKYLCYFQDGDFYEKALVELKVADGVGLYAVAASVIMRGSSGEGVSCTIRSSLLGLEKTASISIADPFFRSAQRWIAALAGTLPVLLLLLGGAGYFLWQQQEEKKTQFRKKKREQELREMAWSTMKQEQSTRVKLLEELRWRSIQYASRGERHSAYNEWKKALFKPADVILDPKTANPILLVSEDQRSVQRAKEPQDLPDNPERFNWHYCVLGCESFISGRHYWEVEVGDRKEWHIGVCSKNVQRKGWVKMTPENGFWTMGLTDGNKYRTLTEPRTNLKLPKPPKKVGVFLDYETGDISFYNAVDGSHIHTFLDVSFSEALYPVFRILTLEPTALTICPA

SEQ ID NO: 10092 - protein, 352 aa, Homo sapiens
  Payload ID: 2020;
  Gene Symbol: BTN3A1;
  Gene Name: butyrophilin, subfamily 3, member A1;
  Uniprot ID:  O00481;
  ENSP ID: ENSP00000420010
MKMASFLAFLLLNFRVCLLLLQLLMPHSAQFSVLGPSGPILAMVGEDADLPCHLFPTMSAETMELKWVSSSLRQVVNVYADGKEVEDRQSAPYRGRTSILRDGITAGKAALRIHNVTASDSGKYLCYFQDGDFYEKALVELKVAALGSDLHVDVKGYKDGGIHLECRSTGWYPQPQIQWSNNKGENIPTVEAPVVADGVGLYAVAASVIMRGSSGEGVSCTIRSSLLGLEKTASISIADPFFRSAQRWIAALAGTLPVLLLLLGGAGYFLWQQQEEKKTQFRKKKREQELREMAWSTMKQEQSTRVKLLEELRWRSIQYASRGERHSAYNEWKKALFKPGEEMLQMRLHFVK

SEQ ID NO: 10093 - protein, 91 aa, Homo sapiens
  Payload ID: 2020;
  Gene Symbol: BTN3A1;
  Gene Name: butyrophilin, subfamily 3, member A1;
  ENSP ID: ENSP00000427013
MKMASFLAFLLLNFRVCLLLLQLLMPHSAQFSVLGPSGPILAMVGEDADLPCHLFPTMSAETMELKWVSSSLRQVVNVYADGKEVEDRQSA

SEQ ID NO: 10094 - protein, 334 aa, Homo sapiens
  Payload ID: 2021;
  Gene Symbol: BTN3A2;
  Gene Name: butyrophilin, subfamily 3, member A2;
  Uniprot ID:  P78410;
  ENSP ID: ENSP00000348751
MKMASSLAFLLLNFHVSLLLVQLLTPCSAQFSVLGPSGPILAMVGEDADLPCHLFPTMSAETMELKWVSSSLRQVVNVYADGKEVEDRQSAPYRGRTSILRDGITAGKAALRIHNVTASDSGKYLCYFQDGDFYEKALVELKVAALGSNLHVEVKGYEDGGIHLECRSTGWYPQPQIQWSNAKGENIPAVEAPVVADGVGLYEVAASVIMRGGSGEGVSCIIRNSLLGLEKTASISIADPFFRSAQPWIAALAGTLPILLLLLAGASYFLWRQQKEITALSSEIESEQEMKEMGYAATEREISLRESLQEELKRKKIQYLTRGEESSSDTNKSA

SEQ ID NO: 10095 - protein, 334 aa, Homo sapiens; identical to SEQ ID NO: 10094
  Payload ID: 2021;
  Gene Symbol: BTN3A2;
  Gene Name: butyrophilin, subfamily 3, member A2;
  Uniprot ID:  P78410;
  ENSP ID: ENSP00000366937

SEQ ID NO: 10096 - protein, 311 aa, Homo sapiens
  Payload ID: 2021;
  Gene Symbol: BTN3A2;
  Gene Name: butyrophilin, subfamily 3, member A2;
  Uniprot ID:  P78410;
  ENSP ID: ENSP00000380140
MGIPRAQFSVLGPSGPILAMVGEDADLPCHLFPTMSAETMELKWVSSSLRQVVNVYADGKEVEDRQSAPYRGRTSILRDGITAGKAALRIHNVTASDSGKYLCYFQDGDFYEKALVELKVAALGSNLHVEVKGYEDGGIHLECRSTGWYPQPQIQWSNAKGENIPAVEAPVVADGVGLYEVAASVIMRGGSGEGVSCIIRNSLLGLEKTASISIADPFFRSAQPWIAALAGTLPILLLLLAGASYFLWRQQKEITALSSEIESEQEMKEMGYAATEREISLRESLQEELKRKKIQYLTRGEESSSDTNKSA

SEQ ID NO: 10097 - protein, 334 aa, Homo sapiens; identical to SEQ ID NO: 10094
  Payload ID: 2021;
  Gene Symbol: BTN3A2;
  Gene Name: butyrophilin, subfamily 3, member A2;
  Uniprot ID:  P78410;
  ENSP ID: ENSP00000380152

SEQ ID NO: 10098 - protein, 334 aa, Homo sapiens; identical to SEQ ID NO: 10094
  Payload ID: 2021;
  Gene Symbol: BTN3A2;
  Gene Name: butyrophilin, subfamily 3, member A2;
  Uniprot ID:  P78410;
  ENSP ID: ENSP00000432138

SEQ ID NO: 10099 - protein, 159 aa, Homo sapiens
  Payload ID: 2021;
  Gene Symbol: BTN3A2;
  Gene Name: butyrophilin, subfamily 3, member A2;
  ENSP ID: ENSP00000433749
MKMASSLAFLLLNFHVSLLLVQLLTPCSAQFSVLGPSGPILAMVGEDADLPCHLFPTMSAETMELKWVSSSLRQVVNVYADGKEVEDRQSAPYRGRTSILRDGITAGKAALRIHNVTASDSGKYLCYFQDGDFYEKALVELKVADPFFRSAQPWIAALA

SEQ ID NO: 10100 - protein, 43 aa, Homo sapiens
  Payload ID: 2021;
  Gene Symbol: BTN3A2;
  Gene Name: butyrophilin, subfamily 3, member A2;
  ENSP ID: ENSP00000433880
MKMASSLAFLLLNFHVSLLLVQLLTPCSGLCSPLGSLYLAFPV

SEQ ID NO: 10101 - protein, 115 aa, Homo sapiens
  Payload ID: 2021;
  Gene Symbol: BTN3A2;
  Gene Name: butyrophilin, subfamily 3, member A2;
  ENSP ID: ENSP00000434102
MVGEDADLPCHLFPTMSAETMELKWVSSSLRQVVNVYADGKEVEDRQSAPYRGRTSILRDGITAGKAALRIHNVTASDSGKYLCYFQDGDFYEKALVELKVAALGSNLHVEVKGY

SEQ ID NO: 10102 - protein, 196 aa, Homo sapiens
  Payload ID: 2021;
  Gene Symbol: BTN3A2;
  Gene Name: butyrophilin, subfamily 3, member A2;
  ENSP ID: ENSP00000435952
MVGEDADLPCHLFPTMSAETMELKWVSSSLRQVVNVYADGKEVEDRQSAPYRGRTSILRDGITAGKAALRIHNVTASDSGKYLCYFQDGDFYEKALVELKVAALGSNLHVEVKGYEDGGIHLECRSTGWYPQPQIQWSNAKGENIPAVEAPVVADGVGLYEVAASVIMRGGSGEGVSCIIRNSLLGLEKTASISIA

SEQ ID NO: 10103 - protein, 292 aa, Homo sapiens
  Payload ID: 2021;
  Gene Symbol: BTN3A2;
  Gene Name: butyrophilin, subfamily 3, member A2;
  Uniprot ID:  P78410;
  ENSP ID: ENSP00000442687
MVGEDADLPCHLFPTMSAETMELKWVSSSLRQVVNVYADGKEVEDRQSAPYRGRTSILRDGITAGKAALRIHNVTASDSGKYLCYFQDGDFYEKALVELKVAALGSNLHVEVKGYEDGGIHLECRSTGWYPQPQIQWSNAKGENIPAVEAPVVADGVGLYEVAASVIMRGGSGEGVSCIIRNSLLGLEKTASISIADPFFRSAQPWIAALAGTLPILLLLLAGASYFLWRQQKEITALSSEIESEQEMKEMGYAATEREISLRESLQEELKRKKIQYLTRGEESSSDTNKSA

SEQ ID NO: 10104 - protein, 115 aa, Homo sapiens
  Payload ID: 2021;
  Gene Symbol: BTN3A2;
  Gene Name: butyrophilin, subfamily 3, member A2;
  ENSP ID: ENSP00000474533
RGGSGEGVSCIIRNSLLGLEKTASISIADPFFRSAQPWIAALAGTLPILLLLLAGASYFLWRQQKEITALSSEIESEQEMKEMGYAATEREISLRESLQEELKRKKIQYLTREWL

SEQ ID NO: 10105 - protein, 584 aa, Homo sapiens
  Payload ID: 2022;
  Gene Symbol: BTN3A3;
  Gene Name: butyrophilin, subfamily 3, member A3;
  Uniprot ID:  O00478;
  ENSP ID: ENSP00000244519
MKMASSLAFLLLNFHVSLFLVQLLTPCSAQFSVLGPSGPILAMVGEDADLPCHLFPTMSAETMELRWVSSSLRQVVNVYADGKEVEDRQSAPYRGRTSILRDGITAGKAALRIHNVTASDSGKYLCYFQDGDFYEKALVELKVAALGSDLHIEVKGYEDGGIHLECRSTGWYPQPQIKWSDTKGENIPAVEAPVVADGVGLYAVAASVIMRGSSGGGVSCIIRNSLLGLEKTASISIADPFFRSAQPWIAALAGTLPISLLLLAGASYFLWRQQKEKIALSRETEREREMKEMGYAATEQEISLREKLQEELKWRKIQYMARGEKSLAYHEWKMALFKPADVILDPDTANAILLVSEDQRSVQRAEEPRDLPDNPERFEWRYCVLGCENFTSGRHYWEVEVGDRKEWHIGVCSKNVERKKGWVKMTPENGYWTMGLTDGNKYRALTEPRTNLKLPEPPRKVGIFLDYETGEISFYNATDGSHIYTFPHASFSEPLYPVFRILTLEPTALTICPIPKEVESSPDPDLVPDHSLETPLTPGLANESGEPQAEVTSLLLPAHPGAEVSPSATTNQNHKLQARTEALY

SEQ ID NO: 10106 - protein, 535 aa, Homo sapiens
  Payload ID: 2022;
  Gene Symbol: BTN3A3;
  Gene Name: butyrophilin, subfamily 3, member A3;
  Uniprot ID:  O00478;
  ENSP ID: ENSP00000355238
MVGEDADLPCHLFPTMSAETMELRWVSSSLRQVVNVYADGKEVEDRQSAPYRGRTSILRDGITAGKAALRIHNVTASDSGKYLCYFQDGDFYEKALVELKVAALGSDLHIEVKGYEDGGIHLECRSTGWYPQPQIKWSDTKGENIPAVEAPVVADGVGLYAVAASVIMRGSSGGGVSCIIRNSLLGLEKTASISIADPFFRSAQPWIAALAGTLPISLLLLAGASYFLWRQQKEKIALSRETEREREMKEMGYAATEQEISLREWRKIQYMARGEKSLAYHEWKMALFKPADVILDPDTANAILLVSEDQRSVQRAEEPRDLPDNPERFEWRYCVLGCENFTSGRHYWEVEVGDRKEWHIGVCSKNVERKKGWVKMTPENGYWTMGLTDGNKYRALTEPRTNLKLPEPPRKVGIFLDYETGEISFYNATDGSHIYTFPHASFSEPLYPVFRILTLEPTALTICPIPKEVESSPDPDLVPDHSLETPLTPGLANESGEPQAEVTSLLLPAHPGAEVSPSATTNQNHKLQARTEALY

SEQ ID NO: 10107 - protein, 137 aa, Homo sapiens
  Payload ID: 2022;
  Gene Symbol: BTN3A3;
  Gene Name: butyrophilin, subfamily 3, member A3;
  ENSP ID: ENSP00000417234
MKMASSLAFLLLNFHVSLFLVQLLTPCSAQFSVLGPSGPILAMVGEDADLPCHLFPTMSAETMELRWVSSSLRQVVNVYADGKEVEDRQSAPYRGRTSILRDGITAGKAALRIHNVTASDSGKYLCYFQDGDFYEKA

SEQ ID NO: 10108 - protein, 140 aa, Homo sapiens
  Payload ID: 2022;
  Gene Symbol: BTN3A3;
  Gene Name: butyrophilin, subfamily 3, member A3;
  ENSP ID: ENSP00000417717
MVGEDADLPCHLFPTMSAETMELRWVSSSLRQVVNVYADGKEVEDRQSAPYRGRTSILRDGITAGKAALRIHNVTASDSGKYLCYFQDGDFYEKALVELKVAALGSDLHIEVKGYEDGGIHLECRSTGWYPQPQIKWSDT

SEQ ID NO: 10109 - protein, 127 aa, Homo sapiens
  Payload ID: 2022;
  Gene Symbol: BTN3A3;
  Gene Name: butyrophilin, subfamily 3, member A3;
  ENSP ID: ENSP00000419312
MKMASSLAFLLLNFHVSLFLVQLLTPCSDADLPCHLFPTMSAETMELRWVSSSLRQVVNVYADGKEVEDRQSAPYRGRTSILRDGITAGKAALRIHNVTASDSGKYLCYFQDGDFYEKALVELKVAA

SEQ ID NO: 10110 - protein, 250 aa, Homo sapiens
  Payload ID: 2022;
  Gene Symbol: BTN3A3;
  Gene Name: butyrophilin, subfamily 3, member A3;
  ENSP ID: ENSP00000419445
MVGEDADLPCHLFPTMSAETMELRWVSSSLRQVVNVYADGKEVEDRQSAPYRGRTSILRDGITAGKAALRIHNVTASDSGKYLCYFQDGDFYEKALVELKVAALGSDLHIEVKGYEDGGIHLECRSTGWYPQPQIKWSDTKGENIPAVEAPVVADGVGLYAVAASVIMRGSSGGGVSCIIRNSLLGLEKTASISIADPFFRSAQPWIAALAGTLPISLLLLAGASYFLWRQQKEKIALSRETEREREMKE

SEQ ID NO: 10111 - protein, 210 aa, Homo sapiens
  Payload ID: 2022;
  Gene Symbol: BTN3A3;
  Gene Name: butyrophilin, subfamily 3, member A3;
  ENSP ID: ENSP00000419736
MVGEDADLPCHLFPTMSAETMELRWVSSSLRQVVNVYADGKEVEDRQSAPYRGRTSILRDGITAGKAALRIHNVTASDSGKYLCYFQDGDFYEKALVELKVAEWRKIQYMARGEKSLAYHEWKMALFKPADVILDPDTANAILLVSEDQRSVQRAEEPRDLPDNPERFEWRYCVLGCENFTSGRHYWEVEVGDRKEWHIGVCSKNVERKK

SEQ ID NO: 10112 - protein, 237 aa, Homo sapiens
  Payload ID: 2022;
  Gene Symbol: BTN3A3;
  Gene Name: butyrophilin, subfamily 3, member A3;
  ENSP ID: ENSP00000420147
MKMASSLAFLLLNFHVSLFLVQLLTPCSAQFSVLGPSGPILAMVGEDADLPCHLFPTMSAETMELRWVSSSLRQVVNVYADGKEVEDRQSAPYRGRTSILRDGITAGKAALRIHNVTASDSGKYLCYFQDGDFYEKALVELKVAALGSDLHIEVKGYEDGGIHLECRSTGWYPQPQIKWSDTKGENIPAVEAPVVADGVGLYAVAASVIMRGSSGGGVSCIIRNSLLGLEKTASISI

SEQ ID NO: 10113 - protein, 100 aa, Homo sapiens
  Payload ID: 2022;
  Gene Symbol: BTN3A3;
  Gene Name: butyrophilin, subfamily 3, member A3;
  ENSP ID: ENSP00000420339
MVGEDADLPCHLFPTMSAETMELRWVSSSLRQVVNVYADGKEVEDRQSAPYRGRTSILRDGITAGKAALRIHNVTASDSGKYLCYFQDGDFYEKALVELK

SEQ ID NO: 10114 - protein, 455 aa, Homo sapiens
  Payload ID: 2023;
  Gene Symbol: BTNL2;
  Gene Name: butyrophilin-like 2;
  Uniprot ID:  Q9UIR0;
  ENSP ID: ENSP00000364132
MVDFPGYNLSGAVASFLFILLTMKQSEDFRVIGPAHPILAGVGEDALLTCQLLPKRTTMHVEVRWYRSEPSTPVFVHRDGVEVTEMQMEEYRGWVEWIENGIAKGNVALKIHNIQPSDNGQYWCHFQDGNYCGETSLLLKVAGLGSAPSIHMEGPGESGVQLVCTARGWFPEPQVYWEDIRGEKLLAVSEHRIQDKDGLFYAEATLVVRNASAESVSCLVHNPVLTEEKGSVISLPEKLQTELASLKVNGPSQPILVRVGEDIQLTCYLSPKANAQSMEVRWDRSHRYPAVHVYMDGDHVAGEQMAEYRGRTVLVSDAIDEGRLTLQILSARPSDDGQYRCLFEKDDVYQEASLDLKVVSLGSSPLITVEGQEDGEMQPMCSSDGWFPQPHVPWRDMEGKTIPSSSQALTQGSHGLFHVQTLLRVTNISAVDVTCSISIPFLGEEKIATFSLSGW

SEQ ID NO: 10115 - protein, 108 aa, Homo sapiens
  Payload ID: 2023;
  Gene Symbol: BTNL2;
  Gene Name: butyrophilin-like 2;
  ENSP ID: ENSP00000387852
MVDFPGYNLSGAVASFLFILLTMKQSDFRVIGPAHPILAGVGEDALLTCQLLPKRTTMHVEVRWYRSEPSTPVFVHRDGVEVTEMQMEEYRGWVEWIENGIAKGNVAL

SEQ ID NO: 10116 - protein, 108 aa, Homo sapiens; identical to SEQ ID NO: 10115
  Payload ID: 2023;
  Gene Symbol: BTNL2;
  Gene Name: butyrophilin-like 2;
  ENSP ID: ENSP00000388434

SEQ ID NO: 10117 - protein, 482 aa, Homo sapiens
  Payload ID: 2023;
  Gene Symbol: BTNL2;
  Gene Name: butyrophilin-like 2;
  ENSP ID: ENSP00000390613
MVDFPGYNLSGAVASFLFILLTMKQSEDFRVIGPAHPILAGVGEDALLTCQLLPKRTTMHVEVRWYRSEPSTPVFVHRDGVEVTEMQMEEYRGWVEWIENGIAKGNVALKIHNIQPSDNGQYWCHFQDGNYCGETSLLLKVAGLGSAPSIHMEGPGESGVQLVCTARGWFPEPQVYWEDIRGEKLLAVSEHRIQDKDGLFYAEATLVVRNASAESVSCLVHNPVLTEEKGSVISLPEKLQTELASLKVNGPSQPILVRVGEDIQLTCYLSPKANAQSMEVRWDRSHRYPAVHVYMDGDHVAGEQMAEYRGRTVLVSDAIDEGRLTLQILSARPSDDGQYRCLFEKDDVYQEASLDLKVVSLGSSPLITVEGQEDGEMQPMCSSDGWFPQPHVPWRDMEGKTIPSSSQALTQGSHGLFHVQTLLRVTNISAVDVTCSISIPFLGEEKIATFSLSESRMTFLWKTLLVWGLLLAVAVGLPRKRS

SEQ ID NO: 10118 - protein, 68 aa, Homo sapiens
  Payload ID: 2023;
  Gene Symbol: BTNL2;
  Gene Name: butyrophilin-like 2;
  ENSP ID: ENSP00000394258
MVDFPGYNLSGAVASFLFILLTMKQSEDFRVIGPAHPILAGVGEDALLTCQLLPKRTTMHVEVRETPD

SEQ ID NO: 10119 - protein, 68 aa, Homo sapiens; identical to SEQ ID NO: 10118
  Payload ID: 2023;
  Gene Symbol: BTNL2;
  Gene Name: butyrophilin-like 2;
  ENSP ID: ENSP00000394365

SEQ ID NO: 10120 - protein, 108 aa, Homo sapiens; identical to SEQ ID NO: 10115
  Payload ID: 2023;
  Gene Symbol: BTNL2;
  Gene Name: butyrophilin-like 2;
  ENSP ID: ENSP00000394378

SEQ ID NO: 10121 - protein, 68 aa, Homo sapiens; identical to SEQ ID NO: 10118
  Payload ID: 2023;
  Gene Symbol: BTNL2;
  Gene Name: butyrophilin-like 2;
  ENSP ID: ENSP00000394970

SEQ ID NO: 10122 - protein, 68 aa, Homo sapiens; identical to SEQ ID NO: 10118
  Payload ID: 2023;
  Gene Symbol: BTNL2;
  Gene Name: butyrophilin-like 2;
  ENSP ID: ENSP00000396343

SEQ ID NO: 10123 - protein, 482 aa, Homo sapiens; identical to SEQ ID NO: 10117
  Payload ID: 2023;
  Gene Symbol: BTNL2;
  Gene Name: butyrophilin-like 2;
  ENSP ID: ENSP00000399884

SEQ ID NO: 10124 - protein, 482 aa, Homo sapiens
  Payload ID: 2023;
  Gene Symbol: BTNL2;
  Gene Name: butyrophilin-like 2;
  ENSP ID: ENSP00000402639
MVDFPGYNLSGAVASFLFILLTMKQSEDFRVIGPAHPILAGVGEDALLTCQLLPKRTTMHVEVRWYRSEPSTPVFVHRDGVEVTEMQMEEYRGWVEWIENGIAKGNVALKIHNIQPSDNGQYWCHFQDGNYCGETSLLLKVAGLGSAPSIHMEGPGESGVQLVCTARGWFPEPQVYWEDIRGEKLLAVSEHRIQDEDGLFYAEATLVVRNASAESVSCLVHNPVLTEEKGSVISLPEKLQTELASLKVNGPSQPILVRVGEDIQLTCYLSPKANAQSMEVRWDRSHRYPAVHVYMDGDHVAGEQMAEYRGRTVLVSDAIDEGRLTLQILSARPSDDGQYRCLFEKDDVYQEASLDLKVVGLGSSPLITVEGQEDGEMQPMCSSDGWFPQPHVPWRDMEGKTIPSSSQALTQGSHGLFHVQTLLRVTNISAVDVTCSISIPFLGEEKIATFSLSESRMTFLWKTLLVWGLLLAVAVGLPRKRS

SEQ ID NO: 10125 - protein, 482 aa, Homo sapiens; identical to SEQ ID NO: 10124
  Payload ID: 2023;
  Gene Symbol: BTNL2;
  Gene Name: butyrophilin-like 2;
  ENSP ID: ENSP00000405794

SEQ ID NO: 10126 - protein, 68 aa, Homo sapiens; identical to SEQ ID NO: 10118
  Payload ID: 2023;
  Gene Symbol: BTNL2;
  Gene Name: butyrophilin-like 2;
  ENSP ID: ENSP00000409507

SEQ ID NO: 10127 - protein, 108 aa, Homo sapiens; identical to SEQ ID NO: 10115
  Payload ID: 2023;
  Gene Symbol: BTNL2;
  Gene Name: butyrophilin-like 2;
  ENSP ID: ENSP00000411385

SEQ ID NO: 10128 - protein, 108 aa, Homo sapiens; identical to SEQ ID NO: 10115
  Payload ID: 2023;
  Gene Symbol: BTNL2;
  Gene Name: butyrophilin-like 2;
  ENSP ID: ENSP00000411676

SEQ ID NO: 10129 - protein, 108 aa, Homo sapiens; identical to SEQ ID NO: 10115
  Payload ID: 2023;
  Gene Symbol: BTNL2;
  Gene Name: butyrophilin-like 2;
  ENSP ID: ENSP00000411765

SEQ ID NO: 10130 - protein, 108 aa, Homo sapiens; identical to SEQ ID NO: 10115
  Payload ID: 2023;
  Gene Symbol: BTNL2;
  Gene Name: butyrophilin-like 2;
  ENSP ID: ENSP00000411884

SEQ ID NO: 10131 - protein, 68 aa, Homo sapiens; identical to SEQ ID NO: 10118
  Payload ID: 2023;
  Gene Symbol: BTNL2;
  Gene Name: butyrophilin-like 2;
  ENSP ID: ENSP00000413300

SEQ ID NO: 10132 - protein, 482 aa, Homo sapiens; identical to SEQ ID NO: 10124
  Payload ID: 2023;
  Gene Symbol: BTNL2;
  Gene Name: butyrophilin-like 2;
  ENSP ID: ENSP00000414407

SEQ ID NO: 10133 - protein, 482 aa, Homo sapiens; identical to SEQ ID NO: 10117
  Payload ID: 2023;
  Gene Symbol: BTNL2;
  Gene Name: butyrophilin-like 2;
  ENSP ID: ENSP00000414811

SEQ ID NO: 10134 - protein, 482 aa, Homo sapiens; identical to SEQ ID NO: 10117
  Payload ID: 2023;
  Gene Symbol: BTNL2;
  Gene Name: butyrophilin-like 2;
  ENSP ID: ENSP00000415396

SEQ ID NO: 10135 - protein, 482 aa, Homo sapiens; identical to SEQ ID NO: 10117
  Payload ID: 2023;
  Gene Symbol: BTNL2;
  Gene Name: butyrophilin-like 2;
  ENSP ID: ENSP00000416544

SEQ ID NO: 10136 - protein, 108 aa, Homo sapiens; identical to SEQ ID NO: 10115
  Payload ID: 2023;
  Gene Symbol: BTNL2;
  Gene Name: butyrophilin-like 2;
  ENSP ID: ENSP00000416987

SEQ ID NO: 10137 - protein, 68 aa, Homo sapiens; identical to SEQ ID NO: 10118
  Payload ID: 2023;
  Gene Symbol: BTNL2;
  Gene Name: butyrophilin-like 2;
  ENSP ID: ENSP00000420063

SEQ ID NO: 10138 - protein, 178 aa, Homo sapiens
  Payload ID: 2023;
  Gene Symbol: BTNL2;
  Gene Name: butyrophilin-like 2;
  Uniprot ID:  Q9UIR0;
  ENSP ID: ENSP00000443364
MEVRWDRSHRYPAVHVYMDGDHVAGEQMAEYRGRTVLVSDAIDEGRLTLQILSARPSDDGQYRCLFEKDDVYQEASLDLKVVSLGSSPLITVEGQEDGEMQPMCSSDGWFPQPHVPWRDMEGKTIPSSSQALTQGSHGLFHVQTLLRVTNISAVDVTCSISIPFLGEEKIATFSLSGW

SEQ ID NO: 10139 - protein, 178 aa, Homo sapiens
  Payload ID: 2023;
  Gene Symbol: BTNL2;
  Gene Name: butyrophilin-like 2;
  Uniprot ID:  Q9UIR0;
  ENSP ID: ENSP00000446794
MEVRWDRSHRYPAVHVYMDGDHVAGEQMAEYRGRTVLVSDAIDEGRLTLQILSARPSDDGQYRCLFEKDDVYQEASLDLKVVGLGSSPLITVEGQEDGEMQPMCSSDGWFPQPHVPWRDMEGKTIPSSSQALTQGSHGLFHVQTLLRVTNISAVDVTCSISIPFLGEEKIATFSLSGW

SEQ ID NO: 10140 - protein, 178 aa, Homo sapiens; identical to SEQ ID NO: 10139
  Payload ID: 2023;
  Gene Symbol: BTNL2;
  Gene Name: butyrophilin-like 2;
  Uniprot ID:  Q9UIR0;
  ENSP ID: ENSP00000446915

SEQ ID NO: 10141 - protein, 178 aa, Homo sapiens; identical to SEQ ID NO: 10138
  Payload ID: 2023;
  Gene Symbol: BTNL2;
  Gene Name: butyrophilin-like 2;
  Uniprot ID:  Q9UIR0;
  ENSP ID: ENSP00000447291

SEQ ID NO: 10142 - protein, 178 aa, Homo sapiens; identical to SEQ ID NO: 10138
  Payload ID: 2023;
  Gene Symbol: BTNL2;
  Gene Name: butyrophilin-like 2;
  Uniprot ID:  Q9UIR0;
  ENSP ID: ENSP00000447616

SEQ ID NO: 10143 - protein, 245 aa, Homo sapiens
  Payload ID: 2023;
  Gene Symbol: BTNL2;
  Gene Name: butyrophilin-like 2;
  Uniprot ID:  Q9UIR0;
  ENSP ID: ENSP00000447733
MVDFPGYNLSGAVASFLFILLTMKQSEKLQTELASLKVNGPSQPILVRVGEDIQLTCYLSPKANAQSMEVRWDRSHRYPAVHVYMDGDHVAGEQMAEYRGRTVLVSDAIDEGRLTLQILSARPSDDGQYRCLFEKDDVYQEASLDLKVVGLGSSPLITVEGQEDGEMQPMCSSDGWFPQPHVPWRDMEGKTIPSSSQALTQGSHGLFHVQTLLRVTNISAVDVTCSISIPFLGEEKIATFSLSGW

SEQ ID NO: 10144 - protein, 455 aa, Homo sapiens; identical to SEQ ID NO: 10114
  Payload ID: 2023;
  Gene Symbol: BTNL2;
  Gene Name: butyrophilin-like 2;
  Uniprot ID:  Q9UIR0;
  ENSP ID: ENSP00000447985

SEQ ID NO: 10145 - protein, 455 aa, Homo sapiens; identical to SEQ ID NO: 10114
  Payload ID: 2023;
  Gene Symbol: BTNL2;
  Gene Name: butyrophilin-like 2;
  Uniprot ID:  Q9UIR0;
  ENSP ID: ENSP00000448023

SEQ ID NO: 10146 - protein, 455 aa, Homo sapiens
  Payload ID: 2023;
  Gene Symbol: BTNL2;
  Gene Name: butyrophilin-like 2;
  ENSP ID: ENSP00000448277
MVDFPGYNLSGAVASFLFILLTMKQSEDFRVIGPAHPILAGVGEDALLTCQLLPKRTTMHVEVRWYRSEPSTPVFVHRDGVEVTEMQMEEYRGWVEWIENGIAKGNVALKIHNIQPSDNGQYWCHFQDGNYCGETSLLLKVAGLGSAPSIHMEGPGESGVQLVCTARGWFPEPQVYWEDIRGEKLLAVSEHRIQDEDGLFYAEATLVVRNASAESVSCLVHNPVLTEEKGSVISLPEKLQTELASLKVNGPSQPILVRVGEDIQLTCYLSPKANAQSMEVRWDRSHRYPAVHVYMDGDHVAGEQMAEYRGRTVLVSDAIDEGRLTLQILSARPSDDGQYRCLFEKDDVYQEASLDLKVVGLGSSPLITVEGQEDGEMQPMCSSDGWFPQPHVPWRDMEGKTIPSSSQALTQGSHGLFHVQTLLRVTNISAVDVTCSISIPFLGEEKIATFSLSGW

SEQ ID NO: 10147 - protein, 178 aa, Homo sapiens; identical to SEQ ID NO: 10138
  Payload ID: 2023;
  Gene Symbol: BTNL2;
  Gene Name: butyrophilin-like 2;
  Uniprot ID:  Q9UIR0;
  ENSP ID: ENSP00000448550

SEQ ID NO: 10148 - protein, 245 aa, Homo sapiens
  Payload ID: 2023;
  Gene Symbol: BTNL2;
  Gene Name: butyrophilin-like 2;
  Uniprot ID:  Q9UIR0;
  ENSP ID: ENSP00000448852
MVDFPGYNLSGAVASFLFILLTMKQSEKLQTELASLKVNGPSQPILVRVGEDIQLTCYLSPKANAQSMEVRWDRSHRYPAVHVYMDGDHVAGEQMAEYRGRTVLVSDAIDEGRLTLQILSARPSDDGQYRCLFEKDDVYQEASLDLKVVSLGSSPLITVEGQEDGEMQPMCSSDGWFPQPHVPWRDMEGKTIPSSSQALTQGSHGLFHVQTLLRVTNISAVDVTCSISIPFLGEEKIATFSLSGW

SEQ ID NO: 10149 - protein, 455 aa, Homo sapiens; identical to SEQ ID NO: 10146
  Payload ID: 2023;
  Gene Symbol: BTNL2;
  Gene Name: butyrophilin-like 2;
  ENSP ID: ENSP00000448929

SEQ ID NO: 10150 - protein, 455 aa, Homo sapiens; identical to SEQ ID NO: 10146
  Payload ID: 2023;
  Gene Symbol: BTNL2;
  Gene Name: butyrophilin-like 2;
  ENSP ID: ENSP00000449292

SEQ ID NO: 10151 - protein, 178 aa, Homo sapiens; identical to SEQ ID NO: 10139
  Payload ID: 2023;
  Gene Symbol: BTNL2;
  Gene Name: butyrophilin-like 2;
  Uniprot ID:  Q9UIR0;
  ENSP ID: ENSP00000449356

SEQ ID NO: 10152 - protein, 455 aa, Homo sapiens; identical to SEQ ID NO: 10114
  Payload ID: 2023;
  Gene Symbol: BTNL2;
  Gene Name: butyrophilin-like 2;
  Uniprot ID:  Q9UIR0;
  ENSP ID: ENSP00000449365

SEQ ID NO: 10153 - protein, 455 aa, Homo sapiens; identical to SEQ ID NO: 10114
  Payload ID: 2023;
  Gene Symbol: BTNL2;
  Gene Name: butyrophilin-like 2;
  Uniprot ID:  Q9UIR0;
  ENSP ID: ENSP00000449546

SEQ ID NO: 10154 - protein, 178 aa, Homo sapiens; identical to SEQ ID NO: 10138
  Payload ID: 2023;
  Gene Symbol: BTNL2;
  Gene Name: butyrophilin-like 2;
  Uniprot ID:  Q9UIR0;
  ENSP ID: ENSP00000449578

SEQ ID NO: 10155 - protein, 245 aa, Homo sapiens; identical to SEQ ID NO: 10143
  Payload ID: 2023;
  Gene Symbol: BTNL2;
  Gene Name: butyrophilin-like 2;
  Uniprot ID:  Q9UIR0;
  ENSP ID: ENSP00000450139

SEQ ID NO: 10156 - protein, 178 aa, Homo sapiens
  Payload ID: 2023;
  Gene Symbol: BTNL2;
  Gene Name: butyrophilin-like 2;
  ENSP ID: ENSP00000479046
MEVRWDRSHRYPAVHVYMDGDHVAGEQMAEYRGRTVLVSDAIDEGRLTLQILSARPSDDGQYRCLFEKDDVYQEASLDLKVVGLGSSPLITVEGQEDGEMQLICSSDGWFPQPHVQWRDMEGKTIPSSSQALTQGSHGLFHVQTLLRVTNISAVDVTCSISIPFLGEEKIATFSLSGW

SEQ ID NO: 10157 - protein, 455 aa, Homo sapiens
  Payload ID: 2023;
  Gene Symbol: BTNL2;
  Gene Name: butyrophilin-like 2;
  ENSP ID: ENSP00000483322
MVDFPGYNLSGAVASFLFILLTMKQSEDFRVIGPAHPILAGVGEDALLTCQLLPKRTTMHVEVRWYRSEPSTPVFVHRDGVEVTEMQMEEYRGWVEWIENGIAKGNVALKIHNIQPSDNGQYWCHFQDGNYCGETSLLLKVAGLGSAPSIHMEGPGESGVQLVCTARGWFPEPQVYWEDIRGEKLLAVSEHRIQDKDGLFYAEATLVVRNASAESVSCLVHNPVLTEEKGSVISLPEKLQTELASLKVNGPSQPILVRVGEDIQLTCYLSPKANAQSMEVRWDRSHRYPAVHVYMDGDHVAGEQMAEYRGRTVLVSDAIDEGRLTLQILSARPSDDGQYRCLFEKDDVYQEASLDLKVVGLGSSPLITVEGQEDGEMQLICSSDGWFPQPHVQWRDMEGKTIPSSSQALTQGSHGLFHVQTLLRVTNISAVDVTCSISIPFLGEEKIATFSLSGW

SEQ ID NO: 10158 - protein, 466 aa, Homo sapiens
  Payload ID: 2024;
  Gene Symbol: BTNL3;
  Gene Name: butyrophilin-like 3;
  Uniprot ID:  Q6UXE8;
  ENSP ID: ENSP00000341787
MAFVLILVLSFYELVSGQWQVTGPGKFVQALVGEDAVFSCSLFPETSAEAMEVRFFRNQFHAVVHLYRDGEDWESKQMPQYRGRTEFVKDSIAGGRVSLRLKNITPSDIGLYGCWFSSQIYDEEATWELRVAALGSLPLISIVGYVDGGIQLLCLSSGWFPQPTAKWKGPQGQDLSSDSRANADGYSLYDVEISIIVQENAGSILCSIHLAEQSHEVESKVLIGETFFQPSPWRLASILLGLLCGALCGVVMGMIIVFFKSKGKIQAELDWRRKHGQAELRDARKHAVEVTLDPETAHPKLCVSDLKTVTHRKAPQEVPHSEKRFTRKSVVASQGFQAGKHYWEVDVGQNVGWYVGVCRDDVDRGKNNVTLSPNNGYWVLRLTTEHLYFTFNPHFISLPPSTPPTRVGVFLDYEGGTISFFNTNDQSLIYTLLTCQFEGLLRPYIQHAMYDEEKGTPIFICPVSWG

SEQ ID NO: 10159 - protein, 347 aa, Homo sapiens
  Payload ID: 2025;
  Gene Symbol: BTNL8;
  Gene Name: butyrophilin-like 8;
  Uniprot ID:  Q6UX41;
  ENSP ID: ENSP00000231229
MALMLSLVLSLLKLGSGQWQVFGPDKPVQALVGEDAAFSCFLSPKTNAEAMEVRFFRGQFSSVVHLYRDGKDQPFMQMPQYQGRTKLVKDSIAEGRISLRLENITVLDAGLYGCRISSQSYYQKAIWELQVSALGSVPLISITGYVDRDIQLLCQSSGWFPRPTAKWKGPQGQDLSTDSRTNRDMHGLFDVEISLTVQENAGSISCSMRHAHLSREVESRVQIGDTFFEPISWHLATKVLGILCCGLFFGIVGLKIFFSKFQCKREREAWAGALFMVPAGTGSEMLPHPAASLLLVLASRGPGPKKENPGGTGLEKKARTGRIERRPETRSGGDSGSRDGSPEALRF

SEQ ID NO: 10160 - protein, 500 aa, Homo sapiens
  Payload ID: 2025;
  Gene Symbol: BTNL8;
  Gene Name: butyrophilin-like 8;
  Uniprot ID:  Q6UX41;
  ENSP ID: ENSP00000342197
MALMLSLVLSLLKLGSGQWQVFGPDKPVQALVGEDAAFSCFLSPKTNAEAMEVRFFRGQFSSVVHLYRDGKDQPFMQMPQYQGRTKLVKDSIAEGRISLRLENITVLDAGLYGCRISSQSYYQKAIWELQVSALGSVPLISITGYVDRDIQLLCQSSGWFPRPTAKWKGPQGQDLSTDSRTNRDMHGLFDVEISLTVQENAGSISCSMRHAHLSREVESRVQIGDTFFEPISWHLATKVLGILCCGLFFGIVGLKIFFSKFQWKIQAELDWRRKHGQAELRDARKHAVEVTLDPETAHPKLCVSDLKTVTHRKAPQEVPHSEKRFTRKSVVASQSFQAGKHYWEVDGGHNKRWRVGVCRDDVDRRKEYVTLSPDHGYWVLRLNGEHLYFTLNPRFISVFPRTPPTKIGVFLDYECGTISFFNINDQSLIYTLTCRFEGLLRPYIEYPSYNEQNGTPIVICPVTQESEKEASWQRASAIPETSNSESSSQATTPFLPRGEM

SEQ ID NO: 10161 - protein, 375 aa, Homo sapiens
  Payload ID: 2025;
  Gene Symbol: BTNL8;
  Gene Name: butyrophilin-like 8;
  Uniprot ID:  Q6UX41;
  ENSP ID: ENSP00000383543
MWTWFVKSLGSVPLISITGYVDRDIQLLCQSSGWFPRPTAKWKGPQGQDLSTDSRTNRDMHGLFDVEISLTVQENAGSISCSMRHAHLSREVESRVQIGDTFFEPISWHLATKVLGILCCGLFFGIVGLKIFFSKFQWKIQAELDWRRKHGQAELRDARKHAVEVTLDPETAHPKLCVSDLKTVTHRKAPQEVPHSEKRFTRKSVVASQSFQAGKHYWEVDGGHNKRWRVGVCRDDVDRRKEYVTLSPDHGYWVLRLNGEHLYFTLNPRFISVFPRTPPTKIGVFLDYECGTISFFNINDQSLIYTLTCRFEGLLRPYIEYPSYNEQNGTPIVICPVTQESEKEASWQRASAIPETSNSESSSQATTPFLPRGEM

SEQ ID NO: 10162 - protein, 41 aa, Homo sapiens
  Payload ID: 2025;
  Gene Symbol: BTNL8;
  Gene Name: butyrophilin-like 8;
  ENSP ID: ENSP00000422069
MHGLFDVEISLTVQENAGSISCSMRHAHLSREVESRVQIGV

SEQ ID NO: 10163 - protein, 340 aa, Homo sapiens
  Payload ID: 2025;
  Gene Symbol: BTNL8;
  Gene Name: butyrophilin-like 8;
  Uniprot ID:  Q6UX41;
  ENSP ID: ENSP00000424585
MALMLSLVLSLLKLGSGQWQVFGPDKPVQALVGEDAAFSCFLSPKTNAEAMEVRFFRGQFSSVVHLYRDGKDQPFMQMPQYQGRTKLVKDSIAEGRISLRLENITVLDAGLYGCRISSQSYYQKAIWELQVSALGSVPLISITGYVDRDIQLLCQSSGWFPRPTAKWKGPQGQDLSTDSRTNRDMHGLFDVEISLTVQENAGSISCSMRHAHLSREVESRVQIGDTFFEPISWHLATKVLGILCCGLFFGIVGLKIFFSKFQCKREREAWAGALFMVPAGTGSEMLPHPAASLLLVLASRGPGPKKLEKKARTGRIERRPETRSGGDSGSRDGSPEALRF

SEQ ID NO: 10164 - protein, 384 aa, Homo sapiens
  Payload ID: 2025;
  Gene Symbol: BTNL8;
  Gene Name: butyrophilin-like 8;
  Uniprot ID:  Q6UX41;
  ENSP ID: ENSP00000425207
MALMLSLVLSLLKLGSALGSVPLISITGYVDRDIQLLCQSSGWFPRPTAKWKGPQGQDLSTDSRTNRDMHGLFDVEISLTVQENAGSISCSMRHAHLSREVESRVQIGDTFFEPISWHLATKVLGILCCGLFFGIVGLKIFFSKFQWKIQAELDWRRKHGQAELRDARKHAVEVTLDPETAHPKLCVSDLKTVTHRKAPQEVPHSEKRFTRKSVVASQSFQAGKHYWEVDGGHNKRWRVGVCRDDVDRRKEYVTLSPDHGYWVLRLNGEHLYFTLNPRFISVFPRTPPTKIGVFLDYECGTISFFNINDQSLIYTLTCRFEGLLRPYIEYPSYNEQNGTPIVICPVTQESEKEASWQRASAIPETSNSESSSQATTPFLPRGEM

SEQ ID NO: 10165 - protein, 293 aa, Homo sapiens
  Payload ID: 2025;
  Gene Symbol: BTNL8;
  Gene Name: butyrophilin-like 8;
  ENSP ID: ENSP00000427441
MRHAHLSREVESRVQIGDTFFEPISWHLATKVLGILCCGLFFGIVGLKIFFSKFQWKIQAELDWRRKHGQAELRDARKHAVEVTLDPETAHPKLCVSDLKTVTHRKAPQEVPHSEKRFTRKSVVASQSFQAGKHYWEVDGGHNKRWRVGVCRDDVDRRKEYVTLSPDHGYWVLRLNGEHLYFTLNPRFISVFPRTPPTKIGVFLDYECGTISFFNINDQSLIYTLTCRFEGLLRPYIEYPSYNEQNGTPIVICPVTQESEKEASWQRASAIPETSNSESSSQATTPFLPRGEM

SEQ ID NO: 10166 - protein, 316 aa, Homo sapiens
  Payload ID: 2025;
  Gene Symbol: BTNL8;
  Gene Name: butyrophilin-like 8;
  Uniprot ID:  Q6UX41;
  ENSP ID: ENSP00000435098
MHGLFDVEISLTVQENAGSISCSMRHAHLSREVESRVQIGDTFFEPISWHLATKVLGILCCGLFFGIVGLKIFFSKFQWKIQAELDWRRKHGQAELRDARKHAVEVTLDPETAHPKLCVSDLKTVTHRKAPQEVPHSEKRFTRKSVVASQSFQAGKHYWEVDGGHNKRWRVGVCRDDVDRRKEYVTLSPDHGYWVLRLNGEHLYFTLNPRFISVFPRTPPTKIGVFLDYECGTISFFNINDQSLIYTLTCRFEGLLRPYIEYPSYNEQNGTPIVICPVTQESEKEASWQRASAIPETSNSESSSQATTPFLPRGEM

SEQ ID NO: 10167 - protein, 375 aa, Homo sapiens; identical to SEQ ID NO: 10161
  Payload ID: 2025;
  Gene Symbol: BTNL8;
  Gene Name: butyrophilin-like 8;
  Uniprot ID:  Q6UX41;
  ENSP ID: ENSP00000483717

SEQ ID NO: 10168 - protein, 535 aa, Homo sapiens
  Payload ID: 2026;
  Gene Symbol: BTNL9;
  Gene Name: butyrophilin-like 9;
  Uniprot ID:  Q6UXG8;
  ENSP ID: ENSP00000330200
MVDLSVSPDSLKPVSLTSSLVFLMHLLLLQPGEPSSEVKVLGPEYPILALVGEEVEFPCHLWPQLDAQQMEIRWFRSQTFNVVHLYQEQQELPGRQMPAFRNRTKLVKDDIAYGSVVLQLHSIIPSDKGTYGCRFHSDNFSGEALWELEVAGLGSDPHLSLEGFKEGGIQLRLRSSGWYPKPKVQWRDHQGQCLPPEFEAIVWDAQDLFSLETSVVVRAGALSNVSVSIQNLLLSQKKELVVQIADVFVPGASAWKSAFVATLPLLLVLAALALGVLRKQRRSREKLRKQAEKRQEKLTAELEKLQTELDWRRAEGQAEWRAAQKYAVDVTLDPASAHPSLEVSEDGKSVSSRGAPPGPAPGHPQRFSEQTCALSLERFSAGRHYWEVHVGRRSRWFLGACLAAVPRAGPARLSPAAGYWVLGLWNGCEYFVLAPHRVALTLRVPPRRLGVFLDYEAGELSFFNVSDGSHIFTFHDTFSGALCAYFRPRAHDGGEHPDPLTICPLPVRGTGVPEENDSDTWLQPYEPADPALDWW

SEQ ID NO: 10169 - protein, 344 aa, Homo sapiens
  Payload ID: 2026;
  Gene Symbol: BTNL9;
  Gene Name: butyrophilin-like 9;
  Uniprot ID:  Q6UXG8;
  ENSP ID: ENSP00000366037
MVDLSVSPDSLKPVSLTSSLVFLMHLLLLQPGEPSSEVKVLGPEYPILALVGEEVEFPCHLWPQLDAQQMEIRWFRSQTFNVVHLYQEQQELPGRQMPAFRNRTKLVKDDIAYGSVVLQLHSIIPSDKGTYGCRFHSDNFSGEALWELEVAGLGSDPHLSLEGFKEGGIQLRLRSSGWYPKPKVQWRDHQGQCLPPEFEAIVWDAQDLFSLETSVVVRAGALSNVSVSIQNLLLSQKKELVVQIADVFVPGASAWKSAFVATLPLLLVLAALALGVLRKQRRSREKLRKQAEKRQEKLTAELEKLQTELDWRRAEGQAECFVLASHPPGEGIQAASNSTTTLNA

SEQ ID NO: 10170 - protein, 315 aa, Homo sapiens
  Payload ID: 2026;
  Gene Symbol: BTNL9;
  Gene Name: butyrophilin-like 9;
  Uniprot ID:  Q6UXG8;
  ENSP ID: ENSP00000425424
MVDLSVSPDSLKPVSLTSSLVFLMHLLLLQPGEPSSEVKVLGPEYPILALVGEEVEFPCHLWPQLDAQQMEIRWFRSQTFNVVHLYQEQQELPGRQMPAFRNRTKLVKDDIAYGSVVLQLHSIIPSDKGTYGCRFHSDNFSGEALWELEVAGLGSDPHLSLEGFKEGGIQLRLRSSGWYPKPKVQWRDHQGQCLPPEFEAIVWDAQDLFSLETSVVVRAGALSNVSVSIQNLLLSQKKELVVQIADVFVPGASAWKSAFVATLPLLLVLAALALGVLRKQRRSREKLRKQAEKRQGERGQGVLHAPAQVPKPAVI

SEQ ID NO: 10171 - protein, 246 aa, Homo sapiens
  Payload ID: 2026;
  Gene Symbol: BTNL9;
  Gene Name: butyrophilin-like 9;
  ENSP ID: ENSP00000427345
MEIRWFRSQTFNVVHLYQEQQELPGRQMPAFRNRTKLVKDDIAYGSVVLQLHSIIPSDKGTYGCRFHSDNFSGEALWELEVAGLGSDPHLSLEGFKEGGIQLRLRSSGWYPKPKVQWRDHQGQCLPPEFEAIVWDAQDLFSLETSVVVRAGALSNVSVSIQNLLLSQKKELVVQIADVFVPGASAWKSAFVATLPLLLVLAALALGVLRKQRRSREKLRKQAEKRQGERGQGVLHAPAQVPKPAVI

SEQ ID NO: 10172 - protein, 602 aa, Homo sapiens
  Payload ID: 2027;
  Gene Symbol: BCHE;
  Gene Name: butyrylcholinesterase;
  Uniprot ID:  P06276;
  ENSP ID: ENSP00000264381
MHSKVTIICIRFLFWFLLLCMLIGKSHTEDDIIIATKNGKVRGMNLTVFGGTVTAFLGIPYAQPPLGRLRFKKPQSLTKWSDIWNATKYANSCCQNIDQSFPGFHGSEMWNPNTDLSEDCLYLNVWIPAPKPKNATVLIWIYGGGFQTGTSSLHVYDGKFLARVERVIVVSMNYRVGALGFLALPGNPEAPGNMGLFDQQLALQWVQKNIAAFGGNPKSVTLFGESAGAASVSLHLLSPGSHSLFTRAILQSGSFNAPWAVTSLYEARNRTLNLAKLTGCSRENETEIIKCLRNKDPQEILLNEAFVVPYGTPLSVNFGPTVDGDFLTDMPDILLELGQFKKTQILVGVNKDEGTAFLVYGAPGFSKDNNSIITRKEFQEGLKIFFPGVSEFGKESILFHYTDWVDDQRPENYREALGDVVGDYNFICPALEFTKKFSEWGNNAFFYYFEHRSSKLPWPEWMGVMHGYEIEFVFGLPLERRDNYTKAEEILSRSIVKRWANFAKYGNPNETQNNSTSWPVFKSTEQKYLTLNTESTRIMTKLRAQQCRFWTSFFPKVLEMTGNIDEAEWEWKAGFHRWNNYMMDWKNQFNDYTSKKESCVGL

SEQ ID NO: 10173 - protein, 132 aa, Homo sapiens
  Payload ID: 2027;
  Gene Symbol: BCHE;
  Gene Name: butyrylcholinesterase;
  ENSP ID: ENSP00000418325
AVQFTGWSSSCILHFPEVLHDFHSLQTLPSLLQRIGNPNETQNNSTSWPVFKSTEQKYLTLNTESTRIMTKLRAQQCRFWTSFFPKVLEMTGNIDEAEWEWKAGFHRWNNYMMDWKNQFNDYTSKKESCVGL

SEQ ID NO: 10174 - protein, 120 aa, Homo sapiens
  Payload ID: 2027;
  Gene Symbol: BCHE;
  Gene Name: butyrylcholinesterase;
  ENSP ID: ENSP00000418504
AVQFTGWSSSCILHFPEVLHDFHSLQTLPSLLQRIGNPNETQNNSTSWPVFKSTEQKYLTLNTESTRIMTKLRAQQCRFWTSFFPKVLEMTEPICCYCEPGTALAARAAQMKMTGSAYSQ

SEQ ID NO: 10175 - protein, 562 aa, Homo sapiens
  Payload ID: 2027;
  Gene Symbol: BCHE;
  Gene Name: butyrylcholinesterase;
  ENSP ID: ENSP00000419505
MHSKVTIICIRFLFWFLLLCMLIGKSHTEDDIIIATKNGKVRGMNLTVFGGTVTAFLGIPYAQPPLGRLRFKKPQSLTKWSDIWNATKYANSCCQNIDQSFPGFHGSEMWNPNTDLSEDCLYLNVWIPAPKPKNATVLIWIYGGGFQTGTSSLHVYDGKFLARVERVIVVSMNYRVGALGFLALPGNPEAPGNMGLFDQQLALQWVQKNIAAFGGNPKSVTLFGESAGAASVSLHLLSPGSHSLFTRAILQSGSFNAPWAVTSLYEARNRTLNLAKLTGCSRENETEIIKCLRNKDPQEILLNEAFVVPYGTPLSVNFGPTVDGDFLTDMPDILLELGQFKKTQILVGVNKDEGTAFLVYGAPGFSKDNNSIITRKEFQEGLKIFFPGVSEFGKESILFHYTDWVDDQRPENYREALGDVVGDYNFICPALEFTKKFSEWGNNAFFYYFEHRSSKLPWPEWMGVMHGYEIEFVFGLPLERRDNYTKAEEILSRSIVKRWANFAKYGNPNETQNNSTSWPVFKSTEQKYLTLNTESTRIMTKLRAQQCRFWTSFFPKVLEMTG

SEQ ID NO: 10176 - protein, 525 aa, Homo sapiens
  Payload ID: 2027;
  Gene Symbol: BCHE;
  Gene Name: butyrylcholinesterase;
  ENSP ID: ENSP00000419804
MHSKVTIICIRFLFWFLLLCMLIGKSHTEDDIIIATKNGKVRGMNLTVFGGTVTAFLGIPYAQPPLGRLRFKKPQSLTKWSDIWNATKYANSCCQNIDQSFPGFHGSEMWNPNTDLSEDCLYLNVWIPAPKPKNATVLIWIYGGGFQTGTSSLHVYDGKFLARVERVIVVSMNYRVGALGFLALPGNPEAPGNMGLFDQQLALQWVQKNIAAFGGNPKSVTLFGESAGAASVSLHLLSPGSHSLFTRAILQSGSFNAPWAVTSLYEARNRTLNLAKLTGCSRENETEIIKCLRNKDPQEILLNEAFVVPYGTPLSVNFGPTVDGDFLTDMPDILLELGQFKKTQILVGVNKDEGTAFLVYGAPGFSKDNNSIITRKEFQEGLKIFFPGVSEFGKESILFHYTDWVDDQRPENYREALGDVVGDYNFICPALEFTKKFSEWGNNAFFYYFEHRSSKLPWPEWMGVMHGYEIEFVFGLPLERRDNYTKAEEILSRSIVKRWANFAKYGCSSSTILNYVLETEPVVLI

SEQ ID NO: 10177 - protein, 75 aa, Homo sapiens
  Payload ID: 2028;
  Gene Symbol:;
  Gene Name: BX004987.4;
  ENSP ID: ENSP00000484918
MVVLGMQTEEGHCIMLRGLAHSLGGTQVICKVVGLPSSIGFNTSSHLLFPATLQGAPTHFPCRWRQGGSTDNLPA

SEQ ID NO: 10178 - protein, 137 aa, Homo sapiens; identical to SEQ ID NO: 3750
  Payload ID: 2029;
  Gene Symbol:;
  Gene Name: BX248413.1;
  ENSP ID: ENSP00000484425

SEQ ID NO: 10179 - protein, 437 aa, Homo sapiens
  Payload ID: 2030;
  Gene Symbol: BYSL;
  Gene Name: bystin-like;
  Uniprot ID:  Q13895;
  ENSP ID: ENSP00000230340
MPKFKAARGVGGQEKHAPLADQILAGNAVRAGVREKRRGRGTGEAEEEYVGPRLSRRILQQARQQQEELEAEHGTGDKPAAPRERTTRLGPRMPQDGSDDEDEEWPTLEKAATMTAAGHHAEVVVDPEDERAIEMFMNKNPPARRTLADIIMEKLTEKQTEVETVMSEVSGFPMPQLDPRVLEVYRGVREVLSKYRSGKLPKAFKIIPALSNWEQILYVTEPEAWTAAAMYQATRIFASNLKERMAQRFYNLVLLPRVRDDVAEYKRLNFHLYMALKKALFKPGAWFKGILIPLCESGTCTLREAIIVGSIITKCSIPVLHSSAAMLKIAEMEYSGANSIFLRLLLDKKYALPYRVLDALVFHFLGFRTEKRELPVLWHQCLLTLVQRYKADLATDQKEALLELLRLQPHPQLSPEIRRELQSAVPRDVEDVPITVE

SEQ ID NO: 10180 - protein, 183 aa, Homo sapiens
  Payload ID: 2030;
  Gene Symbol: BYSL;
  Gene Name: bystin-like;
  ENSP ID: ENSP00000362087
  MOD_RES (1)..(1): Any amino acid
XAATMTAAGHHAEVVVDPEDERAIEMFMNKNPPARRTLADIIMEKLTEKQTEVETVMSEVSGFPMPQLDPRVLEVYRGVREVLSKYRSGKLPKAFKIIPALSNWEQILYVTEPEAWTAAAMYQATRIFASNLKERMAQRFYNLVLLPRVRDDVAEYKRLNFHLYMALKKALFKPGAWFKVAAL

SEQ ID NO: 10181 - protein, 194 aa, Homo sapiens
  Payload ID: 2030;
  Gene Symbol: BYSL;
  Gene Name: bystin-like;
  ENSP ID: ENSP00000417813
MPKFKAARGVGGQEKHAPLADQILAGNAVRAGVREKRRGRGTGEAEEEYVGPRLSRRILQQARQQQEELEAEHGTGDKPAAPRERTTRLGPRMPQDGSDDEDEEWPTLEKAATMTAAGHHAEVVVDPEDERAIEMFMNKNPPARYYLSTAVENCPRHLRSSLHSPTGSKSSTSQSRRPGLQLPCTRPPGFLPLT

SEQ ID NO: 10182 - protein, 394 aa, Homo sapiens
  Payload ID: 2031;
  Gene Symbol: C15orf38-AP3S2;
  Gene Name: C15orf38-AP3S2 readthrough;
  ENSP ID: ENSP00000381377
MSRIYHDGALRNKAVQSVRLPGAWDPAAHQGGNGVLLEGELIDVSRHSILDTHGRKERYYVLYIRPSHIHRRKFDAKGNEIEPNFSATRKVNTGFLMSSYKVEAKGDTDRLTPEALKGLVNKPELLALTESLTPDHTVAFWMPESEMEVMELELGAGVRLKTRGDGPFLDSLAKLEAGTVTKCNFTGDGKTGASWTDNIMAQKCSKGAAAEIREQGDGAEDEEWPEEIQQQIVRETFHLVLKRDDNICNFLEGGSLIGGSDYKLIYRHYATLYFVFCVDSSESELGILDLIQVFVETLDKCFENVCELDLIFHMDKVHYILQEVVMGGMVLETNMNEIVAQIEAQNRLEKSEGGLSAAPARAVSAVKNINLPEIPRNINIGDLNIKVPNLSQFV

SEQ ID NO: 10183 - protein, 185 aa, Homo sapiens
  Payload ID: 2031;
  Gene Symbol: C15orf38-AP3S2;
  Gene Name: C15orf38-AP3S2 readthrough;
  ENSP ID: ENSP00000453100
MSSYKVEAKGDTDRLTPEALKGLVNKPELLALTESLTPDHTVAFWMPESEMEVMELELGAGVRLKTRGDGPFLDSLAKLEAGTVTKCNFTGDGKTGASWTDNIMAQKCSKGAAAEIREQGDGAEDEEWVFVETLDKCFENVCELDLIFHMDKVHYILQEVVMGGMVLETNMNEIVAQIEAQNRLE

SEQ ID NO: 10184 - protein, 184 aa, Homo sapiens
  Payload ID: 2031;
  Gene Symbol: C15orf38-AP3S2;
  Gene Name: C15orf38-AP3S2 readthrough;
  ENSP ID: ENSP00000453637
MSSYNSLAKLEAGTVTKCNFTGDGKTGASWTDNIMAQKCSKGAAAEIREQGDGAEDEEWPEEIQQQIVRETFHLVLKRDDNICNFLEGGSLIGGSDYKLIYRHYATLYFVFCVDSSESELGILDLIQVFVETLDKCFENVCELDLIFHMDKVHYILQEVVMGGMVLETNMNEIVAQIEAQNRLE

SEQ ID NO: 10185 - protein, 141 aa, Homo sapiens
  Payload ID: 2032;
  Gene Symbol: C1D;
  Gene Name: C1D nuclear receptor corepressor;
  Uniprot ID:  Q13901;
  ENSP ID: ENSP00000348107
MAGEEINEDYPVEIHEYLSAFENSIGAVDEMLKTMMSVSRNELLQKLDPLEQAKVDLVSAYTLNSMFWVYLATQGVNPKEHPVKQELERIRVYMNRVKEITDKKKAGKLDRGAASRFVKNALWEPKSKNASKVANKGKSKS

SEQ ID NO: 10186 - protein, 180 aa, Homo sapiens
  Payload ID: 2032;
  Gene Symbol: C1D;
  Gene Name: C1D nuclear receptor corepressor;
  ENSP ID: ENSP00000384304
MPSPSVSTSAASVLEGVCGRARSTYRTPEEGEEQSWSAIMAGEEINEDYPVEIHEYLSAFENSIGAVDEMLKTMMSVSRNELLQKLDPLEQAKVDLVSAYTLNSMFWVYLATQGVNPKEHPVKQELERIRVYMNRVKEITDKKKAGKLDRGAASRFVKNALWEPKSKNASKVANKGKSKS

SEQ ID NO: 10187 - protein, 141 aa, Homo sapiens; identical to SEQ ID NO: 10185
  Payload ID: 2032;
  Gene Symbol: C1D;
  Gene Name: C1D nuclear receptor corepressor;
  Uniprot ID:  Q13901;
  ENSP ID: ENSP00000386468

SEQ ID NO: 10188 - protein, 141 aa, Homo sapiens; identical to SEQ ID NO: 10185
  Payload ID: 2032;
  Gene Symbol: C1D;
  Gene Name: C1D nuclear receptor corepressor;
  Uniprot ID:  Q13901;
  ENSP ID: ENSP00000386779

SEQ ID NO: 10189 - protein, 318 aa, Homo sapiens
  Payload ID: 2033;
  Gene Symbol: C1GALT1C1;
  Gene Name: C1GALT1-specific chaperone 1;
  Uniprot ID:  Q96EU7;
  ENSP ID: ENSP00000304364
MLSESSSFLKGVMLGSIFCALITMLGHIRIGHGNRMHHHEHHHLQAPNKEDILKISEDERMELSKSFRVYCIILVKPKDVSLWAAVKETWTKHCDKAEFFSSENVKVFESINMDTNDMWLMMRKAYKYAFDKYRDQYNWFFLARPTTFAIIENLKYFLLKKDPSQPFYLGHTIKSGDLEYVGMEGGIVLSVESMKRLNSLLNIPEKCPEQGGMIWKISEDKQLAVCLKYAGVFAENAEDADGKDVFNTKSVGLSIKEAMTYHPNQVVEGCCSDMAVTFNGLTPNQMHVMMYGVYRLRAFGHIFNDALVFLPPNGSDND

SEQ ID NO: 10190 - protein, 318 aa, Homo sapiens; identical to SEQ ID NO: 10189
  Payload ID: 2033;
  Gene Symbol: C1GALT1C1;
  Gene Name: C1GALT1-specific chaperone 1;
  Uniprot ID:  Q96EU7;
  ENSP ID: ENSP00000360363

SEQ ID NO: 10191 - protein, 315 aa, Homo sapiens
  Payload ID: 2034;
  Gene Symbol: C1GALT1C1L;
  Gene Name: C1GALT1-specific chaperone 1 like;
  Uniprot ID:  P0DN25;
  ENSP ID: ENSP00000489061
MVSASGTSFFKGMLLGSISWVLITMFGQIHIRHRGQTQDHEHHHLRPPNRNDFLNTSKVILLELSKSIRVFCIIFGESEDESYWAVLKETWTKHCDKAELYDTKNDNLFNIESNDRWVQMRTAYKYVFEKYGDNYNWFFLALPTTFAVIENLKYLLFTRDASQPFYLGHTVIFGDLEYVTVEGGIVLSRELMKRLNRLLDNSETCADQSVIWKLSEDKQLAICLKYAGVHAENAEDYEGRDVFNTKPIAQLIEEALSNNPQQVVEGCCSDMAITFNGLTPQKMEVMMYGLYRLRAFGHYFNDTLVFLPPVGSEND

SEQ ID NO: 10192 - protein, 199 aa, Homo sapiens
  Payload ID: 2035;
  Gene Symbol: C1QTNF1;
  Gene Name: C1q and tumor necrosis  factor related prt 1;
  ENSP ID: ENSP00000311265
MYPATAVPQINITILKGEKGDRGDRGLQGKYGKTGSAGARGHTGPKGQKGSMGAPGERCKSHYAAFSVGRKKPMHSNHYYQTVIFDTEFVNLYDHFNMFTGKFYCYVPGLYFFSLNVHTWNQKETYLHIMKNEEEVVILFAQVGDRSIMQSQSLMLELREQDQVWVRLYKGERENAIFSEELDTYITFSGYLVKHATEP

SEQ ID NO: 10193 - protein, 281 aa, Homo sapiens
  Payload ID: 2035;
  Gene Symbol: C1QTNF1;
  Gene Name: C1q and tumor necrosis  factor related prt 1;
  Uniprot ID:  Q9BXJ1;
  ENSP ID: ENSP00000340864
MGSRGQGLLLAYCLLLAFASGLVLSRVPHVQGEQQEWEGTEELPSPPDHAERAEEQHEKYRPSQDQGLPASRCLRCCDPGTSMYPATAVPQINITILKGEKGDRGDRGLQGKYGKTGSAGARGHTGPKGQKGSMGAPGERCKSHYAAFSVGRKKPMHSNHYYQTVIFDTEFVNLYDHFNMFTGKFYCYVPGLYFFSLNVHTWNQKETYLHIMKNEEEVVILFAQVGDRSIMQSQSLMLELREQDQVWVRLYKGERENAIFSEELDTYITFSGYLVKHATEP

SEQ ID NO: 10194 - protein, 281 aa, Homo sapiens; identical to SEQ ID NO: 10193
  Payload ID: 2035;
  Gene Symbol: C1QTNF1;
  Gene Name: C1q and tumor necrosis  factor related prt 1;
  Uniprot ID:  Q9BXJ1;
  ENSP ID: ENSP00000343230

SEQ ID NO: 10195 - protein, 281 aa, Homo sapiens; identical to SEQ ID NO: 10193
  Payload ID: 2035;
  Gene Symbol: C1QTNF1;
  Gene Name: C1q and tumor necrosis  factor related prt 1;
  Uniprot ID:  Q9BXJ1;
  ENSP ID: ENSP00000376240

SEQ ID NO: 10196 - protein, 281 aa, Homo sapiens; identical to SEQ ID NO: 10193
  Payload ID: 2035;
  Gene Symbol: C1QTNF1;
  Gene Name: C1q and tumor necrosis  factor related prt 1;
  Uniprot ID:  Q9BXJ1;
  ENSP ID: ENSP00000462481

SEQ ID NO: 10197 - protein, 281 aa, Homo sapiens; identical to SEQ ID NO: 10193
  Payload ID: 2035;
  Gene Symbol: C1QTNF1;
  Gene Name: C1q and tumor necrosis  factor related prt 1;
  Uniprot ID:  Q9BXJ1;
  ENSP ID: ENSP00000462990

SEQ ID NO: 10198 - protein, 281 aa, Homo sapiens; identical to SEQ ID NO: 10193
  Payload ID: 2035;
  Gene Symbol: C1QTNF1;
  Gene Name: C1q and tumor necrosis  factor related prt 1;
  Uniprot ID:  Q9BXJ1;
  ENSP ID: ENSP00000463008

SEQ ID NO: 10199 - protein, 281 aa, Homo sapiens; identical to SEQ ID NO: 10193
  Payload ID: 2035;
  Gene Symbol: C1QTNF1;
  Gene Name: C1q and tumor necrosis  factor related prt 1;
  Uniprot ID:  Q9BXJ1;
  ENSP ID: ENSP00000463108

SEQ ID NO: 10200 - protein, 199 aa, Homo sapiens; identical to SEQ ID NO: 10192
  Payload ID: 2035;
  Gene Symbol: C1QTNF1;
  Gene Name: C1q and tumor necrosis  factor related prt 1;
  ENSP ID: ENSP00000463337

SEQ ID NO: 10201 - protein, 281 aa, Homo sapiens; identical to SEQ ID NO: 10193
  Payload ID: 2035;
  Gene Symbol: C1QTNF1;
  Gene Name: C1q and tumor necrosis  factor related prt 1;
  Uniprot ID:  Q9BXJ1;
  ENSP ID: ENSP00000463922

SEQ ID NO: 10202 - protein, 330 aa, Homo sapiens
  Payload ID: 2036;
  Gene Symbol: C1QTNF2;
  Gene Name: C1q and tumor necrosis  factor related prt 2;
  Uniprot ID:  Q9BXJ5;
  ENSP ID: ENSP00000377545
MGKLCLGPTLCPAAAAEESRDAEPRRELLCSGRPWTWRAAARVTTMIPWVLLACALPCAADPLLGAFARRDFRKGSPQLVCSLPGPQGPPGPPGAPGPSGMMGRMGFPGKDGQDGHDGDRGDSGEEGPPGRTGNRGKPGPKGKAGAIGRAGPRGPKGVNGTPGKHGTPGKKGPKGKKGEPGLPGPCSCGSGHTKSAFSVAVTKSYPRERLPIKFDKILMNEGGHYNASSGKFVCGVPGIYYFTYDITLANKHLAIGLVHNGQYRIRTFDANTGNHDVASGSTILALKQGDEVWLQIFYSEQNGLFYDPYWTDSLFTGFLIYADQDDPNEV

SEQ ID NO: 10203 - protein, 246 aa, Homo sapiens
  Payload ID: 2037;
  Gene Symbol: C1QTNF3;
  Gene Name: C1q and tumor necrosis  factor related prt 3;
  Uniprot ID:  Q9BXJ4;
  ENSP ID: ENSP00000231338
MLWRQLIYWQLLALFFLPFCLCQDEYMESPQTGGLPPDCSKCCHGDYSFRGYQGPPGPPGPPGIPGNHGNNGNNGATGHEGAKGEKGDKGDLGPRGERGQHGPKGEKGYPGIPPELQIAFMASLATHFSNQNSGIIFSSVETNIGNFFDVMTGRFGAPVSGVYFFTFSMMKHEDVEEVYVYLMHNGNTVFSMYSYEMKGKSDTSSNHAVLKLAKGDEVWLRMGNGALHGDHQRFSTFAGFLLFETK

SEQ ID NO: 10204 - protein, 319 aa, Homo sapiens
  Payload ID: 2037;
  Gene Symbol: C1QTNF3;
  Gene Name: C1q and tumor necrosis  factor related prt 3;
  Uniprot ID:  Q9BXJ4;
  ENSP ID: ENSP00000371497
MLWRQLIYWQLLALFFLPFCLCQDEYMEVSGRTNKVVARIVQSHQQTGRSGSRREKVRERSHPKTGTVDNNTSTDLKSLRPDELPHPEVDDLAQITTFWGQSPQTGGLPPDCSKCCHGDYSFRGYQGPPGPPGPPGIPGNHGNNGNNGATGHEGAKGEKGDKGDLGPRGERGQHGPKGEKGYPGIPPELQIAFMASLATHFSNQNSGIIFSSVETNIGNFFDVMTGRFGAPVSGVYFFTFSMMKHEDVEEVYVYLMHNGNTVFSMYSYEMKGKSDTSSNHAVLKLAKGDEVWLRMGNGALHGDHQRFSTFAGFLLFETK

SEQ ID NO: 10205 - protein, 329 aa, Homo sapiens
  Payload ID: 2038;
  Gene Symbol: C1QTNF4;
  Gene Name: C1q and tumor necrosis  factor related prt 4;
  Uniprot ID:  Q9BXJ3;
  ENSP ID: ENSP00000302274
MLPLLLGLLGPAACWALGPTPGPGSSELRSAFSAARTTPLEGTSEMAVTFDKVYVNIGGDFDVATGQFRCRVPGAYFFSFTAGKAPHKSLSVMLVRNRDEVQALAFDEQRRPGARRAASQSAMLQLDYGDTVWLRLHGAPQYALGAPGATFSGYLVYADADADAPARGPPAPPEPRSAFSAARTRSLVGSDAGPGPRHQPLAFDTEFVNIGGDFDAAAGVFRCRLPGAYFFSFTLGKLPRKTLSVKLMKNRDEVQAMIYDDGASRRREMQSQSVMLALRRGDAVWLLSHDHDGYGAYSNHGKYITFSGFLVYPDLAPAAPPGLGASELL

SEQ ID NO: 10206 - protein, 100 aa, Homo sapiens
  Payload ID: 2038;
  Gene Symbol: C1QTNF4;
  Gene Name: C1q and tumor necrosis  factor related prt 4;
  ENSP ID: ENSP00000434548
MLPLLLGLLGPAACWALGPTPGPGSSELRSAFSAARTTPLEGTSEMAVTFDKVYVNIGGDFDVATGQFRCRVPGAYFFSFTAGKAPHKSLSVMLVRNRDE

SEQ ID NO: 10207 - protein, 243 aa, Homo sapiens
  Payload ID: 2039;
  Gene Symbol: C1QTNF5;
  Gene Name: C1q and tumor necrosis  factor related prt 5;
  Uniprot ID:  Q9BXJ0;
  ENSP ID: ENSP00000431140
MRPLLVLLLLGLAAGSPPLDDNKIPSLCPGHPGLPGTPGHHGSQGLPGRDGRDGRDGAPGAPGEKGEGGRPGLPGPRGDPGPRGEAGPAGPTGPAGECSVPPRSAFSAKRSESRVPPPSDAPLPFDRVLVNEQGHYDAVTGKFTCQVPGVYYFAVHATVYRASLQFDLVKNGESIASFFQFFGGWPKPASLSGGAMVRLEPEDQVWVQVGVGDYIGIYASIKTDSTFSGFLVYSDWHSSPVFA

SEQ ID NO: 10208 - protein, 243 aa, Homo sapiens; identical to SEQ ID NO: 10207
  Payload ID: 2039;
  Gene Symbol: C1QTNF5;
  Gene Name: C1q and tumor necrosis  factor related prt 5;
  Uniprot ID:  Q9BY79;
  ENSP ID: ENSP00000456533

SEQ ID NO: 10209 - protein, 60 aa, Homo sapiens
  Payload ID: 2039;
  Gene Symbol: C1QTNF5;
  Gene Name: C1q and tumor necrosis  factor related prt 5;
  ENSP ID: ENSP00000489201
MRPLLVLLLLGLAAGSPPLDDNKIPSLCPGHPGLPGLPGPRGDPGPRGEAGPAGPTGPAG

SEQ ID NO: 10210 - protein, 278 aa, Homo sapiens
  Payload ID: 2040;
  Gene Symbol: C1QTNF6;
  Gene Name: C1q and tumor necrosis  factor related prt 6;
  Uniprot ID:  Q9BXI9;
  ENSP ID: ENSP00000338812
MQWLRVRESPGEATGHRVTMGTAALGPVWAALLLFLLMCEIPMVELTFDRAVASGCQRCCDSEDPLDPAHVSSASSSGRPHALPEIRPYINITILKGDKGDPGPMGLPGYMGREGPQGEPGPQGSKGDKGEMGSPGAPCQKRFFAFSVGRKTALHSGEDFQTLLFERVFVNLDGCFDMATGQFAAPLRGIYFFSLNVHSWNYKETYVHIMHNQKEAVILYAQPSERSIMQSQSVMLDLAYGDRVWVRLFKRQRENAIYSNDFDTYITFSGHLIKAEDD

SEQ ID NO: 10211 - protein, 278 aa, Homo sapiens; identical to SEQ ID NO: 10210
  Payload ID: 2040;
  Gene Symbol: C1QTNF6;
  Gene Name: C1q and tumor necrosis  factor related prt 6;
  Uniprot ID:  Q9BXI9;
  ENSP ID: ENSP00000380299

SEQ ID NO: 10212 - protein, 116 aa, Homo sapiens
  Payload ID: 2040;
  Gene Symbol: C1QTNF6;
  Gene Name: C1q and tumor necrosis  factor related prt 6;
  ENSP ID: ENSP00000399243
MQWLRVRESPGEATGHRVTMGTAALGPVWAALLLFLLMCEIPMVELTFDRAVASGCQRCCDSEDPLDPAHVSSASSSGRPHALPEIRPYINITILKGRGRTRFPSRLWWLTAVTRP

SEQ ID NO: 10213 - protein, 296 aa, Homo sapiens
  Payload ID: 2041;
  Gene Symbol: C1QTNF7;
  Gene Name: C1q and tumor necrosis  factor related prt 7;
  Uniprot ID:  Q9BXJ2;
  ENSP ID: ENSP00000295297
MSRQEPKMFVLLYVTSFAICASGQPRGNQLKGENYSPRYICSIPGLPGPPGPPGANGSPGPHGRIGLPGRDGRDGRKGEKGEKGTAGLRGKTGPLGLAGEKGDQGETGKKGPIGPEGEKGEVGPIGPPGPKGDRGEQGDPGLPGVCRCGSIVLKSAFSVGITTSYPEERLPIIFNKVLFNEGEHYNPATGKFICAFPGIYYFSYDITLANKHLAIGLVHNGQYRIKTFDANTGNHDVASGSTVIYLQPEDEVWLEIFFTDQNGLFSDPGWADSLFSGFLLYVDTDYLDSISEDDEL

SEQ ID NO: 10214 - protein, 112 aa, Homo sapiens
  Payload ID: 2041;
  Gene Symbol: C1QTNF7;
  Gene Name: C1q and tumor necrosis  factor related prt 7;
  ENSP ID: ENSP00000371820
MFVLLYVTSFAICASGQPRGNQLKGENYSPRYICSIPGLPGPPGPPGANGSPGPHGRIGLPGRDGRDGRKGEKGEKGTAGLRGKTGPLGLAGEKGDQGETGKKGPIGPEGEK

SEQ ID NO: 10215 - protein, 151 aa, Homo sapiens
  Payload ID: 2041;
  Gene Symbol: C1QTNF7;
  Gene Name: C1q and tumor necrosis  factor related prt 7;
  ENSP ID: ENSP00000380812
MSRQEPKMFVLLYVTSFAICASGQPRGNQLKGENYSPRYICSIPGLPGPPGPPGANGSPGPHGRIGLPGRDGRDGRKGEKGEKGTAGLRGKTGPLGLAGEKGDQGETGKKGPIGPEGEKGEVGPIGPPGPKGDRGEQGDPGLPGVCRCGSI

SEQ ID NO: 10216 - protein, 289 aa, Homo sapiens
  Payload ID: 2041;
  Gene Symbol: C1QTNF7;
  Gene Name: C1q and tumor necrosis  factor related prt 7;
  Uniprot ID:  Q9BXJ2;
  ENSP ID: ENSP00000388914
MFVLLYVTSFAICASGQPRGNQLKGENYSPRYICSIPGLPGPPGPPGANGSPGPHGRIGLPGRDGRDGRKGEKGEKGTAGLRGKTGPLGLAGEKGDQGETGKKGPIGPEGEKGEVGPIGPPGPKGDRGEQGDPGLPGVCRCGSIVLKSAFSVGITTSYPEERLPIIFNKVLFNEGEHYNPATGKFICAFPGIYYFSYDITLANKHLAIGLVHNGQYRIKTFDANTGNHDVASGSTVIYLQPEDEVWLEIFFTDQNGLFSDPGWADSLFSGFLLYVDTDYLDSISEDDEL

SEQ ID NO: 10217 - protein, 289 aa, Homo sapiens; identical to SEQ ID NO: 10216
  Payload ID: 2041;
  Gene Symbol: C1QTNF7;
  Gene Name: C1q and tumor necrosis  factor related prt 7;
  Uniprot ID:  Q9BXJ2;
  ENSP ID: ENSP00000410722

SEQ ID NO: 10218 - protein, 252 aa, Homo sapiens
  Payload ID: 2042;
  Gene Symbol: C1QTNF8;
  Gene Name: C1q and tumor necrosis  factor related prt 8;
  Uniprot ID:  P60827;
  ENSP ID: ENSP00000330426
MAAPALLLLALLLPVGAWPGLPRRPCVHCCRPAWPPGPYARVSDRDLWRGDLWRGLPRVRPTIDIEILKGEKGEAGVRGRAGRSGKEGPPGARGLQGRRGQKGQVGPPGAACRRAYAAFSVGRREGLHSSDHFQAVPFDTELVNLDGAFDLAAGRFLCTVPGVYFLSLNVHTWNYKETYLHIMLNRRPAAVLYAQPSERSVMQAQSLMLLLAAGDAVWVRMFQRDRDNAIYGEHGDLYITFSGHLVKPAAEL

SEQ ID NO: 10219 - protein, 256 aa, Homo sapiens [sequence omitted]

SEQ ID NO: 10220 - protein, 333 aa, Homo sapiens
  Payload ID: 2043;
  Gene Symbol: C1QTNF9;
  Gene Name: C1q and tumor necrosis  factor related prt 9;
  Uniprot ID:  P0C862;
  ENSP ID: ENSP00000333737
MRIWWLLLAIEICTGNINSQDTCRQGHPGIPGNPGHNGLPGRDGRDGAKGDKGDAGEPGRPGSPGKDGTSGEKGERGADGKVEAKGIKGDQGSRGSPGKHGPKGLAGPMGEKGLRGETGPQGQKGNKGDVGPTGPEGPRGNIGPLGPTGLPGPMGPIGKPGPKGEAGPTGPQGEPGVRGIRGWKGDRGEKGKIGETLVLPKSAFTVGLTVLSKFPSSDMPIKFDKILYNEFNHYDTAAGKFTCHIAGVYYFTYHITVFSRNVQVSLVKNGVKILHTKDAYMSSEDQASGGIVLQLKLGDEVWLQVTGGERFNGLFADEDDDTTFTGFLLFSSP

SEQ ID NO: 10221 - protein, 333 aa, Homo sapiens; identical to SEQ ID NO: 10220
  Payload ID: 2043;
  Gene Symbol: C1QTNF9;
  Gene Name: C1q and tumor necrosis  factor related prt 9;
  Uniprot ID:  P0C862;
  ENSP ID: ENSP00000371503

SEQ ID NO: 10222 - protein, 333 aa, Homo sapiens
  Payload ID: 2044;
  Gene Symbol: C1QTNF9B;
  Gene Name: C1q and tumor necrosis  factor related prt 9B;
  Uniprot ID:  B2RNN3;
  ENSP ID: ENSP00000371572
MRIWWLLLAIEICTGNINSQDTCRQGHPGIPGNPGHNGLPGRDGRDGAKGDKGDAGEPGCPGSPGKDGTSGEKGERGADGKVEAKGIKGDQGSRGSPGKHGPKGLAGPMGEKGLRGETGPQGQKGNKGDVGPTGPEGPRGNIGPLGPTGLPGPMGPIGKPGPKGEAGPTGPQGEPGVRGIRGWKGDRGEKGKIGETLVLPKSAFTVGLTVLSKFPSSDVPIKFDKILYNEFNHYDTAVGKFTCHIAGVYYFTYHITVFSRNVQVSLVKNGVKILHTRDAYVSSEDQASGSIVLQLKLGDEMWLQVTGGERFNGLFADEDDDTTFTGFLLFSSQ

SEQ ID NO: 10223 - protein, 333 aa, Homo sapiens; identical to SEQ ID NO: 10222
  Payload ID: 2044;
  Gene Symbol: C1QTNF9B;
  Gene Name: C1q and tumor necrosis  factor related prt 9B;
  Uniprot ID:  B2RNN3;
  ENSP ID: ENSP00000371575

SEQ ID NO: 10224 - protein, 99 aa, Homo sapiens
  Payload ID: 2044;
  Gene Symbol: C1QTNF9B;
  Gene Name: C1q and tumor necrosis  factor related prt 9B;
  ENSP ID: ENSP00000371580
MRIWWLLLAIEICTGNINSQDTCRQGHPGIPGNPGHNGLPGRDGRDGAKGDKGDAGEPGCPGSPGKDGTSGEKGERGADGKVEAKGIKGMFRCLWSKTE

SEQ ID NO: 10225 - protein, 284 aa, Homo sapiens
  Payload ID: 2045;
  Gene Symbol: C1QTNF3-AMACR;
  Gene Name: C1QTNF3-AMACR readthrough (NMD candidate);
  ENSP ID: ENSP00000371511
MTKSSLRPLQKQSPQTGGLPPDCSKCCHGDYSFRGYQGPPGPPGPPGIPGNHGNNGNNGATGHEGAKGEKGDKGDLGPRGERGQHGPKGEKGYPGIPPELQIAFMASLATHFSNQNSGIIFSSVETNIGNFFDVMTGRFGAPVSGVYFFTFSMMKHEDVEEVYVYLMHNGNTVFSMYSYEMKGKSDTSSNHAVLKLAKGDEVWLRMGNGALHGDHQRFSTFAGFLLFETKCHGETPAGPRDSAAGKSKAYLCQAEWIWPVRKLLPVSWPRYQLFGFVRWKEQHI

SEQ ID NO: 10226 - protein, 100 aa, Homo sapiens
  Payload ID: 2046;
  Gene Symbol:;
  Gene Name: C1QTNF9B antisense RNA 1 [Source:EntrezGene;Acc:542767];
  ENSP ID: ENSP00000487130
MGISEEGNLLSTVSPTVKALFGKTRVSPIFPFSPRSPFQPLIPRTPGSPWGPVGPASPLGPGFPIGPMGPGKPVGPKGPMLPLGPSGPVGPTSPLFPFCP

SEQ ID NO: 10227 - protein, 541 aa, Homo sapiens
  Payload ID: 2047;
  Gene Symbol: C2CD2;
  Gene Name: C2 calcium-dependent domain containing 2;
  Uniprot ID:  Q9Y426;
  ENSP ID: ENSP00000329302
MRLSPFHLQLEFHMKEKREDLQISWSFISVPEMAVNIQPKALGEDQVAETSAMSDVLKDILKHLAGSASPSVVLITKPTTVKEAQNLQCAASTAQESCPPKPPRAHELKLLVRNIHVLLLSEPGASGHINAVCVVQLNDPVQRFSSTLTKNTPDLMWEEEFTFELNAKSKELHLQISEAGRSSEGLLATATVPLDLFKKQPSGPQSFTLTSGSACGSSVLGSVTAEFSYMEPGELKSWPIPPPVPAAKIEKDRTVMPCGTVVTTVTAVKTKPRVDVGRASPLSSDSPVKTPIKVKVIEKDISVQAIACRSAPVSKTLSSSDTELLVLNGSDPVAEVAIRQLSESSKLKLKSPRKKSTIIISGISKTSLSQDHDAALMQGYTASVDSTHQEDAPSHPERAAASAPPEEAESAQASLAPKPQEDELDSWDLEKEPQAAAWSSQVLLDPDGDELSESSMSVLEPGTAKKHKGGILRKGAKLFFRRRHQQKDPGMSQSHNDLVFLEQPEGSRRKGITLTRILNKKLLSRHRNKNTMNGAPVEPCT

SEQ ID NO: 10228 - protein, 696 aa, Homo sapiens
  Payload ID: 2047;
  Gene Symbol: C2CD2;
  Gene Name: C2 calcium-dependent domain containing 2;
  Uniprot ID:  Q9Y426;
  ENSP ID: ENSP00000369853
MAMARLGSWLGEAQWLALVSLFVAALATVGLYLAQWALARARPQPQRRAVEPGEGPRPGSDALLSWILTLGSWRSQWQAAWVTALNEEAERKGGPPFLSFEEDPRQQALELVVQEVSSVLRSAEEKVVVCHVVGQAIQFLVSETPALGAGCRLYDMRLSPFHLQLEFHMKEKREDLQISWSFISVPEMAVNIQPKALGEDQVAETSAMSDVLKDILKHLAGSASPSVVLITKPTTVKEAQNLQCAASTAQESCPPKPPRAHELKLLVRNIHVLLLSEPGASGHINAVCVVQLNDPVQRFSSTLTKNTPDLMWEEEFTFELNAKSKELHLQISEAGRSSEGLLATATVPLDLFKKQPSGPQSFTLTSGSACGSSVLGSVTAEFSYMEPGELKSWPIPPPVPAAKIEKDRTVMPCGTVVTTVTAVKTKPRVDVGRASPLSSDSPVKTPIKVKVIEKDISVQAIACRSAPVSKTLSSSDTELLVLNGSDPVAEVAIRQLSESSKLKLKSPRKKSTIIISGISKTSLSQDHDAALMQGYTASVDSTHQEDAPSHPERAAASAPPEEAESAQASLAPKPQEDELDSWDLEKEPQAAAWSSQVLLDPDGDELSESSMSVLEPGTAKKHKGGILRKGAKLFFRRRHQQKDPGMSQSHNDLVFLEQPEGSRRKGITLTRILNKKLLSRHRNKNTMNGAPVEPCT

SEQ ID NO: 10229 - protein, 182 aa, Homo sapiens
  Payload ID: 2047;
  Gene Symbol: C2CD2;
  Gene Name: C2 calcium-dependent domain containing 2;
  ENSP ID: ENSP00000388704
  MOD_RES (1)..(1): Any amino acid
XSTIIISGISKDHDAALMQGYTASVDSTHQEDAPSHPERAAASAPPEEAESAQASLAPKPQEDELDSWDLEKEPQAAAWSSQVLLDPDGDELSESSMSVLEPGTAKKHKGGILRKGAKLFFRRRHQQKDPGMSQSHNDLVFLEQPEGSRRKGITLTRILNKKLLSRHRNKNTMNGAPVEPCT

SEQ ID NO: 10230 - protein, 1963 aa, Homo sapiens
  Payload ID: 2048;
  Gene Symbol: C2CD3;
  Gene Name: C2 calcium-dependent domain containing 3;
  Uniprot ID:  Q4AC94;
  ENSP ID: ENSP00000323339
MKQRKGQGSGGSRGRKKRGLSDISPSTSLPPLVEGQLRCFLKLTVNRVIWKIAKPPTCVLVRVRWWGETSDGTLFCPRDALQTEPKAVRTTTRYAIRCGPKQFTSYLTDMAVLVLEVITKLDGLPIGRVQINGLAQLSPTHQINGFFTIVSSTSKKLGELQVSLALEPLSETYDSYHPLPTTDMTENVLLSKQGFRENTEPSSTQFQVPSRPRDIHTIKIDGKELAANSSRSTTPRGKDHVCFAENPDTIKDSSFGLQHSLNSGQSLESVTLKGRAPRKQMSLLNSSEFQPQIRTVAKSHSDSCILSSNNLPTKDLLSALLEQGNKLRNAMVISAMKSSPETSMLLDQVHPPINEDSLRASTQIRAFSRNRFKDHIEDHLLPSTENTFWRHDTKADTRAIQLLLGSAELSQGNFWDGLGSPPDSPSPGSDVYCISELNDPQYDQSLLENLFYTAPKSDTSISDFLSEEDDIVPSKKISQSTALARSSKVLESSDHKLKKRSAGKRNRNLVEQQMLSETPEDAQTMTLSVDRLALLGRTHSVRIIIETMGVPPDSPQMTPGKKSYAGPPPKVTTAKKRTFFVEYHFPVGFSESGLGKTALITEVVRLASSKITDGKVKFQQRFVFPVQFGGPMIEHWWNSNLTFQIYVKKTPQKKPEVIGSVSLSLRAVIQSELLSFSDQLPVQQENGQSPFGPLKVTMELITDNKDFTGINTKLSGNTHYTPLCAPTSPNKALPELNQDMTCTKNPQNLNQIHEETAKKAQNLVLPNRKSPSPVAPHPSTFVATPASHNLVNQTNGTTKESALLLHVLLMVPDGKDFISGESEKQSPCNVYLNCKLFSTEEVTRSVIAWGTTQPVFNFSQVIPVSLSSKYLERLKNNVMVIETWNKVRSPGQDKLLGLVKLPLHQFYMSFKDAKISRLLLDAQYPVVAVDSYMPVIDVFSGHQNGSLRVFLAMGSSNQIMALQRLKNEEGTLPPFSPRPAHFLDQPTAASVAMAEDRGNGLMEHCFEIHIEMVKGLAPLQATVWGEADCYVQYYFPVQHSQSSVLKGPEFLENGITLKPFRTATTLCVPDPIFNSEHHHSLLLPAEVPVQRLLLSAFSAQGLVPGGGVQFEIWCRYYYPNVRDQKVAKGTLPLSRICAMVTTQHREDVGIQTFNLPLTPRIENRKELRNQSSGLLDVGLRYRRSPRTAEGVLAARTVSISVQIIRACGLQAAAKALAEREPALQFSATVGVNASVTTHLSFLPQGEQRRTHPVACSFCPEFSHHVEFTCNLVTQHCSGEACFLAELLEFAEVIFAVYHENTKSASDIISIESCKEYLLGVVKVPTKELLIKRSGITGWYPIILPEDGGLPHGLELMQKIVGGLELSISFTHRGDRERVLEAAEHLGWSFENSLKDFVRMDEGEPATVTISTPRLWLPIHCVLLAGHNHIHKNTYCYLRYKFYDHEAFWTPLKKPKESVNKKQIMVTFKASKRAEVTRGPSLLWYFREERLEIQVWRAYGNDSVERPHQTDSWIGSAYVDLARLGERSARTLTVSGVYPLFGRNASNLSGAALRVHVVLSSLSSHLEPTHELDSMDCSSHSESEQLPRRNDEVQLSPPEVISCHQKSPASTQVPCSSTTAEVRLTQEGPADLDGTFAVSILVERAMHLSLKGSPLTERKVSIPSCCVSFATADESSPVYTQVVENTDSPIWNFQQQSRLSKELLLDPQQTLVFKVWHKGDEERVIGFASVDLSPLLSGFQFVCGWYNITDFSGECQGQIKVAVSPLESLIHFKEERQARRGVETSKSLIPIYSPFSFPASDTYAAFSSHMARQTLDQLAHASSKELDFSSPGRSDTTRSQASRHEEHVQNIRRFHESLHLQGEAPLPCDDKLTTSPLSSQTSILTSLRKNLSELDQIQRYFRQKLTKPFLPLSPQTQTAISQHQESCRDHLGPGASSLDPGSQCILEKSSNLVLQVSSLITGSY

SEQ ID NO: 10231 - protein, 2353 aa, Homo sapiens
  Payload ID: 2048;
  Gene Symbol: C2CD3;
  Gene Name: C2 calcium-dependent domain containing 3;
  Uniprot ID:  Q4AC94;
  ENSP ID: ENSP00000334379
MKQRKGQGSGGSRGRKKRGLSDISPSTSLPPLVEGQLRCFLKLTVNRVIWKIAKPPTCVLVRVRWWGETSDGTLFCPRDALQTEPKAVRTTTRYAIRCGPKQFTSYLTDMAVLVLEVITKLDGLPIGRVQINGLAQLSPTHQINGFFTIVSSTSKKLGELQVSLALEPLSETYDSYHPLPTTDMTENVLLSKQGFRENTEPSSTQFQVPSRPRDIHTIKIDGKELAANSSRSTTPRGKDHVCFAENPDTIKDSSFGLQHSLNSGQSLESVTLKGRAPRKQMSLLNSSEFQPQIRTVAKSHSDSCILSSNNLPTKDLLSALLEQGNKLRNAMVISAMKSSPETSMLLDQVHPPINEDSLRASTQIRAFSRNRFKDHIEDHLLPSTENTFWRHDTKADTRAIQLLLGSAELSQGNFWDGLGSPPDSPSPGSDVYCISELNDPQYDQSLLENLFYTAPKSDTSISDFLSEEDDIVPSKKISQSTALARSSKVLESSDHKLKKRSAGKRNRNLVEQQMLSETPEDAQTMTLSVDRLALLGRTHSVRIIIETMGVPPDSPQMTPGKKSYAGPPPKVTTAKKRTFFVEYHFPVGFSESGLGKTALITEVVRLASSKITDGKVKFQQRFVFPVQFGGPMIEHWWNSNLTFQIYVKKTPQKKPEVIGSVSLSLRAVIQSELLSFSDQLPVQQENGQSPFGPLKVTMELITDNKDFTGINTKLSGNTHYTPLCAPTSPNKALPELNQDMTCTKNPQNLNQIHEETAKKAQNLVLPNRKSPSPVAPHPSTFVATPASHNLVNQTNGTTKESALLLHVLLMVPDGKDFISGESEKQSPCNVYLNCKLFSTEEVTRSVIAWGTTQPVFNFSQVIPVSLSSKYLERLKNNVMVIETWNKVRSPGQDKLLGLVKLPLHQFYMSFKDAKISRLLLDAQYPVVAVDSYMPVIDVFSGHQNGSLRVFLAMGSSNQIMALQRLKNEEGTLPPFSPRPAHFLDQPTAASVAMAEDRGNGLMEHCFEIHIEMVKGLAPLQATVWGEADCYVQYYFPVQHSQSSVLKGPEFLENGITLKPFRTATTLCVPDPIFNSEHHHSLLLPAEVPVQRLLLSAFSAQGLVPGGGVQFEIWCRYYYPNVRDQKVAKGTLPLSRICAMVTTQHREDVGIQTFNLPLTPRIENRKELRNQSSGLLDVGLRYRRSPRTAEGVLAARTVSISVQIIRACGLQAAAKALAEREPALQFSATVGVNASVTTHLSFLPQGEQRRTHPVACSFCPEFSHHVEFTCNLVTQHCSGEACFLAELLEFAEVIFAVYHENTKSASDIISIESCKEYLLGVVKVPTKELLIKRSGITGWYPIILPEDGGLPHGLELMQKIVGGLELSISFTHRGDRERVLEAAEHLGWSFENSLKDFVRMDEGEPATVTISTPRLWLPIHCVLLAGHNHIHKNTYCYLRYKFYDHEAFWTPLKKPKESVNKKQIMVTFKASKRAEVTRGPSLLWYFREERLEIQVWRAYGNDSVERPHQTDSWIGSAYVDLARLGERSARTLTVSGVYPLFGRNASNLSGAALRVHVVLSSLSSHLEPTHELDSMDCSSHSESEQLPRRNDEVQLSPPEVISCHQKSPASTQVPCSSTTAEVRLTQEGPADLDGTFAVSILVERAMHLSLKGSPLTERKVSIPSCCVSFATADESSPVYTQVVENTDSPIWNFQQQSRLSKELLLDPQQTLVFKVWHKGDEERVIGFASVDLSPLLSGFQFVCGWYNITDFSGECQGQIKVAVSPLESLIHFKEERQARRGVETSKSLIPIYSPFSFPASDTYAAFSSHMARQTLDQLAHASSKELDFSSPGRSDTTRSQASRHEEHVQNIRRFHESLHLQGEAPLPCDDKLTTSPLSSQTSILTSLRKNLSELDQIQRYFRQKLTKPFLPLSPQTQTAISQHQESCRDHLGPGASSLDPGSQCILEKSSNLVLQVSSLITDLQTITRDSQAALSSHRARSRSNKATTLPDAQDTEALQERCTMPDEPLVRAPDKGTDSPSPPPLEETSNGGRMLHESLRHAVPITRMQSSEDTEAGPAYSDEDYEEDIIEPRTLNEITTVTDKTSPWSSVISDTSEVISPQPDEVQREGPSCPSPGPFCREELMVKSSFLSSPERAVNPHLPRQGSPSQSLVACECEASKARVGGESASANPQPIPCPTLSGAQQSSTFVGWSSPQTDQNKEPKSEAPAENEAATSELGDSADSFKKLPLNLASQSRRENHKGPPIDSSDIRQRQVTTGSETSTKQSLLLPGPIVVPNFFLPPQQLEASLRMLSLSATLPPAATTDQDKSEATRGALSQRPCRPRPNSLPLNLPEEETLRIARIFSSQYSQKD

SEQ ID NO: 10232 - protein, 776 aa, Homo sapiens
  Payload ID: 2048;
  Gene Symbol: C2CD3;
  Gene Name: C2 calcium-dependent domain containing 3;
  ENSP ID: ENSP00000388750
AARTVSISVQIIRACGLQAAAKALAEREPALQFSATVGVNASVTTHLSFLPQGEQRRTHPVACSFCPEFSHHVEFTCNLVTQHCSGEACFLAELLEFAEVIFAVYHENTKSASDIISIESCKEYLLGVVKVPTKELLIKRSGITGWYPIILPEDGGLPHGLELMQKIVGGLELSISFTHRGDRERVLEAAEHLGWSFENSLKDFVRMDEGEPATVTISTPRLWLPIHCVLLAGHNHIHKNTYCYLRYKFYDHEAFWTPLKKPKESVNKKQIMVTFKASKRAEVTRGPSLLWYFREERLEIQVWRAYGNDSVERPHQTDSWIGSAYVDLARLGERSARTLTVSGVYPLFGRNASNLSGAALRVHVVLSSLSSHLEPTHELDSMDCSSHSESEQLPRRNDEVQLSPPEVISCHQKSPASTQVPCSSTTAEVRLTQEGPADLDGTFAVSILVERAMHLSLKGSPLTERKVSIPSCCVSFATADESSPVYTQVVENTDSPIWNFQQQSRLSKELLLDPQQTLVFKVWHKGDEERVIGFASVDLSPLLSGFQFVCGWYNITDFSGECQGQIKVAVSPLESLIHFKEERQARRGVETSKSLIPIYSPFSFPASDTYAAFSSHMARQTLDQLAHASSKELDFSSPGRSDTTRSQASRHEEHVQNIRRFHESLHLQGEAPLPCDDKLTTSPLSSQTSILTSLRKNLSELDQIQRYFRQKLTKPFLPLSPQTQTAISQHQESCRDHLGPGASSLDPGSQCILEKSSNLVLQVSSLITGLPAPNDS

SEQ ID NO: 10233 - protein, 677 aa, Homo sapiens
  Payload ID: 2048;
  Gene Symbol: C2CD3;
  Gene Name: C2 calcium-dependent domain containing 3;
  ENSP ID: ENSP00000404577
GEQRRTHPVACSFCPEFSHHVEFTCNLVTQHCSGEACFLAELLEFAEVIFAVYHENTKSASDIISIESCKEYLLGVVKVPTKELLIKRSGITGWYPIILPEDGGLPHGLELMQKIVGGLELSISFTHRGDRERVLEAAEHLGWSFENSLKDFVRMDEGEPATVTISTPRLWLPIHCVLLAGHNHIHKNTYCYLRYKFYDHEAFWTPLKKPKESVNKKQIMVTFKASKRAEVTRGPSLLWYFREERLEIQVWRAYGNDSVERPHQTDSWIGSAYVDLARLGERSARTLTVSGVYPLFGRNASNLSGAALRVHVVLSSLSSHLEPTHELDSMDCSSHSESEQLPRRNDEVQLSPPEVISCHQKSPASTQVPCSSTTAEVRLTQEGPADLDGTFAVSILVERAMHLSLKGSPLTERKVSIPSCCVSFATADESSPVYTQVVENTDSPIWNFQQQSRLSKELLLDPQQTLVFKVWHKGDEERVIGFASVDLSPLLSGFQFVCGWYNITDFSGECQGQIKVAVSPLESLIHFKEERQARRGVETSKSLIPIYSPFSFPASDTYAAFSSHMARQTLDQLAHASSKELDFSSPGRSDTTRSQASRHEEHVQNIRRFHESLHLQGEAPLPCDDKLTTSPLSSQTSILTSLRSSPSLSYPSALRLKRPSHSTRRAVGTILGQVPAA

SEQ ID NO: 10234 - protein, 191 aa, Homo sapiens
  Payload ID: 2048;
  Gene Symbol: C2CD3;
  Gene Name: C2 calcium-dependent domain containing 3;
  ENSP ID: ENSP00000439343
YKGSWVTEYENSADSRLGTRRLSPEGGALFRAMHPAQWSPQRAHPYALAQLEAPPSQPRRGLSDISPSTSLPPLVEGQLRCFLKLTVNRVIWKIAKPPTCVLVRVRWWGETSDGTLFCPRDALQTEPKAVRTTTRYAIRCGPKQFTSYLTDMAVLVLEVITKLDGLPIGRVQINGLAQLSPTHQINGFFTI

SEQ ID NO: 10235 - protein, 171 aa, Homo sapiens
  Payload ID: 2048;
  Gene Symbol: C2CD3;
  Gene Name: C2 calcium-dependent domain containing 3;
  ENSP ID: ENSP00000441742
  MOD_RES (1)..(1): Any amino acid
XLIHFKEERQARRGVETSKSLIPIYSPFSFPASDTYAAFSSHMARQTLDQLAHASSKELDFSSPGRSDTTRSQASRHEEHVQNIRRFHESLHLQGEAPLPCDDKLTTSPLSSQTSILTSLSPQTQTAISQHQESCRDHLGPGASSLDPGSQCILEKSSNLVLQVSSLITDT

SEQ ID NO: 10236 - protein, 506 aa, Homo sapiens
  Payload ID: 2048;
  Gene Symbol: C2CD3;
  Gene Name: C2 calcium-dependent domain containing 3;
  ENSP ID: ENSP00000445933
MKQRKGQGSGGSRGRKKRGLSDISPSTSLPPLVEGQLRCFLKLTVNRVIWKIAKPPTCVLVRVRWWGETSDGTLFCPRDALQTEPKAVRTTTRYAIRCGPKQFTSYLTDMAVLVLEVITKLDGLPIGRVQINGLAQLSPTHQINGFFTIVSSTSKKLGELQVSLALEPLSETYDSYHPLPTTDMTENVLLSKQGFRENTEPSSTQFQVPSRPRDIHTIKIDGKELAANSSRSTTPRGKDHVCFAENPDTIKDSSFGLQHSLNSGQSLESVTLKGRAPRKQMSLLNSSEFQPQIRTVAKSHSDSCILSSNNLPTKDLLSALLEQGNKLRNAMVISAMKSSPETSMLLDQVHPPINEDSLRASTQIRAFSRNRFKDHIEDHLLPSTENTFWRHDTKADTRAIQLLLGSLGLTRCRDCRRSLVHAVLNGAQAGVQWRDIGSLQPPPPSRLPWPPKVPRLQPLPGRHPVWEVRSVSAWPPIVWDVRIPSAWLPSLESEERLCPPAIPSRK

SEQ ID NO: 10237 - protein, 369 aa, Homo sapiens
  Payload ID: 2049;
  Gene Symbol: C2CD4A;
  Gene Name: C2 calcium-dependent domain containing 4A;
  Uniprot ID:  Q8NCU7;
  ENSP ID: ENSP00000347712
MWCLERLRLGPECLRRSGDWLLPGRARGAKSRTTAACANVLTPDRIPEFCIPPRLMPRLALAALRNSWVEEAGMDEGAGRTDWDPRSQAALSLPHLPRVRTAYGFCALLESPHTRRKESLLLGGPPAPRPRAHTYGGGGGPDALLGTLRVPRAPGPATPAAPGCPRPPQDALARRPRGCRLLRVPDGLLSRALRAGRSRRLTRVRSVSSGNEDKERRAGSQSPARAPSTSPPSSRVPFPERLEAEGTVALGRAGDALRLAAEYCPGTGRLRLRLLRAESPAGGAPGPRAVSCRLSLVLRPPGTALRQCSTVVGRSRKASFDQDFCFDGLSEDEVRRLAVRVKARDEGRGRERGRLLGQGELSLGALLLL

SEQ ID NO: 10238 - protein, 364 aa, Homo sapiens
  Payload ID: 2050;
  Gene Symbol: C2CD4B;
  Gene Name: C2 calcium-dependent domain containing 4B;
  Uniprot ID:  A6NLJ0;
  ENSP ID: ENSP00000369755
MRLLEKLCSSAAGSSAPKPAFAKVLTPNRIPEFCIPPRLPAPCTLESPIRAAAVPRRCAAESDLWPRAADEDAGRTDWDPRSQAALSLPHLPRVRTTYGFCALLESPHTRRKESLLLGGPPAPRPRAHSCGGGGGPDAPLGTLCGPRGPGPATPAAPGGPRLPQDALAAGPRRCRLLRVPDGLLSRALRAGRSRRLARVRSVSSGNEDEERRAGSESPARAPSSSPLSSRAPLPERLEAKGTVALGRAGDALRLAAEYCPGTRRLRLRLLRAESLFGGAPGPRAVRCRLSLVLRPPGTARWQCSAVVGRSRKASFDQDFCFDGLSEDEVRRLAVRVKARDEGRGRDRGRLLGQGELSLGALLLL

SEQ ID NO: 10239 - protein, 421 aa, Homo sapiens
  Payload ID: 2051;
  Gene Symbol: C2CD4C;
  Gene Name: C2 calcium-dependent domain containing 4C;
  Uniprot ID:  Q8TF44;
  ENSP ID: ENSP00000328677
MRKTNMWFLERLRGSGENGAARGVGSEAGDKASKGPLYSNVLTPDKIPDFFIPPKLPSGPAEGEGQAALGPSTSEQNLASAAPRQTPRSPRLPAKLAAESKSLLKAATRHVIQIESAEDWLSEEATDADPQAQGAMSLPSVPKAQTSYGFAMLAESPHTRRKESLFHSEHGALAQVGSPGAGRRRAAAKANGGDGGPREAGGALMSPGRYFSGGESDTGSSAESSPFGSPLLSRSVSLLKGFAQDSQAKVSQLRHSVGRHGSLSADDSTPDASPGSRRRLTRRAPPEPGPESGQARGEHTVHVGPRGSVRLLAEYEAGQARLRVHLLAAEGLYDRLCDARSINCCVGLCLVPGKLQKQRSTIVKNSRRPVFNEDFFFDGLGPASVRKLALRIKVVNKGSSLKRDTLLGEKELPLTSLLPFL

SEQ ID NO: 10240 - protein, 353 aa, Homo sapiens
  Payload ID: 2052;
  Gene Symbol: C2CD4D;
  Gene Name: C2 calcium-dependent domain containing 4D;
  Uniprot ID:  B7Z1M9;
  ENSP ID: ENSP00000389554
MWLLEKAGYKVGAAEPAARWAPSGLFSKRRAPGPPTSACPNVLTPDRIPQFFIPPRLPDPGGAVPAARRHVAGRGLPATCSLPHLAGREGWAFLPESPHTRRRESLFHGPPPAPAGGLPAAQSRLHVSAPDLRLCRAPDSDTASSPDSSPFGSPRPGLGRRRVSRPHSLSPEKASSADTSPHSPRRAGPPTPPLFHLDFLCCQLRPTRESVLRLGPRGGQLRLSTEYQAGPGRLRLRLVSAEGLPRPRSRPGSGGGGCCVVLRLRPRVRPREQQSRVVKCSANPIFNEDFFFDGLGPPDLAARSLRAKVLDRGAGLRRDVLLGECETPLIALLPPLGGGLGPGSSLAPTHLSL

SEQ ID NO: 10241 - protein, 1000 aa, Homo sapiens
  Payload ID: 2053;
  Gene Symbol: C2CD5;
  Gene Name: C2 calcium-dependent domain containing 5;
  Uniprot ID:  Q86YS7;
  ENSP ID: ENSP00000334229
MPGKLKVKIVAGRHLPVMDRASDLTDAFVEVKFGNTTFKTDVYLKSLNPQWNSEWFKFEVDDEDLQDEPLQITVLDHDTYSANDAIGKVYIDIDPLLYSEAATVISGWFPIYDTIHGIRGEINVVVKVDLFNDLNRFRQSSCGVKFFCTTSIPKCYRAVIIHGFVEELVVNEDPEYQWIDRIRTPRASNEARQRLISLMSGELQRKIGLKVLEMRGNAVVGYLQCFDLEGESGLVVRAIGTACTLDKLSSPAAFLPACNSPSKEMKEIPFNEDPNPNTHSSGPSTPLKNQTYSFSPSKSYSRQSSSSDTDLSLTPKTGMGSGSAGKEGGPFKALLRQQTQSALEQREFPFFTLTAFPPGFLVHVGGVVSARSVKLLDRIHNPDEPETRDAWWAEIRQEIKSHAKALGCHAVVGYSESTSICEEVCILSASGTAAVLNPRFLQDGTVEGCLEQRLEENLPTRCGFCHIPYDELNMPFPAHLTYCYNCRKQKVPDVLFTTIDLPTDATVIGKGCLIQARLCRLKKKAQAEANATAISNLLPFMEYEVHTQLMNKLKLKGMNALFGLRIQITVGENMLMGLASATGVYLAALPTPGGIQIAGKTPNDGSYEQHISHMQKKINDTIAKNKELYEINPPEISEEIIGSPIPEPRQRSRLLRSQSESSDEVTELDLSHGKKDAFVLEIDDTDAMEDVHSLLTDVPPPSGFYSCNTEIMPGINNWTSEIQMFTSVRVIRLSSLNLTNQALNKNFNDLCENLLKSLYFKLRSMIPCCLCHVNFTVSLPEDELIQVTVTAVAITFDKNQALQTTKTPVEKSLQRASTDNEELLQFPLELCSDSLPSHPFPPAKAMTVEKASPVGDGNFRNRSAPPCANSTVGVVKMTPLSFIPGAKITKYLGIINMFFIRETTSLREEGGVSGFLHAFIAEVFAMVRAHVAALGGNAVVSYIMKQCVFMENPNKNQAQCLINVSGDAVVFVRESDLEVVSSQQPTTNCQSSCTEGEVTT

SEQ ID NO: 10242 - protein, 1042 aa, Homo sapiens
  Payload ID: 2053;
  Gene Symbol: C2CD5;
  Gene Name: C2 calcium-dependent domain containing 5;
  Uniprot ID:  Q86YS7;
  ENSP ID: ENSP00000379345
MPGKLKVKIVAGRHLPVMDRASDLTDAFVEVKFGNTTFKTDVYLKSLNPQWNSEWFKFEVDDEDLQDEPLQITVLDHDTYSANDAIGKVYIDIDPLLYSEAATVISGWFPIYDTIHGIRGEINVVVKVDLFNDLNRFRQSSCGVKFFCTTSIPKCYRAVIIHGFVEELVVNEDPEYQWIDRIRTPRASNEARQRLISLMSGELQRKIGLKVLEMRGNAVVGYLQCFDLEGESGLVVRAIGTACTLDKLSSPAAFLPACNSPSKEMKESPLVHPPSHGCRSTHNSPIHTATGSRLTQNFSVSVPTLIYTGMGSGSAGKEGGPFKALLRQQTQSALEQREFPFFTLTAFPPGFLVHVGGVVSARSVKLLDRIHNPDEPETRDAWWAEIRQEIKSHAKALGCHAVVGYSESTSICEEVCILSASGTAAVLNPRFLQDGTVEGCLEQRLEENLPTRCGFCHIPYDELNMPFPAHLTYCYNCRKQKVPDVLFTTIDLPTDATVIGKGCLIQARLCRLKKKAQAEANATAISNLLPFMEYEVHTQLMNKLKLKGMNALFGLRIQITVGENMLMGLASATGVYLAALPTPGGIQIAGKTPNDGSYEQHISHMQKKINDTIAKNKELYEINPPEISEEIIGSPIPEPRQRSRLLRSQSESSDEVTELDLSHGKKDAFVLEIDDTDAMEDVHSLLTDVPPPSGFYSCNTEIMPGINNWTSEIQMFTSVRVIRLSSLNLTNQALNKNFNDLCENLLKSLYFKLRSMIPCCLCHVNFTVSLPEDELIQVTVTAVAITFDKNQALQTTKTPVEKSLQRASTDNEELLQFPLELCSDSLPSHPFPPAKEHLESASSNSGIPAAQRATSVDYSSFADRCSSWIELIKLKAQTIRRGSIKTTMTVEKASPVGDGNFRNRSAPPCANSTVGVVKMTPLSFIPGAKITKYLGIINMFFIRETTSLREEGGVSGFLHAFIAEVFAMVRAHVAALGGNAVVSYIMKQCVFMENPNKNQAQCLINVSGDAVVFVRESDLEVVSSQQPTTNCQSSCTEGEVTT

SEQ ID NO: 10243 - protein, 1051 aa, Homo sapiens
  Payload ID: 2053;
  Gene Symbol: C2CD5;
  Gene Name: C2 calcium-dependent domain containing 5;
  Uniprot ID:  Q86YS7;
  ENSP ID: ENSP00000388756
MPGKLKVKIVAGRHLPVMDRASDLTDAFVEVKFGNTTFKTDVYLKSLNPQWNSEWFKFEVDDEDLQDEPLQITVLDHDTYSANDAIGKVYIDIDPLLYSEAATVISGWFPIYDTIHGIRGEINVVVKVDLFNDLNRFRQSSCGVKFFCTTSIPKCYRAVIIHGFVEELVVNEDPEYQWIDRIRTPRASNEARQRLISLMSGELQRKIGLKVLEMRGNAVVGYLQCFDLEGESGLVVRAIGTACTLDKLSSPAAFLPACNSPSKEMKEIPFNEDPNPNTHSSGPSTPLKNQTYSFSPSKSYSRQSSSSDTDLSLTPKTGMGSGSAGKEGGPFKALLRQQTQSALEQREFPFFTLTAFPPGFLVHVGGVVSARSVKLLDRIHNPDEPETRDAWWAEIRQEIKSHAKALGCHAVVGYSESTSICEEVCILSASGTAAVLNPRFLQDGTVEGCLEQRLEENLPTRCGFCHIPYDELNMPFPAHLTYCYNCRKQKVPDVLFTTIDLPTDATVIGKGCLIQARLCRLKKKAQAEANATAISNLLPFMEYEVHTQLMNKLKLKGMNALFGLRIQITVGENMLMGLASATGVYLAALPTPGGIQIAGKTPNDGSYEQHISHMQKKINDTIAKNKELYEINPPEISEEIIGSPIPEPRQRSRLLRSQSESSDEVTELDLSHGKKDAFVLEIDDTDAMEDVHSLLTDVPPPSGFYSCNTEIMPGINNWTSEIQMFTSVRVIRLSSLNLTNQALNKNFNDLCENLLKSLYFKLRSMIPCCLCHVNFTVSLPEDELIQVTVTAVAITFDKNQALQTTKTPVEKSLQRASTDNEELLQFPLELCSDSLPSHPFPPAKEHLESASSNSGIPAAQRATSVDYSSFADRCSSWIELIKLKAQTIRRGSIKTTMTVEKASPVGDGNFRNRSAPPCANSTVGVVKMTPLSFIPGAKITKYLGIINMFFIRETTSLREEGGVSGFLHAFIAEVFAMVRAHVAALGGNAVVSYIMKQCVFMENPNKNQAQCLINVSGDAVVFVRESDLEVVSSQQPTTNCQSSCTEGEVTT

SEQ ID NO: 10244 - protein, 283 aa, Homo sapiens
  Payload ID: 2053;
  Gene Symbol: C2CD5;
  Gene Name: C2 calcium-dependent domain containing 5;
  ENSP ID: ENSP00000437935
  MOD_RES (1)..(1): Any amino acid
XWTSEIQMFTSVRVIRLSSLNLTNQALNKNFNDLCENLLKSLYFKLRSMIPCCLCHVNFTVSLPEDELIQVTVTAVAITFDKNQALQTTKTPVEKSLQRASTDNEELLQFPLELCSDSLPSHPFPPAKEHLESASSNSGIPAAQRAMTVEKASPVGDGNFRNRSAPPCANSTVGVVKMTPLSFIPGAKITKYLGIINMFFIRETTSLREEGGVSGFLHAFIAEVFAMVRAHVAALGGNAVVSYIMKQCVFMENPNKNQAQCLINVSGDAVVFVRESDLEVVSS

SEQ ID NO: 10245 - protein, 165 aa, Homo sapiens
  Payload ID: 2053;
  Gene Symbol: C2CD5;
  Gene Name: C2 calcium-dependent domain containing 5;
  ENSP ID: ENSP00000438256
  MOD_RES (1)..(1): Any amino acid
XMSGELQRKIGLKVLEMRGNAVVGYLQCFDLEGESGLVVRAIGTACTLDKLSSPAAFLPACNSPSKEMKEIPFNEDPNPNTHSSGPSTPLKNQTYSFSPSKSYSRQSSSSDTDLSLTPKTGMGSGSAGKEGGPFKALLRQQTQSALEQRMNQKLEMHGGQKSDKK

SEQ ID NO: 10246 - protein, 1053 aa, Homo sapiens
  Payload ID: 2053;
  Gene Symbol: C2CD5;
  Gene Name: C2 calcium-dependent domain containing 5;
  Uniprot ID:  Q86YS7;
  ENSP ID: ENSP00000439392
MPGKLKVKIVAGRHLPVMDRASDLTDAFVEVKFGNTTFKTDVYLKSLNPQWNSEWFKFEVDDEDLQDEPLQITVLDHDTYSANDAIGKVYIDIDPLLYSEAATVISGWFPIYDTIHGIRGEINVVVKVDLFNDLNRFRQSSCGVKFFCTTSIPKCYRAVIIHGFVEELVVNEDPEYQWIDRIRTPRASNEARQRLISLMSGELQRKIGLKVLEMRGNAVVGYLQCFDLEGESGLVVRAIGTACTLDKLSSPAAFLPACNSPSKEMKESPLVHPPSHGCRSTHNSPIHTATGSRLTQNFSVSVPTLIYTGMGSGSAGKEGGPFKALLRQQTQSALEQRGGSPHRFCRRREFPFFTLTAFPPGFLVHVGGVVSARSVKLLDRIHNPDEPETRDAWWAEIRQEIKSHAKALGCHAVVGYSESTSICEEVCILSASGTAAVLNPRFLQDGTVEGCLEQRLEENLPTRCGFCHIPYDELNMPFPAHLTYCYNCRKQKVPDVLFTTIDLPTDATVIGKGCLIQARLCRLKKKAQAEANATAISNLLPFMEYEVHTQLMNKLKLKGMNALFGLRIQITVGENMLMGLASATGVYLAALPTPGGIQIAGKTPNDGSYEQHISHMQKKINDTIAKNKELYEINPPEISEEIIGSPIPEPRQRSRLLRSQSESSDEVTELDLSHGKKDAFVLEIDDTDAMEDVHSLLTDVPPPSGFYSCNTEIMPGINNWTSEIQMFTSVRVIRLSSLNLTNQALNKNFNDLCENLLKSLYFKLRSMIPCCLCHVNFTVSLPEDELIQVTVTAVAITFDKNQALQTTKTPVEKSLQRASTDNEELLQFPLELCSDSLPSHPFPPAKEHLESASSNSGIPAAQRATSVDYSSFADRCSSWIELIKLKAQTIRRGSIKTTMTVEKASPVGDGNFRNRSAPPCANSTVGVVKMTPLSFIPGAKITKYLGIINMFFIRETTSLREEGGVSGFLHAFIAEVFAMVRAHVAALGGNAVVSYIMKQCVFMENPNKNQAQCLINVSGDAVVFVRESDLEVVSSQQPTTNCQSSCTEGEVTT

SEQ ID NO: 10247 - protein, 1051 aa, Homo sapiens; identical to SEQ ID NO: 10243
  Payload ID: 2053;
  Gene Symbol: C2CD5;
  Gene Name: C2 calcium-dependent domain containing 5;
  Uniprot ID:  Q86YS7;
  ENSP ID: ENSP00000441951

SEQ ID NO: 10248 - protein, 1054 aa, Homo sapiens
  Payload ID: 2053;
  Gene Symbol: C2CD5;
  Gene Name: C2 calcium-dependent domain containing 5;
  Uniprot ID:  Q86YS7;
  ENSP ID: ENSP00000443204
MPGKLKVKIVAGRHLPVMDRASDLTDAFVEVKFGNTTFKTDVYLKSLNPQWNSEWFKFEVDDEDLQDEPLQITVLDHDTYSANDAIGKVYIDIDPLLYSEAATVISGWFPIYDTIHGIRGEINVVVKVDLFNDLNRFRQSSCGVKFFCTTSIPKCYRAVIIHGFVEELVVNEDPEYQWIDRIRTPRASNEARQRLISLMSGELQRKIGLKVLEMRGNAVVGYLQCFDLEGESGLVVRAIGTACTLDKLSSPAAFLPACNSPSKEMKESPLVHPPSHGCRSTHNSPIHTATGSRLTQNFSVSVPTLIYTGMGSGSAGKEGGPFKALLRQQTQSALEQREFPFFTLTAFPPGFLVHVGGVVSARSVKLLDRIHNPAFVGIMGNTRSYKLLDWNSFNSDEPETRDAWWAEIRQEIKSHAKALGCHAVVGYSESTSICEEVCILSASGTAAVLNPRFLQDGTVEGCLEQRLEENLPTRCGFCHIPYDELNMPFPAHLTYCYNCRKQKVPDVLFTTIDLPTDATVIGKGCLIQARLCRLKKKAQAEANATAISNLLPFMEYEVHTQLMNKLKLKGMNALFGLRIQITVGENMLMGLASATGVYLAALPTPGGIQIAGKTPNDGSYEQHISHMQKKINDTIAKNKELYEINPPEISEEIIGSPIPEPRQRSRLLRSQSESSDEVTELDLSHGKKDAFVLEIDDTDAMEDVHSLLTDVPPPSGFYSCNTEIMPGINNWTSEIQMFTSVRVIRLSSLNLTNQALNKNFNDLCENLLKSLYFKLRSMIPCCLCHVNFTVSLPEDELIQVTVTAVAITFDKNQALQTTKTPVEKSLQRASTDNEELLQFPLELCSDSLPSHPFPPAKEHLESASSNSGIPAAQRDRCSSWIELIKLKAQTIRRGSIKTTMTVEKASPVGDGNFRNRSAPPCANSTVGVVKMTPLSFIPGAKITKYLGIINMFFIRETTSLREEGGVSGFLHAFIAEVFAMVRAHVAALGGNAVVSYIMKQCVFMENPNKNQAQCLINVSGDAVVFVRESDLEVVSSQQPTTNCQSSCTEGEVTT

SEQ ID NO: 10249 - protein, 182 aa, Homo sapiens
  Payload ID: 2053;
  Gene Symbol: C2CD5;
  Gene Name: C2 calcium-dependent domain containing 5;
  ENSP ID: ENSP00000444857
  MOD_RES (1)..(1): Any amino acid
XQQTQSALEQRGGSPHRFCRRREFPFFTLTAFPPGFLVHVGGVVSARSVKLLDRIHNPAFVGIMGNTRSYKLLDWNSFNSDEPETRDAWWAEIRQEIKSHAKALGCHAVVGYSESTSICEEVCILSASGTAAVLNPRFLQDGTVEGCLEQRLEENLPTRCGFCHIPYDELNMPFPAHLTYCY

SEQ ID NO: 10250 - protein, 79 aa, Homo sapiens
  Payload ID: 2054;
  Gene Symbol: C21orf62-AS1;
  Gene Name: C21orf62 antisense RNA 1;
  Uniprot ID:  Q17RA5;
  ENSP ID: ENSP00000459537
MHHVRQLMMPICPMALNSTTSSSTTFGAFRIMTLNVEEWATAWKVLILLEAAVEEEKRSEEKRILVCGTCGTRSSQKNL

SEQ ID NO: 10251 - protein, 14 aa, Homo sapiens
  Payload ID: 2054;
  Gene Symbol: C21orf62-AS1;
  Gene Name: C21orf62 antisense RNA 1;
  ENSP ID: ENSP00000460208
MHHVRQLMMPICPM

SEQ ID NO: 10252 - protein, 49 aa, Homo sapiens
  Payload ID: 2054;
  Gene Symbol: C21orf62-AS1;
  Gene Name: C21orf62 antisense RNA 1;
  ENSP ID: ENSP00000460870
MHHVRQLMMPICPMVLILLEAAVEEEKRSEEKRILVCGTCGTRSSQKNL

SEQ ID NO: 10253 - protein, 79 aa, Homo sapiens; identical to SEQ ID NO: 10250
  Payload ID: 2054;
  Gene Symbol: C21orf62-AS1;
  Gene Name: C21orf62 antisense RNA 1;
  Uniprot ID:  Q17RA5;
  ENSP ID: ENSP00000461835

SEQ ID NO: 10254 - protein, 707 aa, Homo sapiens
  Payload ID: 2055;
  Gene Symbol: C2CD2L;
  Gene Name: C2CD2-like;
  Uniprot ID:  O14523;
  ENSP ID: ENSP00000338885
MDPGWGQRDVGWAALLILFAASLLTVFAWLLQYARGLWLARARGDRGPGPALAGEPAGSLRELGVWRSLLRLRATRAGAAEEPGVRGLLASLFAFKSFRENWQRAWVRALNEQACRNGSSIQIAFEEVPQLPPRASISHVTCVDQSEHTMVLRCQLSAEEVRFPVSVTQQSPAAVSMETYHVTLTLPPTQLEVNLEEIPGEGLLISWAFTDRPDLSLTVLPKLQARERGEEQVELSTIEELIKDAIVSTQPAMMVNLRACSAPGGLVPSEKPPMMPQAQPAIPRPNRLFLRQLRASHLGNELEGTEELCCVAELDNPMQQKWTKPARAGSEVEWTEDLALDLGPQSRELTLKVLRSSSCGDTELLGQATLPVGSPSRPLSRRQLCPLTPGPGKALGPAATMAVELHYEEGSPRNLGTPTSSTPRPSITPTKKIELDRTIMPDGTIVTTVTTVQSRPRIDGKLDSPSRSPSKVEVTEKTTTVLSESSGPSNTSHSSSPGDSHLSNGLDPVAETAIRQLTEPSGRVAKKTPTKRSTLIISGVSKVPIAQDELALSLGYAASLEASVQDDAGTSGGPSSPPSDPPAMSPGPLDALSSPTSVQEADETTRSDISERPSVDDIESETGSTGALETRSLKDHKVSFLRSGTKLIFRRRPRQKEAGLSQSHDDLSNATATPSVRKKAGSFSRRLIKRFSFKSKPKANGNPSPQL

SEQ ID NO: 10255 - protein, 391 aa, Homo sapiens
  Payload ID: 2055;
  Gene Symbol: C2CD2L;
  Gene Name: C2CD2-like;
  ENSP ID: ENSP00000433600
MMVNLRACSAPGGLVPSEKPPMMPQAQPAIPRPNRLFLRQLRASHLGNELEGTEELCCVAELDNPMQQKWTKPARAGSEVEWTEDLALDLGPQSRELTLKVLRSSSCGDTELLGQATLPVGSPSRPLSRRQLCPLTPGPGKALGPAATMAVELHYEEGSPRNLGTPTSSTPRPSITPTKKIELDRTIMPDGTIVTTVTTVQSRPRIDGKLDSPSRSPSKVEVTEKTTTVLSESSGPSNTSHSSSRDSHLSNGLDPVAETAIRQLTEPSGRVAKKTPTKRSTLIISGVSKVPIAQDELALSLGYAASLEASVQDDAGTSGGPSSPPSDPPAMSPGPLDALSSPTSVQEADETTRSDISERPSVDDIESETGSTGALETRSLKDHKASPLPLQ

SEQ ID NO: 10256 - protein, 550 aa, Homo sapiens
  Payload ID: 2056;
  Gene Symbol: CPAMD8;
  Gene Name: C3 and PZP-like, alpha-2-macroglobulin domain containing 8;
  Uniprot ID:  Q8IZJ3;
  ENSP ID: ENSP00000291440
MAPGALRGGCEQRAPGGGARTAALGPWPWPSPGPAPSPGAAPPRSRKMSGALLWPLLPLLLLLLSARDGVRAAQPQAPGYLIAAPSVFRAGVEEVISVTIFNSPREVTVQAQLVAQGEPVVQSQGAILDKGTIKLKVPTGLRGQALLKVWGRGWQAEEGPLFHNQTSVTVDGRGASVFIQTDKPVYRPQHRVLISIFTVSPNLRPVNEKLEAYILDPRGSRMIEWRHLKPFCCGITNMSFPLSDQPVLGEWFIFVEMQGHAYNKSFEVQKYVLPKFELLIDPPRYIQDLDACETGTVRARYTFGKPVAGALMINMTVNGVGYYSHEVGRPVLRTTKILGSRDFDICVRDMIPADVPEHFRGRVSIWAMVTSVDGSQQVAFDDSTPVQRQLVDIRYSKDTRKQFKPGLAYVGKVELSYPDGSPAEGVTVQIKAELTPKDNIYTSEVVSQRGLVGFEIPSIPTSAQHVWLEVFQELEDYDVSDSFGVSREDGPFWWAGLTAQRRRRSSVFPWPWGITKDSGFAFTVRRGNGTGGDDRPSEPEPPAGRWPLHR

SEQ ID NO: 10257 - protein, 503 aa, Homo sapiens
  Payload ID: 2056;
  Gene Symbol: CPAMD8;
  Gene Name: C3 and PZP-like, alpha-2-macroglobulin domain containing 8;
  ENSP ID: ENSP00000373577
MSGALLWPLLPLLLLLLSARDGVRAAQPQAPGYLIAAPSVFRAGVEEVISVTIFNSPREVTVQAQLVAQGEPVVQSQGAILDKGTIKLKVPTGLRGQALLKVWGRGWQAEEGPLFHNQTSVTVDGRGASVFIQTDKPVYRPQHRVLISIFTVSPNLRPVNEKLEAYILDPRGSRMIEWRHLKPFCCGITNMSFPLSDQPVLGEWFIFVEMQGHAYNKSFEVQKYVLPKFELLIDPPRYIQDLDACETGTVRARYTFGKPVAGALMINMTVNGVGYYSHEVGRPVLRTTKILGSRDFDICVRDMIPADVPEHFRGRVSIWAMVTSVDGSQQVAFDDSTPVQRQLVDIRYSKDTRKQFKPGLAYVGKVELSYPDGSPAEGVTVQIKAELTPKDNIYTSEVVSQRGLVGFEIPSIPTSAQHVWLEVFQELEDYDVSDSFGVSREDGPFWWAGLTAQRRRRSSVFPWPWGITKDSGFAFTVRRGNGTGGDDRPSEPEPPAGRWPLHR

SEQ ID NO: 10258 - protein, 1932 aa, Homo sapiens
  Payload ID: 2056;
  Gene Symbol: CPAMD8;
  Gene Name: C3 and PZP-like, alpha-2-macroglobulin domain containing 8;
  Uniprot ID:  Q8IZJ3;
  ENSP ID: ENSP00000402505
MAPGALRGGCEQRAPGGGARTAALGPWPWPSPGPAPSPGAAPPRSRKMSGALLWPLLPLLLLLLSARDGVRAAQPQAPGYLIAAPSVFRAGVEEVISVTIFNSPREVTVQAQLVAQGEPVVQSQGAILDKGTIKLKVPTGLRGQALLKVWGRGWQAEEGPLFHNQTSVTVDGRGASVFIQTDKPVYRPQHRVLISIFTVSPNLRPVNEKLEAYILDPRGSRMIEWRHLKPFCCGITNMSFPLSDQPVLGEWFIFVEMQGHAYNKSFEVQKYVLPKFELLIDPPRYIQDLDACETGTVRARYTFGKPVAGALMINMTVNGVGYYSHEVGRPVLRTTKILGSRDFDICVRDMIPADVPEHFRGRVSIWAMVTSVDGSQQVAFDDSTPVQRQLVDIRYSKDTRKQFKPGLAYVGKVELSYPDGSPAEGVTVQIKAELTPKDNIYTSEVVSQRGLVGFEIPSIPTSAQHVWLETKVMALNGKPVGAQYLPSYLSLGSWYSPSQCYLQLQPPSHPLQVGEEAYFSVKSTCPCNFTLYYEVAARGNIVLSGQQPAHTTQQRSKRAAPALEKPIRLTHLSETEPPPAPEAEVDVCVTSLHLAVTPSMVPLGRLLVFYVRENGEGVADSLQFAVETFFENQVSVTYSANETQPGEVVDLRIRAARGSCVCVAAVDKSVYLLRSGFRLTPAQVFQELEDYDVSDSFGVSREDGPFWWAGLTAQRRRRSSVFPWPWGITKDSGFAFTETGLVVMTDRVSLNHRQDGGLYTDEAVPAFQPHTGSLVAVAPSRHPPRTEKRKRTFFPETWIWHCLNISDPSGEGTLSVKVPDSITSWVGEAVALSTSQGLGIAEPSLLKTFKPFFVDFMLPALIIRGEQVKIPLSVYNYMGTCAEVYMKLSVPKGIQFVGHPGKRHVTKKMCVAPGEAEPIWVVLSFSDLGLNNITAKALAYGDTNCCRDGRSSKHPEENHADRRVPIGVDHVRRSVMVEAEGVPRAYTYSAFFCPSERVHISTPNKYEFQYVQRPLRLTRFDVAVRAHNDARVALSSGPQDTAGMIEIVLGGHQNTRSWISTSKMGEPVASAHTAKILSWDEFRTFWISWRGGLIQVGHGPEPSNESVIVAWTLPRPPEVQFIGFSTGWGSMGEFRIWRKMEVDESYSEAFTLGVPHGAIPGSERATASIIGDVMGPTLNHLNNLLRLPFGCGEQNMIHFAPNVFVLKYLQKTQQLSPEVERETTDYLVQGYQRQLTYKRQDGSYSAFGERDASGSMWLTAFVLKSFAQARSFIFVDPRELAAAKSWIIQQQQADGSFLAVGRVLNKDIQGGIHGTVPLTAYVVVALLETGTASEEERGSTDKARHFLESAAPLAMDPYSCALTTYALTLLRSPAAPEALRKLRSLAIMRDGVTHWSLSNSWDVDKGTFLSFSDRVSQSVVSAEVEMTAYALLTYTLLGDVAAALPVVKWLSQQRNALGGFSSTQDTCVALQALAEYAILSYAGGINLTVSLASTNLDYQETFELHRTNQKVLQTAAIPSLPTGLFVSAKGDGCCLMQIDVTYNVPDPVAKPAFQLLVSLQEPEAQGRPPPMPASAAEGSRGDWPPADDDDPAADQHHQEYKVMLEVCTRWLHAGSSNMAVLEVPLLSGFRADIESLEQLLLDKHMGMKRYEVAGRRVLFYFDEIPSRCLTCVRFRALRECVVGRTSALPVSVYDYYEPAFEATRFYNVSTHSPLARELCAGPACNEVERAPARGPGWFPGESGPAVAPEEGAAIARCGCDHDCGAQGNPVCGSDGVVYASACRLREAACRQAAPLEPAPPSCCALEQRLPASSSSTYGDDLASVAPGPLQQDVKLNGAGLEVEDSDPEPEGEAEDRVTAGPRPPVSSGNLESSTQSASPFHRWGQTPAPQRHSGRVVGAHRPGLLSPVFVYSPAFQSGGEEGLWMSNTCTLR

SEQ ID NO: 10259 - protein, 175 aa, Homo sapiens
  Payload ID: 2056;
  Gene Symbol: CPAMD8;
  Gene Name: C3 and PZP-like, alpha-2-macroglobulin domain containing 8;
  ENSP ID: ENSP00000469163
LLLDKHMGMKRYEVAGRRVLFYFDEIPSRCLTCVRFRALRECVVGRTSALPVSVYDYYEPAFEATRFYNVSTHSPLARELCAGPACNEVERAPARGPGWFPGESGPAVAPEEGAAIARCGCDHDCGAQGNPVCGSDGVVYASACRLREAACRQAAPLEPAPPSCCALAGREAEWS

SEQ ID NO: 10260 - protein, 338 aa, Homo sapiens
  Payload ID: 2056;
  Gene Symbol: CPAMD8;
  Gene Name: C3 and PZP-like, alpha-2-macroglobulin domain containing 8;
  ENSP ID: ENSP00000471545
  MOD_RES (1)..(1): Any amino acid
XVSAKGDGCCLMQIDVTYNVPDPVAKPAFQLLVSLQEPEAQGRPPPMPASAAEGSRGDWPPADDDDPAADQHHQEYKVMLEVCTRWLHAGSSNMAVLEVPLLSGFRADIESLEQLLLDKHMGMKRYEVAGRRVLFYFDEIPSRCLTCVRFRALRECVVGRTSALPVSVYDYYEPAFEATRFYNVSTHSPLARELCAGPACNEVERAPARGPGWFPGESGPAVAPEEGAAIARCGCDHDCGAQGNPVCGSDGVVYASACRLREAACRQAAPLEPAPPSCCALEQRLPASSSSTYGDDLASVAPGPLQQDVKLNGAGLEVEDSDPEPEGEAEDSQSGFSS

SEQ ID NO: 10261 - protein, 56 aa, Homo sapiens
  Payload ID: 2056;
  Gene Symbol: CPAMD8;
  Gene Name: C3 and PZP-like, alpha-2-macroglobulin domain containing 8;
  ENSP ID: ENSP00000473216
RTQTLSLKGRRRTERLLFLTAALLRAGRHHLAASCPYQPVTLYGGWADLSPGDTCL

SEQ ID NO: 10262 - protein, 458 aa, Homo sapiens
  Payload ID: 2057;
  Gene Symbol: C7orf55-LUC7L2;
  Gene Name: C7orf55-LUC7L2 readthrough;
  ENSP ID: ENSP00000440222
MAALGSPSHTFRGLLRELRYLSAATGRPYRDTAAYRYLVKAFRAHRVTSEKLCRAQHELHFQAATYLCLLRSIRKHVALHQEFHGKGDTTRQRIKFSDDRVCKSHLLNCCPHDVLSGTRMDLGECLKVHDLALRADYEIASKEQDFFFELDAMDHLQSFIADCDRRTEVAKKRLAETQEEISAEVAAKAERVHELNEEIGKLLAKVEQLGAEGNVEESQKVMDEVEKARAKKREAEEVYRNSMPASSFQQQKLRVCEVCSAYLGLHDNDRRLADHFGGKLHLGFIEIREKLEELKRVVAEKQEKRNQERLKRREEREREEREKLRRSRSHSKNPKRSRSREHRRHRSRSMSRERKRRTRSKSREKRHRHRSRSSSRSRSRSHQRSRHSSRDRSRERSKRRSSKERFRDQDLASCDRDRSSRDRSPRDRDRKDKKRSYESANGRSEDRRSSEEREAGEI

SEQ ID NO: 10263 - protein, 496 aa, Homo sapiens
  Payload ID: 2058;
  Gene Symbol: C8orf44-SGK3;
  Gene Name: C8orf44-SGK3 readthrough;
  ENSP ID: ENSP00000429022
MQRDHTMDYKESCPSVSIPSSDEHREKKKRFTVYKVLVSVGRSEWFVFRRYAEFDKLYNTLKKQFPAMALKIPAKRIFGDNFDPDFIKQRRAGLNEFIQNLVRYPELYNHPDVRAFLQMDSPKHQSDPSEDEDERSSQKLHSTSQNINLGPSGNPHAKPTDFDFLKVIGKGSFGKVLLAKRKLDGKFYAVKVLQKKIVLNRKEQKHIMAERNVLLKNVKHPFLVGLHYSFQTTEKLYFVLDFVNGGELFFHLQRERSFPEHRARFYAAEIASALGYLHSIKIVYRDLKPENILLDSVGHVVLTDFGLCKEGIAISDTTTTFCGTPEYLAPEVIRKQPYDNTVDWWCLGAVLYEMLYGLPPFYCRDVAEMYDNILHKPLSLRPGVSLTAWSILEELLEKDRQNRLGAKEDFLEIQNHPFFESLSWADLVQKKIPPPFNPNVAGPDDIRNFDTAFTEETVPYSVCVSSDYSIVNASVLEADDAFVGFSYAPPSEDLFL

SEQ ID NO: 10264 - protein, 1314 aa, Homo sapiens
  Payload ID: 2059;
  Gene Symbol: CADPS;
  Gene Name: Ca++-dependent secretion activator;
  Uniprot ID:  Q9ULU8;
  ENSP ID: ENSP00000283269
MLDPSSSEEESDEIVEEESGKEVLGSAPSGARLSPSRTSEGSAGSAGLGGGGAGAGAGVGAGGGGGSGASSGGGAGGLQPSSRAGGGRPSSPSPSVVSEKEKEELERLQKEEEERKKRLQLYVFVMRCIAYPFNAKQPTDMARRQQKISKQQLQTVKDRFQAFLNGETQIMADEAFMNAVQSYYEVFLKSDRVARMVQSGGCSANDSREVFKKHIEKRVRSLPEIDGLSKETVLSSWMAKFDAIYRGEEDPRKQQARMTASAASELILSKEQLYEMFQNILGIKKFEHQLLYNACQLDNPDEQAAQIRRELDGRLQMADQIARERKFPKFVSKEMENMYIEELKSSVNLLMANLESMPVSKGGEFKLQKLKRSHNASIIDMGEESENQLSKSDVVLSFSLEVVIMEVQGLKSLAPNRIVYCTMEVEGGEKLQTDQAEASKPTWGTQGDFSTTHALPAVKVKLFTESTGVLALEDKELGRVILHPTPNSPKQSEWHKMTVSKNCPDQDLKIKLAVRMDKPQNMKHSGYLWAIGKNVWKRWKKRFFVLVQVSQYTFAMCSYREKKAEPQELLQLDGYTVDYTDPQPGLEGGRAFFNAVKEGDTVIFASDDEQDRILWVQAMYRATGQSHKPVPPTQVQKLNAKGGNVPQLDAPISQFYADRAQKHGMDEFISSNPCNFDHASLFEMVQRLTLDHRLNDSYSCLGWFSPGQVFVLDEYCARNGVRGCHRHLCYLRDLLERAENGAMIDPTLLHYSFAFCASHVHGNRPDGIGTVTVEEKERFEEIKERLRVLLENQITHFRYCFPFGRPEGALKATLSLLERVLMKDIVTPVPQEEVKTVIRKCLEQAALVNYSRLSEYAKIEGKKREMYEHPVFCLASQVMDLTIQNVGRLITPAKKLEDTIRLAELVIEVLQQNEEHHAEAFAWWSDLMVEHAETFLSLFAVDMDAALEVQPPDTWDSFPLFQLLNDFLRTDYNLCNGKFHKHLQDLFAPLVVRYVDLMESSIAQSIHRGFERESWEPVNNGSGTSEDLFWKLDALQTFIRDLHWPEEEFGKHLEQRLKLMASDMIESCVKRTRIAFEVKLQKTSRSTDFRVPQSICTMFNVMVDAKAQSTKLCSMEMGQEHQYHSKIDELIEETVKEMITLLVAKFVTILEGVLAKLSRYDEGTLFSSFLSFTVKAASKYVDVPKPGMDVADAYVTFVRHSQDVLRDKVNEEMYIERLFDQWYNSSMNVICTWLTDRMDLQLHIYQLKTLIRMVKKTYRDFRLQGVLDSTLNSKTYETIRNRLTVEEATASVSEGGGLQGISMKDSDEEDEEDD

SEQ ID NO: 10265 - protein, 1274 aa, Homo sapiens
  Payload ID: 2059;
  Gene Symbol: CADPS;
  Gene Name: Ca++-dependent secretion activator;
  Uniprot ID:  Q9ULU8;
  ENSP ID: ENSP00000350632
MLDPSSSEEESDEIVEEESGKEVLGSAPSGARLSPSRTSEGSAGSAGLGGGGAGAGAGVGAGGGGGSGASSGGGAGGLQPSSRAGGGRPSSPSPSVVSEKEKEELERLQKEEEERKKRLQLYVFVMRCIAYPFNAKQPTDMARRQQKISKQQLQTVKDRFQAFLNGETQIMADEAFMNAVQSYYEVFLKSDRVARMVQSGGCSANDSREVFKKHIEKRVRSLPEIDGLSKETVLSSWMAKFDAIYRGEEDPRKQQARMTASAASELILSKEQLYEMFQNILGIKKFEHQLLYNACQLDNPDEQAAQIRRELDGRLQMADQIARERKFPKFVSKEMENMYIEELKSSVNLLMANLESMPVSKGGEFKLQKLKRSHNASIIDMGEESENQLSKSDVVLSFSLEVVIMEVQGLKSLAPNRIVYCTMEVEGGEKLQTDQAEASKPTWGTQGDFSTTHALPAVKVKLFTESTGVLALEDKELGRVILHPTPNSPKQSEWHKMTVSKNCPDQDLKIKLAVRMDKPQNMKHSGYLWAIGKNVWKRWKKRFFVLVQVSQYTFAMCSYREKKAEPQELLQLDGYTVDYTDPQPGLEGGRAFFNAVKEGDTVIFASDDEQDRILWVQAMYRATGQSHKPVPPTQVQKLNAKGGNVPQLDAPISQFYADRAQKHGMDEFISSNPCNFDHASLFEMGWFSPGQVFVLDEYCARNGVRGCHRHLCYLRDLLERAENGAMIDPTLLHYSFAFCASHVHGNRPDGIGTVTVEEKERFEEIKERLRVLLENQITHFRYCFPFGRPEGALKATLSLLERVLMKDIVTPVPQEEVKTVIRKCLEQAALVNYSRLSEYAKIEENVGRLITPAKKLEDTIRLAELVIEVLQQNEEHHAEAFAWWSDLMVEHAETFLSLFAVDMDAALEVQPPDTWDSFPLFQLLNDFLRTDYNLCNGKFHKHLQDLFAPLVVRYVDLMESSIAQSIHRGFERESWEPVNNGSGTSEDLFWKLDALQTFIRDLHWPEEEFGKHLEQRLKLMASDMIESCVKRTRIAFEVKLQKTSRSTDFRVPQSICTMFNVMVDAKAQSTKLCSMEMGQEHQYHSKIDELIEETVKEMITLLVAKFVTILEGVLAKLSRYDEGTLFSSFLSFTVKAASKYVDVPKPGMDVADAYVTFVRHSQDVLRDKVNEEMYIERLFDQWYNSSMNVICTWLTDRMDLQLHIYQLKTLIRMVKKTYRDFRLQGVLDSTLNSKTYETIRNRLTVEEATASVSEGGGLQGISMKDSDEEDEEDD

SEQ ID NO: 10266 - protein, 1353 aa, Homo sapiens
  Payload ID: 2059;
  Gene Symbol: CADPS;
  Gene Name: Ca++-dependent secretion activator;
  Uniprot ID:  Q9ULU8;
  ENSP ID: ENSP00000373215
MLDPSSSEEESDEIVEEESGKEVLGSAPSGARLSPSRTSEGSAGSAGLGGGGAGAGAGVGAGGGGGSGASSGGGAGGLQPSSRAGGGRPSSPSPSVVSEKEKEELERLQKEEEERKKRLQLYVFVMRCIAYPFNAKQPTDMARRQQKISKQQLQTVKDRFQAFLNGETQIMADEAFMNAVQSYYEVFLKSDRVARMVQSGGCSANDSREVFKKHIEKRVRSLPEIDGLSKETVLSSWMAKFDAIYRGEEDPRKQQARMTASAASELILSKEQLYEMFQNILGIKKFEHQLLYNACQLDNPDEQAAQIRRELDGRLQMADQIARERKFPKFVSKEMENMYIEELKSSVNLLMANLESMPVSKGGEFKLQKLKRSHNASIIDMGEESENQLSKSDVVLSFSLEVVIMEVQGLKSLAPNRIVYCTMEVEGGEKLQTDQAEASKPTWGTQGDFSTTHALPAVKVKLFTESTGVLALEDKELGRVILHPTPNSPKQSEWHKMTVSKNCPDQDLKIKLAVRMDKPQNMKHSGYLWAIGKNVWKRWKKRFFVLVQVSQYTFAMCSYREKKAEPQELLQLDGYTVDYTDPQPGLEGGRAFFNAVKEGDTVIFASDDEQDRILWVQAMYRATGQSHKPVPPTQVQKLNAKGGNVPQLDAPISQFYADRAQKHGMDEFISSNPCNFDHASLFEMVQRLTLDHRLNDSYSCLGWFSPGQVFVLDEYCARNGVRGCHRHLCYLRDLLERAENGAMIDPTLLHYSFAFCASHVHGNRPDGIGTVTVEEKERFEEIKERLRVLLENQITHFRYCFPFGRPEGALKATLSLLERVLMKDIVTPVPQEEVKTVIRKCLEQAALVNYSRLSEYAKIEENQKDAENVGRLITPAKKLEDTIRLAELVIEVLQQNEEHHAEPHVDKGEAFAWWSDLMVEHAETFLSLFAVDMDAALEVQPPDTWDSFPLFQLLNDFLRTDYNLCNGKFHKHLQDLFAPLVVRYVDLMESSIAQSIHRGFERESWEPVKSLTSNLPNVNLPNVNLPKVPNLPVNIPLGIPQMPTFSAPSWMAAIYDADNGSGTSEDLFWKLDALQTFIRDLHWPEEEFGKHLEQRLKLMASDMIESCVKRTRIAFEVKLQKTSRSTDFRVPQSICTMFNVMVDAKAQSTKLCSMEMGQEHQYHSKIDELIEETVKEMITLLVAKFVTILEGVLAKLSRYDEGTLFSSFLSFTVKAASKYVDVPKPGMDVADAYVTFVRHSQDVLRDKVNEEMYIERLFDQWYNSSMNVICTWLTDRMDLQLHIYQLKTLIRMVKKTYRDFRLQGVLDSTLNSKTYETIRNRLTVEEATASVSEGGGLQGISMKDSDEEDEEDD

SEQ ID NO: 10267 - protein, 190 aa, Homo sapiens
  Payload ID: 2059;
  Gene Symbol: CADPS;
  Gene Name: Ca++-dependent secretion activator;
  ENSP ID: ENSP00000417568
  MOD_RES (1)..(1): Any amino acid
XKHLEQRLKLMASDMIESCVKRTRIAFEVKLQKTSRSTDFRVPQSICTMFNVMVDAKAQSTKLCSMEMGQEHQYHSKIDELIEETVKEMITLLVAKFVTILEGVLAKLSRYDEGTLFSSFLSFTKPGMDVADAYVTFVRHSQDVLRDKVNEEMYIERLFDQWYNSSMNVICTWLTDRMDLQLHIYQLKTL

SEQ ID NO: 10268 - protein, 240 aa, Homo sapiens
  Payload ID: 2059;
  Gene Symbol: CADPS;
  Gene Name: Ca++-dependent secretion activator;
  ENSP ID: ENSP00000417827
  MOD_RES (1)..(1): Any amino acid
XADRAQKHGMDEFISSNPCNFDHASLFEMVQRLTLDHRLNDSYSCLGWFSPGQVFVLDEYCARNGVRGCHRHLCYLRDLLERAENGAMIDPTLLHYSFAFCASHVHGNSQQMHVYLSGLPPNTDPEGSKTPSPPEPEAKKDTKKESKKRKDSKTQANQELKRPDGIGTVTVEEKERFEEIKERLRVLLENQITHFRYCFPFGRPEGALKATLSLLERVLMKDIVTPVPQEEVKTVIRKCL

SEQ ID NO: 10269 - protein, 311 aa, Homo sapiens
  Payload ID: 2059;
  Gene Symbol: CADPS;
  Gene Name: Ca++-dependent secretion activator;
  ENSP ID: ENSP00000418110
  MOD_RES (1)..(1): Any amino acid
XNDSYSCLGWFSPGQVFVLDEYCARNGVRGCHRHLCYLRDLLERAENGAMIDPTLLHYSFAFCASHVHGNRPDGIGTVTVEEKERFEEIKERLRVLLENQITHFRYCFPFGRPEGALKATLSLLERVLMKDIVTPVPQEEVKTVIRKCLEQAALVNYSRLSEYAKIEENQKDAENVGRLITPAKKLEDTIRLAELVIEVLQQNEEHHAEGKEAFAWWSDLMVEHAETFLSLFAVDMDAALEVQPPDTWDSFPLFQLLNDFLRTDYNLCNGKFHKHLQDLFAPLVVRYVDLMESSIAQSIHRGFERESWEPV

SEQ ID NO: 10270 - protein, 457 aa, Homo sapiens
  Payload ID: 2059;
  Gene Symbol: CADPS;
  Gene Name: Ca++-dependent secretion activator;
  Uniprot ID:  Q9ULU8;
  ENSP ID: ENSP00000418736
MLDPSSSEEESDEIVEEESGKEVLGSAPSGARLSPSRTSEGSAGSAGLGGGGAGAGAGVGAGGGGGSGASSGGGAGGLQPSSRAGGGRPSSPSPSVVSEKEKEELERLQKEEEERKKRLQLYVFVMRCIAYPFNAKQPTDMARRQQKISKQQLQTVKDRFQAFLNGETQIMADEAFMNAVQSYYEVFLKSDRVARMVQSGGCSANDSREVFKKHIEKRVRSLPEIDGLSKETVLSSWMAKFDAIYRGEEDPRKQQARMTASAASELILSKEQLYEMFQNILGIKKFEHQLLYNACQLDNPDEQAAQIRRELDGRLQMADQIARERKFPKFVSKEMENMYIEELKSSVNLLMANLESMPVSKGGEFKLQKLKRSHNASIIDMGEESENQLSKSDVVLSFSLEVVIMEVQGLKSLAPNRIVYCTMEVEGGEKLQTDQAEASKPTVIRRNRREQLPHSAI

SEQ ID NO: 10271 - protein, 345 aa, Homo sapiens
  Payload ID: 2059;
  Gene Symbol: CADPS;
  Gene Name: Ca++-dependent secretion activator;
  ENSP ID: ENSP00000418889
  MOD_RES (1)..(1): Any amino acid
XLPNVNLPNVNLPKVPNLPVNIPLGIPQMPTFSAPSWMAAIYDADNGSGTSEDLFWKLDALQTFIRDLHWPEEEFGKHLEQRLKLMASDMIESCVKRTRIAFEVKLQKTSRSTDFRVPQSICTMFNVMVDAKAQSTKLCSMEMGQEFAKMWHQYHSKIDELIEETVKEMITLLVAKFVTILEGVLAKLSRYDEGTLFSSFLSFTVKAASKYVDVPKPGMDVADAYVTFVRHSQDVLRDKVNEEMYIERLFDQWYNSSMNVICTWLTDRMDLQLHIYQLKTLIRMVKKTYRDFRLQGVLDSTLNSKTYETIRNRLTVEEATASVSEGGGLQGISMKDSDEEDEEDD

SEQ ID NO: 10272 - protein, 212 aa, Homo sapiens
  Payload ID: 2059;
  Gene Symbol: CADPS;
  Gene Name: Ca++-dependent secretion activator;
  ENSP ID: ENSP00000439528
QDLKIKLAVRMDKPQNMKHSGYLWAIGKNVWKRWKKRFFVLVQVSQYTFAMCSYREKKAEPQELLQLDGYTVDYTDPQPGLEGGRAFFNAVKEGDTVIFASDDEQDRILWVQAMYRATGQSHKPVPPTQVQKLNAKGGNVPQLDAPISQFSGLKDADRAQKHGMDEFISSNPCNFDHASLFEMVQRLTLDHRLNDSYSCLGWFSPGQVFVLD

SEQ ID NO: 10273 - protein, 222 aa, Homo sapiens
  Payload ID: 2059;
  Gene Symbol: CADPS;
  Gene Name: Ca++-dependent secretion activator;
  ENSP ID: ENSP00000482556
MFNVMVDAKAQSTKLCSMEMGQEFAKMWHQYHSKIDELIEETVKEMITLLVAKFVTILEGVLAKLSRYDEGTLFSSFLSFTVKAASKYVDVPKPGMDVADAYVTFVRHSQDVLRDKVNEEMYIERLFDQWYNSSMNVICTWLTDRMDLQLHIYQLKTLIRMVKKTYRDFRLQGVLDSTLNSKTYETIRNRLTVEEATASVSEGGGLQGISMKDSDEEDEEDD

SEQ ID NO: 10274 - protein, 1344 aa, Homo sapiens
  Payload ID: 2059;
  Gene Symbol: CADPS;
  Gene Name: Ca++-dependent secretion activator;
  ENSP ID: ENSP00000484365
MLDPSSSEEESDEIVEEESGKEVLGSAPSGARLSPSRTSEGSAGSAGLGGGGAGAGAGVGAGGGGGSGASSGGGAGGLQPSSRAGGGRPSSPSPSVVSEKEKEELERLQKEEEERKKRLQLYVFVMRCIAYPFNAKQPTDMARRQQKISKQQLQTVKDRFQAFLNGETQIMADEAFMNAVQSYYEVFLKSDRVARMVQSGGCSANDSREVFKKHIEKRVRSLPEIDGLSKETVLSSWMAKFDAIYRGEEDPRKQQARMTASAASELILSKEQLYEMFQNILGIKKFEHQLLYNACQLDNPDEQAAQIRRELDGRLQMADQIARERKFPKFVSKEMENMYIEELKSSVNLLMANLESMPVSKGGEFKLQKLKRSHNASIIDMGEESENQLSKSDVVLSFSLEVVIMEVQGLKSLAPNRIVYCTMEVEGGEKLQTDQAEASKPTWGTQGDFSTTHALPAVKVKLFTESTGVLALEDKELGRVILHPTPNSPKQSEWHKMTVSKNCPDQDLKIKLAVRMDKPQNMKHSGYLWAIGKNVWKRWKKRFFVLVQVSQYTFAMCSYREKKAEPQELLQLDGYTVDYTDPQPGLEGGRAFFNAVKEGDTVIFASDDEQDRILWVQAMYRATGQSHKPVPPTQVQKLNAKGGNVPQLDAPISQFYADRAQKHGMDEFISSNPCNFDHASLFEMVQRLTLDHRLNDSYSCLGWFSPGQVFVLDEYCARNGVRGCHRHLCYLRDLLERAENGAMIDPTLLHYSFAFCASHVHGNSQQMHVYLSGLPPNTDPEGSKTPSPPEPEAKKDTKKESKKRKDSKTQANQELKRPDGIGTVTVEEKERFEEIKERLRVLLENQITHFRYCFPFGRPEGALKATLSLLERVLMKDIVTPVPQEEVKTVIRKCLEQAALVNYSRLSEYAKIEENVGRLITPAKKLEDTIRLAELVIEVLQQNEEHHAEAFAWWSDLMVEHAETFLSLFAVDMDAALEVQPPDTWDSFPLFQLLNDFLRTDYNLCNGKFHKHLQDLFAPLVVRYVDLMESSIAQSIHRGFERESWEPVNNGSGTSEDLFWKLDALQTFIRDLHWPEEEFGKHLEQRLKLMASDMIESCVKRTRIAFEVKLQKTSRSTDFRVPQSICTMFNVMVDAKAQSTKLCSMEMGQEHQYHSKIDELIEETVKEMITLLVAKFVTILEGVLAKLSRYDEGTLFSSFLSFTVKAASKYVDVPKPGMDVADAYVTFVRHSQDVLRDKVNEEMYIERLFDQWYNSSMNVICTWLTDRMDLQLHIYQLKTLIRMVKKTYRDFRLQGVLDSTLNSKTYETIRNRLTVEEATASVSEGGGLQGISMKDSDEEDEEDD

SEQ ID NO: 10275 - protein, 1194 aa, Homo sapiens
  Payload ID: 2060;
  Gene Symbol: CADPS2;
  Gene Name: Ca++-dependent secretion activator 2;
  ENSP ID: ENSP00000325581
MARRQQKLNKQQLQLLKERFQAFLNGETQIVADEAFCNAVRSYYEVFLKSDRVARMVQSGGCSANDFREVFKKNIEKRVRSLPEIDGLSKETVLSSWIAKYDAIYRGEEDLCKQPNRMALSAVSELILSKEQLYEMFQQILGIKKLEHQLLYNACQLDNADEQAAQIRRELDGRLQLADKMAKERKFPKFIAKDMENMYIEELRSSVNLLMANLESLPVSKGGPEFKLQKLKRSQNSAFLDIGDENEIQLSKSDVVLSFTLEIVIMEVQGLKSVAPNRIVYCTMEVEGEKLQTDQAEASRPQWGTQGDFTTTHPRPVVKVKLFTESTGVLALEDKELGRVILYPTSNSSKSAELHRMVVPKNSQDSDLKIKLAVRMDKPAHMKHSGYLYALGQKVWKRWKKRYFVLVQVSQYTFAMCSYREKKSEPQELMQLEGYTVDYTDPHPGLQGGCMFFNAVKEGDTVIFASDDEQDRILWVQAMYRATGQSYKPVPAIQTQKLNPKGGTLHADAQLSGKDADRFQKHGMDEFISANPCKLDHAFLFRILQRQTLDHRLNDSYSCLGWFSPGQVFVLDEYCARYGVRGCHRHLCYLAELMEHSENGAVIDPTLLHYSFAFCASHVHGNRPDGIGTVSVEEKERFEEIKERLSSLLENQISHFRYCFPFGRPEGALKATLSLLERVLMKDIATPIPAEEVKKVVRKCLEKAALINYTRLTEYAKIEGPAEKETETMNQASPARKLEEILHLAELCIEVLQQNEEHHAEAFAWWPDLLAEHAEKFWALFTVDMDTALEAQPQDSWDSFPLFQLLNNFLRNDTLLCNGKFHKHLQEIFVPLVVRYVDLMESSIAQSIHRGFEQETWQPVKNIANSLPNVALPKVPSLPLNLPQIPNISTASWMPSLYESTNGSATSEDLFWKLDALQMFVFDLHWPEQEFAHHLEQRLKLMASDMLEACVKRTRTAFELKLQKASKTTDLRIPASVCTMFNVLVDAKKQSTKLCALDGGQEQQYHSKIDDLIDNSVKEIISLLVSKFVSVLEGVLSKLSRYDEGTFFSSILSFTVKAAAKYVDVPKPGMDLADTYIMFVRQNQDILREKVNEEMYIEKLFDQWYSSSMKVICVWLTDRLDLQLHIYQLKTLIKIVKKTYRDFRLQGVLEGTLNSKTYDTVHRRLTVEEATASVSEGGGLQGITMKDSDEEEEG

SEQ ID NO: 10276 - protein, 1294 aa, Homo sapiens [sequence omitted]

SEQ ID NO: 10277 - protein, 899 aa, Homo sapiens
  Payload ID: 2060;
  Gene Symbol: CADPS2;
  Gene Name: Ca++-dependent secretion activator 2;
  ENSP ID: ENSP00000380833
  MOD_RES (1)..(1): Any amino acid
XEIQLSKSDVVLSFTLEIVIMEVQGLKSVAPNRIVYCTMEVEGEKLQTDQAEASRPQWGTQGDFTTTHPRPVVKVKLFTESTGVLALEDKELGRVILYPTSNSSKSAELHRMVVPKNSQDSDLKIKLAVRMDKPAHMKHSGYLYALGQKVWKRWKKRYFVLVQVSQYTFAMCSYREKKSEPQELMQLEGYTVDYTDPHPGLQGGCMFFNAVKEGDTVIFASDDEQDRILWVQAMYRATGQSYKPVPAIQTQKLNPKGGTLHADAQLYADRFQKHGMDEFISANPCKLDHAFLFRILQRQTLDHRLNDSYSCLGWFSPGQVFVLDEYCARYGVRGCHRHLCYLAELMEHSENGAVIDPTLLHYSFAFCASHVHGNRPDGIGTVSVEEKERFEEIKERLSSLLENQISHFRYCFPFGRPEGALKATLSLLERVLMKDIATPIPAEEVKKVVRKCLEKAALINYTRLTEYAKIEETMNQASPARKLEEILHLAELCIEVLQQNEEHHAEAFAWWPDLLAEHAEKFWALFTVDMDTALEAQPQDSWDSFPLFQLLNNFLRNDTLLCNGKFHKHLQEIFVPLVVRYVDLMESSIAQSIHRGFEQETWQPVNNGSATSEDLFWKLDALQMFVFDLHWPEQEFAHHLEQRLKLMASDMLEACVKRTRTAFELKLQKASKTTDLRIPASVCTMFNVLVDAKKQSTKLCALDGGQEQQYHSKIDDLIDNSVKEIISLLVSKFVSVLEGVLSKLSRYDEGTFFSSILSFTVKAAAKYVDVPKPGMDLADTYIMFVRQNQDILREKVNEEMYIEKLFDQWYSSSMKVICVWLTDRLDLQLHIYQLKTLIKIVKKTYRDFRLQGVLEGTLNSKTYDTVHRRLTVEEATASVSEGGGLQGITMKDSDEEEEG

SEQ ID NO: 10278 - protein, 1296 aa, Homo sapiens
  Payload ID: 2060;
  Gene Symbol: CADPS2;
  Gene Name: Ca++-dependent secretion activator 2;
  Uniprot ID:  Q86UW7;
  ENSP ID: ENSP00000398481
MLDPSSSEEESDEGLEEESRDVLVAAGSSQRAPPAPTREGRRDAPGRAGGGGAARSVSPSPSVLSEGRDEPQRQLDDEQERRIRLQLYVFVVRCIAYPFNAKQPTDMARRQQKLNKQQLQLLKERFQAFLNGETQIVADEAFCNAVRSYYEVFLKSDRVARMVQSGGCSANDFREVFKKNIEKRVRSLPEIDGLSKETVLSSWIAKYDAIYRGEEDLCKQPNRMALSAVSELILSKEQLYEMFQQILGIKKLEHQLLYNACQLDNADEQAAQIRRELDGRLQLADKMAKERKFPKFIAKDMENMYIEELRSSVNLLMANLESLPVSKGGPEFKLQKLKRSQNSAFLDIGDENEIQLSKSDVVLSFTLEIVIMEVQGLKSVAPNRIVYCTMEVEGEKLQTDQAEASRPQWGTQGDFTTTHPRPVVKVKLFTESTGVLALEDKELGRVILYPTSNSSKSAELHRMVVPKNSQDSDLKIKLAVRMDKPAHMKHSGYLYALGQKVWKRWKKRYFVLVQVSQYTFAMCSYREKKSEPQELMQLEGYTVDYTDPHPGLQGGCMFFNAVKEGDTVIFASDDEQDRILWVQAMYRATGQSYKPVPAIQTQKLNPKGGTLHADAQLSGKDADRFQKHGMDEFISANPCKLDHAFLFRILQRQTLDHRLNDSYSCLGWFSPGQVFVLDEYCARYGVRGCHRHLCYLAELMEHSENGAVIDPTLLHYSFAFCASHVHGNRPDGIGTVSVEEKERFEEIKERLSSLLENQISHFRYCFPFGRPEGALKATLSLLERVLMKDIATPIPAEEVKKVVRKCLEKAALINYTRLTEYAKIEETMNQASPARKLEEILHLAELCIEVLQQNEEHHAEGREAFAWWPDLLAEHAEKFWALFTVDMDTALEAQPQDSWDSFPLFQLLNNFLRNDTLLCNGKFHKHLQEIFVPLVVRYVDLMESSIAQSIHRGFEQETWQPVKNIANSLPNVALPKVPSLPLNLPQIPNISTASWMPSLYESTNGSATSEDLFWKLDALQMFVFDLHWPEQEFAHHLEQRLKLMASDMLEACVKRTRTAFELKLQKASKTTDLRIPASVCTMFNVLVDAKKQSTKLCALDGGQEQQYHSKIDDLIDNSVKEIISLLVSKFVSVLEGVLSKLSRYDEGTFFSSILSFTVKAAAKYVDVPKPGMDLADTYIMFVRQNQDILREKVNEEMYIEKLFDQWYSSSMKVICVWLTDRLDLQLHIYQLKTLIKIVKKTYRDFRLQGVLEGTLNSKTYDTVHRRLTVEEATASVSEGGGLQGITMKDSDEEEEG

SEQ ID NO: 10279 - protein, 1255 aa, Homo sapiens
  Payload ID: 2060;
  Gene Symbol: CADPS2;
  Gene Name: Ca++-dependent secretion activator 2;
  Uniprot ID:  Q86UW7;
  ENSP ID: ENSP00000400401
MLDPSSSEEESDEGLEEESRDVLVAAGSSQRAPPAPTREGRRDAPGRAGGGGAARSVSPSPSVLSEGRDEPQRQLDDEQERRIRLQLYVFVVRCIAYPFNAKQPTDMARRQQKLNKQQLQLLKERFQAFLNGETQIVADEAFCNAVRSYYEVFLKSDRVARMVQSGGCSANDFREVFKKNIEKRVRSLPEIDGLSKETVLSSWIAKYDAIYRGEEDLCKQPNRMALSAVSELILSKEQLYEMFQQILGIKKLEHQLLYNACQLDNADEQAAQIRRELDGRLQLADKMAKERKFPKFIAKDMENMYIEELRSSVNLLMANLESLPVSKGGPEFKLQKLKRSQNSAFLDIGDENEIQLSKSDVVLSFTLEIVIMEVQGLKSVAPNRIVYCTMEVEGEKLQTDQAEASRPQWGTQGDFTTTHPRPVVKVKLFTESTGVLALEDKELGRVILYPTSNSSKSAELHRMVVPKNSQDSDLKIKLAVRMDKPAHMKHSGYLYALGQKVWKRWKKRYFVLVQVSQYTFAMCSYREKKSEPQELMQLEGYTVDYTDPHPGLQGGCMFFNAVKEGDTVIFASDDEQDRILWVQAMYRATGQSYKPVPAIQTQKLNPKGGTLHADAQLYADRFQKHGMDEFISANPCKLDHAFLFRILQRQTLDHRLNDSYSCLGWFSPGQVFVLDEYCARYGVRGCHRHLCYLAELMEHSENGAVIDPTLLHYSFAFCASHVHGNRPDGIGTVSVEEKERFEEIKERLSSLLENQISHFRYCFPFGRPEGALKATLSLLERVLMKDIATPIPAEEVKKVVRKCLEKAALINYTRLTEYAKIEETMNQASPARKLEEILHLAELCIEVLQQNEEHHAEAFAWWPDLLAEHAEKFWALFTVDMDTALEAQPQDSWDSFPLFQLLNNFLRNDTLLCNGKFHKHLQEIFVPLVVRYVDLMESSIAQSIHRGFEQETWQPVNNGSATSEDLFWKLDALQMFVFDLHWPEQEFAHHLEQRLKLMASDMLEACVKRTRTAFELKLQKASKTTDLRIPASVCTMFNVLVDAKKQSTKLCALDGGQEFGSQWQQYHSKIDDLIDNSVKEIISLLVSKFVSVLEGVLSKLSRYDEGTFFSSILSFTVKAAAKYVDVPKPGMDLADTYIMFVRQNQDILREKVNEEMYIEKLFDQWYSSSMKVICVWLTDRLDLQLHIYQLKTLIKIVKKTYRDFRLQGVLEGTLNSKTYDTVHRRLTVEEATASVSEGGGLQGITMKDSDEEEEG

SEQ ID NO: 10280 - protein, 490 aa, Homo sapiens
  Payload ID: 2060;
  Gene Symbol: CADPS2;
  Gene Name: Ca++-dependent secretion activator 2;
  ENSP ID: ENSP00000419418
  MOD_RES (1)..(1): Any amino acid
XYTRLTEYAKIEGPAEKETETMNQASPARKLEEILHLAELCIEVLQQNEEHHAEGREAFAWWPDLLAEHAEKFWALFTVDMDTALEAQPQDSWDSFPLFQLLNNFLRNDTLLCNGKFHKHLQEIFVPLVVRYVDLMESSIAQSIHRGFEQETWQPVKNIANSLPNVALPKVPSLPLNLPQIPNISTASWMPSLYESTNGSATSEDLFWKLDALQMFVFDLHWPEQEFAHHLEQRLKLMASDMLEACVKRTRTAFELKLQKASKTTDLRIPASVCTMFNVLVDAKKQSTKLCALDGGQEQQYHSKIDDLIDNSVKEIISLLVSKFVSVLEGVLSKLSRYDEGTFFSSILSFTVKAAAKYVDVPKPGMDLADTYIMFVRQNQDILREKVNEEMYIEKLFDQWYSSSMKVICVWLTDRLDLQLHIYQLKTLIKIVKKTYRDFRLQGVLEGTLNSKTYDTVHRRLTVEEATASVSEGGGLQGITMKDSDEEEEG

SEQ ID NO: 10281 - protein, 1301 aa, Homo sapiens [sequence omitted]

SEQ ID NO: 10282 - protein, 1223 aa, Homo sapiens
  Payload ID: 2061;
  Gene Symbol: CACHD1;
  Gene Name: cache domain containing 1;
  ENSP ID: ENSP00000290039
MRRLAAEELGVVTMQRIFNSFVYTEKISNGESEVQQLAKKIREKFNRYLDVVNRNKQVVEASYTAHLTSPLTAIQDCCTIPPSMMEFDGNFNTNVSRTISCDRLSTTVNSRAFNPGRDLNSVLADNLKSNPGIKWQYFSSEEGIFTVFPAHKFRCKGSYEHRSRPIYVSTVRPQSKHIVVILDHGASVTDTQLQIAKDAAQVILSAIDEHDKISVLTVADTVRTCSLDQCYKTFLSPATSETKRKMSTFVSSVKSSDSPTQHAVGFQKAFQLIRSTNNNTKFQANTDMVIIYLSAGITSKDSSEEDKKATLQVINEENSFLNNSVMILTYALMNDGVTGLKELAFLRDLAEQNSGKYGVPDRMALPVIKGSMMVLNQLSNLETTVGRFYTNLPNRMIDEAVFSLPFSDEMGDGLIMTVSKPCYFGNLLLGIVGVDVNLAYILEDVTYYQDSLASYTFLIDDKGYTLMHPSLTRPYLLSEPPLHTDIIHYENIPKFELVRQNILSLPLGSQIIAVPVNSSLSWHINKLRETGKEAYNVSYAWKMVQDTSFILCIVVIQPEIPVKQLKNLNTVPSSKLLYHRLDLLGQPSACLHFKQLATLESPTIMLSAGSFSSPYEHLSQPETKRMVEHYTAYLSDNTRLIANPGLKFSVRNEVMATSHVTDEWMTQMEMSSLNTYIVRRYIATPNGVLRIYPGSLMDKAFDPTRRQWYLHAVANPGLISLTGPYLDVGGAGYVVTISHTIHSSSTQLSSGHTVAVMGIDFTLRYFYKVLMDLLPVCNQDGGNKIRCFIMEDRGYLVAHPTLIDPKGHAPVEQQHITHKEPLVANDILNHPNFVKKNLCNSFSDRTVQRFYKFNTSLAGDLTNLVHGSHCSKYRLARIPGTNAFVGIVNETCDSLAFCACSMVDRLCLNCHRMEQNECECPCECPLEVNECTGNLTNAENRNPSCEVHQEPVTYTAIDPGLQDALHQCVNSRCSQRLESGDCFGVLDCEWCMVDSDGKTHLDKPYCAPQKECFGGIVGAKSPYVDDMGAIGDEVITLNMIKSAPVGPVAGGIMGCIMVLVLAVYAYRHQIHRRSHQHMSPLAAQEMSVRMSNLENDRDERDDDSHEDRGIISNTRFIAAVIERHAHSPERRRRYWGRSGTESDHGYSTMSPQEDSENPPCNNDPLSAGVDVGNHDEDLDLDTPPQTAALLSHKFHHYRSHHPTLHHSHHLQAAVTVHTVDAEC

SEQ ID NO: 10283 - protein, 758 aa, Homo sapiens
  Payload ID: 2062;
  Gene Symbol: CACTIN;
  Gene Name: cactin, spliceosome C complex subunit;
  Uniprot ID:  Q8WUQ7;
  ENSP ID: ENSP00000221899
MGRDTRSRSRSAGRRGRRRQSQSGSRSRSRSHGRRNRRRREDEGRRRRRRRSRERRSDSEEERWQRSGMRSRSPPRPKWHSRDGSSQSDSGEEQSRGQWARRRRRARSWSPSSSASSSASPGRSQSPRAAAAALSQQQSLQERLRLREERKQQEELMKAFETPEEKRARRLAKKEAKERKKREKMGWGEEYMGYTNTDNPFGDNNLLGTFIWNKALEKKGISHLEEKELKERNKRIQEDNRLELQKVKQLRLEREREKAMREQELEMLQREKEAEHFKTWEEQEDNFHLQQAKLRSKIRIRDGRAKPIDLLAKYISAEDDDLAVEMHEPYTFLNGLTVADMEDLLEDIQVYMELEQGKNADFWRDMTTITEDEISKLRKLEASGKGPGERREGVNASVSSDVQSVFKGKTYNQLQVIFQGIEGKIRAGGPNLDMGYWESLLQQLRAHMARARLRERHQDVLRQKLYKLKQEQGVESEPLFPILKQEPQSPSRSLEPEDAAPTPPGPSSEGGPAEAEVDGATPTEGDGDGDGEGEGEGEAVLMEEDLIQQSLDDYDAGRYSPRLLTAHELPLDAHVLEPDEDLQRLQLSRQQLQVTGDASESAEDIFFRRAKEGMGQDEAQFSVEMPLTGKAYLWADKYRPRKPRFFNRVHTGFEWNKYNQTHYDFDNPPPKIVQGYKFNIFYPDLIDKRSTPEYFLEACADNKDFAILRFHAGPPYEDIAFKIVNREWEYSHRHGFRCQFANGIFQLWFHFKRYRYRR

SEQ ID NO: 10284 - protein, 758 aa, Homo sapiens; identical to SEQ ID NO: 10283
  Payload ID: 2062;
  Gene Symbol: CACTIN;
  Gene Name: cactin, spliceosome C complex subunit;
  Uniprot ID:  Q8WUQ7;
  ENSP ID: ENSP00000248420

SEQ ID NO: 10285 - protein, 758 aa, Homo sapiens; identical to SEQ ID NO: 10283
  Payload ID: 2062;
  Gene Symbol: CACTIN;
  Gene Name: cactin, spliceosome C complex subunit;
  Uniprot ID:  Q8WUQ7;
  ENSP ID: ENSP00000415078

SEQ ID NO: 10286 - protein, 117 aa, Homo sapiens
  Payload ID: 2062;
  Gene Symbol: CACTIN;
  Gene Name: cactin, spliceosome C complex subunit;
  ENSP ID: ENSP00000464898
KPRFFNRVHTGFEWNKYNQTHYDFDNPPPKIVQGYKFNIFYPDLIDKRSTPEYFLEACADNKDFAILRFHAGPPYEDIAFKIVNREWEYSHRHGFRCQFANGIFQLWFHFKRYRYRR

SEQ ID NO: 10287 - protein, 758 aa, Homo sapiens; identical to SEQ ID NO: 10283
  Payload ID: 2062;
  Gene Symbol: CACTIN;
  Gene Name: cactin, spliceosome C complex subunit;
  Uniprot ID:  Q8WUQ7;
  ENSP ID: ENSP00000465751

SEQ ID NO: 10288 - protein, 141 aa, Homo sapiens
  Payload ID: 2062;
  Gene Symbol: CACTIN;
  Gene Name: cactin, spliceosome C complex subunit;
  ENSP ID: ENSP00000466600
  MOD_RES (1)..(1): Any amino acid
XKYISAEDDDLAVEMHEPYTFLNGLTVADMEDLLEDIQVYMELEQGKNADFWRDMTTITEDEISKLRKLEASGKGPGERREGVNASVSSDVQSVFKGKTYNQLQVIFQGIEGKIRAGGPNLDMGYWESLLQQLRAHMARAR

SEQ ID NO: 10289 - protein, 291 aa, Homo sapiens
  Payload ID: 2062;
  Gene Symbol: CACTIN;
  Gene Name: cactin, spliceosome C complex subunit;
  ENSP ID: ENSP00000467149
  MOD_RES (1)..(1): Any amino acid
XKQEQGVESEPLFPILKQEPQSPSRSLEPEDAAPTPPGPSSEGGPAEAEVDGATPTEGDGDGDGEGEGEGEAVLMEEDLIQQSLDDYDAGRYSPRLLTAHELPLDAHVLEPDEDLQRLQLSRQQLQVTGDASESAEDIFFRRAKEGMGQDEAQFSVEMPLTGKAYLWADKYRPRKPRFFNRVHTGFEWNKYNQTHYDFDNPPPKIVQGYKFNIFYPDLIDKRSTPEYFLEACADNKDFAILRFHAGPPYEDIAFKIVNREWEYSHRHGFRCQFANGIFQLWFHFKRYRYRR

SEQ ID NO: 10290 - protein, 130 aa, Homo sapiens
  Payload ID: 2062;
  Gene Symbol: CACTIN;
  Gene Name: cactin, spliceosome C complex subunit;
  ENSP ID: ENSP00000467788
DLAVEMHEPYTFLNGLTVADMEDLLEDIQVYMELEQGKNADFWRDMTTITEDEISKLRKLEASGKGPGHRGQNPRWWPQPGHGLLGEPPAAASCPHGTGPVSTRLRERHQDVLRQKLYKLKQEQGVESEP

SEQ ID NO: 10291 - protein, 882 aa, Homo sapiens
  Payload ID: 2063;
  Gene Symbol: CDH1;
  Gene Name: cadherin 1, type 1;
  Uniprot ID:  P12830;
  ENSP ID: ENSP00000261769
MGPWSRSLSALLLLLQVSSWLCQEPEPCHPGFDAESYTFTVPRRHLERGRVLGRVNFEDCTGRQRTAYFSLDTRFKVGTDGVITVKRPLRFHNPQIHFLVYAWDSTYRKFSTKVTLNTVGHHHRPPPHQASVSGIQAELLTFPNSSPGLRRQKRDWVIPPISCPENEKGPFPKNLVQIKSNKDKEGKVFYSITGQGADTPPVGVFIIERETGWLKVTEPLDRERIATYTLFSHAVSSNGNAVEDPMEILITVTDQNDNKPEFTQEVFKGSVMEGALPGTSVMEVTATDADDDVNTYNAAIAYTILSQDPELPDKNMFTINRNTGVISVVTTGLDRESFPTYTLVVQAADLQGEGLSTTATAVITVTDTNDNPPIFNPTTYKGQVPENEANVVITTLKVTDADAPNTPAWEAVYTILNDDGGQFVVTTNPVNNDGILKTAKGLDFEAKQQYILHVAVTNVVPFEVSLTTSTATVTVDVLDVNEAPIFVPPEKRVEVSEDFGVGQEITSYTAQEPDTFMEQKITYRIWRDTANWLEINPDTGAISTRAELDREDFEHVKNSTYTALIIATDNGSPVATGTGTLLLILSDVNDNAPIPEPRTIFFCERNPKPQVINIIDADLPPNTSPFTAELTHGASANWTIQYNDPTQESIILKPKMALEVGDYKINLKLMDNQNKDQVTTLEVSVCDCEGAAGVCRKAQPVEAGLQIPAILGILGGILALLILILLLLLFLRRRAVVKEPLLPPEDDTRDNVYYYDEEGGGEEDQDFDLSQLHRGLDARPEVTRNDVAPTLMSVPRYLPRPANPDEIGNFIDENLKAADTDPTAPPYDSLLVFDYEGSGSEAASLSSLNSSESDKDQDYDYLNEWGNRFKKLADMYGGGEDD

SEQ ID NO: 10292 - protein, 821 aa, Homo sapiens
  Payload ID: 2063;
  Gene Symbol: CDH1;
  Gene Name: cadherin 1, type 1;
  Uniprot ID:  P12830;
  ENSP ID: ENSP00000414946
MGPWSRSLSALLLLLQVSSWLCQEPEPCHPGFDAESYTFTVPRRHLERGRVLGRVNFEDCTGRQRTAYFSLDTRFKVGTDGVITVKRPLRFHNPQIHFLVYAWDSTYRKFSTKVTLNTVGHHHRPPPHQASVSGIQAELLTFPNSSPGLRRQKRDWVIPPISCPENEKGPFPKNLVQIKSNKDKEGKVFYSITGQGADTPPVGVFIIERETGWLKVTEPLDRERIATYTLFSHAVSSNGNAVEDPMEILITVTDQNDNKPEFTQEVFKGSVMEGALPGTSVMEVTATDADDDVNTYNAAIAYTILSQDPELPDKNMFTINRNTGVISVVTTGLDRESFPTYTLVVQAADLQGEGLSTTATAVITVTDTNDNPPIFNPTTGLDFEAKQQYILHVAVTNVVPFEVSLTTSTATVTVDVLDVNEAPIFVPPEKRVEVSEDFGVGQEITSYTAQEPDTFMEQKITYRIWRDTANWLEINPDTGAISTRAELDREDFEHVKNSTYTALIIATDNGSPVATGTGTLLLILSDVNDNAPIPEPRTIFFCERNPKPQVINIIDADLPPNTSPFTAELTHGASANWTIQYNDPTQESIILKPKMALEVGDYKINLKLMDNQNKDQVTTLEVSVCDCEGAAGVCRKAQPVEAGLQIPAILGILGGILALLILILLLLLFLRRRAVVKEPLLPPEDDTRDNVYYYDEEGGGEEDQDFDLSQLHRGLDARPEVTRNDVAPTLMSVPRYLPRPANPDEIGNFIDENLKAADTDPTAPPYDSLLVFDYEGSGSEAASLSSLNSSESDKDQDYDYLNEWGNRFKKLADMYGGGEDD

SEQ ID NO: 10293 - protein, 537 aa, Homo sapiens
  Payload ID: 2063;
  Gene Symbol: CDH1;
  Gene Name: cadherin 1, type 1;
  ENSP ID: ENSP00000454782
MGPWSRSLSALLLLLQVSSWLCQEPEPCHPGFDAESYTFTVPRRHLERGRVLGRVNFEDCTGRQRTAYFSLDTRFKVGTDGVITVKRPLRFHNPQIHFLVYAWDSTYRKFSTKVTLNTVGHHHRPPPHQASVSGIQAELLTFPNSSPGLRRQKRDWVIPPISCPENEKGPFPKNLVQIKSNKDKEGKVFYSITGQGADTPPVGVFIIERETGWLKVTEPLDRERIATYTLFSHAVSSNGNAVEDPMEILITVTDQNDNKPEFTQEVFKGSVMEGALPGTSVMEVTATDADDDVNTYNAAIAYTILSQDPELPDKNMFTINRNTGVISVVTTGLDRESFPTYTLVVQAADLQGEGLSTTATAVITVTDTNDNPPIFNPTTYKGQVPENEANVVITTLKVTDADAPNTPAWEAVYTILNDDGGQFVVTTNPVNNDGILKTAKGLDFEAKQQYILHVAVTNVVPFEVSLTTSTATVTVDVLDVNEAPIFVPPEKRVEVSEDFGVGQEITSYTAQEPDTFMEQKITFSSCYWNRDTSADPV

SEQ ID NO: 10294 - protein, 414 aa, Homo sapiens
  Payload ID: 2063;
  Gene Symbol: CDH1;
  Gene Name: cadherin 1, type 1;
  ENSP ID: ENSP00000458139
MGPWSRSLSALLLLLQVSSWLCQEPEPCHPGFDAESYTFTVPRRHLERGRVLGRVNFEDCTGRQRTAYFSLDTRFKVGTDGVITVKRPLRFHNPQIHFLVYAWDSTYRKFSTKVTLNTVGHHHRPPPHQASVSGIQAELLTFPNSSPGLRRQKRDWVIPPISCPENEKGPFPKNLVQLFSHAVSSNGNAVEDPMEILITVTDQNDNKPEFTQEVFKGSVMEGALPGTSVMEVTATDADDDVNTYNAAIAYTILSQDPELPDKNMFTINRNTGVISVVTTGLDRESFPTYTLVVQAADLQGEGLSTTATAVITVTDTNDNPPIFNPTTYKGQVPENEANVVITTLKVTDADAPNTPAWEAVYTILNDDGGQFVVTTNPVNNDGILKTAKVCMVPGKMQKLASSQLFIPLSPGLGF

SEQ ID NO: 10295 - protein, 155 aa, Homo sapiens
  Payload ID: 2063;
  Gene Symbol: CDH1;
  Gene Name: cadherin 1, type 1;
  ENSP ID: ENSP00000463170
  MOD_RES (1)..(1): Any amino acid
XTDGVITVKRPLRFHNPQIHFLVYAWDSTYRKFSTKVTLNTVGHHHRPPPHQASVSGIQAELLTFPNSSPGLRRQKRDWVIPPISCPENEKGPFPKNLVQIKSNKDKEGKVFYSITGQGADTPPVGVFIIERETGWLKVTEPLDRERIATYTEPL

SEQ ID NO: 10296 - protein, 647 aa, Homo sapiens [sequence omitted]

SEQ ID NO: 10297 - protein, 647 aa, Homo sapiens
  Payload ID: 2063;
  Gene Symbol: CDH1;
  Gene Name: cadherin 1, type 1;
  ENSP ID: ENSP00000480664
MGPWSRSLSALLLLLQVSSWLCQEPEPCHPGFDAESYTFTVPRRHLERGRVLGRVNFEDCTGRQRTAYFSLDTRFKVGTDGVITVKRPLRFHNPQIHFLVYAWDSTYRKFSTKVTLNTVGHHHRPPPHQASVSGIQAELLTFPNSSPGLRRQKRDWVIPPISCPENEKGPFPKNLVQIKSNKDKEGKVFYSITGQGADTPPVGVFIIERETGWLKVTEPLDRERIATYTLFSHAVSSNGNAVEDPMEILITVTDQNDNKPEFTQEVFKGSVMEGALPGTSVMEVTATDADDDVNTYNAAIAYTILSQDPELPDKNMFTINRNTGVISVVTTGLDRESFPTYTLVVQAADLQGEGLSTTATAVITVTDTNDNPPIFNPTTYKGQVPENEANVVITTLKVTDADAPNTPAWEAVYTILNDDGGQFVVTTNPVNNDGILKTAKGLDFEAKQQYILHVAVTNVVPFEVSLTTSTATVTVDVLDVNEAPIFVPPEKRVEVSEDFGVGQEITSYTAQEPDTFMEQKITYRIWRDTANWLEINPDTGAISTRAELDREDFEHVKNSTYTALIIATDNGSPVATGTGTLLLILSDVNDNAPIPEPRTIFFCERNPKPQVINIIDADLPPNLASQSIGITDMSHCTCPAPQLPAIF

SEQ ID NO: 10298 - protein, 903 aa, Homo sapiens
  Payload ID: 2063;
  Gene Symbol: CDH1;
  Gene Name: cadherin 1, type 1;
  ENSP ID: ENSP00000481063
MGPWSRSLSALLLLLQVSSWLCQEPEPCHPGFDAESYTFTVPRRHLERGRVLGRVNFEDCTGRQRTAYFSLDTRFKVGTDGVITVKRPLRFHNPQIHFLVYAWDSTYRKFSTKVTLNTVGHHHRPPPHQASVSGIQAELLTFPNSSPGLRRQKRDWVIPPISCPENEKGPFPKNLVQIKSNKDKEGKVFYSITGQGADTPPVGVFIIERETGWLKVTEPLDRERIATYTLFSHAVSSNGNAVEDPMEILITVTDQNDNKPEFTQEVFKGSVMEGALPGTSVMEVTATDADDDVNTYNAAIAYTILSQDPELPDKNMFTINRNTGVISVVTTGLDRESFPTYTLVVQAADLQGEGLSTTATAVITVTDTNDNPPIFNPTTYKGQVPENEANVVITTLKVTDADAPNTPAWEAVYTILNDDGGQFVVTTNPVNNDGILKTAKVWYLARCRNWHPHSCSYPCPLGLDFEAKQQYILHVAVTNVVPFEVSLTTSTATVTVDVLDVNEAPIFVPPEKRVEVSEDFGVGQEITSYTAQEPDTFMEQKITYRIWRDTANWLEINPDTGAISTRAELDREDFEHVKNSTYTALIIATDNGSPVATGTGTLLLILSDVNDNAPIPEPRTIFFCERNPKPQVINIIDADLPPNTSPFTAELTHGASANWTIQYNDPTQESIILKPKMALEVGDYKINLKLMDNQNKDQVTTLEVSVCDCEGAAGVCRKAQPVEAGLQIPAILGILGGILALLILILLLLLFLRRRAVVKEPLLPPEDDTRDNVYYYDEEGGGEEDQDFDLSQLHRGLDARPEVTRNDVAPTLMSVPRYLPRPANPDEIGNFIDENLKAADTDPTAPPYDSLLVFDYEGSGSEAASLSSLNSSESDKDQDYDYLNEWGNRFKKLADMYGGGEDD

SEQ ID NO: 10299 - protein, 788 aa, Homo sapiens
  Payload ID: 2064;
  Gene Symbol: CDH10;
  Gene Name: cadherin 10, type 2 (T2-cadherin);
  Uniprot ID:  Q9Y6N8;
  ENSP ID: ENSP00000264463
MTIHQFLLLFLFWVCLPHFCSPEIMFRRTPVPQQRILSSRVPRSDGKILHRQKRGWMWNQFFLLEEYTGSDYQYVGKLHSDQDKGDGSLKYILSGDGAGTLFIIDEKTGDIHATRRIDREEKAFYTLRAQAINRRTLRPVEPESEFVIKIHDINDNEPTFPEEIYTASVPEMSVVGTSVVQVTATDADDPSYGNSARVIYSILQGQPYFSVEPETGIIRTALPNMNRENREQYQVVIQAKDMGGQMGGLSGTTTVNITLTDVNDNPPRFPQNTIHLRVLESSPVGTAIGSVKATDADTGKNAEVEYRIIDGDGTDMFDIVTEKDTQEGIITVKKPLDYESRRLYTLKVEAENTHVDPRFYYLGPFKDTTIVKISIEDVDEPPVFSRSSYLFEVHEDIEVGTIIGTVMARDPDSISSPIRFSLDRHTDLDRIFNIHSGNGSLYTSKPLDRELSQWHNLTVIAAEINNPKETTRVAVFVRILDVNDNAPQFAVFYDTFVCENARPGQLIQTISAVDKDDPLGGQKFFFSLAAVNPNFTVQDNEDNTARILTRKNGFNRHEISTYLLPVVISDNDYPIQSSTGTLTIRVCACDSQGNMQSCSAEALLLPAGLSTGALIAILLCIIILLVIVVLFAALKRQRKKEPLILSKEDIRDNIVSYNDEGGGEEDTQAFDIGTLRNPAAIEEKKLRRDIIPETLFIPRRTPTAPDNTDVRDFINERLKEHDLDPTAPPYDSLATYAYEGNDSIAESLSSLESGTTEGDQNYDYLREWGPRFNKLAEMYGGGESDKDS

SEQ ID NO: 10300 - protein, 436 aa, Homo sapiens
  Payload ID: 2064;
  Gene Symbol: CDH10;
  Gene Name: cadherin 10, type 2 (T2-cadherin);
  ENSP ID: ENSP00000425653
MTIHQFLLLFLFWVCLPHFCSPEIMFRRTPVPQQRILSSRVPRSDGKILHRQKRGWMWNQFFLLEEYTGSDYQYVGKLHSDQDKGDGSLKYILSGDGAGTLFIIDEKTGDIHATRRIDREEKAFYTLRAQAINRRTLRPVEPESEFVIKIHDINDNEPTFPEEIYTASVPEMSVVGTSVVQVTATDADDPSYGNSARVIYSILQGQPYFSVEPETGIIRTALPNMNRENREQYQVVIQAKDMGGQMGGLSGTTTVNITLTDVNDNPPRFPQNTIHLRVLESSPVGTAIGSVKATDADTGKNAEVEYRIIDGDGTDMFDIVTEKDTQEGIITVKKPLDYESRRLYTLKVEAENTHVDPRFYYLGPFKDTTIVKISIEDVDEPPVFSRSSYLFEVHEDIEVGTIIGTVMARDPDSISSPIRQSQRDNTRGCFCENFGC

SEQ ID NO: 10301 - protein, 796 aa, Homo sapiens
  Payload ID: 2065;
  Gene Symbol: CDH11;
  Gene Name: cadherin 11, type 2, OB-cadherin (osteoblast);
  Uniprot ID:  P55287;
  ENSP ID: ENSP00000268603
MKENYCLQAALVCLGMLCHSHAFAPERRGHLRPSFHGHHEKGKEGQVLQRSKRGWVWNQFFVIEEYTGPDPVLVGRLHSDIDSGDGNIKYILSGEGAGTIFVIDDKSGNIHATKTLDREERAQYTLMAQAVDRDTNRPLEPPSEFIVKVQDINDNPPEFLHETYHANVPERSNVGTSVIQVTASDADDPTYGNSAKLVYSILEGQPYFSVEAQTGIIRTALPNMDREAKEEYHVVIQAKDMGGHMGGLSGTTKVTITLTDVNDNPPKFPQSVYQMSVSEAAVPGEEVGRVKAKDPDIGENGLVTYNIVDGDGMESFEITTDYETQEGVIKLKKPVDFETKRAYSLKVEAANVHIDPKFISNGPFKDTVTVKISVEDADEPPMFLAPSYIHEVQENAAAGTVVGRVHAKDPDAANSPIRYSIDRHTDLDRFFTINPEDGFIKTTKPLDREETAWLNITVFAAEIHNRHQEAKVPVAIRVLDVNDNAPKFAAPYEGFICESDQTKPLSNQPIVTISADDKDDTANGPRFIFSLPPEIIHNPNFTVRDNRDNTAGVYARRGGFSRQKQDLYLLPIVISDGGIPPMSSTNTLTIKVCGCDVNGALLSCNAEAYILNAGLSTGALIAILACIVILLVIVVLFVTLRRQKKEPLIVFEEEDVRENIITYDDEGGGEEDTEAFDIATLQNPDGINGFIPRKDIKPEYQYMPRPGLRPAPNSVDVDDFINTRIQEADNDPTAPPYDSIQIYGYEGRGSVAGSLSSLESATTDSDLDYDYLQNWGPRFKKLADLYGSKDTFDDDS

SEQ ID NO: 10302 - protein, 693 aa, Homo sapiens
  Payload ID: 2065;
  Gene Symbol: CDH11;
  Gene Name: cadherin 11, type 2, OB-cadherin (osteoblast);
  Uniprot ID:  P55287;
  ENSP ID: ENSP00000377711
MKENYCLQAALVCLGMLCHSHAFAPERRGHLRPSFHGHHEKGKEGQVLQRSKRGWVWNQFFVIEEYTGPDPVLVGRLHSDIDSGDGNIKYILSGEGAGTIFVIDDKSGNIHATKTLDREERAQYTLMAQAVDRDTNRPLEPPSEFIVKVQDINDNPPEFLHETYHANVPERSNVGTSVIQVTASDADDPTYGNSAKLVYSILEGQPYFSVEAQTGIIRTALPNMDREAKEEYHVVIQAKDMGGHMGGLSGTTKVTITLTDVNDNPPKFPQSVYQMSVSEAAVPGEEVGRVKAKDPDIGENGLVTYNIVDGDGMESFEITTDYETQEGVIKLKKPVDFETKRAYSLKVEAANVHIDPKFISNGPFKDTVTVKISVEDADEPPMFLAPSYIHEVQENAAAGTVVGRVHAKDPDAANSPIRYSIDRHTDLDRFFTINPEDGFIKTTKPLDREETAWLNITVFAAEIHNRHQEAKVPVAIRVLDVNDNAPKFAAPYEGFICESDQTKPLSNQPIVTISADDKDDTANGPRFIFSLPPEIIHNPNFTVRDNRDNTAGVYARRGGFSRQKQDLYLLPIVISDGGIPPMSSTNTLTIKVCGCDVNGALLSCNAEAYILNAGLSTGALIAILACIVILLGCPSLMEPPSPREDMRLLYLGFQLMLFSYVKVNRRFCLLGVFIKLPFLYVVATESPTTLTSL

SEQ ID NO: 10303 - protein, 53 aa, Homo sapiens
  Payload ID: 2065;
  Gene Symbol: CDH11;
  Gene Name: cadherin 11, type 2, OB-cadherin (osteoblast);
  ENSP ID: ENSP00000455120
MKENYCLQAALVCLGMLCHSHAFAPERRGHLRPSFHGHHEKGKEGQVLQRSKR

SEQ ID NO: 10304 - protein, 70 aa, Homo sapiens
  Payload ID: 2065;
  Gene Symbol: CDH11;
  Gene Name: cadherin 11, type 2, OB-cadherin (osteoblast);
  ENSP ID: ENSP00000455420
MKENYCLQAALVCLGMLCHSHAFAPERRGHLRPSFHGHHEKGKEGQVLQRSKRGWVWNQFFVIEEYTGPD

SEQ ID NO: 10305 - protein, 34 aa, Homo sapiens
  Payload ID: 2065;
  Gene Symbol: CDH11;
  Gene Name: cadherin 11, type 2, OB-cadherin (osteoblast);
  ENSP ID: ENSP00000455697
MKENYCLQAALVCLGMLCHSHAFAPERRGHLRPS

SEQ ID NO: 10306 - protein, 222 aa, Homo sapiens
  Payload ID: 2065;
  Gene Symbol: CDH11;
  Gene Name: cadherin 11, type 2, OB-cadherin (osteoblast);
  ENSP ID: ENSP00000455779
MKENYCLQAALVCLGMLCHSHAFAPERRGHLRPSFHGHHEKGKEGQVLQRSKRGWVWNQFFVIEEYTGPDPVLVGRLHSDIDSGDGNIKYILSGEGAGTIFVIDDKSGNIHATKTLDREERAQYTLMAQAVDRDTNRPLEPPSEFIVKVQDINDNPPEFLHETYHANVPERSNVGTSVIQVTASDADDPTYGNSAKLVYSILEGQPYFSVEAQTGIIRTALP

SEQ ID NO: 10307 - protein, 22 aa, Homo sapiens
  Payload ID: 2065;
  Gene Symbol: CDH11;
  Gene Name: cadherin 11, type 2, OB-cadherin (osteoblast);
  ENSP ID: ENSP00000456110
MKENYCLQAALVCLGMLCHSHA

SEQ ID NO: 10308 - protein, 65 aa, Homo sapiens
  Payload ID: 2065;
  Gene Symbol: CDH11;
  Gene Name: cadherin 11, type 2, OB-cadherin (osteoblast);
  ENSP ID: ENSP00000456772
MKENYCLQAALVCLGMLCHSHAFAPERRGHLRPSFHGHHEKGKEGQVLQRSKRGWVWNQFFVIEE

SEQ ID NO: 10309 - protein, 670 aa, Homo sapiens
  Payload ID: 2065;
  Gene Symbol: CDH11;
  Gene Name: cadherin 11, type 2, OB-cadherin (osteoblast);
  ENSP ID: ENSP00000457812
MAQAVDRDTNRPLEPPSEFIVKVQDINDNPPEFLHETYHANVPERSNVGTSVIQVTASDADDPTYGNSAKLVYSILEGQPYFSVEAQTGIIRTALPNMDREAKEEYHVVIQAKDMGGHMGGLSGTTKVTITLTDVNDNPPKFPQSVYQMSVSEAAVPGEEVGRVKAKDPDIGENGLVTYNIVDGDGMESFEITTDYETQEGVIKLKKPVDFETKRAYSLKVEAANVHIDPKFISNGPFKDTVTVKISVEDADEPPMFLAPSYIHEVQENAAAGTVVGRVHAKDPDAANSPIRYSIDRHTDLDRFFTINPEDGFIKTTKPLDREETAWLNITVFAAEIHNRHQEAKVPVAIRVLDVNDNAPKFAAPYEGFICESDQTKPLSNQPIVTISADDKDDTANGPRFIFSLPPEIIHNPNFTVRDNRDNTAGVYARRGGFSRQKQDLYLLPIVISDGGIPPMSSTNTLTIKVCGCDVNGALLSCNAEAYILNAGLSTGALIAILACIVILLVIVVLFVTLRRQKKEPLIVFEEEDVRENIITYDDEGGGEEDTEAFDIATLQNPDGINGFIPRKDIKPEYQYMPRPGLRPAPNSVDVDDFINTRIQEADNDPTAPPYDSIQIYGYEGRGSVAGSLSSLESATTDSDLDYDYLQNWGPRFKKLADLYGSKDTFDDDS

SEQ ID NO: 10310 - protein, 62 aa, Homo sapiens
  Payload ID: 2065;
  Gene Symbol: CDH11;
  Gene Name: cadherin 11, type 2, OB-cadherin (osteoblast);
  ENSP ID: ENSP00000484650
  MOD_RES (1)..(1): Any amino acid
XMSVSEAAVPGEEVGRVKAKDPDIGENGLVTYNIVDGDGMESFEITTDYETQEGVIKLKKVS

SEQ ID NO: 10311 - protein, 794 aa, Homo sapiens
  Payload ID: 2066;
  Gene Symbol: CDH12;
  Gene Name: cadherin 12, type 2 (N-cadherin 2);
  Uniprot ID:  P55289;
  ENSP ID: ENSP00000371689
MLTRNCLSLLLWVLFDGGLLTPLQPQPQQTLATEPRENVIHLPGQRSHFQRVKRGWVWNQFFVLEEYVGSEPQYVGKLHSDLDKGEGTVKYTLSGDGAGTVFTIDETTGDIHAIRSLDREEKPFYTLRAQAVDIETRKPLEPESEFIIKVQDINDNEPKFLDGPYVATVPEMSPVGAYVLQVKATDADDPTYGNSARVVYSILQGQPYFSIDPKTGVIRTALPNMDREVKEQYQVLIQAKDMGGQLGGLAGTTIVNITLTDVNDNPPRFPKSIFHLKVPESSPIGSAIGRIRAVDPDFGQNAEIEYNIVPGDGGNLFDIVTDEDTQEGVIKLKKPLDFETKKAYTFKVEASNLHLDHRFHSAGPFKDTATVKISVLDVDEPPVFSKPLYTMEVYEDTPVGTIIGAVTAQDLDVGSSAVRYFIDWKSDGDSYFTIDGNEGTIATNELLDRESTAQYNFSIIASKVSNPLLTSKVNILINVLDVNEFPPEISVPYETAVCENAKPGQIIQIVSAADRDLSPAGQQFSFRLSPEAAIKPNFTVRDFRNNTAGIETRRNGYSRRQQELYFLPVVIEDSSYPVQSSTNTMTIRVCRCDSDGTILSCNVEAIFLPVGLSTGALIAILLCIVILLAIVVLYVALRRQKKKDTLMTSKEDIRDNVIHYDDEGGGEEDTQAFDIGALRNPKVIEENKIRRDIKPDSLCLPRQRPPMEDNTDIRDFIHQRLQENDVDPTAPPYDSLATYAYEGSGSVAESLSSIDSLTTEADQDYDYLTDWGPRFKVLADMFGEEESYNPDKVT

SEQ ID NO: 10312 - protein, 794 aa, Homo sapiens; identical to SEQ ID NO: 10311
  Payload ID: 2066;
  Gene Symbol: CDH12;
  Gene Name: cadherin 12, type 2 (N-cadherin 2);
  Uniprot ID:  P55289;
  ENSP ID: ENSP00000423577

SEQ ID NO: 10313 - protein, 754 aa, Homo sapiens
  Payload ID: 2066;
  Gene Symbol: CDH12;
  Gene Name: cadherin 12, type 2 (N-cadherin 2);
  Uniprot ID:  P55289;
  ENSP ID: ENSP00000428786
MLTRNCLSLLLWVLFDGGLLTPLQPQPQQTLATEPRENVIHLPGQRSHFQRVKRGWVWNQFFVLEEYVGSEPQYVGKLHSDLDKGEGTVKYTLSGDGAGTVFTIDETTGDIHAIRSLDREEKPFYTLRAQAVDIETRKPLEPESEFIIKVQDINDNEPKFLDGPYVATVPEMSPVGVIRTALPNMDREVKEQYQVLIQAKDMGGQLGGLAGTTIVNITLTDVNDNPPRFPKSIFHLKVPESSPIGSAIGRIRAVDPDFGQNAEIEYNIVPGDGGNLFDIVTDEDTQEGVIKLKKPLDFETKKAYTFKVEASNLHLDHRFHSAGPFKDTATVKISVLDVDEPPVFSKPLYTMEVYEDTPVGTIIGAVTAQDLDVGSSAVRYFIDWKSDGDSYFTIDGNEGTIATNELLDRESTAQYNFSIIASKVSNPLLTSKVNILINVLDVNEFPPEISVPYETAVCENAKPGQIIQIVSAADRDLSPAGQQFSFRLSPEAAIKPNFTVRDFRNNTAGIETRRNGYSRRQQELYFLPVVIEDSSYPVQSSTNTMTIRVCRCDSDGTILSCNVEAIFLPVGLSTGALIAILLCIVILLAIVVLYVALRRQKKKDTLMTSKEDIRDNVIHYDDEGGGEEDTQAFDIGALRNPKVIEENKIRRDIKPDSLCLPRQRPPMEDNTDIRDFIHQRLQENDVDPTAPPYDSLATYAYEGSGSVAESLSSIDSLTTEADQDYDYLTDWGPRFKVLADMFGEEESYNPDKVT

SEQ ID NO: 10314 - protein, 794 aa, Homo sapiens; identical to SEQ ID NO: 10311
  Payload ID: 2066;
  Gene Symbol: CDH12;
  Gene Name: cadherin 12, type 2 (N-cadherin 2);
  Uniprot ID:  P55289;
  ENSP ID: ENSP00000480493

SEQ ID NO: 10315 - protein, 760 aa, Homo sapiens
  Payload ID: 2067;
  Gene Symbol: CDH13;
  Gene Name: cadherin 13;
  Uniprot ID:  P55290;
  ENSP ID: ENSP00000268613
MKTPPGASSRTKCSRELRSFCAFSCPRAKQPTCTAWFPQQEHPSENGPQMPGRDPPAASTMQVLLLTSAEDLDCTPGFQQKVFHINQPAEFIEDQSILNLTFSDCKGNDKLRYEVSSPYFKVNSDGGLVALRNITAVGKTLFVHARTPHAEDMAELVIVGGKDIQGSLQDIFKFARTSPVPRQKRSIVVSPILIPENQRQPFPRDVGKVVDSDRPERSKFRLTGKGVDQEPKGIFRINENTGSVSVTRTLDREVIAVYQLFVETTDVNGKTLEGPVPLEVIVIDQNDNRPIFREGPYIGHVMEGSPTGTTVMRMTAFDADDPATDNALLRYNIRQQTPDKPSPNMFYIDPEKGDIVTVVSPALLDRETLENPKYELIIEAQDMAGLDVGLTGTATATIMIDDKNDHSPKFTKKEFQATVEEGAVGVIVNLTVEDKDDPTTGAWRAAYTIINGNPGQSFEIHTNPQTNEGMLSVVKPLDYEISAFHTLLIKVENEDPLVPDVSYGPSSTATVHITVLDVNEGPVFYPDPMMVTRQEDLSVGSVLLTVNATDPDSLQHQTIRYSVYKDPAGWLNINPINGTVDTTAVLDRESPFVDNSVYTALFLAIDSGNPPATGTGTLLITLEDVNDNAPFIYPTVAEVCDDAKNLSVVILGASDKDLHPNTDPFKFEIHKQAVPDKVWKISKINNTHALVSLLQNLNKANYNLPIMVTDSGKPPMTNITDLRVQVCSCRNSKVDCNAAGALRFSLPSVLLLSLFSLACL

SEQ ID NO: 10316 - protein, 674 aa, Homo sapiens
  Payload ID: 2067;
  Gene Symbol: CDH13;
  Gene Name: cadherin 13;
  Uniprot ID:  P55290;
  ENSP ID: ENSP00000394557
MQPRTPLVLCVLLSQVLLLTSAEDLDCTPGFQQKVFHINQPAEFIEDQSILNLTFSDCKGNDKLRYEVSSPYFKVNSDGGLVALRNITAVGKTLFVHARTPHAEDMAELVIVGGKDIQGSLQVVDSDRPERSKFRLTGKGVDQEPKGIFRINENTGSVSVTRTLDREVIAVYQLFVETTDVNGKTLEGPVPLEVIVIDQNDNRPIFREGPYIGHVMEGSPTGTTVMRMTAFDADDPATDNALLRYNIRQQTPDKPSPNMFYIDPEKGDIVTVVSPALLDRETLENPKYELIIEAQDMAGLDVGLTGTATATIMIDDKNDHSPKFTKKEFQATVEEGAVGVIVNLTVEDKDDPTTGAWRAAYTIINGNPGQSFEIHTNPQTNEGMLSVVKPLDYEISAFHTLLIKVENEDPLVPDVSYGPSSTATVHITVLDVNEGPVFYPDPMMVTRQEDLSVGSVLLTVNATDPDSLQHQTIRYSVYKDPAGWLNINPINGTVDTTAVLDRESPFVDNSVYTALFLAIDSGNPPATGTGTLLITLEDVNDNAPFIYPTVAEVCDDAKNLSVVILGASDKDLHPNTDPFKFEIHKQAVPDKVWKISKINNTHALVSLLQNLNKANYNLPIMVTDSGKPPMTNITDLRVQVCSCRNSKVDCNAAGALRFSLPSVLLLSLFSLACL

SEQ ID NO: 10317 - protein, 190 aa, Homo sapiens
  Payload ID: 2067;
  Gene Symbol: CDH13;
  Gene Name: cadherin 13;
  Uniprot ID:  P55290;
  ENSP ID: ENSP00000408632
MQPRTPLVLCVLLSQVLLLTSAEDLDCTPGFQQKVFHINQPAEFIEDQSILNLTFSDCKGNDKLRYEVSSPYFKVNSDGGLVALRNITAVGKTLFVHARTPHAEDMAELVIVGGKDIQGSLQDIFKFARTSPVPRQKRSIVVSPILIPENQRQPFPRDVGKRTHNPINSELLLNEGITADLNPCITILAI

SEQ ID NO: 10318 - protein, 52 aa, Homo sapiens
  Payload ID: 2067;
  Gene Symbol: CDH13;
  Gene Name: cadherin 13;
  ENSP ID: ENSP00000442225
MQPRTPLVLCVLLSQVLLLTSAEDLDCTPGFQQKVFHINQPAEFIEDQSILN

SEQ ID NO: 10319 - protein, 701 aa, Homo sapiens
  Payload ID: 2067;
  Gene Symbol: CDH13;
  Gene Name: cadherin 13;
  ENSP ID: ENSP00000454435
FSQVLLLTSAEDLDCTPGFQQKVFHINQPAEFIEDQSILNLTFSDCKGNDKLRYEVSSPYFKVNSDGGLVALRNITAVGKTLFVHARTPHAEDMAELVIVGGKDIQGSLQDIFKFARTSPVPRQKRSIVVSPILIPENQRQPFPRDVGKVVDSDRPERSKFRLTGKGVDQEPKGIFRINENTGSVSVTRTLDREVIAVYQLFVETTDVNGKTLEGPVPLEVIVIDQNDNRPIFREGPYIGHVMEGSPTGTTVMRMTAFDADDPATDNALLRYNIRQQTPDKPSPNMFYIDPEKGDIVTVVSPALLDRETLENPKYELIIEAQDMAGLDVGLTGTATATIMIDDKNDHSPKFTKKEFQATVEEGAVGVIVNLTVEDKDDPTTGAWRAAYTIINGNPGQSFEIHTNPQTNEGMLSVVKPLDYEISAFHTLLIKVENEDPLVPDVSYGPSSTATVHITVLDVNEGPVFYPDPMMVTRQEDLSVGSVLLTVNATDPDSLQHQTIRYSVYKDPAGWLNINPINGTVDTTAVLDRESPFVDNSVYTALFLAIDSGNPPATGTGTLLITLEDVNDNAPFIYPTVAEVCDDAKNLSVVILGASDKDLHPNTDPFKFEIHKQAVPDKVWKISKINNTHALVSLLQNLNKANYNLPIMVTDSGKPPMTNITDLRVQVCSCRNSKVDCNAAGALRFSLPSVLLLSLFSLACL

SEQ ID NO: 10320 - protein, 67 aa, Homo sapiens
  Payload ID: 2067;
  Gene Symbol: CDH13;
  Gene Name: cadherin 13;
  ENSP ID: ENSP00000455781
MQPRTPLVLCVLLSQTPVRPTIYLCQNLQFIKNKARDSNSLADHKGKRIQVNRLLPGLLFHDELSGI

SEQ ID NO: 10321 - protein, 67 aa, Homo sapiens
  Payload ID: 2067;
  Gene Symbol: CDH13;
  Gene Name: cadherin 13;
  ENSP ID: ENSP00000456297
MQPRTPLVLCVLLSQVLLLTSAEDLDCTPGFQQKVFHINQPAEFIEDQSILNCKQCHSKMLLDSSHI

SEQ ID NO: 10322 - protein, 175 aa, Homo sapiens
  Payload ID: 2067;
  Gene Symbol: CDH13;
  Gene Name: cadherin 13;
  Uniprot ID:  P55290;
  ENSP ID: ENSP00000456491
MQPRTPLVLCVLLSQVLLLTSAEDLDCTPGFQQKVFHINQPAEFIEDQSILNLTFSDCKGNDKLRYEVSSPYFKVNSDGGLVALRNITAVGKTLFVHARTPHAEDMAELVIVGGKDIQGSLQDIFKFARTSPVPRQKRSIVVSPILIPENQRQPFPRDVGKMKIWQVLCLARWLT

SEQ ID NO: 10323 - protein, 37 aa, Homo sapiens
  Payload ID: 2067;
  Gene Symbol: CDH13;
  Gene Name: cadherin 13;
  ENSP ID: ENSP00000457149
MQPRTPLVLCVLLSQSGGPVCKSQFQALPLAVQWLGV

SEQ ID NO: 10324 - protein, 56 aa, Homo sapiens
  Payload ID: 2067;
  Gene Symbol: CDH13;
  Gene Name: cadherin 13;
  ENSP ID: ENSP00000457914
MQPRTPLVLCVLLSQVLLLTSAEDLDCTPGFQQKVFHINQPAEFIEDQSILNYVFY

SEQ ID NO: 10325 - protein, 713 aa, Homo sapiens
  Payload ID: 2067;
  Gene Symbol: CDH13;
  Gene Name: cadherin 13;
  Uniprot ID:  P55290;
  ENSP ID: ENSP00000479395
MQPRTPLVLCVLLSQVLLLTSAEDLDCTPGFQQKVFHINQPAEFIEDQSILNLTFSDCKGNDKLRYEVSSPYFKVNSDGGLVALRNITAVGKTLFVHARTPHAEDMAELVIVGGKDIQGSLQDIFKFARTSPVPRQKRSIVVSPILIPENQRQPFPRDVGKVVDSDRPERSKFRLTGKGVDQEPKGIFRINENTGSVSVTRTLDREVIAVYQLFVETTDVNGKTLEGPVPLEVIVIDQNDNRPIFREGPYIGHVMEGSPTGTTVMRMTAFDADDPATDNALLRYNIRQQTPDKPSPNMFYIDPEKGDIVTVVSPALLDRETLENPKYELIIEAQDMAGLDVGLTGTATATIMIDDKNDHSPKFTKKEFQATVEEGAVGVIVNLTVEDKDDPTTGAWRAAYTIINGNPGQSFEIHTNPQTNEGMLSVVKPLDYEISAFHTLLIKVENEDPLVPDVSYGPSSTATVHITVLDVNEGPVFYPDPMMVTRQEDLSVGSVLLTVNATDPDSLQHQTIRYSVYKDPAGWLNINPINGTVDTTAVLDRESPFVDNSVYTALFLAIDSGNPPATGTGTLLITLEDVNDNAPFIYPTVAEVCDDAKNLSVVILGASDKDLHPNTDPFKFEIHKQAVPDKVWKISKINNTHALVSLLQNLNKANYNLPIMVTDSGKPPMTNITDLRVQVCSCRNSKVDCNAAGALRFSLPSVLLLSLFSLACL

SEQ ID NO: 10326 - protein, 353 aa, Homo sapiens
  Payload ID: 2067;
  Gene Symbol: CDH13;
  Gene Name: cadherin 13;
  ENSP ID: ENSP00000482651
PTFCRREFQATVEEGAVGVIVNLTVEDKDDPTTGAWRAAYTIINGNPGQSFEIHTNPQTNEGMLSVVKPLDYEISAFHTLLIKVENEDPLVPDVSYGPSSTATVHITVLDVNEGPVFYPDPMMVTRQEDLSVGSVLLTVNATDPDSLQHQTIRYSVYKDPAGWLNINPINGTVDTTAVLDRESPFVDNSVYTALFLAIDSGNPPATGTGTLLITLEDVNDNAPFIYPTVAEVCDDAKNLSVVILGASDKDLHPNTDPFKFEIHKQAVPDKVWKISKINNTHALVSLLQNLNKANYNLPIMVTDSGKPPMTNITDLRVQVCSCRNSKVDCNAAGALRFSLPSVLLLSLFSLACL

SEQ ID NO: 10327 - protein, 661 aa, Homo sapiens
  Payload ID: 2067;
  Gene Symbol: CDH13;
  Gene Name: cadherin 13;
  ENSP ID: ENSP00000483719
SQVLLLTSAEDLDCTPGFQQKVFHINQPAEFIEDQSILNLTFSDCKGNDKLRYEVSSPYFKVNSDGGLVALRNITAVGKTLFVHARTPHAEDMAELVIVGGKDIQGSLQVVDSDRPERSKFRLTGKGVDQEPKGIFRINENTGSVSVTRTLDREVIAVYQLFVETTDVNGKTLEGPVPLEVIVIDQNDNRPIFREGPYIGHVMEGSPTGTTVMRMTAFDADDPATDNALLRYNIRQQTPDKPSPNMFYIDPEKGDIVTVVSPALLDRETLENPKYELIIEAQDMAGLDVGLTGTATATIMIDDKNDHSPKFTKKEFQATVEEGAVGVIVNLTVEDKDDPTTGAWRAAYTIINGNPGQSFEIHTNPQTNEGMLSVVKPLDYEISAFHTLLIKVENEDPLVPDVSYGPSSTATVHITVLDVNEGPVFYPDPMMVTRQEDLSVGSVLLTVNATDPDSLQHQTIRYSVYKDPAGWLNINPINGTVDTTAVLDRESPFVDNSVYTALFLAIDSGNPPATGTGTLLITLEDVNDNAPFIYPTVAEVCDDAKNLSVVILGASDKDLHPNTDPFKFEIHKQAVPDKVWKISKINNTHALVSLLQNLNKANYNLPIMVTDSGKPPMTNITDLRVQVCSCRNSKVDCNAAGALRFSLPSVLLLSLFSLACL

SEQ ID NO: 10328 - protein, 814 aa, Homo sapiens
  Payload ID: 2068;
  Gene Symbol: CDH15;
  Gene Name: cadherin 15, type 1, M-cadherin (myotubule);
  Uniprot ID:  P55291;
  ENSP ID: ENSP00000289746
MDAAFLLVLGLLAQSLCLSLGVPGWRRPTTLYPWRRAPALSRVRRAWVIPPISVSENHKRLPYPLVQIKSDKQQLGSVIYSIQGPGVDEEPRGVFSIDKFTGKVFLNAMLDREKTDRFRLRAFALDLGGSTLEDPTDLEIVVVDQNDNRPAFLQEAFTGRVLEGAVPGTYVTRAEATDADDPETDNAALRFSILQQGSPELFSIDELTGEIRTVQVGLDREVVAVYNLTLQVADMSGDGLTATASAIITLDDINDNAPEFTRDEFFMEAIEAVSGVDVGRLEVEDRDLPGSPNWVARFTILEGDPDGQFTIRTDPKTNEGVLSIVKALDYESCEHYELKVSVQNEAPLQAAALRAERGQAKVRVHVQDTNEPPVFQENPLRTSLAEGAPPGTLVATFSARDPDTEQLQRLSYSKDYDPEDWLQVDAATGRIQTQHVLSPASPFLKGGWYRAIVLAQDDASQPRTATGTLSIEILEVNDHAPVLAPPPPGSLCSEPHQGPGLLLGATDEDLPPHGAPFHFQLSPRLPELGRNWSLSQVNVSHARLRPRHQVPEGLHRLSLLLRDSGQPPQQREQPLNVTVCRCGKDGVCLPGAAALLAGGTGLSLGALVIVLASALLLLVLVLLVALRARFWKQSRGKGLLHGPQDDLRDNVLNYDEQGGGEEDQDAYDISQLRHPTALSLPLGPPPLRRDAPQGRLHPQPPRVLPTSPLDIADFINDGLEAADSDPSVPPYDTALIYDYEGDGSVAGTLSSILSSQGDEDQDYDYLRDWGPRFARLADMYGHPCGLEYGARWDHQAREGLSPGALLPRHRGRTA

SEQ ID NO: 10329 - protein, 829 aa, Homo sapiens
  Payload ID: 2069;
  Gene Symbol: CDH16;
  Gene Name: cadherin 16, KSP-cadherin;
  Uniprot ID:  O75309;
  ENSP ID: ENSP00000299752
MVPAWLWLLCVSVPQALPKAQPAELSVEVPENYGGNFPLYLTKLPLPREGAEGQIVLSGDSGKATEGPFAMDPDSGFLLVTRALDREEQAEYQLQVTLEMQDGHVLWGPQPVLVHVKDENDQVPHFSQAIYRARLSRGTRPGIPFLFLEASDRDEPGTANSDLRFHILSQAPAQPSPDMFQLEPRLGALALSPKGSTSLDHALERTYQLLVQVKDMGDQASGHQATATVEVSIIESTWVSLEPIHLAENLKVLYPHHMAQVHWSGGDVHYHLESHPPGPFEVNAEGNLYVTRELDREAQAEYLLQVRAQNSHGEDYAAPLELHVLVMDENDNVPICPPRDPTVSIPELSPPGTEVTRLSAEDADAPGSPNSHVVYQLLSPEPEDGVEGRAFQVDPTSGSVTLGVLPLRAGQNILLLVLAMDLAGAEGGFSSTCEVEVAVTDINDHAPEFITSQIGPISLPEDVEPGTLVAMLTAIDADLEPAFRLMDFAIERGDTEGTFGLDWEPDSGHVRLRLCKNLSYEAAPSHEVVVVVQSVAKLVGPGPGPGATATVTVLVERVMPPPKLDQESYEASVPISAPAGSFLLTIQPSDPISRTLRFSLVNDSEGWLCIEKFSGEVHTAQSLQGAQPGDTYTVLVEAQDTDEPRLSASAPLVIHFLKAPPAPALTLAPVPSQYLCTPRQDHGLIVSGPSKDPDLASGHGPYSFTLGPNPTVQRDWRLQTLNGSHAYLTLALHWVEPREHIIPVVVSHNAQMWQLLVRVIVCRCNVEGQCMRKVGRMKGMPTKLSAVGILVGTLVAIGIFLILIFTHWTMSRKKDPDQPADSVPLKATV

SEQ ID NO: 10330 - protein, 807 aa, Homo sapiens
  Payload ID: 2069;
  Gene Symbol: CDH16;
  Gene Name: cadherin 16, KSP-cadherin;
  Uniprot ID:  O75309;
  ENSP ID: ENSP00000377619
MVPAWLWLLCVSVPQALPKAQPAELSVEVPENYGGNFPLYLTKLPLPREGAEGQIVLSGDSGKATEGPFAMDPDSGFLLVTRALDREEQAEYQLQVTLEMQDGHVLWGPQPVLVHVKDENDQVPHFSQAIYRARLSRGTRPGIPFLFLEASDRDEPGTANSDLRFHILSQAPAQPSPDMFQLEPRLGALALSPKGSTSLDHALERTYQLLVQVKDMGDQASGHQATATVEVSIIESTWVSLEPIHLAENLKVLYPHHMAQVHWSGGDVHYHLESHPPGPFEVNAEGNLYVTRELDREAQAEYLLQVRAQNSHGEDYAAPLELHVLVMDENDNVPICPPRDPTVSIPELSPPGTEVTRLSAEDADAPGSPNSHVVYQLLSPEPEDGVEGRAFQVDPTSGSVTLGVLPLRAGQNILLLVLAMDLAGAEGGFSSTCEVEVAVTDINDHAPEFITSQIGPISLPEDVEPGTLVAMLTAIDADLEPAFRLMDFAIERGDTEGTFGLDWEPDSGHVRLRLCKNLSYEAAPSHEVVVVVQSVAKLVGPGPGPGATATVTVLVERVMPPPKLDQESYEASVPISAPAGSFLLTIQPSDPISRTLRFSLVNDSEGWLCIEKFSGEVHTAQSLQGAQPGDTYTVLVEAQDTALTLAPVPSQYLCTPRQDHGLIVSGPSKDPDLASGHGPYSFTLGPNPTVQRDWRLQTLNGSHAYLTLALHWVEPREHIIPVVVSHNAQMWQLLVRVIVCRCNVEGQCMRKVGRMKGMPTKLSAVGILVGTLVAIGIFLILIFTHWTMSRKKDPDQPADSVPLKATV

SEQ ID NO: 10331 - protein, 790 aa, Homo sapiens
  Payload ID: 2069;
  Gene Symbol: CDH16;
  Gene Name: cadherin 16, KSP-cadherin;
  Uniprot ID:  O75309;
  ENSP ID: ENSP00000454784
MVPAWLWLLCVSVPQALPKAQPAELSVEVPENYGGNFPLYLTKLPLPREGAEGQIVLSGDSGKATEGPFAMDPDSGFLLVTRALDREEQAEYQLQVTLEMQDGHVLWGPQPVLVHVKDENDQVPHFSQAIYRARLSRGTRPGIPFLFLEASDRDEPGTANSDLRFHILSQAPAQPSPDMFQLEPRLGALALSPKGSTSLDHALERTYQLLVQVKDMGDQASGHQATATVEVSIIESTWVSLEPIHLAENLKVLYPHHMAQVHWSGGDVHYHLESHPPGPFEVNAEGNLYVTRELDREAQAEYLLQVRAQNSHGEDYAAPLELHVLVMDENDNVPICPPRDPTVSIPELSPPGTEVTRLSAEDADAPGSPNSHVVYQLLSPEPEDGVEGRAFQVDPTSGSVTLGVLPLRAGQNILLLVLAMDLAGAEGGFSSTCEVEVAVTDINDHAPEFITSQIGPISLPEDVEPGTLVAMLTAIDADLEPAFRLMDFAIERGDTEGTFGLDWEPDSGHVRLRLCKNLSYEAAPSHEVVVVVQSVAKLVGPGPGPGATATVTVLVERVMPPPKLDQESYEASVPISAPAGSFLLTIQPSDPISRTLRFSLVNDSEGWLCIEKFSGEVHTAQSLQGAQPGDTYTVLVEAQDTDHGLIVSGPSKDPDLASGHGPYSFTLGPNPTVQRDWRLQTLNGSHAYLTLALHWVEPREHIIPVVVSHNAQMWQLLVRVIVCRCNVEGQCMRKVGRMKGMPTKLSAVGILVGTLVAIGIFLILIFTHWTMSRKKDPDQPADSVPLKATV

SEQ ID NO: 10332 - protein, 732 aa, Homo sapiens
  Payload ID: 2069;
  Gene Symbol: CDH16;
  Gene Name: cadherin 16, KSP-cadherin;
  Uniprot ID:  O75309;
  ENSP ID: ENSP00000455263
MVPAWLWLLCVSVPQALPKAQPAELSVEVPENYGGNFPLYLTKLPLPREGAEGQIVLSGDSGKATEGPFAMDPDSGFLLVTRALDREEQAEYQLQVTLEMQDGHVLWGPQPVLVHVKDENDQASGHQATATVEVSIIESTWVSLEPIHLAENLKVLYPHHMAQVHWSGGDVHYHLESHPPGPFEVNAEGNLYVTRELDREAQAEYLLQVRAQNSHGEDYAAPLELHVLVMDENDNVPICPPRDPTVSIPELSPPGTEVTRLSAEDADAPGSPNSHVVYQLLSPEPEDGVEGRAFQVDPTSGSVTLGVLPLRAGQNILLLVLAMDLAGAEGGFSSTCEVEVAVTDINDHAPEFITSQIGPISLPEDVEPGTLVAMLTAIDADLEPAFRLMDFAIERGDTEGTFGLDWEPDSGHVRLRLCKNLSYEAAPSHEVVVVVQSVAKLVGPGPGPGATATVTVLVERVMPPPKLDQESYEASVPISAPAGSFLLTIQPSDPISRTLRFSLVNDSEGWLCIEKFSGEVHTAQSLQGAQPGDTYTVLVEAQDTDEPRLSASAPLVIHFLKAPPAPALTLAPVPSQYLCTPRQDHGLIVSGPSKDPDLASGHGPYSFTLGPNPTVQRDWRLQTLNGSHAYLTLALHWVEPREHIIPVVVSHNAQMWQLLVRVIVCRCNVEGQCMRKVGRMKGMPTKLSAVGILVGTLVAIGIFLILIFTHWTMSRKKDPDQPADSVPLKATV

SEQ ID NO: 10333 - protein, 175 aa, Homo sapiens
  Payload ID: 2069;
  Gene Symbol: CDH16;
  Gene Name: cadherin 16, KSP-cadherin;
  ENSP ID: ENSP00000455523
MVPAWLWLLCVSVPQALPKAQPAELSVEVPENYGGNFPLYLTKLPLPREGAEGQIVLSGDSGKATEGPFAMDPDSGFLLVTRALDREEQAEYQLQVTLEMQDGHVLWGPQPVLVHVKDENDQVPHFSQAIYRARLSRGTRPVCPPTVNQASPSSSLRLQTGMSQAQPTRIFDSTS

SEQ ID NO: 10334 - protein, 749 aa, Homo sapiens
  Payload ID: 2069;
  Gene Symbol: CDH16;
  Gene Name: cadherin 16, KSP-cadherin;
  ENSP ID: ENSP00000456690
MVPAWLWLLCVSVPQVTLEMQDGHVLWGPQPVLVHVKDENDQVPHFSQAIYRARLSRGTRPGIPFLFLEASDRDEPGTANSDLRFHILSQAPAQPSPDMFQLEPRLGALALSPKGSTSLDHALERTYQLLVQVKDMGDQASGHQATATVEVSIIESTWVSLEPIHLAENLKVLYPHHMAQVHWSGGDVHYHLESHPPGPFEVNAEGNLYVTRELDREAQAEYLLQVRAQNSHGEDYAAPLELHVLVMDENDNVPICPPRDPTVSIPELSPPGTEVTRLSAEDADAPGSPNSHVVYQLLSPEPEDGVEGRAFQVDPTSGSVTLGVLPLRAGQNILLLVLAMDLAGAEGGFSSTCEVEVAVTDINDHAPEFITSQIGPISLPEDVEPGTLVAMLTAIDADLEPAFRLMDFAIERGDTEGTFGLDWEPDSGHVRLRLCKNLSYEAAPSHEVVVVVQSVAKLVGPGPGPGATATVTVLVERVMPPPKLDQESYEASVPISAPAGSFLLTIQPSDPISRTLRFSLVNDSEGWLCIEKFSGEVHTAQSLQGAQPGDTYTVLVEAQDTDEPRLSASAPLVIHFLKAPPAPALTLAPVPSQYLCTPRQDHGLIVSGPSKDPDLASGHGPYSFTLGPNPTVQRDWRLQTLNGSHAYLTLALHWVEPREHIIPVVVSHNAQMWQLLVRVIVCRCNVEGQCMRKVGRMKGMPTKLSAVGILVGTLVAIGIFLILIFTHWTMSRKKDPDQPADSVPLKATV

SEQ ID NO: 10335 - protein, 248 aa, Homo sapiens
  Payload ID: 2069;
  Gene Symbol: CDH16;
  Gene Name: cadherin 16, KSP-cadherin;
  ENSP ID: ENSP00000456891
MVPAWLWLLCVSVPQALPKAQPAELSVEVPENYGGNFPLYLTKLPLPREGAEGQIVLSGDSGKATEGPFAMDPDSGFLLVTRALDREEQAEYQLQVTLEMQDGHVLWGPQPVLVHVKDENDQVPHFSQAIYRARLSRGTRPGIPFLFLEASDRDEPGTANSDLRFHILSQAPAQPSPDMFQLEPRLGALALSPKGSTSLDHALERTYQLLVQVKDMGDQASGHQATATVEGRHRRDFWPGLGARLWAC

SEQ ID NO: 10336 - protein, 238 aa, Homo sapiens
  Payload ID: 2069;
  Gene Symbol: CDH16;
  Gene Name: cadherin 16, KSP-cadherin;
  ENSP ID: ENSP00000460891
IVLSGDSGKATEGPFAMDPDSGFLLVTRALDREEQAEYQLQVTLEMQDGHVLWGPQPVLVHVKDENDQVPHFSQAIYRARLSRGTRPGIPFLFLEASDRDEPGTANSDLRFHILSQAPAQPSPDMFQLEPRLGALALSPKGSTSLDHALERTYQLLVQVKDMGDQASGHQATATVEVSIIESTWVSLEPIHLAENLKVLYPHHMAQYLLQVRAQNSHGEDYAAPLELHVLVMDENDNV

SEQ ID NO: 10337 - protein, 124 aa, Homo sapiens
  Payload ID: 2069;
  Gene Symbol: CDH16;
  Gene Name: cadherin 16, KSP-cadherin;
  ENSP ID: ENSP00000463451
MDPDSGFLLVTRALDREEQAEYQLQVTLEMQDGHVLWGPQPVLVHVKDENDQVPHFSQAIYRARLSRGTRPGIPFLFLEASDRDEPGTANSDLRFHILSQAPAQPSPDMFQLEPRLGALALSPK

SEQ ID NO: 10338 - protein, 832 aa, Homo sapiens
  Payload ID: 2070;
  Gene Symbol: CDH17;
  Gene Name: cadherin 17, LI cadherin (liver-intestine);
  Uniprot ID:  Q12864;
  ENSP ID: ENSP00000027335
MILQAHLHSLCLLMLYLATGYGQEGKFSGPLKPMTFSIYEGQEPSQIIFQFKANPPAVTFELTGETDNIFVIEREGLLYYNRALDRETRSTHNLQVAALDANGIIVEGPVPITIKVKDINDNRPTFLQSKYEGSVRQNSRPGKPFLYVNATDLDDPATPNGQLYYQIVIQLPMINNVMYFQINNKTGAISLTREGSQELNPAKNPSYNLVISVKDMGGQSENSFSDTTSVDIIVTENIWKAPKPVEMVENSTDPHPIKITQVRWNDPGAQYSLVDKEKLPRFPFSIDQEGDIYVTQPLDREEKDAYVFYAVAKDEYGKPLSYPLEIHVKVKDINDNPPTCPSPVTVFEVQENERLGNSIGTLTAHDRDEENTANSFLNYRIVEQTPKLPMDGLFLIQTYAGMLQLAKQSLKKQDTPQYNLTIEVSDKDFKTLCFVQINVIDINDQIPIFEKSDYGNLTLAEDTNIGSTILTIQATDADEPFTGSSKILYHIIKGDSEGRLGVDTDPHTNTGYVIIKKPLDFETAAVSNIVFKAENPEPLVFGVKYNASSFAKFTLIVTDVNEAPQFSQHVFQAKVSEDVAIGTKVGNVTAKDPEGLDISYSLRGDTRGWLKIDHVTGEIFSVAPLDREAGSPYRVQVVATEVGGSSLSSVSEFHLILMDVNDNPPRLAKDYTGLFFCHPLSAPGSLIFEATDDDQHLFRGPHFTFSLGSGSLQNDWEVSKINGTHARLSTRHTEFEEREYVVLIRINDGGRPPLEGIVSLPVTFCSCVEGSCFRPAGHQTGIPTVGMAVGILLTTLLVIGIILAVVFIRIKKDKGKDNVESAQASEVKPLRS

SEQ ID NO: 10339 - protein, 580 aa, Homo sapiens
  Payload ID: 2070;
  Gene Symbol: CDH17;
  Gene Name: cadherin 17, LI cadherin (liver-intestine);
  ENSP ID: ENSP00000392811
MILQAHLHSLCLLMLYLATGYGQEGKFSGPLKPMTFSIYEGQEPSQIIFQFKANPPAVTFELTGETDNIFVIEREGLLYYNRALDRETRSTHNLQVAALDANGIIVEGPVPITIKVKDINDNRPTFLQSKYEGSVRQNSRPGNSIGTLTAHDRDEENTANSFLNYRIVEQTPKLPMDGLFLIQTYAGMLQLAKQSLKKQDTPQYNLTIEVSDKDFKTLCFVQINVIDINDQIPIFEKSDYGNLTLAEDTNIGSTILTIQATDADEPFTGSSKILYHIIKGDSEGRLGVDTDPHTNTGYVIIKKPLDFETAAVSNIVFKAENPEPLVFGVKYNASSFAKFTLIVTDVNEAPQFSQHVFQAKVSEDVAIGTKVGNVTAKDPEGLDISYSLRGDTRGWLKIDHVTGEIFSVAPLDREAGSPYRVQVVATEVGGSSLSSVSEFHLILMDVNDNPPRLAKDYTGLFFCHPLSAPGSLIFEATDDDQHLFRGPHFTFSLGSGSLQNDWEVSKINGTHARLSTRHTEFEEREYVVLIRINDGGRPPLEGIVSLPGIILAVVFIRIKKDKGKDNVESAQASEVKPLRS

SEQ ID NO: 10340 - protein, 832 aa, Homo sapiens; identical to SEQ ID NO: 10338
  Payload ID: 2070;
  Gene Symbol: CDH17;
  Gene Name: cadherin 17, LI cadherin (liver-intestine);
  Uniprot ID:  Q12864;
  ENSP ID: ENSP00000401468

SEQ ID NO: 10341 - protein, 147 aa, Homo sapiens
  Payload ID: 2070;
  Gene Symbol: CDH17;
  Gene Name: cadherin 17, LI cadherin (liver-intestine);
  ENSP ID: ENSP00000428189
MILQAHLHSLCLLMLYLATGYGQEGKFSGPLKPMTFSIYEGQEPSQIIFQFKANPPAVTFELTGETDNIFVIEREGLLYYNRALDRETRSTHNLQVAALDANGIIVEGPVPITIKVKDINDNRPTFLQSKYEGSVRQNSRPGKPFLY

SEQ ID NO: 10342 - protein, 90 aa, Homo sapiens
  Payload ID: 2070;
  Gene Symbol: CDH17;
  Gene Name: cadherin 17, LI cadherin (liver-intestine);
  ENSP ID: ENSP00000429730
  MOD_RES (1)..(1): Any amino acid
XIDINDQIPIFEKSDYGNLTLAEDTNIGSTILTIQATDADEPFTGSSKILYHIIKGDSEGRLGVDTDPHTNTGYVIIKKLFTEGRHKRLA

SEQ ID NO: 10343 - protein, 790 aa, Homo sapiens
  Payload ID: 2071;
  Gene Symbol: CDH18;
  Gene Name: cadherin 18, type 2;
  Uniprot ID:  Q13634;
  ENSP ID: ENSP00000274170
MKITSTSCICPVLVCLCFVQRCYGTAHHSSIKVMRNQTKHIEGETEVHHRPKRGWVWNQFFVLEEHMGPDPQYVGKLHSNSDKGDGSVKYILTGEGAGTIFIIDDTTGDIHSTKSLDREQKTHYVLHAQAIDRRTNKPLEPESEFIIKVQDINDNAPKFTDGPYIVTVPEMSDMGTSVLQVTATDADDPTYGNSARVVYSILQGQPYFSVDPKTGVIRTALHNMDREAREHYSVVIQAKDMAGQVGGLSGSTTVNITLTDVNDNPPRFPQKHYQLYVPESAQVGSAVGKIKANDADTGSNADMTYSIINGDGMGIFSISTDKETREGILSLKKPLNYEKKKSYTLNIEGANTHLDFRFSHLGPFKDATMLKIIVGDVDEPPLFSMPSYLMEVYENAKIGTVVGTVLAQDPDSTNSLVRYFINYNVEDDRFFNIDANTGTIRTTKVLDREETPWYNITVTASEIDNPDLLSHVTVGIRVLDVNDNPPELAREYDIIVCENSKPGQVIHTISATDKDDFANGPRFNFFLDERLPVNPNFTLKDNEDNTASILTRRRRFSRTVQDVYYLPIMISDGGIPSLSSSSTLTIRVCACERDGRVRTCHAEAFLSSAGLSTGALIAILLCVLILLAIVVLFITLRRSKKEPLIISEEDVRENVVTYDDEGGGEEDTEAFDITALRNPSAAEELKYRRDIRPEVKLTPRHQTSSTLESIDVQEFIKQRLAEADLDPSVPPYDSLQTYAYEGQRSEAGSISSLDSATTQSDQDYHYLGDWGPEFKKLAELYGEIESERTT

SEQ ID NO: 10344 - protein, 790 aa, Homo sapiens; identical to SEQ ID NO: 10343
  Payload ID: 2071;
  Gene Symbol: CDH18;
  Gene Name: cadherin 18, type 2;
  Uniprot ID:  Q13634;
  ENSP ID: ENSP00000371710

SEQ ID NO: 10345 - protein, 574 aa, Homo sapiens
  Payload ID: 2071;
  Gene Symbol: CDH18;
  Gene Name: cadherin 18, type 2;
  Uniprot ID:  Q13634;
  ENSP ID: ENSP00000422138
MKITSTSCICPVLVCLCFVQRCYGTAHHSSIKVMRNQTKHIEGETEVHHRPKRGWVWNQFFVLEEHMGPDPQYVGKLHSNSDKGDGSVKYILTGEGAGTIFIIDDTTGDIHSTKSLDREQKTHYVLHAQAIDRRTNKPLEPESEFIIKVQDINDNAPKFTDGPYIVTVPEMSDMGTSVLQVTATDADDPTYGNSARVVYSILQGQPYFSVDPKTGVIRTALHNMDREAREHYSVVIQAKDMAGQVGGLSGSTTVNITLTDVNDNPPRFPQKHYQLYVPESAQVGSAVGKIKANDADTGSNADMTYSIINGDGMGIFSISTDKETREGILSLKKPLNYEKKKSYTLNIEGANTHLDFRFSHLGPFKDATMLKIIVGDVDEPPLFSMPSYLMEVYENAKIGTVVGTVLAQDPDSTNSLVRYFINYNVEDDRFFNIDANTGTIRTTKVLDREETPWYNITVTASEIDNPDLLSHVTVGIRVLDVNDNPPELAREYDIIVCENSKPGQVIHTISATDKDDFANGPRFNFFLDERLPVNPNFTLKDNEAAAPSPSGFVHAREMGVCGPAMQKPSCPRLV

SEQ ID NO: 10346 - protein, 575 aa, Homo sapiens
  Payload ID: 2071;
  Gene Symbol: CDH18;
  Gene Name: cadherin 18, type 2;
  ENSP ID: ENSP00000424931
MKITSTSCICPVLVCLCFVQRCYGTAHHSSIKVMRNQTKHIEGETEVHHRPKRGWVWNQFFVLEEHMGPDPQYVGKLHSNSDKGDGSVKYILTGEGAGTIFIIDDTTGDIHSTKSLDREQKTHYVLHAQAIDRRTNKPLEPESEFIIKVQDINDNAPKFTDGPYIVTVPEMSDMGTSVLQVTATDADDPTYGNSARVVYSILQGQPYFSVDPKTGVIRTALHNMDREAREHYSVVIQAKDMAGQVGGLSGSTTVNITLTDVNDNPPRFPQKHYQLYVPESAQVGSAVGKIKANDADTGSNADMTYSIINGDGMGIFSISTDKETREGILSLKKPLNYEKKKSYTLNIEGANTHLDFRFSHLGPFKDATMLKIIVGDVDEPPLFSMPSYLMEVYENAKIGTVVGTVLAQDPDSTNSLVRYFINYNVEDDRFFNIDANTGTIRTTKVLDREETPWYNITVTASEIDNPDLLSHVTVGIRVLDVNDNPPELAREYDIIVCENSKPGQVIHTISATDKDDFANGPRFNFFLDERLPVNPNFTLKDNEAAAAPSPSGFVHAREMGVCGPAMQKPSCPRLV

SEQ ID NO: 10347 - protein, 790 aa, Homo sapiens; identical to SEQ ID NO: 10343
  Payload ID: 2071;
  Gene Symbol: CDH18;
  Gene Name: cadherin 18, type 2;
  Uniprot ID:  Q13634;
  ENSP ID: ENSP00000425093

SEQ ID NO: 10348 - protein, 590 aa, Homo sapiens
  Payload ID: 2071;
  Gene Symbol: CDH18;
  Gene Name: cadherin 18, type 2;
  ENSP ID: ENSP00000425854
MKITSTSCICPVLVCLCFVQRCYGTAHHSSIKVMRNQTKHIEGETEVHHRPKRGWVWNQFFVLEEHMGPDPQYVGKLHSNSDKGDGSVKYILTGEGAGTIFIIDDTTGDIHSTKSLDREQKTHYVLHAQAIDRRTNKPLEPESEFIIKVQDINDNAPKFTDGPYIVTVPEMSDMGTSVLQVTATDADDPTYGNSARVVYSILQGQPYFSVDPKTGVIRTALHNMDREAREHYSVVIQAKDMAGQVGGLSGSTTVNITLTDVNDNPPRFPQKHYQLYVPESAQVGSAVGKIKANDADTGSNADMTYSIINGDGMGIFSISTDKETREGILSLKKPLNYEKKKSYTLNIEGANTHLDFRFSHLGPFKDATMLKIIVGDVDEPPLFSMPSYLMEVYENAKIGTVVGTVLAQDPDSTNSLVRYFINYNVEDDRFFNIDANTGTIRTTKVLDREETPWYNITVTASEIDNPDLLSHVTVGIRVLDVNDNPPELAREYDIIVCENSKPGQVIHTISATDKDDFANGPRFNFFLDERLPVNPNFTLKDNEGEHIYTYLFIYVVSALTLYVIGFILIYTQTSCKSAFKVSLMLLCYDL

SEQ ID NO: 10349 - protein, 441 aa, Homo sapiens
  Payload ID: 2071;
  Gene Symbol: CDH18;
  Gene Name: cadherin 18, type 2;
  ENSP ID: ENSP00000427383
WVWNQFFVLEEHMGPDPQYVGKLHSNSDKGDGSVKYILTGEGAGTIFIIDDTTGDIHSTKSLDREQKTHYVLHAQAIDRRTNKPLEPESEFIIKVQDINDNAPKFTDGPYIVTVPEMSDMGTSVLQVTATDADDPTYGNSARVVYSILQGQPYFSVDPKTGVIRTALHNMDREAREHYSVVIQAKDMAGQVGGLSGSTTVNITLTDVNDNPPRFPQKHYQLYVPESAQVGSAVGKIKANDADTGSNADMTYSIINGDGMGIFSISTDKETREGILSLKKPLNYEKKKSYTLNIEGANTHLDFRFSHLGPFKDATMLKIIVGDVDEPPLFSMPSYLMEVYENAKIGTVVGTVLAQDPDSTNSLVRYFINYNVEDDRFFNIDANTGTIRTTKVLDREETPWYNITVTASEIAAAAPSPSGFVHAREMGVCGPAMQKPSCPRLV

SEQ ID NO: 10350 - protein, 772 aa, Homo sapiens
  Payload ID: 2072;
  Gene Symbol: CDH19;
  Gene Name: cadherin 19, type 2;
  Uniprot ID:  Q9H159;
  ENSP ID: ENSP00000262150
MNCYLLLRFMLGIPLLWPCLGATENSQTKKVKQPVRSHLRVKRGWVWNQFFVPEEMNTTSHHIGQLRSDLDNGNNSFQYKLLGAGAGSTFIIDERTGDIYAIQKLDREERSLYILRAQVIDIATGRAVEPESEFVIKVSDINDNEPKFLDEPYEAIVPEMSPEGTLVIQVTASDADDPSSGNNARLLYSLLQGQPYFSVEPTTGVIRISSKMDRELQDEYWVIIQAKDMIGQPGALSGTTSVLIKLSDVNDNKPIFKESLYRLTVSESAPTGTSIGTIMAYDNDIGENAEMDYSIEEDDSQTFDIITNHETQEGIVILKKKVDFEHQNHYGIRAKVKNHHVPEQLMKYHTEASTTFIKIQVEDVDEPPLFLLPYYVFEVFEETPQGSFVGVVSATDPDNRKSPIRYSITRSKVFNINDNGTITTSNSLDREISAWYNLSITATEKYNIEQISSIPLYVQVLNINDHAPEFSQYYETYVCENAGSGQVIQTISAVDRDESIEEHHFYFNLSVEDTNNSSFTIIDNQDNTAVILTNRTGFNLQEEPVFYISILIADNGIPSLTSTNTLTIHVCDCGDSGSTQTCQYQELVLSMGFKTEVIIAILICIMIIFGFIFLTLGLKQRRKQILFPEKSEDFRENIFQYDDEGGGEEDTEAFDIAELRSSTIMRERKTRKTTSAEIRSLYRQSLQVGPDSAIFRKFILEKLEEANTDPCAPPFDSLQTYAFEGTGSLAGSLSSLESAVSDQDESYDYLNELGPRFKRLACMFGSAVQSNN

SEQ ID NO: 10351 - protein, 434 aa, Homo sapiens
  Payload ID: 2072;
  Gene Symbol: CDH19;
  Gene Name: cadherin 19, type 2;
  ENSP ID: ENSP00000401998
GIPLLWPCLGATENSQTKKVKQPVRSHLRVKRGWVWNQFFVPEEMNTTSHHIGQLRSDLDNGNNSFQYKLLGAGAGSTFIIDERTGDIYAIQKLDREERSLYILRAQVIDIATGRAVEPESEFVIKVSDINDNEPKFLDEPYEAIVPEMSPEGTLVIQVTASDADDPSSGNNARLLYSLLQGQPYFSVEPTTGVIRISSKMDRELQDEYWVIIQAKDMIGQPGALSGTTSVLIKLSDVNDNKPIFKESLYRLTVSESAPTGTSIGTIMAYDNDIGENAEMDYSIEEDDSQTFDIITNHETQEGIVILKKKVDFEHQNHYGIRAKVKNHHVPEQLMKYHTEASTTFIKIQVEDVDEPPLFLLPYYVFEVFEETPQGSFVGVVSATDPDNRKSPIRYSITRSKVFNINDNGTITTSNSLDREISAWYNLSITATEK

SEQ ID NO: 10352 - protein, 490 aa, Homo sapiens
  Payload ID: 2072;
  Gene Symbol: CDH19;
  Gene Name: cadherin 19, type 2;
  Uniprot ID:  Q9H159;
  ENSP ID: ENSP00000439593
MNCYLLLRFMLGIPLLWPCLGATENSQTKKVKQPVRSHLRVKRGWVWNQFFVPEEMNTTSHHIGQLRSDLDNGNNSFQYKLLGAGAGSTFIIDERTGDIYAIQKLDREERSLYILRAQVIDIATGRAVEPESEFVIKVSDINDNEPKFLDEPYEAIVPEMSPEGTLVIQVTASDADDPSSGNNARLLYSLLQGQPYFSVEPTTGVIRISSKMDRELQDEYWVIIQAKDMIGQPGALSGTTSVLIKLSDVNDNKPIFKESLYRLTVSESAPTGTSIGTIMAYDNDIGENAEMDYSIEEDDSQTFDIITNHETQEGIVILKKKVDFEHQNHYGIRAKVKNHHVPEQLMKYHTEASTTFIKIQVEDVDEPPLFLLPYYVFEVFEETPQGSFVGVVSATDPDNRKSPIRYSITRSKVFNINDNGTITTSNSLDREISAWYNLSITATEKYNIEQISSIPLYVQVLNINDHAPEFSQYYETYVCENAGSGQGLFF

SEQ ID NO: 10353 - protein, 541 aa, Homo sapiens
  Payload ID: 2072;
  Gene Symbol: CDH19;
  Gene Name: cadherin 19, type 2;
  ENSP ID: ENSP00000463085
MNCYLLLRFMLGIPLLWPCLGATENSQTKKVKQPVRSHLRVKRGWVWNQFFVPEEMNTTSHHIGQLRSDLDNGNNSFQYKLLGAGAGSTFIIDERTGDIYAIQKLDREERSLYILRAQVIDIATGRAVEPESEFVIKVSDINDNEPKFLDEPYEAIVPEMSPEGTLVIQVTASDADDPSSGNNARLLYSLLQGQPYFSVEPTTGVIRISSKMDRELQDEYWVIIQAKDMIGQPGALSGTTSVLIKLSDVNDNKPIFKESLYRLTVSESAPTGTSIGTIMAYDNDIGENAEMDYSIEEDDSQTFDIITNHETQEGIVILKKKVDFEHQNHYGIRAKVKNHHVPEQLMKYHTEASTTFIKIQVEDVDEPPLFLLPYYVFEVFEETPQGSFVGVVSATDPDNRKSPIRYSITRSKVFNINDNGTITTSNSLDREISAWYNLSITATEKYNIEQISSIPLYVQVLNINDHAPEFSQYYETYVCENAGSGQVIQTISAVDRDESIEEHHFYFNLSVEDTNNSSFTIIDNQELVLTFKKNLSSTSPS

SEQ ID NO: 10354 - protein, 65 aa, Homo sapiens
  Payload ID: 2072;
  Gene Symbol: CDH19;
  Gene Name: cadherin 19, type 2;
  ENSP ID: ENSP00000464477
MNCYLLLRFMLGIPLLWPCLGATENSQTKKVKQPVRSHLRVKRGWVWNQFFVPEEMNTTSHHIGQ

SEQ ID NO: 10355 - protein, 906 aa, Homo sapiens
  Payload ID: 2073;
  Gene Symbol: CDH2;
  Gene Name: cadherin 2, type 1, N-cadherin (neuronal);
  Uniprot ID:  P19022;
  ENSP ID: ENSP00000269141
MCRIAGALRTLLPLLAALLQASVEASGEIALCKTGFPEDVYSAVLSKDVHEGQPLLNVKFSNCNGKRKVQYESSEPADFKVDEDGMVYAVRSFPLSSEHAKFLIYAQDKETQEKWQVAVKLSLKPTLTEESVKESAEVEEIVFPRQFSKHSGHLQRQKRDWVIPPINLPENSRGPFPQELVRIRSDRDKNLSLRYSVTGPGADQPPTGIFIINPISGQLSVTKPLDREQIARFHLRAHAVDINGNQVENPIDIVINVIDMNDNRPEFLHQVWNGTVPEGSKPGTYVMTVTAIDADDPNALNGMLRYRIVSQAPSTPSPNMFTINNETGDIITVAAGLDREKVQQYTLIIQATDMEGNPTYGLSNTATAVITVTDVNDNPPEFTAMTFYGEVPENRVDIIVANLTVTDKDQPHTPAWNAVYRISGGDPTGRFAIQTDPNSNDGLVTVVKPIDFETNRMFVLTVAAENQVPLAKGIQHPPQSTATVSVTVIDVNENPYFAPNPKIIRQEEGLHAGTMLTTFTAQDPDRYMQQNIRYTKLSDPANWLKIDPVNGQITTIAVLDRESPNVKNNIYNATFLASDNGIPPMSGTGTLQIYLLDINDNAPQVLPQEAETCETPDPNSINITALDYDIDPNAGPFAFDLPLSPVTIKRNWTITRLNGDFAQLNLKIKFLEAGIYEVPIIITDSGNPPKSNISILRVKVCQCDSNGDCTDVDRIVGAGLGTGAIIAILLCIIILLILVLMFVVWMKRRDKERQAKQLLIDPEDDVRDNILKYDEEGGGEEDQDYDLSQLQQPDTVEPDAIKPVGIRRMDERPIHAEPQYPVRSAAPHPGDIGDFINEGLKAADNDPTAPPYDSLLVFDYEGSGSTAGSLSSLNSSSSGGEQDYDYLNDWGPRFKKLADMYGGGDD

SEQ ID NO: 10356 - protein, 875 aa, Homo sapiens
  Payload ID: 2073;
  Gene Symbol: CDH2;
  Gene Name: cadherin 2, type 1, N-cadherin (neuronal);
  Uniprot ID:  P19022;
  ENSP ID: ENSP00000382312
MFLLRRYVCIFTEKLKNQAELYVFLSVKFSNCNGKRKVQYESSEPADFKVDEDGMVYAVRSFPLSSEHAKFLIYAQDKETQEKWQVAVKLSLKPTLTEESVKESAEVEEIVFPRQFSKHSGHLQRQKRDWVIPPINLPENSRGPFPQELVRIRSDRDKNLSLRYSVTGPGADQPPTGIFIINPISGQLSVTKPLDREQIARFHLRAHAVDINGNQVENPIDIVINVIDMNDNRPEFLHQVWNGTVPEGSKPGTYVMTVTAIDADDPNALNGMLRYRIVSQAPSTPSPNMFTINNETGDIITVAAGLDREKVQQYTLIIQATDMEGNPTYGLSNTATAVITVTDVNDNPPEFTAMTFYGEVPENRVDIIVANLTVTDKDQPHTPAWNAVYRISGGDPTGRFAIQTDPNSNDGLVTVVKPIDFETNRMFVLTVAAENQVPLAKGIQHPPQSTATVSVTVIDVNENPYFAPNPKIIRQEEGLHAGTMLTTFTAQDPDRYMQQNIRYTKLSDPANWLKIDPVNGQITTIAVLDRESPNVKNNIYNATFLASDNGIPPMSGTGTLQIYLLDINDNAPQVLPQEAETCETPDPNSINITALDYDIDPNAGPFAFDLPLSPVTIKRNWTITRLNGDFAQLNLKIKFLEAGIYEVPIIITDSGNPPKSNISILRVKVCQCDSNGDCTDVDRIVGAGLGTGAIIAILLCIIILLILVLMFVVWMKRRDKERQAKQLLIDPEDDVRDNILKYDEEGGGEEDQDYDLSQLQQPDTVEPDAIKPVGIRRMDERPIHAEPQYPVRSAAPHPGDIGDFINEGLKAADNDPTAPPYDSLLVFDYEGSGSTAGSLSSLNSSSSGGEQDYDYLNDWGPRFKKLADMYGGGDD

SEQ ID NO: 10357 - protein, 191 aa, Homo sapiens
  Payload ID: 2073;
  Gene Symbol: CDH2;
  Gene Name: cadherin 2, type 1, N-cadherin (neuronal);
  ENSP ID: ENSP00000411360
MCNTQRMKFSNCNGKRKVQYESSEPADFKVDEDGMVYAVRSFPLSSEHAKFLIYAQDKETQEKWQVAVKLSLKPTLTEESVKESAEVEEIVFPRQFSKHSGHLQRQKRDWVIPPINLPENSRGPFPQELVRIRSDRDKNLSLRYSVTGPGADQPPTGIFIINPISGQLSVTKPLDREQIARFHLRAHAVDI

SEQ ID NO: 10358 - protein, 120 aa, Homo sapiens
  Payload ID: 2073;
  Gene Symbol: CDH2;
  Gene Name: cadherin 2, type 1, N-cadherin (neuronal);
  ENSP ID: ENSP00000412120
MVYAVRSFPLSSEHAKFLIYAQDKETQEKWQVAVKLSLKPTLTEESVKESAEVEEIVFPRQFSKHSGHLQRQKRDWVIPPINLPENSRGPFPQELVRIRSDRDKNLSLRYSVTGPGADQP

SEQ ID NO: 10359 - protein, 73 aa, Homo sapiens
  Payload ID: 2073;
  Gene Symbol: CDH2;
  Gene Name: cadherin 2, type 1, N-cadherin (neuronal);
  ENSP ID: ENSP00000414269
MVYAVRSFPLSSEHAKFLIYAQDKETQEKWQVAVKLSLKPTLTEESVKESAEVEEIVFPRQFSKHSGHLQRQK

SEQ ID NO: 10360 - protein, 801 aa, Homo sapiens
  Payload ID: 2074;
  Gene Symbol: CDH20;
  Gene Name: cadherin 20, type 2;
  Uniprot ID:  Q9HBT6;
  ENSP ID: ENSP00000262717
MWTSGRMSNAKNWLGLGMSLYFWGLMDLTTTVLSDTPTPQGELEALLSDKPQSHQRTKRSWVWNQFFVLEEYTGTDPLYVGKLHSDMDRGDGSIKYILSGEGAGIVFTIDDTTGDIHAIQRLDREERAQYTLRAQALDRRTGRPMEPESEFIIKIQDINDNEPKFLDGPYVATVPEMSPVGTSVIQVTATDADDPTYGNSARVVYSILQGQPYFSVDSKTGVIRTALMNMDREAKEYYEVIIQAKDMGGQLGGLAGTTTVNITLSDVNDNPPRFPQKHYQMSVLESAPISSTVGRVFAKDLDEGINAEMKYTIVDGDGADAFDISTDPNFQVGIITVKKPLSFESKKSYTLKVEGANPHLEMRFLNLGPFQDTTTVHISVEDVDEPPVFEPGFYFVEVPEDVAIGTTIQIISAKDPDVTNNSIRYSIDRSSDPGRFFYVDITTGALMTARPLDREEFSWHNITVLAMEMNNPSQVGSVPVTIKVLDVNDNAPEFPRFYEAFVCENAKAGQLIQTVSAVDQDDPRNGQHFYYSLAPEAANNPNFTIRDNQDNTARILTRRSGFRQQEQSVFHLPILIADSGQPVLSSTGTLTIQVCSCDDDGHVMSCSPEAYMLPVSLSRGALIAILACIFVLLVLVLLILSMRRHRKQPYIIDDEENIHENIVRYDDEGGGEEDTEAFDIAAMWNPREAQAGAAPKTRQDMLPEIESLSRYVPQTCAVNSTVHSYVLAKLYEADMDLWAPPFDSLQTYMFEGDGSVAGSLSSLQSATSDSEQSFDFLTDWGPRFRKLAELYGASEGPAPLW

SEQ ID NO: 10361 - protein, 801 aa, Homo sapiens; identical to SEQ ID NO: 10360
  Payload ID: 2074;
  Gene Symbol: CDH20;
  Gene Name: cadherin 20, type 2;
  Uniprot ID:  Q9HBT6;
  ENSP ID: ENSP00000442226

SEQ ID NO: 10362 - protein, 801 aa, Homo sapiens; identical to SEQ ID NO: 10360
  Payload ID: 2074;
  Gene Symbol: CDH20;
  Gene Name: cadherin 20, type 2;
  Uniprot ID:  Q9HBT6;
  ENSP ID: ENSP00000444767

SEQ ID NO: 10363 - protein, 828 aa, Homo sapiens
  Payload ID: 2075;
  Gene Symbol: CDH22;
  Gene Name: cadherin 22, type 2;
  Uniprot ID:  Q9UJ99;
  ENSP ID: ENSP00000361336
MRPRPEGRGLRAGVALSPALLLLLLLPPPPTLLGRLWAAGTPSPSAPGARQDGALGAGRVKRGWVWNQFFVVEEYTGTEPLYVGKIHSDSDEGDGAIKYTISGEGAGTIFLIDELTGDIHAMERLDREQKTFYTLRAQARDRATNRLLEPESEFIIKVQDINDSEPRFLHGPYIGSVAELSPTGTSVMQVMASDADDPTYGSSARLVYSVLDGEHHFTVDPKTGVIRTAVPDLDRESQERYEVVIQATDMAGQLGGLSGSTTVTIVVTDVNDNPPRFPQKMYQFSIQESAPIGTAVGRVKAEDSDVGENTDMTYHLKDESSSGGDVFKVTTDSDTQEAIIVVQKRLDFESQPVHTVILEALNKFVDPRFADLGTFRDQAIVRVAVTDVDEPPEFRPPSGLLEVQEDAQVGSLVGVVTARDPDAANRPVRYAIDRESDLDQIFDIDADTGAIVTGKGLDRETAGWHNITVLAMEADNHAQLSRASLRIRILDVNDNPPELATPYEAAVCEDAKPGQLIQTISVVDRDEPQGGHRFYFRLVPEAPSNPHFSLLDIQDNTAAVHTQHVGFNRQEQDVFFLPILVVDSGPPTLSSTGTLTIRICGCDSSGTIQSCNTTAFVMAASLSPGALIALLVCVLILVVLVLLILTLRRHHKSHLSSDEDEDMRDNVIKYNDEGGGEQDTEAYDMSALRSLYDFGELKGGDGGGSAGGGAGGGSGGGAGSPPQAHLPSERHSLPQGPPSPEPDFSVFRDFISRKVALADGDLSVPPYDAFQTYAFEGADSPAASLSSLHSGSSGSEQDFAYLSSWGPRFRPLAALYAGHRGDDEAQAS

SEQ ID NO: 10364 - protein, 828 aa, Homo sapiens; identical to SEQ ID NO: 10363
  Payload ID: 2075;
  Gene Symbol: CDH22;
  Gene Name: cadherin 22, type 2;
  Uniprot ID:  Q9UJ99;
  ENSP ID: ENSP00000437790

SEQ ID NO: 10365 - protein, 819 aa, Homo sapiens
  Payload ID: 2076;
  Gene Symbol: CDH24;
  Gene Name: cadherin 24, type 2;
  Uniprot ID:  Q86UP0;
  ENSP ID: ENSP00000267383
MWGLVRLLLAWLGGWGCMGRLAAPARAWAGSREHPGPALLRTRRSWVWNQFFVIEEYAGPEPVLIGKLHSDVDRGEGRTKYLLTGEGAGTVFVIDEATGNIHVTKSLDREEKAQYVLLAQAVDRASNRPLEPPSEFIIKVQDINDNPPIFPLGPYHATVPEMSNVGTSVIQVTAHDADDPSYGNSAKLVYTVLDGLPFFSVDPQTGVVRTAIPNMDRETQEEFLVVIQAKDMGGHMGGLSGSTTVTVTLSDVNDNPPKFPQSLYQFSVVETAGPGTLVGRLRAQDPDLGDNALMAYSILDGEGSEAFSISTDLQGRDGLLTVRKPLDFESQRSYSFRVEATNTLIDPAYLRRGPFKDVASVRVAVQDAPEPPAFTQAAYHLTVPENKAPGTLVGQISAADLDSPASPIRYSILPHSDPERCFSIQPEEGTIHTAAPLDREARAWHNLTVLATELGWSWGPERGWVPLLVAEWSAPAAPPQRSPVGSAVGIPQDSSAQASRVQVAIQTLDENDNAPQLAEPYDTFVCDSAAPGQLIQVIRALDRDEVGNSSHVSFQGPLGPDANFTVQDNRDGSASLLLPSRPAPPRHAPYLVPIELWDWGQPALSSTATVTVSVCRCQPDGSVASCWPEAHLSAAGLSTGALLAIITCVGALLALVVLFVALRRQKQEALMVLEEEDVRENIITYDDEGGGEEDTEAFDITALQNPDGAAPPAPGPPARRDVLPRARVSRQPRPPGPADVAQLLALRLREADEDPGVPPYDSVQVYGYEGRGSSCGSLSSLGSGSEAGGAPGPAEPLDDWGPLFRTLAELYGAKEPPAP

SEQ ID NO: 10366 - protein, 819 aa, Homo sapiens; identical to SEQ ID NO: 10365
  Payload ID: 2076;
  Gene Symbol: CDH24;
  Gene Name: cadherin 24, type 2;
  Uniprot ID:  Q86UP0;
  ENSP ID: ENSP00000380517

SEQ ID NO: 10367 - protein, 781 aa, Homo sapiens
  Payload ID: 2076;
  Gene Symbol: CDH24;
  Gene Name: cadherin 24, type 2;
  Uniprot ID:  Q86UP0;
  ENSP ID: ENSP00000434821
MWGLVRLLLAWLGGWGCMGRLAAPARAWAGSREHPGPALLRTRRSWVWNQFFVIEEYAGPEPVLIGKLHSDVDRGEGRTKYLLTGEGAGTVFVIDEATGNIHVTKSLDREEKAQYVLLAQAVDRASNRPLEPPSEFIIKVQDINDNPPIFPLGPYHATVPEMSNVGTSVIQVTAHDADDPSYGNSAKLVYTVLDGLPFFSVDPQTGVVRTAIPNMDRETQEEFLVVIQAKDMGGHMGGLSGSTTVTVTLSDVNDNPPKFPQSLYQFSVVETAGPGTLVGRLRAQDPDLGDNALMAYSILDGEGSEAFSISTDLQGRDGLLTVRKPLDFESQRSYSFRVEATNTLIDPAYLRRGPFKDVASVRVAVQDAPEPPAFTQAAYHLTVPENKAPGTLVGQISAADLDSPASPIRYSILPHSDPERCFSIQPEEGTIHTAAPLDREARAWHNLTVLATELDSSAQASRVQVAIQTLDENDNAPQLAEPYDTFVCDSAAPGQLIQVIRALDRDEVGNSSHVSFQGPLGPDANFTVQDNRDGSASLLLPSRPAPPRHAPYLVPIELWDWGQPALSSTATVTVSVCRCQPDGSVASCWPEAHLSAAGLSTGALLAIITCVGALLALVVLFVALRRQKQEALMVLEEEDVRENIITYDDEGGGEEDTEAFDITALQNPDGAAPPAPGPPARRDVLPRARVSRQPRPPGPADVAQLLALRLREADEDPGVPPYDSVQVYGYEGRGSSCGSLSSLGSGSEAGGAPGPAEPLDDWGPLFRTLAELYGAKEPPAP

SEQ ID NO: 10368 - protein, 781 aa, Homo sapiens; identical to SEQ ID NO: 10367
  Payload ID: 2076;
  Gene Symbol: CDH24;
  Gene Name: cadherin 24, type 2;
  Uniprot ID:  Q86UP0;
  ENSP ID: ENSP00000452493

SEQ ID NO: 10369 - protein, 314 aa, Homo sapiens
  Payload ID: 2076;
  Gene Symbol: CDH24;
  Gene Name: cadherin 24, type 2;
  ENSP ID: ENSP00000478078
MWGLVRLLLAWLGGWGCMGRLAAPARAWAGSREHPGPALLRTRRSWVWNQFFVIEEYAGPEPVLIGKLHSDVDRGEGRTKYLLTGEGAGTVFVIDEATGNIHVTKSLDREEKAQYVLLAQAVDRASNRPLEPPSEFIIKIITCVGALLALVVLFVALRRQKQEALMVLEEEDVRENIITYDDEGGGEEDTEAFDITALQNPDGAAPPAPGPPARRDVLPRARVSRQPRPPGPADVAQLLALRLREADEDPGVPPYDSVQVYGYEGRGSSCGSLSSLGSGSEAGGAPGPAEPLDDWGPLFRTLAELYGAKEPPAP

SEQ ID NO: 10370 - protein, 124 aa, Homo sapiens
  Payload ID: 2077;
  Gene Symbol: CDH26;
  Gene Name: cadherin 26;
  Uniprot ID:  Q8IXH8;
  ENSP ID: ENSP00000244049
MKPLIWTWSDVEGQRPALLICTAAAGPTQGVKAYPDATMHRQLLAPVEGRMAETLNQKLHVANVLEDDPGYLPHVYSEEGECGGAPSLSSLASLEQELQPDLLDSLGSKATPFEEIYSESGVPS

SEQ ID NO: 10371 - protein, 165 aa, Homo sapiens
  Payload ID: 2077;
  Gene Symbol: CDH26;
  Gene Name: cadherin 26;
  Uniprot ID:  Q8IXH8;
  ENSP ID: ENSP00000310845
MKPLIWTWSDVEGQRPALLICTAAAGPTQGVKDLEEVPPSAASQSAQARCALGSWGYGKPFEPRSVKNIHSTPAYPDATMHRQLLAPVEGRMAETLNQKLHVANVLEDDPGYLPHVYSEEGECGGAPSLSSLASLEQELQPDLLDSLGSKATPFEEIYSESGVPS

SEQ ID NO: 10372 - protein, 832 aa, Homo sapiens
  Payload ID: 2077;
  Gene Symbol: CDH26;
  Gene Name: cadherin 26;
  Uniprot ID:  Q8IXH8;
  ENSP ID: ENSP00000339390
MAMRSGRHPSLLLLLVLLLWLLQVSIIDSVQQETDDLTKQTKEKIYQPLRRSKRRWVITTLELEEEDPGPFPKLIGELFNNMSYNMSLMYLISGPGVDEYPEIGLFSLEDHENGRIYVHRPVDREMTPSFTVYFDVVERSTGKIVDTSLIFNIRISDVNDHAPQFPEKEFNITVQENQSAGQPIFQMLAVDLDEENTPNSQVLYFLISQTPLLKESGFRVDRLSGEIRLSGCLDYETAPQFTLLIRARDCGEPSLSSTTTVHVDVQEGNNHRPAFTQENYKVQIPEGRASQGVLRLLVQDRDSPFTSAWRAKFNILHGNEEGHFDISTDPETNEGILNVIKPLDYETRPAQSLIIVVENEERLVFCERGKLQPPRKAAASATVSVQVTDANDPPAFHPQSFIVNKEEGARPGTLLGTFNAMDPDSQIRYELVHDPANWVSVDKNSGVVITVEPIDRESPHVNNSFYVIIIHAVDDGFPPQTATGTLMLFLSDINDNVPTLRPRSRYMEVCESAVHEPLHIEAEDPDLEPFSDPFTFELDNTWGNAEDTWKLGRNWGQSVELLTLRSLPRGNYLVPLFIGDKQGLSQKQTVHVRICPCASGLTCVELADAEVGLHVGALFPVCAAFVALAVALLFLLRCYFVLEPKRHGCSVSNDEGHQTLVMYNAESKGTSAQTWSDVEGQRPALLICTAAAGPTQGVKDLEEVPPSAASQSAQARCALGSWGYGKPFEPRSVKNIHSTPAYPDATMHRQLLAPVEGRMAETLNQKLHVANVLEDDPGYLPHVYSEEGECGGAPSLSSLASLEQELQPDLLDSLGSKATPFEEIYSESGVPS

SEQ ID NO: 10373 - protein, 444 aa, Homo sapiens
  Payload ID: 2077;
  Gene Symbol: CDH26;
  Gene Name: cadherin 26;
  ENSP ID: ENSP00000360030
  MOD_RES (1)..(1): Any amino acid
XRPGTLLGTFNAMDPDSQIRYELVHDPANWVSVDKNSGVVITVEPIDRESPHVNNSFYVIIIHAVDDGFPPQTATGTLMLFLSDINDNVPTLRPRSRYMEVCESAVHEPLHIEAEDPDLEPFSDPFTFELDNTWGNAEDTWKLGRNWGQSVELLTLRSLPRGNYLVPLFIGDKQGLSQKQTVHVRICPCASGLTCVELADAEVGLHVGALFPVCAAFVALAVALLFLLRCYFVLEPKRHGCSVSNDEGHQTLVMYNAESKGTSAQTWSDVEGQRPALLICTAAAGPTQGVKAYPDATMHRQLLAPVEGRMAETLNQSKERNRFSLSRGCIIPQGRATAGRGLPQDIYKEMMPRRLTQTGKRKHGALARTPSFKKVVYDHKEDEENKAGRKQRSHLFKVMQLRNEQGGVRVQSAHSPSPLNKKACFPGDYRGESAGGHNCRAVSG

SEQ ID NO: 10374 - protein, 80 aa, Homo sapiens
  Payload ID: 2077;
  Gene Symbol: CDH26;
  Gene Name: cadherin 26;
  ENSP ID: ENSP00000407939
MKPLIWTWSDVEGQRPALLICTAAAGPTQGVKGYGKPFEPRSVKNIHSTPAYPDATMHRQLLAPVEGRMAETLNQKLHVA

SEQ ID NO: 10375 - protein, 829 aa, Homo sapiens
  Payload ID: 2078;
  Gene Symbol: CDH3;
  Gene Name: cadherin 3, type 1, P-cadherin (placental);
  Uniprot ID:  P22223;
  ENSP ID: ENSP00000264012
MGLPRGPLASLLLLQVCWLQCAASEPCRAVFREAEVTLEAGGAEQEPGQALGKVFMGCPGQEPALFSTDNDDFTVRNGETVQERRSLKERNPLKIFPSKRILRRHKRDWVVAPISVPENGKGPFPQRLNQLKSNKDRDTKIFYSITGPGADSPPEGVFAVEKETGWLLLNKPLDREEIAKYELFGHAVSENGASVEDPMNISIIVTDQNDHKPKFTQDTFRGSVLEGVLPGTSVMQVTATDEDDAIYTYNGVVAYSIHSQEPKDPHDLMFTIHRSTGTISVISSGLDREKVPEYTLTIQATDMDGDGSTTTAVAVVEILDANDNAPMFDPQKYEAHVPENAVGHEVQRLTVTDLDAPNSPAWRATYLIMGGDDGDHFTITTHPESNQGILTTRKGLDFEAKNQHTLYVEVTNEAPFVLKLPTSTATIVVHVEDVNEAPVFVPPSKVVEVQEGIPTGEPVCVYTAEDPDKENQKISYRILRDPAGWLAMDPDSGQVTAVGTLDREDEQFVRNNIYEVMVLAMDNGSPPTTGTGTLLLTLIDVNDHGPVPEPRQITICNQSPVRQVLNITDKDLSPHTSPFQAQLTDDSDIYWTAEVNEEGDTVVLSLKKFLKQDTYDVHLSLSDHGNKEQLTVIRATVCDCHGHVETCPGPWKGGFILPVLGAVLALLFLLLVLLLLVRKKRKIKEPLLLPEDDTRDNVFYYGEEGGGEEDQDYDITQLHRGLEARPEVVLRNDVAPTIIPTPMYRPRPANPDEIGNFIIENLKAANTDPTAPPYDTLLVFDYEGSGSDAASLSSLTSSASDQDQDYDYLNEWGSRFKKLADMYGGGEDD

SEQ ID NO: 10376 - protein, 784 aa, Homo sapiens
  Payload ID: 2078;
  Gene Symbol: CDH3;
  Gene Name: cadherin 3, type 1, P-cadherin (placental);
  Uniprot ID:  P22223;
  ENSP ID: ENSP00000398485
MGLPRGPLASLLLLQVCWLQCAASEPCRAVFREAEVTLEAGGAEQEPGQALGKVFMGCPGQEPALFSTDNDDFTVRNGETVQERRSLKERNPLKIFPSKRILRRHKRDWVVAPISVPENGKGPFPQRLNQLKSNKDRDTKIFYSITGPGADSPPEGVFAVEKETGWLLLNKPLDREEIAKYELFGHAVSENGASVEDPMNISIIVTDQNDHKPKFTQDTFRGSVLEGVLPGTSVMQVTATDEDDAIYTYNGVVAYSIHSQEPKDPHDLMFTIHRSTGTISVISSGLDREKVPEYTLTIQATDMDGDGSTTTAVAVVEILDANDNAPMFDPQKYEAHVPENAVGHEVQRLTVTDLDAPNSPAWRATYLIMGGDDGDHFTITTHPESNQGILTTRKGLDFEAKNQHTLYVEVTNEAPFVLKLPTSTATIVVHVEDVNEAPVFVPPSKVVEVQEGIPTGEPVCVYTAEDPDKENQKISYRILRDPAGWLAMDPDSGQVTAVGTLDREDEQFVRNNIYEVMVLAMDNGSPPTTGTGTLLLTLIDVNDHGPVPEPRQITICNQSPVRQVLNITDKDLSPHTSPFQAQLTDDSDIYWTAEVNEEGDTVVLSLKKFLKQDTYDVHLSLSDHGNKEQLTVIRATVCDCHGHVETCPGPWKGGFILPVLGAVLALLFLLLVLLLLVRKKRKIKEPLLLPEDDTRDNVFYYGEEGGGEEDQDYDITQLHRGLEARPEVVLRNDVAPTIIPTPMYRPRPANPDEIGNFIIEGRGERGSQRGNGGLQLARGRTRRS

SEQ ID NO: 10377 - protein, 73 aa, Homo sapiens
  Payload ID: 2078;
  Gene Symbol: CDH3;
  Gene Name: cadherin 3, type 1, P-cadherin (placental);
  ENSP ID: ENSP00000462111
  MOD_RES (1)..(1): Any amino acid
XCWLQCAASEPCRAVFREAEVTLEAGGAEQEPGQALGKGKKVTEGKESIEDLPIQTYLTKTQERLGGCSNICP

SEQ ID NO: 10378 - protein, 41 aa, Homo sapiens
  Payload ID: 2078;
  Gene Symbol: CDH3;
  Gene Name: cadherin 3, type 1, P-cadherin (placental);
  ENSP ID: ENSP00000463267
  MOD_RES (1)..(1): Any amino acid
XVRQVLNITDKDLSPHTSPFQAQLTDDSDIYWTAEVNEEGT

SEQ ID NO: 10379 - protein, 155 aa, Homo sapiens
  Payload ID: 2078;
  Gene Symbol: CDH3;
  Gene Name: cadherin 3, type 1, P-cadherin (placental);
  ENSP ID: ENSP00000463364
  MOD_RES (1)..(1): Any amino acid
XGHVETCPGPWKGGFILPVLGAVLALLFLLLVLLLLVRKKRKIKEPLLLPEDDTRDNVFYYGEEGGGEEDQDYDITQLHRGLEARPEVVLRNDVAPTIIPTPMYRPRPANPDEIGNFIIEVRRGRPVEGHPLFKPSTSHTGEQAWAWSLGSGFKF

SEQ ID NO: 10380 - protein, 81 aa, Homo sapiens
  Payload ID: 2078;
  Gene Symbol: CDH3;
  Gene Name: cadherin 3, type 1, P-cadherin (placental);
  ENSP ID: ENSP00000463415
VVLRNDVAPTIIPTPMYRPRPANPDEIGNFIIEVLLLCRSPPWQEALATGYSLDPAWPVPPFPPTTPGKTKTQPFHKYMST

SEQ ID NO: 10381 - protein, 48 aa, Homo sapiens
  Payload ID: 2078;
  Gene Symbol: CDH3;
  Gene Name: cadherin 3, type 1, P-cadherin (placental);
  ENSP ID: ENSP00000464021
MGLPRGPLASLLLLQYSWAALGKSQLCLALIMMTSLCGMARQSRKEGH

SEQ ID NO: 10382 - protein, 59 aa, Homo sapiens
  Payload ID: 2078;
  Gene Symbol: CDH3;
  Gene Name: cadherin 3, type 1, P-cadherin (placental);
  ENSP ID: ENSP00000464058
  MOD_RES (1)..(1): Any amino acid
XLNQLKSNKDRDTKIFYSITGPGADSPPEGVFAVEKETGWLLLNKPLDREEIAKYEVLL

SEQ ID NO: 10383 - protein, 842 aa, Homo sapiens
  Payload ID: 2079;
  Gene Symbol: CDH4;
  Gene Name: cadherin 4, type 1, R-cadherin (retinal);
  Uniprot ID:  P55283;
  ENSP ID: ENSP00000443301
MDFKVGADGTVFATRELQVPSEQVAFTVTAWDSQTAEKWDAVVRLLVAQTSSPHSGHKPQKGKKVVALDPSPPPKDTLLPWPQHQNANGLRRRKRDWVIPPINVPENSRGPFPQQLVRIRSDKDNDIPIRYSITGVGADQPPMEVFSIDSMSGRMYVTRPMDREEHASYHLRAHAVDMNGNKVENPIDLYIYVIDMNDNRPEFINQVYNGSVDEGSKPGTYVMTVTANDADDSTTANGMVRYRIVTQTPQSPSQNMFTINSETGDIVTVAAGLDREKVQQYTVIVQATDMEGNLNYGLSNTATAIITVTDVNDNPPEFTASTFAGEVPENRVETVVANLTVMDRDQPHSPNWNAVYRIISGDPSGHFSVRTDPVTNEGMVTVVKAVDYELNRAFMLTVMVSNQAPLASGIQMSFQSTAGVTISIMDINEAPYFPSNHKLIRLEEGVPPGTVLTTFSAVDPDRFMQQAVRYSKLSDPASWLHINATNGQITTAAVLDRESLYTKNNVYEATFLAADNGIPPASGTGTLQIYLIDINDNAPELLPKEAQICEKPNLNAINITAADADVDPNIGPYVFELPFVPAAVRKNWTITRLNGDYAQLSLRILYLEAGMYDVPIIVTDSGNPPLSNTSIIKVKVCPCDDNGDCTTIGAVAAAGLGTGAIVAILICILILLTMVLLFVMWMKRREKERHTKQLLIDPEDDVRDNILKYDEEGGGEEDQDYDLSQLQQPEAMGHVPSKAPGVRRVDERPVGAEPQYPIRPMVPHPGDIGDFINEGLRAADNDPTAPPYDSLLVFDYEGSGSTAGSVSSLNSSSSGDQDYDYLNDWGPRFKKLADMYGGGEED

SEQ ID NO: 10384 - protein, 822 aa, Homo sapiens
  Payload ID: 2079;
  Gene Symbol: CDH4;
  Gene Name: cadherin 4, type 1, R-cadherin (retinal);
  ENSP ID: ENSP00000480844
MPKSTGMLHGGRENAGVKFSSCVGTKGTQYETNSMDFKPQKGKKVVALDPSPPPKDTLLPWPQHQNANGLRRRKRDWVIPPINVPENSRGPFPQQLVRIRSDKDNDIPIRYSITGVGADQPPMEVFSIDSMSGRMYVTRPMDREEHASYHLRAHAVDMNGNKVENPIDLYIYVIDMNDNRPEFINQVYNGSVDEGSKPGTYVMTVTANDADDSTTANGMVRYRIVTQTPQSPSQNMFTINSETGDIVTVAAGLDREKVQQYTVIVQATDMEGNLNYGLSNTATAIITVTDVNDNPPEFTASTFAGEVPENRVETVVANLTVMDRDQPHSPNWNAVYRIISGDPSGHFSVRTDPVTNEGMVTVVKAVDYELNRAFMLTVMVSNQAPLASGIQMSFQSTAGVTISIMDINEAPYFPSNHKLIRLEEGVPPGTVLTTFSAVDPDRFMQQAVRYSKLSDPASWLHINATNGQITTAAVLDRESLYTKNNVYEATFLAADNGIPPASGTGTLQIYLIDINDNAPELLPKEAQICEKPNLNAINITAADADVDPNIGPYVFELPFVPAAVRKNWTITRLNGDYAQLSLRILYLEAGMYDVPIIVTDSGNPPLSNTSIIKVKVCPCDDNGDCTTIGAVAAAGLGTGAIVAILICILILLTMVLLFVMWMKRREKERHTKQLLIDPEDDVRDNILKYDEEGGGEEDQDYDLSQLQQPEAMGHVPSKAPGVRRVDERPVGAEPQYPIRPMVPHPGDIGDFINEGLRAADNDPTAPPYDSLLVFDYEGSGSTAGSVSSLNSSSSGDQDYDYLNDWGPRFKKLADMYGGGEED

SEQ ID NO: 10385 - protein, 916 aa, Homo sapiens
  Payload ID: 2079;
  Gene Symbol: CDH4;
  Gene Name: cadherin 4, type 1, R-cadherin (retinal);
  Uniprot ID:  P55283;
  ENSP ID: ENSP00000484928
MTAGAGVLLLLLSLSGALRAHNEDLTTRETCKAGFSEDDYTALISQNILEGEKLLQVKFSSCVGTKGTQYETNSMDFKVGADGTVFATRELQVPSEQVAFTVTAWDSQTAEKWDAVVRLLVAQTSSPHSGHKPQKGKKVVALDPSPPPKDTLLPWPQHQNANGLRRRKRDWVIPPINVPENSRGPFPQQLVRIRSDKDNDIPIRYSITGVGADQPPMEVFSIDSMSGRMYVTRPMDREEHASYHLRAHAVDMNGNKVENPIDLYIYVIDMNDNRPEFINQVYNGSVDEGSKPGTYVMTVTANDADDSTTANGMVRYRIVTQTPQSPSQNMFTINSETGDIVTVAAGLDREKVQQYTVIVQATDMEGNLNYGLSNTATAIITVTDVNDNPPEFTASTFAGEVPENRVETVVANLTVMDRDQPHSPNWNAVYRIISGDPSGHFSVRTDPVTNEGMVTVVKAVDYELNRAFMLTVMVSNQAPLASGIQMSFQSTAGVTISIMDINEAPYFPSNHKLIRLEEGVPPGTVLTTFSAVDPDRFMQQAVRYSKLSDPASWLHINATNGQITTAAVLDRESLYTKNNVYEATFLAADNGIPPASGTGTLQIYLIDINDNAPELLPKEAQICEKPNLNAINITAADADVDPNIGPYVFELPFVPAAVRKNWTITRLNGDYAQLSLRILYLEAGMYDVPIIVTDSGNPPLSNTSIIKVKVCPCDDNGDCTTIGAVAAAGLGTGAIVAILICILILLTMVLLFVMWMKRREKERHTKQLLIDPEDDVRDNILKYDEEGGGEEDQDYDLSQLQQPEAMGHVPSKAPGVRRVDERPVGAEPQYPIRPMVPHPGDIGDFINEGLRAADNDPTAPPYDSLLVFDYEGSGSTAGSVSSLNSSSSGDQDYDYLNDWGPRFKKLADMYGGGEED

SEQ ID NO: 10386 - protein, 566 aa, Homo sapiens
  Payload ID: 2079;
  Gene Symbol: CDH4;
  Gene Name: cadherin 4, type 1, R-cadherin (retinal);
  ENSP ID: ENSP00000486568
KVQQYTVIVQATDMEGNLNYGLSNTATAIITVTDVNDNPPEFTASTFAGEVPENRVETVVANLTVMDRDQPHSPNWNAVYRIISGDPSGHFSVRTDPVTNEGMVTVVKAVDYELNRAFMLTVMVSNQAPLASGIQMSFQSTAGVTISIMDINEAPYFPSNHKLIRLEEGVPPGTVLTTFSAVDPDRFMQQAVRYSKLSDPASWLHINATNGQITTAAVLDRESLYTKNNVYEATFLAADNGIPPASGTGTLQIYLIDINDNAPELLPKEAQICERPNLNAINITAADADVDPNIGPYVFELPFVPAAVRKNWTITRLNGDYAQLSLRILYLEAGMYDVPIIVTDSGNPPLSNTSIIKVKVCPCDDNGDCTTIGAVAAAGLGTGAIVAILICILILLTMVLLFVMWMKRREKERHTKQLLIDPEDDVRDNILKYDEEGGGEEDQDYDLSQLQQPEAMGHVPSKAPGVRRVDERPVGAEPQYPIRPMVPHPGDIGDFINEGLRAADNDPTAPPYDSLLVFDYEGSGSTAGSVSSLNSSSSGDQDYDYLNDWGPRFKKLADMYGGGEED

SEQ ID NO: 10387 - protein, 566 aa, Homo sapiens; identical to SEQ ID NO: 10386
  Payload ID: 2079;
  Gene Symbol: CDH4;
  Gene Name: cadherin 4, type 1, R-cadherin (retinal);
  ENSP ID: ENSP00000486680

SEQ ID NO: 10388 - protein, 566 aa, Homo sapiens; identical to SEQ ID NO: 10386
  Payload ID: 2079;
  Gene Symbol: CDH4;
  Gene Name: cadherin 4, type 1, R-cadherin (retinal);
  ENSP ID: ENSP00000487355

SEQ ID NO: 10389 - protein, 784 aa, Homo sapiens
  Payload ID: 2080;
  Gene Symbol: CDH5;
  Gene Name: cadherin 5, type 2 (vascular endothelium);
  Uniprot ID:  P33151;
  ENSP ID: ENSP00000344115
MQRLMMLLATSGACLGLLAVAAVAAAGANPAQRDTHSLLPTHRRQKRDWIWNQMHIDEEKNTSLPHHVGKIKSSVSRKNAKYLLKGEYVGKVFRVDAETGDVFAIERLDRENISEYHLTAVIVDKDTGENLETPSSFTIKVHDVNDNWPVFTHRLFNASVPESSAVGTSVISVTAVDADDPTVGDHASVMYQILKGKEYFAIDNSGRIITITKSLDREKQARYEIVVEARDAQGLRGDSGTATVLVTLQDINDNFPFFTQTKYTFVVPEDTRVGTSVGSLFVEDPDEPQNRMTKYSILRGDYQDAFTIETNPAHNEGIIKPMKPLDYEYIQQYSFIVEATDPTIDLRYMSPPAGNRAQVIINITDVDEPPIFQQPFYHFQLKENQKKPLIGTVLAMDPDAARHSIGYSIRRTSDKGQFFRVTKKGDIYNEKELDREVYPWYNLTVEAKELDSTGTPTGKESIVQVHIEVLDENDNAPEFAKPYQPKVCENAVHGQLVLQISAIDKDITPRNVKFKFILNTENNFTLTDNHDNTANITVKYGQFDREHTKVHFLPVVISDNGMPSRTGTSTLTVAVCKCNEQGEFTFCEDMAAQVGVSIQAVVAILLCILTITVITLLIFLRRRLRKQARAHGKSVPEIHEQLVTYDEEGGGEMDTTSYDVSVLNSVRRGGAKPPRPALDARPSLYAQVQKPPRHAPGAHGGPGEMAAMIEVKKDEADHDGDGPPYDTLHIYGYEGSESIAESLSSLGTDSSDSDVDYDFLNDWGPRFKMLAELYGSDPREELLY

SEQ ID NO: 10390 - protein, 131 aa, Homo sapiens
  Payload ID: 2080;
  Gene Symbol: CDH5;
  Gene Name: cadherin 5, type 2 (vascular endothelium);
  ENSP ID: ENSP00000455302
MQRLMMLLATSGACLGLLAVAAVAAAGANPAQRDTHSLLPTHRRQKRDWIWNQMHIDEEKNTSLPHHVGKIKSSVSRKNAKYLLKGEYVGKVFRVDAETGDVFAIERLDRENISEYHLTAVIVDKDTGENL

SEQ ID NO: 10391 - protein, 17 aa, Homo sapiens
  Payload ID: 2080;
  Gene Symbol: CDH5;
  Gene Name: cadherin 5, type 2 (vascular endothelium);
  ENSP ID: ENSP00000455655
MQRLMMLLATSGACLGL

SEQ ID NO: 10392 - protein, 110 aa, Homo sapiens
  Payload ID: 2080;
  Gene Symbol: CDH5;
  Gene Name: cadherin 5, type 2 (vascular endothelium);
  ENSP ID: ENSP00000456028
MQRLMMLLATSGACLGLLAVAAVAAAGANPAQRDTHSLLPTHRRQKRDWIWNQMHIDEEKNTSLPHHVGKIKSSVSRKNAKYLLKGEYVGKVFRVDAETGDVTQMSPRTG

SEQ ID NO: 10393 - protein, 76 aa, Homo sapiens
  Payload ID: 2080;
  Gene Symbol: CDH5;
  Gene Name: cadherin 5, type 2 (vascular endothelium);
  ENSP ID: ENSP00000456093
MQRLMMLLATSGACLGLLAVAAVAAAGANPAQRDTHSLLPTHRRQKRDWIWNQMHIDEEKNTSLPHHVGKIKSSVS

SEQ ID NO: 10394 - protein, 406 aa, Homo sapiens
  Payload ID: 2080;
  Gene Symbol: CDH5;
  Gene Name: cadherin 5, type 2 (vascular endothelium);
  ENSP ID: ENSP00000458878
MQRLMMLLATSGACLGLLAVAAVAAAGANPAQRDTHSLLPTHRRQKRDWIWNQMHIDEEKNTSLPHHVGKIKSSVSRKNAKYLLKGEYVGKVFRVDAETGDVFAIERLDRENISEYHLTAVIVDKDTGENLETPSSFTIKVHDVNDNWPVFTHRLFNASVPESSAVGTSVISVTAVDADDPTVGDHASVMYQILKGKEYFAIDNSGRIITITKSLDREKQARYEIVVEARDAQGLRGDSGTATVLVTLQDINDNFPFFTQTKYTFVVPEDTRVGTSVGSLFVEDPDEPQNRMTKYSILRGDYQDAFTIETNPAHNEGIIKPMKPLDYEYIQQYSFIVEATDPTIDLRYMSPPAGNRAQVIINITDVDEPPIFQQPFYHFQLKENQKKPLIGTVLAMDPDAARHSIG

SEQ ID NO: 10395 - protein, 223 aa, Homo sapiens
  Payload ID: 2080;
  Gene Symbol: CDH5;
  Gene Name: cadherin 5, type 2 (vascular endothelium);
  ENSP ID: ENSP00000461880
MPSRTGTSTLTVAVCKCNEQGEFTFCEDMAAQVGVSIQAVVAILLCILTITVITLLIFLRRRLRKQARAHGKSVPEIHEQLVTYDEEGGGEMDTTSYDVSVLNSVRRGGAKPPRPALDARPSLYAQVQKPPRHAPGAHGGPGEMAAMIEVKKDEADHDGDGPPYDTLHIYGYEGSESIAESLSSLGTDSSDSDVDYDFLNDWGPRFKMLAELYGSDPREELLY

SEQ ID NO: 10396 - protein, 669 aa, Homo sapiens
  Payload ID: 2080;
  Gene Symbol: CDH5;
  Gene Name: cadherin 5, type 2 (vascular endothelium);
  Uniprot ID:  P33151;
  ENSP ID: ENSP00000479381
MQRLMMLLATSGACLGLLAVAAVAAAGANPAQRDTHSLLPTHRRQKRDWIWNQMHIDEEKNTSLPHHVGKIKSSVSRKNAKYLLKGEYVGKVFRVDAETGDVFAIERLDRENISEYHLTAVIVDKDTGENLETPSSFTIKVHDVNDNWPVFTHRLFNASVPESSAVGTSVISVTAVDADDPTVGDHASVMYQILKGKEYFAIDNSGRIITITKSLDREKQARYEIVVEARDAQGLRGDSGTATVLVTLQDINDNFPFFTQTKYTFVVPEDTRVGTSVGSLFVEDPDEPQNRMTKYSILRGDYQDAFTIETNPAHNEGIIKPMKPLDYEYIQQYSFIVEATDPTIDLRYMSPPAGNRAQVIINITDVDEPPIFQQPFYHFQLVLQISAIDKDITPRNVKFKFILNTENNFTLTDNHDNTANITVKYGQFDREHTKVHFLPVVISDNGMPSRTGTSTLTVAVCKCNEQGEFTFCEDMAAQVGVSIQAVVAILLCILTITVITLLIFLRRRLRKQARAHGKSVPEIHEQLVTYDEEGGGEMDTTSYDVSVLNSVRRGGAKPPRPALDARPSLYAQVQKPPRHAPGAHGGPGEMAAMIEVKKDEADHDGDGPPYDTLHIYGYEGSESIAESLSSLGTDSSDSDVDYDFLNDWGPRFKMLAELYGSDPREELLY

SEQ ID NO: 10397 - protein, 790 aa, Homo sapiens
  Payload ID: 2081;
  Gene Symbol: CDH6;
  Gene Name: cadherin 6, type 2, K-cadherin (fetal kidney);
  Uniprot ID:  P55285;
  ENSP ID: ENSP00000265071
MRTYRYFLLLFWVGQPYPTLSTPLSKRTSGFPAKKRALELSGNSKNELNRSKRSWMWNQFFLLEEYTGSDYQYVGKLHSDQDRGDGSLKYILSGDGAGDLFIINENTGDIQATKRLDREEKPVYILRAQAINRRTGRPVEPESEFIIKIHDINDNEPIFTKEVYTATVPEMSDVGTFVVQVTATDADDPTYGNSAKVVYSILQGQPYFSVESETGIIKTALLNMDRENREQYQVVIQAKDMGGQMGGLSGTTTVNITLTDVNDNPPRFPQSTYQFKTPESSPPGTPIGRIKASDADVGENAEIEYSITDGEGLDMFDVITDQETQEGIITVKKLLDFEKKKVYTLKVEASNPYVEPRFLYLGPFKDSATVRIVVEDVDEPPVFSKLAYILQIREDAQINTTIGSVTAQDPDAARNPVKYSVDRHTDMDRIFNIDSGNGSIFTSKLLDRETLLWHNITVIATEINNPKQSSRVPLYIKVLDVNDNAPEFAEFYETFVCEKAKADQLIQTLHAVDKDDPYSGHQFSFSLAPEAASGSNFTIQDNKDNTAGILTRKNGYNRHEMSTYLLPVVISDNDYPVQSSTGTVTVRVCACDHHGNMQSCHAEALIHPTGLSTGALVAILLCIVILLVTVVLFAALRRQRKKEPLIISKEDIRDNIVSYNDEGGGEEDTQAFDIGTLRNPEAIEDNKLRRDIVPEALFLPRRTPTARDNTDVRDFINQRLKENDTDPTAPPYDSLATYAYEGTGSVADSLSSLESVTTDADQDYDYLSDWGPRFKKLADMYGGVDSDKDS

SEQ ID NO: 10398 - protein, 608 aa, Homo sapiens
  Payload ID: 2081;
  Gene Symbol: CDH6;
  Gene Name: cadherin 6, type 2, K-cadherin (fetal kidney);
  ENSP ID: ENSP00000424843
MWNQFFLLEEYTGSDYQYVGKLHSDQDRGDGSLKYILSGDGAGDLFIINENTGDIQATKRLDREEKPVYILRAQAINRRTGRPVEPESEFIIKIHDINDNEPIFTKEVYTATVPEMSDVGTFVVQVTATDADDPTYGNSAKVVYSILQGQPYFSVESETGIIKTALLNMDRENREQYQVVIQAKDMGGQMGGLSGTTTVNITLTDVNDNPPRFPQSTYQFKTPESSPPGTPIGRIKASDADVGENAEIEYSITDGEGLDMFDVITDQETQEGIITVKKLLDFEKKKVYTLKVEASNPYVEPRFLYLGPFKDSATVRIVVEDVDEPPVFSKLAYILQIREDAQINTTIGSVTAQDPDAARNPVKYSVDRHTDMDRIFNIDSGNGSIFTSKLLDRETLLWHNITVIATEINNPKQSSRVPLYIKVLDVNDNAPEFAEFYETFVCEKAKADQLIQTLHAVDKDDPYSGHQFSFSLAPEAASGSNFTIQDNKDNTAGILTRKNGYNRHEMSTYLLPVVISDNDYPVQSSTGTVTVRVCACDHHGNMQSCHAEALIHPTGLSTGALVAILLCIVILLGKLVLPASYLPMVRGSHCYCDTLDLSASPIKAYSLI

SEQ ID NO: 10399 - protein, 785 aa, Homo sapiens
  Payload ID: 2082;
  Gene Symbol: CDH7;
  Gene Name: cadherin 7, type 2;
  Uniprot ID:  Q9ULB5;
  ENSP ID: ENSP00000319166
MKLGKVEFCHFLQLIALFLCFSGMSQAELSRSRSKPYFQSGRSRTKRSWVWNQFFVLEEYMGSDPLYVGKLHSDVDKGDGSIKYILSGEGASSIFIIDENTGDIHATKRLDREEQAYYTLRAQALDRLTNKPVEPESEFVIKIQDINDNEPKFLDGPYTAGVPEMSPVGTSVVQVTATDADDPTYGNSARVVYSILQGQPYFSVEPKTGVIKTALPNMDREAKDQYLLVIQAKDMVGQNGGLSGTTSVTVTLTDVNDNPPRFPRRSYQYNVPESLPVASVVARIKAADADIGANAEMEYKIVDGDGLGIFKISVDKETQEGIITIQKELDFEAKTSYTLRIEAANKDADPRFLSLGPFSDTTTVKIIVEDVDEPPVFSSPLYPMEVSEATQVGNIIGTVAAHDPDSSNSPVRYSIDRNTDLERYFNIDANSGVITTAKSLDRETNAIHNITVLAMESQNPSQVGRGYVAITILDINDNAPEFAMDYETTVCENAQPGQVIQKISAVDKDEPSNGHQFYFSLTTDATNNHNFSLKDNKDNTASILTRRNGFRRQEQSVYYLPIFIVDSGSPSLSSTNTLTIRVCDCDADGVAQTCNAEAYVLPAGLSTGALIAILACVLTLLVLILLIVTMRRRKKEPLIFDEERDIRENIVRYDDEGGGEEDTEAFDMAALRNLNVIRDTKTRRDVTPEIQFLSRPAFKSIPDNVIFREFIWERLKEADVDPGAPPYDSLQTYAFEGNGSVAESLSSLDSISSNSDQNYDYLSDWGPRFKRLADMYGTGQESLYS

SEQ ID NO: 10400 - protein, 785 aa, Homo sapiens; identical to SEQ ID NO: 10399
  Payload ID: 2082;
  Gene Symbol: CDH7;
  Gene Name: cadherin 7, type 2;
  Uniprot ID:  Q9ULB5;
  ENSP ID: ENSP00000381058

SEQ ID NO: 10401 - protein, 630 aa, Homo sapiens
  Payload ID: 2082;
  Gene Symbol: CDH7;
  Gene Name: cadherin 7, type 2;
  ENSP ID: ENSP00000443030
MKLGKVEFCHFLQLIALFLCFSGMSQAELSRSRSKPYFQSGRSRTKRSWVWNQFFVLEEYMGSDPLYVGKLHSDVDKGDGSIKYILSGEGASSIFIIDENTGDIHATKRLDREEQAYYTLRAQALDRLTNKPVEPESEFVIKIQDINDNEPKFLDGPYTAGVPEMSPVGTSVVQVTATDADDPTYGNSARVVYSILQGQPYFSVEPKTGVIKTALPNMDREAKDQYLLVIQAKDMVGQNGGLSGTTSVTVTLTDVNDNPPRFPRRSYQYNVPESLPVASVVARIKAADADIGANAEMEYKIVDGDGLGIFKISVDKETQEGIITIQKELDFEAKTSYTLRIEAANKDADPRFLSLGPFSDTTTVKIIVEDVDEPPVFSSPLYPMEVSEATQVGNIIGTVAAHDPDSSNSPVRYSIDRNTDLERYFNIDANSGVITTAKSLDRETNAIHNITVLAMESQNPSQVGRGYVAITILDINDNAPEFAMDYETTVCENAQPGQVIQKISAVDKDEPSNGHQFYFSLTTDATNNHNFSLKDNKDNTASILTRRNGFRRQEQSVYYLPIFIVDSGSPSLSSTNTLTIRVCDCDADGVAQTCNAEAYVLPAGLSTGALIAILACVLTLLGRYCFQGLL

SEQ ID NO: 10402 - protein, 745 aa, Homo sapiens
  Payload ID: 2083;
  Gene Symbol: CDH8;
  Gene Name: cadherin 8, type 2;
  ENSP ID: ENSP00000299345
MPERLAEMLLDLWTPLIILWITLPPCIYMAPMNQSQVLMSGSPLELNSLGEEQRILNRSKRGWVWNQMFVLEEFSGPEPILVGRLHTDLDPGSKKIKYILSGDGAGTIFQINDVTGDIHAIKRLDREEKAEYTLTAQAVDWETSKPLEPPSEFIIKVQDINDNAPEFLNGPYHATVPEMSILGTSVTNVTATDADDPVYGNSAKLVYSILEGQPYFSIEPETAIIKTALPNMDREAKEEYLVVIQAKDMGGHSGGLSGTTTLTVTLTDVNDNPPKFAQSLYHFSVPEDVVLGTAIGRVKANDQDIGENAQSSYDIIDGDGTALFEITSDAQAQDGIIRLRKPLDFETKKSYTLKVEAANVHIDPRFSGRGPFKDTATVKIVVEDADEPPVFSSPTYLLEVHENAALNSVIGQVTARDPDITSSPIRFSIDRHTDLERQFNINADDGKITLATPLDRELSVWHNITIIATEIRNHSQISRVPVAIKVLDVNDNAPEFASEYEAFLCENGKPGQVIQTVSAMDKDDPKNGHYFLYSLLPEMVNNPNFTIKKNEDNSLSILAKHNGFNRQKQEVYLLPIIISDSGNPPLSSTSTLTIRVCGCSNDGVVQSCNVEAYVLPIGLSMGALIAILACIILLLVIVVLFVTLRRHKNEPLIIKDDEDVRENIIRYDDEGGGEEDTEAFDIATLQNPDGINGFLPRKDIKPDLQFMPRLQKRVARRNITRCCLKRKTVENHGFNELRGQDQKRK

SEQ ID NO: 10403 - protein, 744 aa, Homo sapiens
  Payload ID: 2083;
  Gene Symbol: CDH8;
  Gene Name: cadherin 8, type 2;
  ENSP ID: ENSP00000462018
MPERLAEMLLDLWTPLIILWITLPPCIYMAPMNQSQVLMSGSPLELNSLGEEQRILNRSKRGWVWNQMFVLEEFSGPEPILVGRLHTDLDPGSKKIKYILSGDGAGTIFQINDVTGDIHAIKRLDREEKAEYTLTAQAVDWETSKPLEPPSEFIIKVQDINDNAPEFLNGPYHATVPEMSILGTSVTNVTATDADDPVYGNSAKLVYSILEGQPYFSIEPETAIIKTALPNMDREAKEEYLVVIQAKDMGGHSGGLSGTTTLTVTLTDVNDNPPKFAQSLYHFSVPEDVVLGTAIGRVKANDQDIGENAQSSYDIIDGDGTALFEITSDAQAQDGIIRLRKPLDFETKKSYTLKVEAANVHIDPRFSGRGPFKDTATVKIVVEDADEPPVFSSPTYLLEVHENAALNSVIGQVTARDPDITSSPIRFSIDRHTDLERQFNINADDGKITLATPLDRELSVWHNITIIATEIRNHSQISRVPVAIKVLDVNDNAPEFASEYEAFLCENGKPGQVIQTVSAMDKDDPKNGHYFLYSLLPEMVNNPNFTIKKNEDNSLSILAKHNGFNRQKQEVYLLPIIISDSGNPPLSSTSTLTIRVCGCSNDGVVQSCNVEAYVLPIGLSMGALIAILACIILLLVIVVLFVTLRRHKNEPLIIKDDEDVRENIIRYDDEGGGEEDTEAFDIATLQNPDGINGFLPRWGLPIQWWEERNPIQTCLFSRSRIPRSLLFIFFHKDTKINCITQWTT

SEQ ID NO: 10404 - protein, 799 aa, Homo sapiens
  Payload ID: 2083;
  Gene Symbol: CDH8;
  Gene Name: cadherin 8, type 2;
  Uniprot ID:  P55286;
  ENSP ID: ENSP00000462701
MPERLAEMLLDLWTPLIILWITLPPCIYMAPMNQSQVLMSGSPLELNSLGEEQRILNRSKRGWVWNQMFVLEEFSGPEPILVGRLHTDLDPGSKKIKYILSGDGAGTIFQINDVTGDIHAIKRLDREEKAEYTLTAQAVDWETSKPLEPPSEFIIKVQDINDNAPEFLNGPYHATVPEMSILGTSVTNVTATDADDPVYGNSAKLVYSILEGQPYFSIEPETAIIKTALPNMDREAKEEYLVVIQAKDMGGHSGGLSGTTTLTVTLTDVNDNPPKFAQSLYHFSVPEDVVLGTAIGRVKANDQDIGENAQSSYDIIDGDGTALFEITSDAQAQDGIIRLRKPLDFETKKSYTLKVEAANVHIDPRFSGRGPFKDTATVKIVVEDADEPPVFSSPTYLLEVHENAALNSVIGQVTARDPDITSSPIRFSIDRHTDLERQFNINADDGKITLATPLDRELSVWHNITIIATEIRNHSQISRVPVAIKVLDVNDNAPEFASEYEAFLCENGKPGQVIQTVSAMDKDDPKNGHYFLYSLLPEMVNNPNFTIKKNEDNSLSILAKHNGFNRQKQEVYLLPIIISDSGNPPLSSTSTLTIRVCGCSNDGVVQSCNVEAYVLPIGLSMGALIAILACIILLLVIVVLFVTLRRHKNEPLIIKDDEDVRENIIRYDDEGGGEEDTEAFDIATLQNPDGINGFLPRKDIKPDLQFMPRQGLAPVPNGVDVDEFINVRLHEADNDPTAPPYDSIQIYGYEGRGSVAGSLSSLESTTSDSDQNFDYLSDWGPRFKRLGELYSVGESDKET

SEQ ID NO: 10405 - protein, 81 aa, Homo sapiens
  Payload ID: 2083;
  Gene Symbol: CDH8;
  Gene Name: cadherin 8, type 2;
  ENSP ID: ENSP00000462847
MPERLAEMLLDLWTPLIILWITLPPCIYMAPMNQSQVLMSGSPLELNSLGEEQRILNRSKRGWVWNQMFVLEEFSGPEPIL

SEQ ID NO: 10406 - protein, 425 aa, Homo sapiens
  Payload ID: 2083;
  Gene Symbol: CDH8;
  Gene Name: cadherin 8, type 2;
  ENSP ID: ENSP00000462976
MPERLAEMLLDLWTPLIILWITLPPCIYMAPMNQSQVLMSGSPLELNSLGEEQRILNRSKRGWVWNQMFVLEEFSGPEPILVGRLHTDLDPGSKKIKYILSGDGAGTIFQINDVTGDIHAIKRLDREEKAEYTLTAQAVDWETSKPLEPPSEFIIKVQDINDNAPEFLNGPYHATVPEMSILGTSVTNVTATDADDPVYGNSAKLVYSILEGQPYFSIEPETAIIKTALPNMDREAKEEYLVVIQAKDMGGHSGGLSGTTTLTVTLTDVNDNPPKFAQSLYHFSVPEDVVLGTAIGRVKANDQDIGENAQSSYDIIDGDGTALFEITSDAQAQDGIIRLRKPLDFETKKSYTLKVEAANVHIDPRFSGRGPFKDTATVKIVVEDADEPPVFSSPTYLLEVHENAALNSVIGQVTARDPDITSSPI

SEQ ID NO: 10407 - protein, 476 aa, Homo sapiens
  Payload ID: 2083;
  Gene Symbol: CDH8;
  Gene Name: cadherin 8, type 2;
  ENSP ID: ENSP00000463266
MPERLAEMLLDLWTPLIILWITLPPCIYMAPMNQSQVLMSGSPLELNSLGEEQRILNRSKRGWVWNQMFVLEEFSGPEPILVGRLHTDLDPGSKKIKYILSGDGAGTIFQINDVTGDIHAIKRLDREEKAEYTLTAQAVDWETSKPLEPPSEFIIKVQDINDNAPEFLNGPYHATVPEMSILGTSVTNVTATDADDPVYGNSAKLVYSILEGQPYFSIEPETAIIKTALPNMDREAKEEYLVVIQAKDMGGHSGGLSGTTTLTVTLTDVNDNPPKFAQSLYHFSVPEDVVLGTAIGRVKANDQDIGENAQSSYDIIDGDGTALFEITSDAQAQDGIIRLRKPLDFETKKSYTLKVEAANVHIDPRFSGRGPFKDTATVKIVVEDADEPPVFSSPTYLLEVHENAALNSVIGQVTARDPDITSSPIRFSIDRHTDLERQFNINADDGKITLATPLDRELSVWHNITIIATEISHSNC

SEQ ID NO: 10408 - protein, 532 aa, Homo sapiens
  Payload ID: 2083;
  Gene Symbol: CDH8;
  Gene Name: cadherin 8, type 2;
  ENSP ID: ENSP00000463511
MPERLAEMLLDLWTPLIILWITLPPCIYMAPMNQSQVLMSGSPLELNSLGEEQRILNRSKRGWVWNQMFVLEEFSGPEPILVGRLHTDLDPGSKKIKYILSGDGAGTIFQINDVTGDIHAIKRLDREEKAEYTLTAQAVDWETSKPLEPPSEFIIKVQDINDNAPEFLNGPYHATVPEMSILGTSVTNVTATDADDPVYGNSAKLVYSILEGQPYFSIEPETAIIKTALPNMDREAKEEYLVVIQAKDMGGHSGGLSGTTTLTVTLTDVNDNPPKFAQSLYHFSVPEDVVLGTAIGRVKANDQDIGENAQSSYDIIDGDGTALFEITSDAQAQDGIIRLRKPLDFETKKSYTLKVEAANVHIDPRFSGRGPFKDTATVKIVVEDADEPPVFSSPTYLLEVHENAALNSVIGQVTARDPDITSSPIRFSIDRHTDLERQFNINADDGKITLATPLDRELSVWHNITIIATEIRNHSQISRVPVAIKVLDVNDNAPEFASEYEAFLCENGKPGQVNISMLLMLNMFVYNCLIFD

SEQ ID NO: 10409 - protein, 789 aa, Homo sapiens
  Payload ID: 2084;
  Gene Symbol: CDH9;
  Gene Name: cadherin 9, type 2 (T1-cadherin);
  Uniprot ID:  Q9ULB4;
  ENSP ID: ENSP00000231021
MRTYHYIPLFIWTYMFHTVDTILLQEKPNSYLSSKKIAGLTKDDGKMLRRTKRGWMWNQFFLLEEYTGTDTQYVGKLHTDQDKGDGNLKYILTGDGAGSLFVIDENTGDIHAAKKLDREEKSLYILRAKAIDRKTGRQVEPESEFIIKIHDINDNEPKFTKDLYTASVPEMSGVGTSVIQVTATDADDANYGNSAKVVYSILQGQPYFSVDPESGIIKTALPDMSRENREQYQVVIQAKDMGGQMGGLSGTTTVNITLTDVNNNPPRFPQSTYQFNSPESVPLGTHLGRIKANDPDVGENAEMEYSIAEGDGADMFDVITDKDTQEGIITVKQNLDFENQMLYTLRVDASNTHPDPRFLHLGPFKDTAVVKISVEDIDEPPVFTKVSYLIEVDEDVKEGSIIGQVTAYDPDARNNLIKYSVDRHTDMDRIFGIHSENGSIFTLKALDRESSPWHNITVTATEINNPKQSSHIPVFIRILDINDHAPEFAMYYETFVCENAKPGQLIQTVSVMDKDDPPRGHKFFFEPVPEFTLNPNFTIVDNKDNTAGIMTRKDGYSRNKMSTYLLPILIFDNDYPIQSSTGTLTIRVCACDNQGNMQSCTAEALILSAGLSTGALVAILLCVLILLILVVLFAALKRQRKKEPLIISKDDVRDNIVTYNDEGGGEEDTQAFDIGTLRNPEAREDSKLRRDVMPETIFQIRRTVPLWENIDVQDFIHRRLKENDADPSAPPYDSLATYAYEGNDSIADSLSSLESLTADCNQDYDYLSDWGPRFKKLADMYGGDDSDRD

SEQ ID NO: 10410 - protein, 81 aa, Homo sapiens
  Payload ID: 2084;
  Gene Symbol: CDH9;
  Gene Name: cadherin 9, type 2 (T1-cadherin);
  ENSP ID: ENSP00000422538
MRTYHYIPLFIWTYMFHTVDTILLQEKPNSYLSSKKIAGLTKDDGKMLRRTKRGWMWNQFFLLEEYTGTDTQYVGKLHTDQ

SEQ ID NO: 10411 - protein, 132 aa, Homo sapiens
  Payload ID: 2084;
  Gene Symbol: CDH9;
  Gene Name: cadherin 9, type 2 (T1-cadherin);
  ENSP ID: ENSP00000426239
MRTYHYIPLFIWTYMFHTVDTILLQEKPNSYLSSKKIAGLTKDDGKMLRRTKRGWMWNQFFLLEEYTGTDTQYVGKLHTDQDKGDGNLKYILTGDGAGSLFVIDENTGDIHAAKKLDREEKSLYILRAKAID

SEQ ID NO: 10412 - protein, 3014 aa, Homo sapiens
  Payload ID: 2085;
  Gene Symbol: CELSR1;
  Gene Name: cadherin, EGF LAG seven-pass G-type receptor 1;
  Uniprot ID:  Q9NYQ6;
  ENSP ID: ENSP00000262738
MAPPPPPVLPVLLLLAAAAALPAMGLRAAAWEPRVPGGTRAFALRPGCTYAVGAACTPRAPRELLDVGRDGRLAGRRRVSGAGRPLPLQVRLVARSAPTALSRRLRARTHLPGCGARARLCGTGARLCGALCFPVPGGCAAAQHSALAAPTTLPACRCPPRPRPRCPGRPICLPPGGSVRLRLLCALRRAAGAVRVGLALEAATAGTPSASPSPSPPLPPNLPEARAGPARRARRGTSGRGSLKFPMPNYQVALFENEPAGTLILQLHAHYTIEGEEERVSYYMEGLFDERSRGYFRIDSATGAVSTDSVLDRETKETHVLRVKAVDYSTPPRSATTYITVLVKDTNDHSPVFEQSEYRERVRENLEVGYEVLTIRASDRDSPINANLRYRVLGGAWDVFQLNESSGVVSTRAVLDREEAAEYQLLVEANDQGRNPGPLSATATVYIEVEDENDNYPQFSEQNYVVQVPEDVGLNTAVLRVQATDRDQGQNAAIHYSILSGNVAGQFYLHSLSGILDVINPLDFEDVQKYSLSIKAQDGGRPPLINSSGVVSVQVLDVNDNEPIFVSSPFQATVLENVPLGYPVVHIQAVDADSGENARLHYRLVDTASTFLGGGSAGPKNPAPTPDFPFQIHNSSGWITVCAELDREEVEHYSFGVEAVDHGSPPMSSSTSVSITVLDVNDNDPVFTQPTYELRLNEDAAVGSSVLTLQARDRDANSVITYQLTGGNTRNRFALSSQRGGGLITLALPLDYKQEQQYVLAVTASDGTRSHTAHVLINVTDANTHRPVFQSSHYTVSVSEDRPVGTSIATLSANDEDTGENARITYVIQDPVPQFRIDPDSGTMYTMMELDYENQVAYTLTIMAQDNGIPQKSDTTTLEILILDANDNAPQFLWDFYQGSIFEDAPPSTSILQVSATDRDSGPNGRLLYTFQGGDDGDGDFYIEPTSGVIRTQRRLDRENVAVYNLWALAVDRGSPTPLSASVEIQVTILDINDNAPMFEKDELELFVEENNPVGSVVAKIRANDPDEGPNAQIMYQIVEGDMRHFFQLDLLNGDLRAMVELDFEVRREYVLVVQATSAPLVSRATVHILLVDQNDNPPVLPDFQILFNNYVTNKSNSFPTGVIGCIPAHDPDVSDSLNYTFVQGNELRLLLLDPATGELQLSRDLDNNRPLEALMEVSVSDGIHSVTAFCTLRVTIITDDMLTNSITVRLENMSQEKFLSPLLALFVEGVAAVLSTTKDDVFVFNVQNDTDVSSNILNVTFSALLPGGVRGQFFPSEDLQEQIYLNRTLLTTISTQRVLPFDDNICLREPCENYMKCVSVLRFDSSAPFLSSTTVLFRPIHPINGLRCRCPPGFTGDYCETEIDLCYSDPCGANGRCRSREGGYTCECFEDFTGEHCEVDARSGRCANGVCKNGGTCVNLLIGGFHCVCPPGEYERPYCEVTTRSFPPQSFVTFRGLRQRFHFTISLTFATQERNGLLLYNGRFNEKHDFIALEIVDEQVQLTFSAGETTTTVAPKVPSGVSDGRWHSVQVQYYNKPNIGHLGLPHGPSGEKMAVVTVDDCDTTMAVRFGKDIGNYSCAAQGTQTGSKKSLDLTGPLLLGGVPNLPEDFPVHNRQFVGCMRNLSVDGKNVDMAGFIANNGTREGCAARRNFCDGRRCQNGGTCVNRWNMYLCECPLRFGGKNCEQAMPHPQLFSGESVVSWSDLNIIISVPWYLGLMFRTRKEDSVLMEATSGGPTSFRLQILNNYLQFEVSHGPSDVESVMLSGLRVTDGEWHHLLIELKNVKEDSEMKHLVTMTLDYGMDQNKADIGGMLPGLTVRSVVVGGASEDKVSVRRGFRGCMQGVRMGGTPTNVATLNMNNALKVRVKDGCDVDDPCTSSPCPPNSRCHDAWEDYSCVCDKGYLGINCVDACHLNPCENMGACVRSPGSPQGYVCECGPSHYGPYCENKLDLPCPRGWWGNPVCGPCHCAVSKGFDPDCNKTNGQCQCKENYYKLLAQDTCLPCDCFPHGSHSRTCDMATGQCACKPGVIGRQCNRCDNPFAEVTTLGCEVIYNGCPKAFEAGIWWPQTKFGQPAAVPCPKGSVGNAVRHCSGEKGWLPPELFNCTTISFVDLRAMNEKLSRNETQVDGARALQLVRALRSATQHTGTLFGNDVRTAYQLLGHVLQHESWQQGFDLAATQDADFHEDVIHSGSALLAPATRAAWEQIQRSEGGTAQLLRRLEGYFSNVARNVRRTYLRPFVIVTANMILAVDIFDKFNFTGARVPRFDTIHEEFPRELESSVSFPADFFRPPEEKEGPLLRPAGRRTTPQTTRPGPGTEREAPISRRRRHPDDAGQFAVALVIIYRTLGQLLPERYDPDRRSLRLPHRPIINTPMVSTLVYSEGAPLPRPLERPVLVEFALLEVEERTKPVCVFWNHSLAVGGTGGWSARGCELLSRNRTHVACQCSHTASFAVLMDISRRENGEVLPLKIVTYAAVSLSLAALLVAFVLLSLVRMLRSNLHSIHKHLAVALFLSQLVFVIGINQTENPFLCTVVAILLHYIYMSTFAWTLVESLHVYRMLTEVRNIDTGPMRFYYVVGWGIPAIVTGLAVGLDPQGYGNPDFCWLSLQDTLIWSFAGPIGAVIIINTVTSVLSAKVSCQRKHHYYGKKGIVSLLRTAFLLLLLISATWLLGLLAVNRDALSFHYLFAIFSGLQGPFVLLFHCVLNQEVRKHLKGVLGGRKLHLEDSATTRATLLTRSLNCNTTFGDGPDMLRTDLGESTASLDSIVRDEGIQKLGVSSGLVRGSHGEPDASLMPRSCKDPPGHDSDSDSELSLDEQSSSYASSHSSDSEDDGVGAEEKWDPARGAVHSTPKGDAVANHVPAGWPDQSLAESDSEDPSGKPRLKVETKVSVELHREEQGSHRGEYPPDQESGGAARLASSQPPEQRKGILKNKVTYPPPLTLTEQTLKGRLREKLADCEQSPTSSRTSSLGSGGPDCAITVKSPGREPGRDHLNGVAMNVRTGSAQADGSDSEKP

SEQ ID NO: 10413 - protein, 772 aa, Homo sapiens
  Payload ID: 2085;
  Gene Symbol: CELSR1;
  Gene Name: cadherin, EGF LAG seven-pass G-type receptor 1;
  ENSP ID: ENSP00000414689
  MOD_RES (1)..(1): Any amino acid
XDFPFQIHNSSGWITVCAELDREEVEHYSFGVEAVDHGSPPMSSSTSVSITVLDVNDNDPVFTQPTYELRLNEDAAVGSSVLTLQARDRDANSVITYQLTGGNTRNRFALSSQRGGGLITLALPLDYKQEQQYVLAVTASDGTRSHTAHVLINVTDANTHRPVFQSSHYTVSVSEDRPVGTSIATLSANDEDTGENARITYVIQDPVPQFRIDPDSGTMYTMMELDYENQVAYTLTIMAQDNGIPQKSDTTTLEILILDANDNAPQFLWDFYQGSIFEDAPPSTSILQVSATDRDSGPNGRLLYTFQGGDDGDGDFYIEPTSGVIRTQRRLDRENVAVYNLWALAVDRGSPTPLSASVEIQVTILDINDNAPMFEKDELELFVEENNPVGSVVAKIRANDPDEGPNAQIMYQIVEGDMRHFFQLDLLNGDLRAMVELDFEVRREYVLVVQATSAPLVSRATVHILLVDQNDNPPVLPDFQILFNNYVTNKSNSFPTGVIGCIPAHDPDVSDSLNYTFVQGNELRLLLLDPATGELQLSRDLDNNRPLEALMEVSVSDGIHSVTAFCTLRVTIITDDMLTNSITVRLENMSQEKFLSPLLALFVEGVAAVLSTTKDDVFVFNVQNDTDVSSNILNVTFSALLPGGVRGQFFPSEDLQEQIYLNRTLLTTISTQRVLPFDDNICLREPCENYMKCVSVLRFDSSAPFLSSTTVLFRPIHPINGLRCRCPPGFTGDYCETEIDLCYSDPCGANGRCRSREGGYTCECFEDFTEIS

SEQ ID NO: 10414 - protein, 2923 aa, Homo sapiens
  Payload ID: 2086;
  Gene Symbol: CELSR2;
  Gene Name: cadherin, EGF LAG seven-pass G-type receptor 2;
  Uniprot ID:  Q9HCU4;
  ENSP ID: ENSP00000271332
MRSPATGVPLPTPPPPLLLLLLLLLPPPLLGDQVGPCRSLGSRGRGSSGACAPMGWLCPSSASNLWLYTSRCRDAGTELTGHLVPHHDGLRVWCPESEAHIPLPPAPEGCPWSCRLLGIGGHLSPQGKLTLPEEHPCLKAPRLRCQSCKLAQAPGLRAGERSPEESLGGRRKRNVNTAPQFQPPSYQATVPENQPAGTPVASLRAIDPDEGEAGRLEYTMDALFDSRSNQFFSLDPVTGAVTTAEELDRETKSTHVFRVTAQDHGMPRRSALATLTILVTDTNDHDPVFEQQEYKESLRENLEVGYEVLTVRATDGDAPPNANILYRLLEGSGGSPSEVFEIDPRSGVIRTRGPVDREEVESYQLTVEASDQGRDPGPRSTTAAVFLSVEDDNDNAPQFSEKRYVVQVREDVTPGAPVLRVTASDRDKGSNAVVHYSIMSGNARGQFYLDAQTGALDVVSPLDYETTKEYTLRVRAQDGGRPPLSNVSGLVTVQVLDINDNAPIFVSTPFQATVLESVPLGYLVLHVQAIDADAGDNARLEYRLAGVGHDFPFTINNGTGWISVAAELDREEVDFYSFGVEARDHGTPALTASASVSVTVLDVNDNNPTFTQPEYTVRLNEDAAVGTSVVTVSAVDRDAHSVITYQITSGNTRNRFSITSQSGGGLVSLALPLDYKLERQYVLAVTASDGTRQDTAQIVVNVTDANTHRPVFQSSHYTVNVNEDRPAGTTVVLISATDEDTGENARITYFMEDSIPQFRIDADTGAVTTQAELDYEDQVSYTLAITARDNGIPQKSDTTYLEILVNDVNDNAPQFLRDSYQGSVYEDVPPFTSVLQISATDRDSGLNGRVFYTFQGGDDGDGDFIVESTSGIVRTLRRLDRENVAQYVLRAYAVDKGMPPARTPMEVTVTVLDVNDNPPVFEQDEFDVFVEENSPIGLAVARVTATDPDEGTNAQIMYQIVEGNIPEVFQLDIFSGELTALVDLDYEDRPEYVLVIQATSAPLVSRATVHVRLLDRNDNPPVLGNFEILFNNYVTNRSSSFPGGAIGRVPAHDPDISDSLTYSFERGNELSLVLLNASTGELKLSRALDNNRPLEAIMSVLVSDGVHSVTAQCALRVTIITDEMLTHSITLRLEDMSPERFLSPLLGLFIQAVAATLATPPDHVVVFNVQRDTDAPGGHILNVSLSVGQPPGPGGGPPFLPSEDLQERLYLNRSLLTAISAQRVLPFDDNICLREPCENYMRCVSVLRFDSSAPFIASSSVLFRPIHPVGGLRCRCPPGFTGDYCETEVDLCYSRPCGPHGRCRSREGGYTCLCRDGYTGEHCEVSARSGRCTPGVCKNGGTCVNLLVGGFKCDCPSGDFEKPYCQVTTRSFPAHSFITFRGLRQRFHFTLALSFATKERDGLLLYNGRFNEKHDFVALEVIQEQVQLTFSAGESTTTVSPFVPGGVSDGQWHTVQLKYYNKPLLGQTGLPQGPSEQKVAVVTVDGCDTGVALRFGSVLGNYSCAAQGTQGGSKKSLDLTGPLLLGGVPDLPESFPVRMRQFVGCMRNLQVDSRHIDMADFIANNGTVPGCPAKKNVCDSNTCHNGGTCVNQWDAFSCECPLGFGGKSCAQEMANPQHFLGSSLVAWHGLSLPISQPWYLSLMFRTRQADGVLLQAITRGRSTITLQLREGHVMLSVEGTGLQASSLRLEPGRANDGDWHHAQLALGASGGPGHAILSFDYGQQRAEGNLGPRLHGLHLSNITVGGIPGPAGGVARGFRGCLQGVRVSDTPEGVNSLDPSHGESINVEQGCSLPDPCDSNPCPANSYCSNDWDSYSCSCDPGYYGDNCTNVCDLNPCEHQSVCTRKPSAPHGYTCECPPNYLGPYCETRIDQPCPRGWWGHPTCGPCNCDVSKGFDPDCNKTSGECHCKENHYRPPGSPTCLLCDCYPTGSLSRVCDPEDGQCPCKPGVIGRQCDRCDNPFAEVTTNGCEVNYDSCPRAIEAGIWWPRTRFGLPAAAPCPKGSFGTAVRHCDEHRGWLPPNLFNCTSITFSELKGFAERLQRNESGLDSGRSQQLALLLRNATQHTAGYFGSDVKVAYQLATRLLAHESTQRGFGLSATQDVHFTENLLRVGSALLDTANKRHWELIQQTEGGTAWLLQHYEAYASALAQNMRHTYLSPFTIVTPNIVISVVRLDKGNFAGAKLPRYEALRGEQPPDLETTVILPESVFRETPPVVRPAGPGEAQEPEELARRQRRHPELSQGEAVASVIIYRTLAGLLPHNYDPDKRSLRVPKRPIINTPVVSISVHDDEELLPRALDKPVTVQFRLLETEERTKPICVFWNHSILVSGTGGWSARGCEVVFRNESHVSCQCNHMTSFAVLMDVSRRENGEILPLKTLTYVALGVTLAALLLTFFFLTLLRILRSNQHGIRRNLTAALGLAQLVFLLGINQADLPFACTVIAILLHFLYLCTFSWALLEALHLYRALTEVRDVNTGPMRFYYMLGWGVPAFITGLAVGLDPEGYGNPDFCWLSIYDTLIWSFAGPVAFAVSMSVFLYILAARASCAAQRQGFEKKGPVSGLQPSFAVLLLLSATWLLALLSVNSDTLLFHYLFATCNCIQGPFIFLSYVVLSKEVRKALKLACSRKPSPDPALTTKSTLTSSYNCPSPYADGRLYQPYGDSAGSLHSTSRSGKSQPSYIPFLLREESALNPGQGPPGLGDPGSLFLEGQDQQHDPDTDSDSDLSLEDDQSGSYASTHSSDSEEEEEEEEEEAAFPGEQGWDSLLGPGAERLPLHSTPKDGGPGPGKAPWPGDFGTTAKESSGNGAPEERLRENGDALSREGSLGPLPGSSAQPHKGILKKKCLPTISEKSSLLRLPLEQCTGSSRGSSASEGSRGGPPPRPPPRQSLQEQLNGVMPIAMSIKAGTVDEDSSGSEFLFFNFLH

SEQ ID NO: 10415 - protein, 3312 aa, Homo sapiens
  Payload ID: 2087;
  Gene Symbol: CELSR3;
  Gene Name: cadherin, EGF LAG seven-pass G-type receptor 3;
  Uniprot ID:  Q9NYQ7;
  ENSP ID: ENSP00000164024
MMARRPPWRGLGGRSTPILLLLLLSLFPLSQEELGGGGHQGWDPGLAATTGPRAHIGGGALALCPESSGVREDGGPGLGVREPIFVGLRGRRQSARNSRGPPEQPNEELGIEHGVQPLGSRERETGQGPGSVLYWRPEVSSCGRTGPLQRGSLSPGALSSGVPGSGNSSPLPSDFLIRHHGPKPVSSQRNAGTGSRKRVGTARCCGELWATGSKGQGERATTSGAERTAPRRNCLPGASGSGPELDSAPRTARTAPASGSAPRESRTAPEPAPKRMRSRGLFRCRFLPQRPGPRPPGLPARPEARKVTSANRARFRRAANRHPQFPQYNYQTLVPENEAAGTAVLRVVAQDPDAGEAGRLVYSLAALMNSRSLELFSIDPQSGLIRTAAALDRESMERHYLRVTAQDHGSPRLSATTMVAVTVADRNDHSPVFEQAQYRETLRENVEEGYPILQLRATDGDAPPNANLRYRFVGPPAARAAAAAAFEIDPRSGLISTSGRVDREHMESYELVVEASDQGQEPGPRSATVRVHITVLDENDNAPQFSEKRYVAQVREDVRPHTVVLRVTATDRDKDANGLVHYNIISGNSRGHFAIDSLTGEIQVVAPLDFEAEREYALRIRAQDAGRPPLSNNTGLASIQVVDINDHIPIFVSTPFQVSVLENAPLGHSVIHIQAVDADHGENARLEYSLTGVAPDTPFVINSATGWVSVSGPLDRESVEHYFFGVEARDHGSPPLSASASVTVTVLDVNDNRPEFTMKEYHLRLNEDAAVGTSVVSVTAVDRDANSAISYQITGGNTRNRFAISTQGGVGLVTLALPLDYKQERYFKLVLTASDRALHDHCYVHINITDANTHRPVFQSAHYSVSVNEDRPMGSTIVVISASDDDVGENARITYLLEDNLPQFRIDADSGAITLQAPLDYEDQVTYTLAITARDNGIPQKADTTYVEVMVNDVNDNAPQFVASHYTGLVSEDAPPFTSVLQISATDRDAHANGRVQYTFQNGEDGDGDFTIEPTSGIVRTVRRLDREAVSVYELTAYAVDRGVPPLRTPVSIQVMVQDVNDNAPVFPAEEFEVRVKENSIVGSVVAQITAVDPDEGPNAHIMYQIVEGNIPELFQMDIFSGELTALIDLDYEARQEYVIVVQATSAPLVSRATVHVRLVDQNDNSPVLNNFQILFNNYVSNRSDTFPSGIIGRIPAYDPDVSDHLFYSFERGNELQLLVVNQTSGELRLSRKLDNNRPLVASMLVTVTDGLHSVTAQCVLRVVIITEELLANSLTVRLENMWQERFLSPLLGRFLEGVAAVLATPAEDVFIFNIQNDTDVGGTVLNVSFSALAPRGAGAGAAGPWFSSEELQEQLYVRRAALAARSLLDVLPFDDNVCLREPCENYMKCVSVLRFDSSAPFLASASTLFRPIQPIAGLRCRCPPGFTGDFCETELDLCYSNPCRNGGACARREGGYTCVCRPRFTGEDCELDTEAGRCVPGVCRNGGTCTDAPNGGFRCQCPAGGAFEGPRCEVAARSFPPSSFVMFRGLRQRFHLTLSLSFATVQQSGLLFYNGRLNEKHDFLALELVAGQVRLTYSTGESNTVVSPTVPGGLSDGQWHTVHLRYYNKPRTDALGGAQGPSKDKVAVLSVDDCDVAVALQFGAEIGNYSCAAAGVQTSSKKSLDLTGPLLLGGVPNLPENFPVSHKDFIGCMRDLHIDGRRVDMAAFVANNGTMAGCQAKLHFCDSGPCKNSGFCSERWGSFSCDCPVGFGGKDCQLTMAHPHHFRGNGTLSWNFGSDMAVSVPWYLGLAFRTRATQGVLMQVQAGPHSTLLCQLDRGLLSVTVTRGSGRASHLLLDQVTVSDGRWHDLRLELQEEPGGRRGHHVLMVSLDFSLFQDTMAVGSELQGLKVKQLHVGGLPPGSAEEAPQGLVGCIQGVWLGSTPSGSPALLPPSHRVNAEPGCVVTNACASGPCPPHADCRDLWQTFSCTCQPGYYGPGCVDACLLNPCQNQGSCRHLPGAPHGYTCDCVGGYFGHHCEHRMDQQCPRGWWGSPTCGPCNCDVHKGFDPNCNKTNGQCHCKEFHYRPRGSDSCLPCDCYPVGSTSRSCAPHSGQCPCRPGALGRQCNSCDSPFAEVTASGCRVLYDACPKSLRSGVWWPQTKFGVLATVPCPRGALGAAVRLCDEAQGWLEPDLFNCTSPAFRELSLLLDGLELNKTALDTMEAKKLAQRLREVTGHTDHYFSQDVRVTARLLAHLLAFESHQQGFGLTATQDAHFNENLLWAGSALLAPETGDLWAALGQRAPGGSPGSAGLVRHLEEYAATLARNMELTYLNPMGLVTPNIMLSIDRMEHPSSPRGARRYPRYHSNLFRGQDAWDPHTHVLLPSQSPRPSPSEVLPTSSSIENSTTSSVVPPPAPPEPEPGISIIILLVYRTLGGLLPAQFQAERRGARLPQNPVMNSPVVSVAVFHGRNFLRGILESPISLEFRLLQTANRSKAICVQWDPPGLAEQHGVWTARDCELVHRNGSHARCRCSRTGTFGVLMDASPRERLEGDLELLAVFTHVVVAVSVAALVLTAAILLSLRSLKSNVRGIHANVAAALGVAELLFLLGIHRTHNQLVCTAVAILLHYFFLSTFAWLFVQGLHLYRMQVEPRNVDRGAMRFYHALGWGVPAVLLGLAVGLDPEGYGNPDFCWISVHEPLIWSFAGPVVLVIVMNGTMFLLAARTSCSTGQREAKKTSALTLRSSFLLLLLVSASWLFGLLAVNHSILAFHYLHAGLCGLQGLAVLLLFCVLNADARAAWMPACLGRKAAPEEARPAPGLGPGAYNNTALFEESGLIRITLGASTVSSVSSARSGRTQDQDSQRGRSYLRDNVLVRHGSAADHTDHSLQAHAGPTDLDVAMFHRDAGADSDSDSDLSLEEERSLSIPSSESEDNGRTRGRFQRPLCRAAQSERLLTHPKDVDGNDLLSYWPALGECEAAPCALQTWGSERRLGLDTSKDAANNNQPDPALTSGDETSLGRAQRQRKGILKNRLQYPLVPQTRGAPELSWCRAATLGHRAVPAASYGRIYAGGGTGSLSQPASRYSSREQLDLLLRRQLSRERLEEAPAPVLRPLSRPGSQECMDAAPGRLEPKDRGSTLPRRQPPRDYPGAMAGRFGSRDALDLGAPREWLSTLPPPRRTRDLDPQPPPLPLSPQRQLSRDPLLPSRPLDSLSRSSNSREQLDQVPSRHPSREALGPLPQLLRAREDSVSGPSHGPSTEQLDILSSILASFNSSALSSVQSSSTPLGPHTTATPSATASVLGPSTPRSATSHSISELSPDSEVPRSEGHS

SEQ ID NO: 10416 - protein, 1026 aa, Homo sapiens
  Payload ID: 2088;
  Gene Symbol: CPED1;
  Gene Name: cadherin-like and PC-esterase domain containing 1;
  Uniprot ID:  A4D0V7;
  ENSP ID: ENSP00000309772
MVCRPVFPCRRRFCPRPFLVGLVVAICLFYQTLTLRGSRKLTAAAPGAVPHTSTETQASRCKKGFSQDKQCFLLSGNAQETRKVKESMETHFGSHGRRAILYRPPFYSKTELQLHQHILTQHGYTVVIAEERLNAGLGPGLLEQGDLGSWDLLICLSSKKAEGTPCISKEVMCQLGLHQKANRLPEIQQPLCRKEGLCQIVRRFPELQLPVSPSVCLDQGMQLKPSTSSHLLKTVKPRVWKPGDWSREQLNETTVLAPHETIFRAEDLSVILKAYVLVTSLTPLRAFIHSTGTVWNPPKKKRFTVKLQTFFETFLRASSPQQAFDIMKEAIGKLLLAAEVFSETSTLGPKTFHRCRFCFQLLTFDIGYGSFMYPVVLQVHEHLNFQDYDNMDFEDQNTEEFLLNDTFNFLFPNESSLSIFSEIFQRLYRSDVFKGENYQKELNQCLSLEEINSIMTFIKELGSLGQFQLLFPSTTPGIQSLMHEFYDVANPVGNPGSVLTQYWSLLNVFEQFQFMNKKTQPHPLEWNSFTEDKNIEKPQVPFDAIENKKAAVPQIKNENKEIHCSDDENTPCHIKQIFTHPHLELNPDFHPKIKDYYCEVPFDVVTVTIGVETPKCLCKVHLYEQAGPSFASYPLGLGMNKISIFVVDESPAHGETLITYKLTIYREDRPSLPLFEAFTACGFVQDCGLLIHPEETCGLQPISSDYIEAILQSELKRCPSGDMKGQWIVPCLSCSDNRTCDWREITWQPHNCQYGVLTKPQLQQCLGGRKILFIGDSTNRGIMYYLIERLNETLQEWQKVHGTKFYHNVNGGKTLISYSYYPQFWISPSLRPTFENALEHLLQRSRPLENTGQTVLVVGGVQWLNSNHLQIIHKVLKRENLLNILVIIKTLGIGFHLPVDGVHFLTQSEVQNLWKENLIILDTAKKHGYEVVDTFTITMGRYKEFLQGKCGCHFHEVVKSKLSKEYNFIKMKRSRNHIMGRYFSNQSKLQQGTVTNFRSPYHVRGPINQVCSEILLSRMCANKRTM

SEQ ID NO: 10417 - protein, 202 aa, Homo sapiens
  Payload ID: 2088;
  Gene Symbol: CPED1;
  Gene Name: cadherin-like and PC-esterase domain containing 1;
  ENSP ID: ENSP00000345235
MVCRPVFPCRRRFCPRPFLVGLVVAICLFYQTLTLRGSRKLTAAAPGAVPHTSTETQASRCKKGFSQDKQCFLLSGNAQETRKVKESMETHFGSHGRRAILYRPPFYSKTELQLHQHILTQHGYTVVIAEERLNAGLGPGLLEQGDLGSWDLLICLSSKKAEGTPCISKEVMCQLGLHQKQLRRREERQRPGSPASRRLSVR

SEQ ID NO: 10418 - protein, 334 aa, Homo sapiens
  Payload ID: 2088;
  Gene Symbol: CPED1;
  Gene Name: cadherin-like and PC-esterase domain containing 1;
  ENSP ID: ENSP00000391952
MQLKPSTSSHLLKTVKPRVWKPGDWSREQLNETTVLAPHETIFRAEDLSVILKAYVLVTSLTPLRAFIHSTGTVWNPPKKKRFTVKLQTFFETFLRASSPQQAFDIMKEAIGKLLLAAEVFSETSTLGPKTFHRCRFCFQLLTFDIGYGSFMYPVVLQVHEHLNFQDYDNMDFEDQNTEEFLLNDTFNFLFPNESSLSIFSEIFQRLYRSDVFKGENYQKELNQCLSLEEINSIMTFIKELGSLGQFQLLFPSTTPGIQSLMHEFYDVANPVGNPGSVLTQYWSLLNVFEQFQFMNKKTQPHPLEWNSFTEDKNIEKPQVPFDAIENKKAAVPQ

SEQ ID NO: 10419 - protein, 549 aa, Homo sapiens
  Payload ID: 2088;
  Gene Symbol: CPED1;
  Gene Name: cadherin-like and PC-esterase domain containing 1;
  ENSP ID: ENSP00000398082
MVCRPVFPCRRRFCPRPFLVGLVVAICLFYQTLTLRGSRKLTAAAPGAVPHTSTETQASRCKKGFSQDKQCFLLSGNAQETRKVKESMETHFGSHGRRAILYRPPFYSKTELQLHQHILTQHGYTVVIAEERLNAGLGPGLLEQGDLGSWDLLICLSSKKAEGTPCISKEVMCQLGLHQKANRLPEIQQPLCRKEGLCQIVRRFPELQLPVSPSVCLDQGMQLKPSTSSHLLKTVKPRVWKPGDWSREQLNETTVLAPHETIFRAEDLSVILKAYVLVTSLTPLRAFIHSTGTVWNPPKKKRFTVKLQTFFETFLRASSPQQAFDIMKEAIGKLLLAAEVFSETSTLGPKTFHRCRFCFQLLTFDIGYGSFMYPVVLQVHEHLNFQDYDNMDFEDQNTEEFLLNDTFNFLFPNESSLSIFSEIFQRLYRSDVFKGENYQKELNQCLSLEEINSIMTFIKELGSLGQFQLLFPSTTPGIQSLMHEFYDVANPVGNPGSVLTQYWSLLNVFEQFQFMNKKTQPHPLEWNSFTEDKNIEKPQVPFDAIENKK

SEQ ID NO: 10420 - protein, 783 aa, Homo sapiens
  Payload ID: 2088;
  Gene Symbol: CPED1;
  Gene Name: cadherin-like and PC-esterase domain containing 1;
  Uniprot ID:  A4D0V7;
  ENSP ID: ENSP00000406122
MVCRPVFPCRRRFCPRPFLVGLVVAICLFYQTLTLRGSRKLTAAAPGAVPHTSTETQASRCKKGFSQDKQCFLLSGNAQETRKVKESMETHFGSHGRRAILYRPPFYSKTELQLHQHILTQHGYTVVIAEERLNAGLGPGLLEQGDLGSWDLLICLSSKKAEGTPCISKEVMCQLGLHQKANRLPEIQQPLCRKEGLCQIVRRFPELQLPVSPSVCLDQGMQLKPSTSSHLLKTVKPRVWKPGDWSREQLNETTVLAPHETIFRAEDLSVILKAYVLVTSLTPLRAFIHSTGTVWNPPKKKRFTVKLQTFFETFLRASSPQQAFDIMKEAIGKLLLAAEVFSETSTLGPKTFHRCRFCFQLLTFDIGYGSFMYPVVLQVHEHLNFQDYDNMDFEDQNTEEFLLNDTFNFLFPNESSLSIFSEIFQRLYRSDVFKGENYQKELNQCLSLEEINSIMTFIKELGSLGQFQLLFPSTTPGIQSLMHEFYDVANPVGNPGSVLTQYWSLLNVFEQFQFMNKKTQPHPLEWNSFTEDKNIEKPQVPFDAIENKKAAVPQIKNENKEIHCSDDENTPCHIKQIFTHPHLELNPDFHPKIKDYYCEVPFDVVTVTIGVETPKCLCKVHLYEQAGPSFASYPLGLGMNKISIFVVDESPAHGETLITYKLTIYREDRPSLPLFEAFTACGFVQDCGLLIHPEETCGLQPISSDYIEAILQSELKRCPSGDMKGQWIVPCLSCSDNRTCDWREITWQPHNCQYGVLTKPQLQQCLGGRKLGVDVQRVPRSRN

SEQ ID NO: 10421 - protein, 563 aa, Homo sapiens
  Payload ID: 2088;
  Gene Symbol: CPED1;
  Gene Name: cadherin-like and PC-esterase domain containing 1;
  ENSP ID: ENSP00000415573
MQLKPSTSSHLLKTVKPRVWKPGDWSREQLNETTVLAPHETIFRAEDLSVILKAYVLVTSLTPLRAFIHSTGTVWNPPKKKRFTVKLQTFFETFLRASSPQQAFDIMKEAIGKLLLAAEVFSETSTLGPKTFHRCRFCFQLLTFDIGYGSFMYPVVLQVHEHLNFQDYDNMDFEDQNTEEFLLNDTFNFLFPNESSLSIFSEIFQRLYRSDVFKGENYQKELNQCLSLEEINSIMTFIKELGSLGQFQLLFPSTTPGIQSLMHEFYDVANPVGNPGSVLTQYWSLLNVFEQFQFMNKKTQPHPLEWNSFTEDKNIEKPQVPFDAIENKKAAVPQIKNENKEIHCSDDENTPCHIKQIFTHPHLELNPDFHPKIKDYYCEVPFDVVTVTIGVETPKCLCKVHLYEQAGPSFASYPLGLGMNKISIFVVDESPAHGETLITYKLTIYREDRPSLPLFEAFTACGFVQDCGLLIHPEETCGLQPISSDYIEAILQSELKRCPSGDMKGQWIVPCLSCSDNRTCDWREITWQPHNCQYGVLTKPQLQQCLGGRKLGVDVQRVPRSRN

SEQ ID NO: 10422 - protein, 60 aa, Homo sapiens
  Payload ID: 2088;
  Gene Symbol: CPED1;
  Gene Name: cadherin-like and PC-esterase domain containing 1;
  ENSP ID: ENSP00000428504
RCKKGFSQDKQCFLLSGNAQETRKVEFFGFSGQPLEKLAPGWGSSCRCKGEVDSPFQSVL

SEQ ID NO: 10423 - protein, 3359 aa, Homo sapiens
  Payload ID: 2089;
  Gene Symbol: CDH23;
  Gene Name: cadherin-related 23;
  ENSP ID: ENSP00000224721
MGRHVATSCHVAWLLVLISGCWGQVNRLPFFTNHFFDTYLLISEDTPVGSSVTQLLAQDMDNDPLVFGVSGEEASRFFAVEPDTGVVWLRQPLDRETKSEFTVEFSVSDHQGVITRKVNIQVGDVNDNAPTFHNQPYSVRIPEVGATGNTPVGTPIFIVNATDPDLGAGGSVLYSFQPPSQFFAIDSARGIVTVIRELDYETTQAYQLTVNATDQDKTRPLSTLANLAIIITDVQDMDPIFINLPYSTNIYEHSPPGTTVRIITAIDQDKGRPRGIGYTIVSGNTNSIFALDYISGVLTLNGLLDRENPLYSHGFILTVKGTELNDDRTPSDATVTTTFNILVIDINDNAPEFNSSEYSVAITELAQVGFALPLFIQVVDKDENLGLNSMFEVYLVGNNSHHFIISPTSVQGKADIRIRVAIPLDYETVDRYDFDLFANESVPDHVGYAKVKITLINENDNRPIFSQPLYNISLYENVTVGTSVLTVLATDNDAGTFGEVSYFFSDDPDRFSLDKDTGLIMLIARLDYELIQRFTLTIIARDGGGEETTGRVRINVLDVNDNVPTFQKDAYVGALRENEPSVTQLVRLRATDEDSPPNNQITYSIVSASAFGSYFDISLYEGYGVISVSRPLDYEQISNGLIYLTVMAMDAGNPPLNSTVPVTIEVFDENDNPPTFSKPAYFVSVVENIMAGATVLFLNATDLDRSREYGQESIIYSLEGSTQFRINARSGEITTTSLLDRETKSEYILIVRAVDGGVGHNQKTGIATVNITLLDINDNHPTWKDAPYYINLVEMTPPDSDVTTVVAVDPDLGENGTLVYSIQPPNKFYSLNSTTGKIRTTHAMLDRENPDPHEAELMRKIVVSVTDCGRPPLKATSSATVFVNLLDLNDNDPTFQNLPFVAEVLEGIPAGVSIYQVVAIDLDEGLNGLVSYRMPVGMPRMDFLINSSSGVVVTTTELDRERIAEYQLRVVASDAGTPTKSSTSTLTIHVLDVNDETPTFFPAVYNVSVSEDVPREFRVVWLNCTDNDVGLNAELSYFITGGNVDGKFSVGYRDAVVRTVVGLDRETTAAYMLILEAIDNGPVGKRHTGTATVFVTVLDVNDNRPIFLQSSYEASVPEDIPEGHSILQLKATDADEGEFGRVWYRILHGNHGNNFRIHVSNGLLMRGPRPLDRERNSSHVLIVEAYNHDLGPMRSSVRVIVYVEDINDEAPVFTQQQYSRLGLRETAGIGTSVIVVQATDRDSGDGGLVNYRILSGAEGKFEIDESTGLIITVNYLDYETKTSYMMNVSATDQAPPFNQGFCSVYITLLNELDEAVQFSNASYEAAILENLALGTEIVRVQAYSIDNLNQITYRFNAYTSTQAKALFKIDAITGVITVQGLVDREKGDFYTLTVVADDGGPKVDSTVKVYITVLDENDNSPRFDFTSDSAVSIPEDCPVGQRVATVKAWDPDAGSNGQVVFSLASGNIAGAFEIVTTNDSIGEVFVARPLDREELDHYILQVVASDRGTPPRKKDHILQVTILDINDNPPVIESPFGYNVSVNENVGGGTAVVQVRATDRDIGINSVLSYYITEGNKDMAFRMDRISGEIATRPAPPDRERQSFYHLVATVEDEGTPTLSATTHVYVTIVDENDNAPMFQQPHYEVLLDEGPDTLNTSLITIQALDLDEGPNGTVTYAIVAGNIVNTFRIDRHMGVITAAKELDYEISHGRYTLIVTATDQCPILSHRLTSTTTVLVNVNDINDNVPTFPRDYEGPFEVTEGQPGPRVWTFLAHDRDSGPNGQVEYSIMDGDPLGEFVISPVEGVLRVRKDVELDRETIAFYNLTICARDRGMPPLSSTMLVGIRVLDINDNDPVLLNLPMNITISENSPVSSFVAHVLASDADSGCNARLTFNITAGNRERAFFINATTGIVTVNRPLDRERIPEYKLTISVKDNPENPRIARRDYDLLLIFLSDENDNHPLFTKSTYQAEVMENSPAGTPLTVLNGPILALDADQDIYAVVTYQLLGAQSGLFDINSSTGVVTVRSGVIIDREAFSPPILELLLLAEDIGLLNSTAHLLITILDDNDNRPTFSPATLTVHLLENCPPGFSVLQVTATDEDSGLNGELVYRIEAGAQDRFLIHLVTGVIRVGNATIDREEQESYRLTVVATDRGTVPLSGTAIVTILIDDINDSRPEFLNPIQTVSVLESAEPGTVIANITAIDHDLNPKLEYHIVGIVAKDDTDRLVPNQEDAFAVNINTGSVMVKSPMNRELVATYEVTLSVIDNASDLPERSVSVPNAKLTVNVLDVNDNTPQFKPFGITYYMERILEGATPGTTLIAVAAVDPDKGLNGLVTYTLLDLVPPGYVQLEDSSAGKVIANRTVDYEEVHWLNFTVRASDNGSPPRAAEIPVYLEIVDINDNNPIFDQPSYQEAVFEDVPVGTIILTVTATDADSGNFALIEYSLGDGESKFAINPTTGDIYVLSSLDREKKDHYILTALAKDNPGDVASNRRENSVQVVIQVLDVNDCRPQFSKPQFSTSVYENEPAGTSVITMMATDQDEGPNGELTYSLEGPGVEAFHVDMDSGLVTTQRPLQSYEKFSLTVVATDGGEPPLWGTTMLLVEVIDVNDNRPVFVRPPNGTILHIREEIPLRSNVYEVYATDKDEGLNGAVRYSFLKTAGNRDWEFFIIDPISGLIQTAQRLDRESQAVYSLILVASDLGQPVPYETMQPLQVALEDIDDNEPLFVRPPKGSPQYQLLTVPEHSPRGTLVGNVTGAVDADEGPNAIVYYFIAAGNEEKNFHLQPDGCLLVLRDLDREREAIFSFIVKASSNRSWTPPRGPSPTLDLVADLTLQEVRVVLEDINDQPPRFTKAEYTAGVATDAKVGSELIQVLALDADIGNNSLVFYSILAIHYFRALANDSEDVGQVFTMGSMDGILRTFDLFMAYSPGYFVVDIVARDLAGHNDTAIIGIYILRDDQRVKIVINEIPDRVRGFEEEFIHLLSNITGAIVNTDNVQFHVDKKGRVNFAQTELLIHVVNRDTNRILDVDRVIQMIDENKEQLRNLFRNYNVLDVQPAISVRLPDDMSALQMAIIVLAILLFLAAMLFVLMNWYYRTVHKRKLKAIVAGSAGNRGFIDIMDMPNTNKYSFDGANPVWLDPFCRNLELAAQAEHEDDLPENLSEIADLWNSPTRTHGTFGREPAAVKPDDDRYLRAAIQEYDNIAKLGQIIREGPIKGSLLKVVLEDYLRLKKLFAQRMVQKASSCHSSISELIQTELDEEPGDHSPGQGSLRFRHKPPVELKGPDGIHVVHGSTGTLLATDLNSLPEEDQKGLGRSLETLTAAEATAFERNARTESAKSTPLHKLRDVIMETPLEITEL

SEQ ID NO: 10424 - protein, 1061 aa, Homo sapiens
  Payload ID: 2089;
  Gene Symbol: CDH23;
  Gene Name: cadherin-related 23;
  ENSP ID: ENSP00000299366
MGRHVATSCHVAWLLVLISGCWGQVNRLPFFTNHFFDTYLLISEDTPVGSSVTQLLAQDMDNDPLVFGVSGEEASRFFAVEPDTGVVWLRQPLDRETKSEFTVEFSVSDHQGVITRKVNIQVGDVNDNAPTFHNQPYSVRIPENTPVGTPIFIVNATDPDLGAGGSVLYSFQPPSQFFAIDSARGIVTVIRELDYETTQAYQLTVNATDQDKTRPLSTLANLAIIITDVQDMDPIFINLPYSTNIYEHSPPGTTVRIITAIDQDKGRPRGIGYTIVSGNTNSIFALDYISGVLTLNGLLDRENPLYSHGFILTVKGTELNDDRTPSDATVTTTFNILVIDINDNAPEFNSSEYSVAITELAQVGFALPLFIQVVDKDENLGLNSMFEVYLVGNNSHHFIISPTSVQGKADIRIRVAIPLDYETVDRYDFDLFANESVPDHVGYAKVKITLINENDNRPIFSQPLYNISLYENVTVGTSVLTVLATDNDAGTFGEVSYFFSDDPDRFSLDKDTGLIMLIARLDYELIQRFTLTIIARDGGGEETTGRVRINVLDVNDNVPTFQKDAYVGALRENEPSVTQLVRLRATDEDSPPNNQITYSIVSASAFGSYFDISLYEGYGVISVSRPLDYEQISNGLIYLTVMAMDAGNPPLNSTVPVTIEVFDENDNPPTFSKPAYFVSVVENIMAGATVLFLNATDLDRSREYGQESIIYSLEGSTQFRINARSGEITTTSLLDRETKSEYILIVRAVDGGVGHNQKTGIATVNITLLDINDNHPTWKDAPYYINLVEMTPPDSDVTTVVAVDPDLGENGTLVYSIQPPNKFYSLNSTTGKIRTTHAMLDRENPDPHEAELMRKIVVSVTDCGRPPLKATSSATVFVNLLDLNDNDPTFQNLPFVAEVLEGIPAGVSIYQVVAIDLDEGLNGLVSYRMPVGMPRMDFLINSSSGVVVTTTELDRERIAEYQLRVVASDAGTPTKSSTSTLTIHVLDVNDETPTFFPAVYNVSVSEDVPREFRVVWLNCTDNDVGLNAELSYFITGAAPASAHLCRPPGALPPPLPDGQPD

SEQ ID NO: 10425 - protein, 1114 aa, Homo sapiens
  Payload ID: 2089;
  Gene Symbol: CDH23;
  Gene Name: cadherin-related 23;
  Uniprot ID:  Q9H251;
  ENSP ID: ENSP00000381768
MVKSPMNRELVATYEVTLSVIDNASDLPERSVSVPNAKLTVNVLDVNDNTPQFKPFGITYYMERILEGATPGTTLIAVAAVDPDKGLNGLVTYTLLDLVPPGYVQLEDSSAGKVIANRTVDYEEVHWLNFTVRASDNGSPPRAAEIPVYLEIVDINDNNPIFDQPSYQEAVFEDVPVGTIILTVTATDADSGNFALIEYSLGDGESKFAINPTTGDIYVLSSLDREKKDHYILTALAKDNPGDVASNRRENSVQVVIQVLDVNDCRPQFSKPQFSTSVYENEPAGTSVITMMATDQDEGPNGELTYSLEGPGVEAFHVDMDSGLVTTQRPLQSYEKFSLTVVATDGGEPPLWGTTMLLVEVIDVNDNRPVFVRPPNGTILHIREEIPLRSNVYEVYATDKDEGLNGAVRYSFLKTAGNRDWEFFIIDPISGLIQTAQRLDRESQAVYSLILVASDLGQPVPYETMQPLQVALEDIDDNEPLFVRPPKGSPQYQLLTVPEHSPRGTLVGNVTGAVDADEGPNAIVYYFIAAGNEEKNFHLQPDGCLLVLRDLDREREAIFSFIVKASSNRSWTPPRGPSPTLDLVADLTLQEVRVVLEDINDQPPRFTKAEYTAGVATDAKVGSELIQVLALDADIGNNSLVFYSILAIHYFRALANDSEDVGQVFTMGSMDGILRTFDLFMAYSPGYFVVDIVARDLAGHNDTAIIGIYILRDDQRVKIVINEIPDRVRGFEEEFIHLLSNITGAIVNTDNVQFHVDKKGRVNFAQTELLIHVVNRDTNRILDVDRVIQMIDENKEQLRNLFRNYNVLDVQPAISVRLPDDMSALQMAIIVLAILLFLAAMLFVLMNWYYRTVHKRKLKAIVAGSAGNRGFIDIMDMPNTNKYSFDGANPVWLDPFCRNLELAAQAEHEDDLPENLSEIADLWNSPTRTHGTFGREPAAVKPDDDRYLRAAIQEYDNIAKLGQIIREGPIKGSLLKVVLEDYLRLKKLFAQRMVQKASSCHSSISELIQTELDEEPGDHSPGQGSLRFRHKPPVELKGPDGIHVVHGSTGTLLATDLNSLPEEDQKGLGRSLETLTAAEATAFERNARTESAKSTPLHKLRDVIMETPLEITEL

SEQ ID NO: 10426 - protein, 1380 aa, Homo sapiens
  Payload ID: 2089;
  Gene Symbol: CDH23;
  Gene Name: cadherin-related 23;
  ENSP ID: ENSP00000381789
MGRHVATSCHVAWLLVLISGCWGQVNRLPFFTNHFFDTYLLISEDTPVGSSVTQLLAQDMDNDPLVFGVSGEEASRFFAVEPDTGVVWLRQPLDRETKSEFTVEFSVSDHQGVITRKVNIQVGDVNDNAPTFHNQPYSVRIPENTPVGTPIFIVNATDPDLGAGGSVLYSFQPPSQFFAIDSARGIVTVIRELDYETTQAYQLTVNATDQDKTRPLSTLANLAIIITDVQDMDPIFINLPYSTNIYEHSPPGTTVRIITAIDQDKGRPRGIGYTIVSGNTNSIFALDYISGVLTLNGLLDRENPLYSHGFILTVKGTELNDDRTPSDATVTTTFNILVIDINDNAPEFNSSEYSVAITELAQVGFALPLFIQVVDKDENLGLNSMFEVYLVGNNSHHFIISPTSVQGKADIRIRVAIPLDYETVDRYDFDLFANESVPDHVGYAKVKITLINENDNRPIFSQPLYNISLYENVTVGTSVLTVLATDNDAGTFGEVSYFFSDDPDRFSLDKDTGLIMLIARLDYELIQRFTLTIIARDGGGEETTGRVRINVLDVNDNVPTFQKDAYVGALRENEPSVTQLVRLRATDEDSPPNNQITYSIVSASAFGSYFDISLYEGYGVISVSRPLDYEQISNGLIYLTVMAMDAGNPPLNSTVPVTIEVFDENDNPPTFSKPAYFVSVVENIMAGATVLFLNATDLDRSREYGQESIIYSLEGSTQFRINARSGEITTTSLLDRETKSEYILIVRAVDGGVGHNQKTGIATVNITLLDINDNHPTWKDAPYYINLVEMTPPDSDVTTVVAVDPDLGENGTLVYSIQPPNKFYSLNSTTGKIRTTHAMLDRENPDPHEAELMRKIVVSVTDCGRPPLKATSSATVFVNLLDLNDNDPTFQNLPFVAEVLEGIPAGVSIYQVVAIDLDEGLNGLVSYRMPVGMPRMDFLINSSSGVVVTTTELDRERIAEYQLRVVASDAGTPTKSSTSTLTIHVLDVNDETPTFFPAVYNVSVSEDVPREFRVVWLNCTDNDVGLNAELSYFITGGNVDGKFSVGYRDAVVRTVVGLDRETTAAYMLILEAIDNGPVGKRHTGTATVFVTVLDVNDNRPIFLQSSYEASVPEDIPEGHSILQAATDADEGEFGRVWYRILHGNHGNNFRIHVSNGLLMRGPRPLDRERNSSHVLIVEAYNHDLGPMRSSVRVIVYVEDINDEAPVFTQQQYSRLGLRETAGIGTSVIVVQATDRDSGDGGLVNYRILSGAEGKFEIDESTGLIITVNYLDYETKTSYMMNVSATDQAPPFNQGFCSVYITLLNELDEAVQFSNASYEAAILENLALGTEIVRVQAYSIDNLNQITYRFNAYTSTQAKALFKIDAITVRGWGQGAPFLPI

SEQ ID NO: 10427 - protein, 445 aa, Homo sapiens
  Payload ID: 2089;
  Gene Symbol: CDH23;
  Gene Name: cadherin-related 23;
  ENSP ID: ENSP00000381822
MDNDPLVFGVSGEEASRFFAVEPDTGVVWLRQPLDRETKSEFTVEFSVSDHQGVITRKVNIQVGDVNDNAPTFHNQPYSVRIPENTPVGTPIFIVNATDPDLGAGGSVLYSFQPPSQFFAIDSARGIVTVIRELDYETTQAYQLTVNALAIIITNLPYSTNIYEHSPPGTTVRIITAIDQDKGRPRGIGYTIVSGNTNSIFALDYISGVLTLNGLLDRENPLYSHGFILTVKGTELNDDRTPSDATVTTTFNILVIDINDNAPEFNSSEYSVAITELAQVGFALPLFIQVVDKDEGLNSMFEVYLVGNNSHHFIISPTSVQGKADIRIRVAIPLDYETVDRYDFDLFANESVPDHVGYAKVKITLINENDNRPIFSQPLYNISLYENVTVGTSVLTVLVSPRFTAGPLSSPGPTVVRHPEGFCPRDLSNQGRRHPQIPELCLLVY

SEQ ID NO: 10428 - protein, 803 aa, Homo sapiens
  Payload ID: 2089;
  Gene Symbol: CDH23;
  Gene Name: cadherin-related 23;
  ENSP ID: ENSP00000388894
  MOD_RES (1)..(1): Any amino acid
XDIRIRVAIPLDYETVDRYDFDLFANESVPDHVGYAKVKITLINENDNRPIFSQPLYNISLYENVTVGTSVLTVLATDNDAGTFGEVSYFFSDDPDRFSLDKDTGLIMLIARLDYELIQRFTLTIIARDGGGEETTGRVRINVLDVNDNVPTFQKDAYVGALRENEPSVTQLVRLRATDEDSPPNNQITYSIVSASAFGSYFDISLYEGYGVISVSRPLDYEQISNGLIYLTVMAMDAGNPPLNSTVPVTIEVFDENDNPPTFSKPAYFVSVVENIMAGATVLFLNATDLDRSREYGQESIIYSLEGSTQFRINARSGEITTTSLLDRETKSEYILIVRAVDGGVGHNQKTGIATVNITLLDINDNHPTWKDAPYYINLVEMTPPDSDVTTVVAVDPDLGENGTLVYSIQPPNKFYSLNSTTGKIRTTHAMLDRENPDPHEAELMRKIVVSVTDCGRPPLKATSSATVFVNLLDLNDNDPTFQNLPFVAEVLEGIPAGVSIYQVVAIDLDEGLNGLVSYRMPVGMPRMDFLINSSSGVVVTTTELDRERIAEYQLRVVASDAGTPTKSSTSTLTIHVLDVNDETPTFFPAVYNVSVSEDVPREFRVVWLNCTDNDVGLNAELSYFITGGNVDGKFSVGYRDAVVRTVVGLDRETTAAYMLILEAIDNGPVGKRHTGTATVFVTVLDVNDNRPIFLQSSYEASVPEDIPEGHSILQEDLASPCISPAPPRRAFQSSGEKETSQFPGKELRREPGPSKAQNRAAFTEPLAEAPLLGSKQAQEERAPLPREQAQQLQGSEGEKGGP

SEQ ID NO: 10429 - protein, 530 aa, Homo sapiens
  Payload ID: 2089;
  Gene Symbol: CDH23;
  Gene Name: cadherin-related 23;
  ENSP ID: ENSP00000473454
MGRHVATSCHVAWLLVLISGCWGQVNRLPFFTNHFFDTYLLISEDTPVGSSVTQLLAQDMDNDPLVFGVSGEEASRFFAVEPDTGVVWLRQPLDRETKSEFTVEFSVSDHQGVITRKVNIQVGDVNDNAPTFHNQPYSVRIPENTPVGTPIFIVNATDPDLGAGGSVLYSFQPPSQFFAIDSARGIVTVIRELDYETTQAYQLTVNATDQDKTRPLSTLANLAIIITDVQDMDPIFINLPYSTNIYEHSPPGTTVRIITAIDQDKGRPRGIGYTIVSGNTNSIFALDYISGVLTLNGLLDRENPLYSHGFILTVKGTELNDDRTPSDATVTTTFNILVIDINDNAPEFNSSEYSVAITELAQVGFALPLFIQVVDKDENLGLNSMFEVYLVGNNSHHFIISPTSVQGKADIRIRVAIPLDYETVDRYDFDLFANESVPDHVGYAKVKITLINENDNRPIFSQPLYNISLYENVTVGTSVLTVLVSPRFTAGPLSSPGPTVVRHPEGFCPRDLSNQGRRHPQIPELCLLVY

SEQ ID NO: 10430 - protein, 954 aa, Homo sapiens
  Payload ID: 2089;
  Gene Symbol: CDH23;
  Gene Name: cadherin-related 23;
  ENSP ID: ENSP00000473539
  MOD_RES (1)..(1): Any amino acid
XDKTRPLSTLANLAIIITDVQDMDPIFINLPYSTNIYEHSPPGTTVRIITAIDQDKGRPRGIGYTIVSGNTNSIFALDYISGVLTLNGLLDRENPLYSHGFILTVKGTELNDDRTPSDATVTTTFNILVIDINDNAPEFNSSEYSVAITELAQVGFALPLFIQVVDKDEENGGWLQGRPEGVGEGLHVQNLGLNSMFEVYLVGNNSHHFIISPTSVQGKADIRIRVAIPLDYETVDRYDFDLFANESVPDHVGYAKVKITLINENDNRPIFSQPLYNISLYENVTVGTSVLTVLATDNDAGTFGEVSYFFSDDPDRFSLDKDTGLIMLIARLDYELIQRFTLTIIARDGGGEETTGRVRINVLDVNDNVPTFQKDAYVGALRENEPSVTQLVRLRATDEDSPPNNQITYSIVSASAFGSYFDISLYEGYGVISVSRPLDYEQISNGLIYLTVMAMDAGNPPLNSTVPVTIEVFDENDNPPTFSKPAYFVSVVENIMAGATVLFLNATDLDRSREYGQESIIYSLEGSTQFRINARSGEITTTSLLDRETKSEYILIVRAVDGGVGHNQKTGIATVNITLLDINDNHPTWKDAPYYINLVEMTPPDSDVTTVVAVDPDLGENGTLVYSIQPPNKFYSLNSTTGKIRTTHAMLDRENPDPHEAELMRKIVVSVTDCGRPPLKATSSATVFVNLLDLNDNDPTFQNLPFVAEVLEGIPAGVSIYQVVAIDLDEGLNGLVSYRMPVGMPRMDFLINSSSGVVVTTTELDRERIAEYQLRVVASDAGTPTKSSTSTLTIHVLDVNDETPTFFPAVYNVSVSEDVPREFRVVWLNCTDNDVGLNAELSYFITGGNVDGKFSVGYRDAVVRTVVGLDRETTAAYMLILEAIDNGPVGKRHTGTATVFVTVLDVNDNRPIFLQSSYEASVPEDIPEGHSILQAAPALASEGSLLDHLQSLPD

SEQ ID NO: 10431 - protein, 1079 aa, Homo sapiens
  Payload ID: 2089;
  Gene Symbol: CDH23;
  Gene Name: cadherin-related 23;
  Uniprot ID:  Q9H251;
  ENSP ID: ENSP00000478374
MVKSPMNRELVATYEVTLSVIDNASDLPERSVSVPNAKLTVNVLDVNDNTPQFKPFGITYYMERILEGATPGTTLIAVAAVDPDKGLNGLVTYTLLDLVPPGYVQLEDSSAGKVIANRTVDYEEVHWLNFTVRASDNGSPPRAAEIPVYLEIVDINDNNPIFDQPSYQEAVFEDVPVGTIILTVTATDADSGNFALIEYSLGDGESKFAINPTTGDIYVLSSLDREKKDHYILTALAKDNPGDVASNRRENSVQVVIQVLDVNDCRPQFSKPQFSTSVYENEPAGTSVITMMATDQDEGPNGELTYSLEGPGVEAFHVDMDSGLVTTQRPLQSYEKFSLTVVATDGGEPPLWGTTMLLVEVIDVNDNRPVFVRPPNGTILHIREEIPLRSNVYEVYATDKDEGLNGAVRYSFLKTAGNRDWEFFIIDPISGLIQTAQRLDRESQAVYSLILVASDLGQPVPYETMQPLQVALEDIDDNEPLFVRPPKGSPQYQLLTVPEHSPRGTLVGNVTGAVDADEGPNAIVYYFIAAGNEEKNFHLQPDGCLLVLRDLDREREAIFSFIVKASSNRSWTPPRGPSPTLDLVADLTLQEVRVVLEDINDQPPRFTKAEYTAGVATDAKVGSELIQVLALDADIGNNSLVFYSILAIHYFRALANDSEDVGQVFTMGSMDGILRTFDLFMAYSPGYFVVDIVARDLAGHNDTAIIGIYILRDDQRVKIVINEIPDRVRGFEEEFIHLLSNITGAIVNTDNVQFHVDKKGRVNFAQTELLIHVVNRDTNRILDVDRVIQMIDENKEQLRNLFRNYNVLDVQPAISVRLPDDMSALQMAIIVLAILLFLAAMLFVLMNWYYRTVHKRKLKAIVAGSAGNRGFIDIMDMPNTNKYSFDGANPVWLDPFCRNLELAAQAEHEDDLPENLSEIADLWNSPTRTHGTFGREPAAVKPDDDRYLRAAIQEYDNIAKLGQIIREGPIKLIQTELDEEPGDHSPGQGSLRFRHKPPVELKGPDGIHVVHGSTGTLLATDLNSLPEEDQKGLGRSLETLTAAEATAFERNARTESAKSTPLHKLRDVIMETPLEITEL

SEQ ID NO: 10432 - protein, 165 aa, Homo sapiens
  Payload ID: 2089;
  Gene Symbol: CDH23;
  Gene Name: cadherin-related 23;
  ENSP ID: ENSP00000480146
  MOD_RES (1)..(1): Any amino acid
XDNAPEFNSSEYSVAITELAQVGFALPLFIQVVDKDEGLNSMFEVYLVGNNSHHFIISPTSVQGKADIRIRVAIPLDYETVDRYDFDLFANESVPDHVGYAKVKITLINENDNRPIFSQPLYNISLYENVTVGTSVLTVLWEKFFCSNSSRFSSAQLVVSSWNQL

SEQ ID NO: 10433 - protein, 1381 aa, Homo sapiens
  Payload ID: 2089;
  Gene Symbol: CDH23;
  Gene Name: cadherin-related 23;
  ENSP ID: ENSP00000482036
MGRHVATSCHVAWLLVLISGCWGQVNRLPFFTNHFFDTYLLISEDTPVGSSVTQLLAQDMDNDPLVFGVSGEEASRFFAVEPDTGVVWLRQPLDRETKSEFTVEFSVSDHQGVITRKVNIQVGDVNDNAPTFHNQPYSVRIPENTPVGTPIFIVNATDPDLGAGGSVLYSFQPPSQFFAIDSARGIVTVIRELDYETTQAYQLTVNATDQDKTRPLSTLANLAIIITDVQDMDPIFINLPYSTNIYEHSPPGTTVRIITAIDQDKGRPRGIGYTIVSGNTNSIFALDYISGVLTLNGLLDRENPLYSHGFILTVKGTELNDDRTPSDATVTTTFNILVIDINDNAPEFNSSEYSVAITELAQVGFALPLFIQVVDKDENLGLNSMFEVYLVGNNSHHFIISPTSVQGKADIRIRVAIPLDYETVDRYDFDLFANESVPDHVGYAKVKITLINENDNRPIFSQPLYNISLYENVTVGTSVLTVLATDNDAGTFGEVSYFFSDDPDRFSLDKDTGLIMLIARLDYELIQRFTLTIIARDGGGEETTGRVRINVLDVNDNVPTFQKDAYVGALRENEPSVTQLVRLRATDEDSPPNNQITYSIVSASAFGSYFDISLYEGYGVISVSRPLDYEQISNGLIYLTVMAMDAGNPPLNSTVPVTIEVFDENDNPPTFSKPAYFVSVVENIMAGATVLFLNATDLDRSREYGQESIIYSLEGSTQFRINARSGEITTTSLLDRETKSEYILIVRAVDGGVGHNQKTGIATVNITLLDINDNHPTWKDAPYYINLVEMTPPDSDVTTVVAVDPDLGENGTLVYSIQPPNKFYSLNSTTGKIRTTHAMLDRENPDPHEAELMRKIVVSVTDCGRPPLKATSSATVFVNLLDLNDNDPTFQNLPFVAEVLEGIPAGVSIYQVVAIDLDEGLNGLVSYRMPVGMPRMDFLINSSSGVVVTTTELDRERIAEYQLRVVASDAGTPTKSSTSTLTIHVLDVNDETPTFFPAVYNVSVSEDVPREFRVVWLNCTDNDVGLNAELSYFITGGNVDGKFSVGYRDAVVRTVVGLDRETTAAYMLILEAIDNGPVGKRHTGTATVFVTVLDVNDNRPIFLQSSYEASVPEDIPEGHSILQLKATDADEGEFGRVWYRILHGNHGNNFRIHVSNGLLMRGPRPLDRERNSSHVLIVEAYNHDLGPMRSSVRVIVYVEDINDEAPVFTQQQYSRLGLRETAGIGTSVIVVQATDRDSGDGGLVNYRILSGAEGKFEIDESTGLIITVNYLDYETKTSYMMNVSATDQAPPFNQGFCSVYITLLNELDEAVQFSNASYEAAILENLALGTEIVRVQAYSIDNLNQITYRFNAYTSTQAKALFKIDAITVRGWGQGAPFLPI

SEQ ID NO: 10434 - protein, 3354 aa, Homo sapiens
  Payload ID: 2089;
  Gene Symbol: CDH23;
  Gene Name: cadherin-related 23;
  ENSP ID: ENSP00000483211
MGRHVATSCHVAWLLVLISGCWGQVNRLPFFTNHFFDTYLLISEDTPVGSSVTQLLAQDMDNDPLVFGVSGEEASRFFAVEPDTGVVWLRQPLDRETKSEFTVEFSVSDHQGVITRKVNIQVGDVNDNAPTFHNQPYSVRIPENTPVGTPIFIVNATDPDLGAGGSVLYSFQPPSQFFAIDSARGIVTVIRELDYETTQAYQLTVNATDQDKTRPLSTLANLAIIITDVQDMDPIFINLPYSTNIYEHSPPGTTVRIITAIDQDKGRPRGIGYTIVSGNTNSIFALDYISGVLTLNGLLDRENPLYSHGFILTVKGTELNDDRTPSDATVTTTFNILVIDINDNAPEFNSSEYSVAITELAQVGFALPLFIQVVDKDETQGLNSMFEVYLVGNNSHHFIISPTSVQGKADIRIRVAIPLDYETVDRYDFDLFANESVPDHVGYAKVKITLINENDNRPIFSQPLYNISLYENVTVGTSVLTVLATDNDAGTFGEVSYFFSDDPDRFSLDKDTGLIMLIARLDYELIQRFTLTIIARDGGGEETTGRVRINVLDVNDNVPTFQKDAYVGALRENEPSVTQLVRLRATDEDSPPNNQITYSIVSASAFGSYFDISLYEGYGVISVSRPLDYEQISNGLIYLTVMAMDAGNPPLNSTVPVTIEVFDENDNPPTFSKPAYFVSVVENIMAGATVLFLNATDLDRSREYGQESIIYSLEGSTQFRINARSGEITTTSLLDRETKSEYILIVRAVDGGVGHNQKTGIATVNITLLDINDNHPTWKDAPYYINLVEMTPPDSDVTTVVAVDPDLGENGTLVYSIQPPNKFYSLNSTTGKIRTTHAMLDRENPDPHEAELMRKIVVSVTDCGRPPLKATSSATVFVNLLDLNDNDPTFQNLPFVAEVLEGIPAGVSIYQVVAIDLDEGLNGLVSYRMPVGMPRMDFLINSSSGVVVTTTELDRERIAEYQLRVVASDAGTPTKSSTSTLTIHVLDVNDETPTFFPAVYNVSVSEDVPREFRVVWLNCTDNDVGLNAELSYFITGGNVDGKFSVGYRDAVVRTVVGLDRETTAAYMLILEAIDNGPVGKRHTGTATVFVTVLDVNDNRPIFLQSSYEASVPEDIPEGHSILQLKATDADEGEFGRVWYRILHGNHGNNFRIHVSNGLLMRGPRPLDRERNSSHVLIVEAYNHDLGPMRSSVRVIVYVEDINDEAPVFTQQQYSRLGLRETAGIGTSVIVVQATDRDSGDGGLVNYRILSGAEGKFEIDESTGLIITVNYLDYETKTSYMMNVSATDQAPPFNQGFCSVYITLLNELDEAVQFSNASYEAAILENLALGTEIVRVQAYSIDNLNQITYRFNAYTSTQAKALFKIDAITGVITVQGLVDREKGDFYTLTVVADDGGPKVDSTVQVYITVLDENDNSPRFDFTSDSAVSIPEDCPVGQRVATVKAWDPDAGSNGQVVFSLASGNIAGAFEIVTTNDSIGEVFVARPLDREELDHYILQVVASDRGTPPRKKDHILQVTILDINDNPPVIESPFGYNVSVNENVGGGTAVVQVRATDRDIGINSVLSYYITEGNKDMAFRMDRISGEIATRPAPPDRERQSFYHLVATVEDEGTPTLSATTHVYVTIVDENDNAPMFQQPHYEVLLDEGPDTLNTSLITIQALDLDEGPNGTVTYAIVAGNIVNTFRIDRHMGVITAAKELDYEISHGRYTLIVTATDQCPILSHRLTSTTTVLVNVNDINDNVPTFPRDYEGPFEVTEGQPGPRVWTFLAHDRDSGPNGQVEYSIMDGDPLGEFVISPVEGVLRVRKDVELDRETIAFYNLTICARDRGMPPLSSTMLVGIRVLDINDNDPVLLNLPMNITISENSPVSSFVAHVLASDADSGCNARLTFNITAGNRERAFFINATTGIVTVNRPLDRERIPEYKLTISVKDNPENPRIARRDYDLLLIFLSDENDNHPLFTKSTYQAEVMENSPAGTPLTVLNGPILALDADQDIYAVVTYQLLGAQSGLFDINSSTGVVTVRSGVIIDREAFSPPILELLLLAEDIGLLNSTAHLLITILDDNDNRPTFSPATLTVHLLENCPPGFSVLQVTATDEDSGLNGELVYRIEAGAQDRFLIHLVTGVIRVGNATIDREEQESYRLTVVATDRGTVPLSGTAIVTILIDDINDSRPEFLNPIQTVSVLESAEPGTVIANITAIDHDLNPKLEYHIVGIVAKDDTDRLVPNQEDAFAVNINTGSVMVKSPMNRELVATYEVTLSVIDNASDLPERSVSVPNAKLTVNVLDVNDNTPQFKPFGITYYMERILEGATPGTTLIAVAAVDPDKGLNGLVTYTLLDLVPPGYVQLEDSSAGKVIANRTVDYEEVHWLNFTVRASDNGSPPRAAEIPVYLEIVDINDNNPIFDQPSYQEAVFEDVPVGTIILTVTATDADSGNFALIEYSLGDGESKFAINPTTGDIYVLSSLDREKKDHYILTALAKDNPGDVASNRRENSVQVVIQVLDVNDCRPQFSKPQFSTSVYENEPAGTSVITMMATDQDEGPNGELTYSLEGPGVEAFHVDMDSGLVTTQRPLQSYEKFSLTVVATDGGEPPLWGTTMLLVEVIDVNDNRPVFVRPPNGTILHIREEIPLRSNVYEVYATDKDEGLNGAVRYSFLKTAGNRDWEFFIIDPISGLIQTAQRLDRESQAVYSLILVASDLGQPVPYETMQPLQVALEDIDDNEPLFVRPPKGSPQYQLLTVPEHSPRGTLVGNVTGAVDADEGPNAIVYYFIAAGNEEKNFHLQPDGCLLVLRDLDREREAIFSFIVKASSNRSWTPPRGPSPTLDLVADLTLQEVRVVLEDINDQPPRFTKAEYTAGVATDAKVGSELIQVLALDADIGNNSLVFYSILAIHYFRALANDSEDVGQVFTMGSMDGILRTFDLFMAYSPGYFVVDIVARDLAGHNDTAIIGIYILRDDQRVKIVINEIPDRVRGFEEEFIHLLSNITGAIVNTDNVQFHVDKKGRVNFAQTELLIHVVNRDTNRILDVDRVIQMIDENKEQLRNLFRNYNVLDVQPAISVRLPDDMSALQMAIIVLAILLFLAAMLFVLMNWYYRTVHKRKLKAIVAGSAGNRGFIDIMDMPNTNKYSFDGANPVWLDPFCRNLELAAQAEHEDDLPENLSEIADLWNSPTRTHGTFGREPAAVKPDDDRYLRAAIQEYDNIAKLGQIIREGPIKGSLLKVVLEDYLRLKKLFAQRMVQKASSCHSSISELIQTELDEEPGDHSPGQGSLRFRHKPPVELKGPDGIHVVHGSTGTLLATDLNSLPEEDQKGLGRSLETLTAAEATAFERNARTESAKSTPLHKLRDVIMETPLEITEL

SEQ ID NO: 10435 - protein, 745 aa, Homo sapiens
  Payload ID: 2090;
  Gene Symbol: CDHR1;
  Gene Name: cadherin-related family member 1;
  Uniprot ID:  Q96JP9;
  ENSP ID: ENSP00000331063
MRRCRWAALALGLLRLCLAQANFAPHFFDNGVGSTNGNMALFSLPEDTPVGSHVYTLNGTDPEGDPISYHISFDPSTRSVFSVDPTFGNITLVEELDREREDEIEAIISISDGLNLVAEKVVILVTDANDEAPRFIQEPYVALVPEDIPAGSIIFKVHAVDRDTGSGGSVTYFLQNLHSPFAVDRHSGVLRLQAGATLDYERSRTHYITVVAKDGGGRLHGADVVFSATTTVTVNVEDVQDMAPVFVGTPYYGYVYEDTLPGSEVLKVVAMDGDRGKPNRILYSLVNGNDGAFEINETSGAISITQSPAQLQREVYELHVQVTEMSPAGSPAAQATVPVTIRIVDLNNHPPTFYGESGPQNRFELSMNEHPPQGEILRGLKITVNDSDQGANAKFNLQLVGPRGIFRVVPQTVLNEAQVTIIVENSAAIDFEKSKVLTFKLLAVEVNTPEKFSSTADVVIQLLDTNDNVPKFDSLYYVARIPENAPGGSSVVAVTAVDPDTGPWGEVKYSTYGTGADLFLIHPSTGLIYTQPWASLDAEATARYNFYVKAEDMEGKYSVAEVFITLLDVNDHPPQFGKSVQKKTMVLGTPVKIEAIDEDAEEPNNLVDYSITHAEPANVFDINSHTGEIWLKNSIRSLDALHNITPGRDCLWSLEVQAKDRGSPSFSTTALLKIDITDAEVRRLRYMKNSNFPGTTKSVRKPKFKPKKPHSSQGLFLHPHCEIALFNLSNVNLYSRVFQGAAQAS

SEQ ID NO: 10436 - protein, 598 aa, Homo sapiens
  Payload ID: 2090;
  Gene Symbol: CDHR1;
  Gene Name: cadherin-related family member 1;
  ENSP ID: ENSP00000361189
  MOD_RES (1)..(1): Any amino acid
XITVVAKDGGGRLHGADVVFSATTTVTVNVEDVQDMAPVFVGTPYYGYVYEDTLPGSEVLKVVAMDGDRGKPNRILYSLVNGNDGAFEINETSGAISITQSPAQLQREVYELHVQVTEMSPAGSPAAQATVPVTIRIVDLNNHPPTFYGESGPQNRFELSMNEHPPQGEILRGLKITVNDSDQGANAKFNLQLVGPRGIFRVVPQTVLNEAQVTIIVENSAAIDFEKSKVLTFKAVDPDTGPWGEVKYSTYGTGADLFLIHPSTGLIYTQPWASLDAEATARYNFYVKAEDMEGKYSVAEVFITLLDVNDHPPQFGKSVQKKTMVLGTPVKIEAIDEDAEEPNNLVDYSITHAEPANVFDINSHTGEIWLKNSIRSLDALHNITPGRDCLWSLEVQAKDRGSPSFSTTALLKIDITDAETLSRSPMAAFLIQTKDNPMKAVGVLAGTMATVVAITVLISTATFWRNKKSNKVLPMRRVLRKRPSPAPRTIRIEWLKSKSTKAATKFMLKEKPPNENCNNNSPESSLLPRAPALPPPPSVAPSTGAAQWTVPTVSGSLTPQPTQPPPKPKTMGSPVQSTLISELKQKFEKKSVHNKAYF

SEQ ID NO: 10437 - protein, 135 aa, Homo sapiens
  Payload ID: 2090;
  Gene Symbol: CDHR1;
  Gene Name: cadherin-related family member 1;
  ENSP ID: ENSP00000485151
  MOD_RES (1)..(1): Any amino acid
XENSAAIDFEKSKVLTFKLLAVEVNTPEKFSSTADVVIQLLDTNDNVPKFDSLYYVARIPENAPGGSSVVAVTAVDPDTGPWGEVKYSTYGTGADLFLIHPSTGLIYTQPWASLDAEATARYNFYVKAEDMEGKP

SEQ ID NO: 10438 - protein, 78 aa, Homo sapiens
  Payload ID: 2090;
  Gene Symbol: CDHR1;
  Gene Name: cadherin-related family member 1;
  ENSP ID: ENSP00000485245
  MOD_RES (1)..(1): Any amino acid
XITHAEPANVFDINSHTGEIWLKNSIRSLDALHNITPGRDCLWSLEVQAKDRGSPSFSTTALLKIDITDAEVRRLRSN

SEQ ID NO: 10439 - protein, 48 aa, Homo sapiens
  Payload ID: 2090;
  Gene Symbol: CDHR1;
  Gene Name: cadherin-related family member 1;
  ENSP ID: ENSP00000485460
  MOD_RES (1)..(1): Any amino acid
XMDGDRGKPNRILYSLVNDFPRQCRTILWHDSPAPPCGPVQNFRVHLP

SEQ ID NO: 10440 - protein, 859 aa, Homo sapiens
  Payload ID: 2090;
  Gene Symbol: CDHR1;
  Gene Name: cadherin-related family member 1;
  Uniprot ID:  Q96JP9;
  ENSP ID: ENSP00000485478
MRRCRWAALALGLLRLCLAQANFAPHFFDNGVGSTNGNMALFSLPEDTPVGSHVYTLNGTDPEGDPISYHISFDPSTRSVFSVDPTFGNITLVEELDREREDEIEAIISISDGLNLVAEKVVILVTDANDEAPRFIQEPYVALVPEDIPAGSIIFKVHAVDRDTGSGGSVTYFLQNLHSPFAVDRHSGVLRLQAGATLDYERSRTHYITVVAKDGGGRLHGADVVFSATTTVTVNVEDVQDMAPVFVGTPYYGYVYEDTLPGSEVLKVVAMDGDRGKPNRILYSLVNGNDGAFEINETSGAISITQSPAQLQREVYELHVQVTEMSPAGSPAAQATVPVTIRIVDLNNHPPTFYGESGPQNRFELSMNEHPPQGEILRGLKITVNDSDQGANAKFNLQLVGPRGIFRVVPQTVLNEAQVTIIVENSAAIDFEKSKVLTFKLLAVEVNTPEKFSSTADVVIQLLDTNDNVPKFDSLYYVARIPENAPGGSSVVAVTAVDPDTGPWGEVKYSTYGTGADLFLIHPSTGLIYTQPWASLDAEATARYNFYVKAEDMEGKYSVAEVFITLLDVNDHPPQFGKSVQKKTMVLGTPVKIEAIDEDAEEPNNLVDYSITHAEPANVFDINSHTGEIWLKNSIRSLDALHNITPGRDCLWSLEVQAKDRGSPSFSTTALLKIDITDAETLSRSPMAAFLIQTKDNPMKAVGVLAGTMATVVAITVLISTATFWRNKKSNKVLPMRRVLRKRPSPAPRTIRIEWLKSKSTKAATKFMLKEKPPNENCNNNSPESSLLPRAPALPPPPSVAPSTGAAQWTVPTVSGSLTPQPTQPPPKPKTMGSPVQSTLISELKQKFEKKSVHNKAYF

SEQ ID NO: 10441 - protein, 1310 aa, Homo sapiens
  Payload ID: 2091;
  Gene Symbol: CDHR2;
  Gene Name: cadherin-related family member 2;
  Uniprot ID:  Q9BYE9;
  ENSP ID: ENSP00000261944
MAQLWLSCFLLPALVVSVAANVAPKFLANMTSVILPEDLPVGAQAFWLVAEDQDNDPLTYGMSGPNAYFFAVTPKTGEVKLASALDYETLYTFKVTISVSDPYIQVQREMLVIVEDRNDNAPVFQNTAFSTSINETLPVGSVVFSVLAVDKDMGSAGMVVYSIEKVIPSTGDSEHLFRILANGSIVLNGSLSYNNKSAFYQLELKACDLGGMYHNTFTIQCSLPVFLSISVVDQPDLDPQFVREFYSASVAEDAAKGTSVLTVEAVDGDKGINDPVIYSISYSTRPGWFDIGADGVIRVNGSLDREQLLEADEEVQLQVTATETHLNIYGQEAKVSIWVTVRVMDVNDHKPEFYNCSLPACTFTPEEAQVNFTGYVDEHASPRIPIDDLTMVVYDPDKGSNGTFLLSLGGPDAEAFSVSPERAVGSASVQVLVRVSALVDYERQTAMAVQVVATDSVSQNFSVAMVTIHLRDINDHRPTFPQSLYVLTVPEHSATGSVVTDSIHATDPDTGAWGQITYSLLPGNGADLFQVDPVSGTVTVRNGELLDRESQAVYYLTLQATDGGNLSSSTTLQIHLLDINDNAPVVSGSYNIFVQEEEGNVSVTIQAHDNDEPGTNNSRLLFNLLPGPYSHNFSLDPDTGLLRNLGPLDREAIDPALEGRIVLTVLVSDCGEPVLGTKVNVTITVEDINDNLPIFNQSSYNFTVKEEDPGVLVGVVKAWDADQTEANNRISFSLSGSGANYFMIRGLVLGAGWAEGYLRLPPDVSLDYETQPVFNLTVSAENPDPQGGETIVDVCVNVKDVNDNPPTLDVASLRGIRVAENGSQHGQVAVVVASDVDTSAQLEIQLVNILCTKAGVDVGSLCWGWFSVAANGSVYINQSKAIDYEACDLVTLVVRACDLATDPGFQAYSNNGSLLITIEDVNDNAPYFLPENKTFVIIPELVLPNREVASVRARDDDSGNNGVILFSILRVDFISKDGATIPFQGVFSIFTSSEADVFAGSIQPVTSLDSTLQGTYQVTVQARDRPSLGPFLEATTTLNLFTVDQSYRSRLQFSTPKEEVGANRQAINAALTQATRTTVYIVDIQDIDSAARARPHSYLDAYFVFPNGSALTLDELSVMIRNDQDSLTQLLQLGLVVLGSQESQESDLSKQLISVIIGLGVALLLVLVIMTMAFVCVRKSYNRKLQAMKAAKEARKTAAGVMPSAPAIPGTNMYNTERANPMLNLPNKDLGLEYLSPSNDLDSVSVNSLDDNSVDVDKNSQEIKEHRPPHTPPEPDPEPLSVVLLGRQAGASGQLEGPSYTNAGLDTTDL

SEQ ID NO: 10442 - protein, 1310 aa, Homo sapiens; identical to SEQ ID NO: 10441
  Payload ID: 2091;
  Gene Symbol: CDHR2;
  Gene Name: cadherin-related family member 2;
  Uniprot ID:  Q9BYE9;
  ENSP ID: ENSP00000421078

SEQ ID NO: 10443 - protein, 1310 aa, Homo sapiens; identical to SEQ ID NO: 10441
  Payload ID: 2091;
  Gene Symbol: CDHR2;
  Gene Name: cadherin-related family member 2;
  Uniprot ID:  Q9BYE9;
  ENSP ID: ENSP00000424565

SEQ ID NO: 10444 - protein, 62 aa, Homo sapiens
  Payload ID: 2091;
  Gene Symbol: CDHR2;
  Gene Name: cadherin-related family member 2;
  ENSP ID: ENSP00000426838
MAQLWLSCFLLPALVVSVAANVAPKFLANMTSVILPEDLPVVQNGIQECRKLPDETRDTKGY

SEQ ID NO: 10445 - protein, 885 aa, Homo sapiens
  Payload ID: 2092;
  Gene Symbol: CDHR3;
  Gene Name: cadherin-related family member 3;
  Uniprot ID:  Q6ZTQ4;
  ENSP ID: ENSP00000325954
MQEAIILLALLGAMSGGEALHLILLPATGNVAENSPPGTSVHKFSVKLSASLSPVIPGFPQIVNSNPLTEAFRVNWLSGTYFEVVTTGMEQLDFETGPNIFDLQIYVKDEVGVTDLQVLTVQVTDVNEPPQFQGNLAEGLHLYIVERANPGFIYQVEAFDPEDTSRNIPLSYFLISPPKSFRMSANGTLFSTTELDFEAGHRSFHLIVEVRDSGGLKASTELQVNIVNLNDEVPRFTSPTRVYTVLEELSPGTIVANITAEDPDDEGFPSHLLYSITTVSKYFMINQLTGTIQVAQRIDRDAGELRQNPTISLEVLVKDRPYGGQENRIQITFIVEDVNDNPATCQKFTFSIMVPERTAKGTLLLDLNKFCFDDDSEAPNNRFNFTMPSGVGSGSRFLQDPAGSGKIVLIGDLDYENPSNLAAGNKYTVIIQVQDVAPPYYKNNVYVYILTSPENEFPLIFDRPSYVFDVSERRPARTRVGQVRATDKDLPQSSLLYSISTGGASLQYPNVFWINPKTGELQLVTKVDCETTPIYILRIQATNNEDTSSVTVTVNILEENDEKPICTPNSYFLALPVDLKVGTNIQNFKLTCTDLDSSPRSFRYSIGPGNVNNHFTFSPNAGSNVTRLLLTSRFDYAGGFDKIWDYKLLVYVTDDNLMSDRKKAEALVETGTVTLSIKVIPHPTTIITTTPRPRVTYQVLRKNVYSPSAWYVPFVITLGSILLLGLLVYLVVLLAKAIHRHCPCKTGKNKEPLTKKGETKTAERDVVVETIQMNTIFDGEAIDPVTGETYEFNSKTGARKWKDPLTQMPKWKESSHQGAAPRRVTAGEGMGSLRSANWEEDELSGKAWAEDAGLGSRNEGGKLGNPKNRNPAFMNRAYPKPHPGK

SEQ ID NO: 10446 - protein, 149 aa, Homo sapiens
  Payload ID: 2092;
  Gene Symbol: CDHR3;
  Gene Name: cadherin-related family member 3;
  ENSP ID: ENSP00000417198
MQEAIILLALLGAMSGGEALHLILLPATGNVAENSPPGTSVHKFSVKLSASLSPVIPGFPQIVNSNPLTEAFRVNWLSGTYFEVVTTGMEQLDFETGPNIFDLQIYVKDEVGVTDLQVLTVQVTDVNEPPQFQGNLAEARHECTQSWRN

SEQ ID NO: 10447 - protein, 797 aa, Homo sapiens
  Payload ID: 2092;
  Gene Symbol: CDHR3;
  Gene Name: cadherin-related family member 3;
  ENSP ID: ENSP00000417771
MEQLDFETGPNIFDLQIYVKDEVGVTDLQVLTVQVTDVNEPPQFQGNLAEGLHLYIVERANPGFIYQVEAFDPEDTSRNIPLSYFLISPPKSFRMSANGTLFSTTELDFEAGHRSFHLIVEVRDSGGLKASTELQVNIVNLNDEVPRFTSPTRVYTVLEELSPGTIVANITAEDPDDEGFPSHLLYSITTVSKYFMINQLTGTIQVAQRIDRDAGELRQNPTISLEVLVKDRPYGGQENRIQITFIVEDVNDNPATCQKFTFSIMVPERTAKGTLLLDLNKFCFDDDSEAPNNRFNFTMPSGVGSGSRFLQDPAGSGKIVLIGDLDYENPSNLAAGNKYTVIIQVQDVAPPYYKNNVYVYILTSPENEFPLIFDRPSYVFDVSERRPARTRVGQVRATDKDLPQSSLLYSISTGGASLQYPNVFWINPKTGELQLVTKVDCETTPIYILRIQATNNEDTSSVTVTVNILEENDEKPICTPNSYFLALPVDLKVGTNIQNFKLTCTDLDSSPRSFRYSIGPGNVNNHFTFSPNAGSNVTRLLLTSRFDYAGGFDKIWDYKLLVYVTDDNLMSDRKKAEALVETGTVTLSIKVIPHPTTIITTTPRPRVTYQVLRKNVYSPSAWYVPFVITLGSILLLGLLVYLVVLLAKAIHRHCPCKTGKNKEPLTKKGETKTAERDVVVETIQMNTIFDGEAIDPVTGETYEFNSKTGARKWKDPLTQMPKWKESSHQGAAPRRVTAGEGMGSLRSANWEEDELSGKAWAEDAGLGSRNEGGKLGNPKNRNPAFMNRAYPKPHPGK

SEQ ID NO: 10448 - protein, 161 aa, Homo sapiens
  Payload ID: 2092;
  Gene Symbol: CDHR3;
  Gene Name: cadherin-related family member 3;
  ENSP ID: ENSP00000418958
  MOD_RES (1)..(1): Any amino acid
XDYENPSNLAAGNKYTVIIQVTVNILEENDEKPICTPNSYFLALPVDLKVGTNIQNFKLTCTDLDSSPRSFRYSIGPGNVNNHFTFSPNAGSNVTRLLLTSRFDYAGGFDKIWDYKLLVYVTDDNLMSDRKKAEALVETGTVTLSIKVIPHPTTIITTTPR

SEQ ID NO: 10449 - protein, 318 aa, Homo sapiens
  Payload ID: 2092;
  Gene Symbol: CDHR3;
  Gene Name: cadherin-related family member 3;
  ENSP ID: ENSP00000419017
YTVLEELSPGTIVANITAEDPDDEGFPSHLLYSITTVSKYFMINQLTGTIQVAQRIDRDAGELRQNPTISLEVLVKDRPYGGQENRIQITFIVEDVNDNPATCQKFTFSIMVPERTAKGTLLLDLNKFCFDDDSEAPNNRFNFTMPSGVGSGSRFLQDPAGSGKIVLIGDLDYENPSNLAAGNKYTVIIQVQDVAPPYYKNNVYVYILTSPENEFPLIFDRPSYVFDVSERRPAQGHLSGPEEKRLLSICMVRAVCHHFGLHIASGSPRVPGRPIGQSHPQTLPLQDWEEQGTSDKERRNEDCRERRRGGNYPDEHYL

SEQ ID NO: 10450 - protein, 61 aa, Homo sapiens
  Payload ID: 2092;
  Gene Symbol: CDHR3;
  Gene Name: cadherin-related family member 3;
  ENSP ID: ENSP00000419593
MEQLDFETGPNIFDLQIYVKDEVGVTDLQVLTVQVTDVNEPPQFQGNLAEARHECTQSWRN

SEQ ID NO: 10451 - protein, 199 aa, Homo sapiens
  Payload ID: 2093;
  Gene Symbol: CDHR4;
  Gene Name: cadherin-related family member 4;
  Uniprot ID:  A6H8M9;
  ENSP ID: ENSP00000341302
MVLLRLLVFLFAPVVSDLCSLPCFINVSESQGPGTVLQFLSFNCSSYTPTPTLELLNVQPPTTFFNPPSLARWQGTYVGKLTLSSSAQLDALMVNHYKVQLKFTCGNHVMEGSLSVDVQRDLSHIQCAGQFASPGEARGSRQGGGRHGLSRSSLTSTLASWGNDSGARDSHTWGSAVHSAPPRPRTPRSAGKPRTWDGG

SEQ ID NO: 10452 - protein, 788 aa, Homo sapiens
  Payload ID: 2093;
  Gene Symbol: CDHR4;
  Gene Name: cadherin-related family member 4;
  Uniprot ID:  A6H8M9;
  ENSP ID: ENSP00000391409
MVLLRLLVFLFAPVVSDLCSLPCFINVSESQGPGTVLQFLSFNCSSYTPTPTLELLNVQPPTTFFNPPSLARWQGTYVGKLTLSSSAQLDALMVNHYKVQLKFTCGNHVMEGSLSVDVQRDLSHIQCAGQFASPAGEMIQVPETVTPGARLYTLLLPGLELHGAQMSIISAQDLPHFPGPFSINEQGWLQAPSQGLLGQAQKVFQLQISVSFGQRQSCQGMVIVKVLPVPSSQVSFLEQAQNITIPENLAPGSEVVQVQARGVDLRYEILSPVPSPLFSIGRADGVVRTTTPLELARTSGTAVSRLQVKAFEQGQLWASAKLNLTMNVQLVNLWPPRCLPALLVSQIPETAPVGTVLNTLTCEDPDSVGATLDYKLWFRSSSNPASLCLYDRVLEVNATLDCDTPGACFQHAASILVLDGGQPQMTTEVPVLVMVTPINEFSPACAPRTFRVQEDAAPHTLLGSVVGTDMDYPHDNIEYYTSGGPTTFAVDRLSGEVHLLGPLDYEQQRLYRLTVLVIDHGQDQNPNHHLSGSCTITIEVEDVNDHAPECEPPFQELTIYAPLGRSVEVTKMSCQIPQEPQRLIYSYSIVGGNSQNRFILQGAILVHSDLVLGPFWPEQPRTYELLICVADAGPSTPHLSTTATIIVHLVPRRASTVATSTHRTTVPSTMTPMLVTDTEAFWQPQPWFVVVLTATGALLLLALGWLLGRLLQGLAQLLQAPSKPAQALLLNSIQGTEGSIEGFLEAPKMEMSQAPSSVMSLHFDGRAQDSRTGRDYLFNTHTGARRWL

SEQ ID NO: 10453 - protein, 134 aa, Homo sapiens
  Payload ID: 2093;
  Gene Symbol: CDHR4;
  Gene Name: cadherin-related family member 4;
  ENSP ID: ENSP00000417753
QELTIYAPLGRSVEVTKMSCQIPQEPQRLIYSYSIVGGNSQNRFILQGAILVHSDLVLGPFWPEQPRTYELLICVADAGPSTPHLSTTATIIVHLVPRRASTVATSTHRTTVGPAAASTQQTSPGFAAKQHPGN

SEQ ID NO: 10454 - protein, 151 aa, Homo sapiens
  Payload ID: 2093;
  Gene Symbol: CDHR4;
  Gene Name: cadherin-related family member 4;
  ENSP ID: ENSP00000419433
  MOD_RES (1)..(1): Any amino acid
XSTTATIIVHLVPRRASTVATSTHRTTVPSTMTPMLVTDTEAFWQPQPWFVVVLTATGALLLLALGWLLGRLLQGLAQLLQAPSKPAQALLLNSIQGTEGSIEGFLEAPKMEMSQAPSSVMSLQHFDGRAQDSRTGRDYLFNTHTGARRWL

SEQ ID NO: 10455 - protein, 184 aa, Homo sapiens
  Payload ID: 2093;
  Gene Symbol: CDHR4;
  Gene Name: cadherin-related family member 4;
  ENSP ID: ENSP00000420677
MVLLRLLVFLFAPVVSDLCSLPCFINVSESQGPGTVLQFLSFNCSSYTPTPTLELLNVQPPTTFFNPPSLARWQGTYVGKLTLSSSAQLDALMVNHYKVQLKFTCGNHVMEGSLSVDVQRDLSHIQCAGQFASPAGEMIQVPETVTPGARLYTLLLPGLELHGAQVSPEHGTVGDRMGVGGWRE

SEQ ID NO: 10456 - protein, 651 aa, Homo sapiens
  Payload ID: 2094;
  Gene Symbol: CDHR5;
  Gene Name: cadherin-related family member 5;
  Uniprot ID:  Q9HBB8;
  ENSP ID: ENSP00000345726
MGSWALLWPPLLFTGLLVRPPGTMAQAQYCSVNKDIFEVEENTNVTEPLVDIHVPEGQEVTLGALSTPFAFRIQGNQLFLNVTPDYEEKSLLEAQLLCQSGGTLVTQLRVFVSVLDVNDNAPEFPFKTKEIRVEEDTKVNSTVIPETQLQAEDRDKDDILFYTLQEMTAGASDYFSLVSVNRPALRLDRPLDFYERPNMTFWLLVRDTPGENVEPSHTATATLVLNVVPADLRPPWFLPCTFSDGYVCIQAQYHGAVPTGHILPSPLVLRPGPIYAEDGDRGINQPIIYSIFRGNVNGTFIIHPDSGNLTVARSVPSPMTFLLLVKGQQADLARYSVTQVTVEAVAAAGSPPRFPQRLYRGTVARGAGAGVVVKDAAAPSQPLRIQAQDPEFSDLNSAITYRITNHSHFRMEGEVVLTTTTLAQAGAFYAEVEAHNTVTSGTATTVIEIQVSEQEPPSTGGGPSEDKRFSVVDMAALGGVLGALLLLALLGLAVLVHKHYGPRLKCCCGKAPEPQPQGFDNQAFLPDHKANWAPVPSPTHDPKPAEAPMPAEPAPPGPASPGGAPEPPAAARAGGSPTAVRSILTKERRPEGGYKAVWFGEDIGTEADVVVLNAPTLDVDGASDSGSGDEGEGAGRGGGPYDAPGGDDSYI

SEQ ID NO: 10457 - protein, 845 aa, Homo sapiens
  Payload ID: 2094;
  Gene Symbol: CDHR5;
  Gene Name: cadherin-related family member 5;
  Uniprot ID:  Q9HBB8;
  ENSP ID: ENSP00000351118
MGSWALLWPPLLFTGLLVRPPGTMAQAQYCSVNKDIFEVEENTNVTEPLVDIHVPEGQEVTLGALSTPFAFRIQGNQLFLNVTPDYEEKSLLEAQLLCQSGGTLVTQLRVFVSVLDVNDNAPEFPFKTKEIRVEEDTKVNSTVIPETQLQAEDRDKDDILFYTLQEMTAGASDYFSLVSVNRPALRLDRPLDFYERPNMTFWLLVRDTPGENVEPSHTATATLVLNVVPADLRPPWFLPCTFSDGYVCIQAQYHGAVPTGHILPSPLVLRPGPIYAEDGDRGINQPIIYSIFRGNVNGTFIIHPDSGNLTVARSVPSPMTFLLLVKGQQADLARYSVTQVTVEAVAAAGSPPRFPQRLYRGTVARGAGAGVVVKDAAAPSQPLRIQAQDPEFSDLNSAITYRITNHSHFRMEGEVVLTTTTLAQAGAFYAEVEAHNTVTSGTATTVIEIQVSEQEPPSTDVPPSPEAGGTTGPWTSTTSEVPRPPEPSQGPSTTSSGGGTGPHPPSGTTLRPPTSSTPGGPPGAENSTSHQPATPGGDTAQTPKPGTSQPMPPGVGTSTSHQPATPSGGTAQTPEPGTSQPMPPSMGTSTSHQPATPGGGTAQTPEAGTSQPMPPGMGTSTSHQPTTPGGGTAQTPEPGTSQPMPLSKSTPSSGGGPSEDKRFSVVDMAALGGVLGALLLLALLGLAVLVHKHYGPRLKCCCGKAPEPQPQGFDNQAFLPDHKANWAPVPSPTHDPKPAEAPMPAEPAPPGPASPGGAPEPPAAARAGGSPTAVRSILTKERRPEGGYKAVWFGEDIGTEADVVVLNAPTLDVDGASDSGSGDEGEGAGRGGGPYDAPGGDDSYI

SEQ ID NO: 10458 - protein, 845 aa, Homo sapiens; identical to SEQ ID NO: 10457
  Payload ID: 2094;
  Gene Symbol: CDHR5;
  Gene Name: cadherin-related family member 5;
  Uniprot ID:  Q9HBB8;
  ENSP ID: ENSP00000380676

SEQ ID NO: 10459 - protein, 15 aa, Homo sapiens
  Payload ID: 2094;
  Gene Symbol: CDHR5;
  Gene Name: cadherin-related family member 5;
  ENSP ID: ENSP00000431505
MTAGASDYFSLVSVN

SEQ ID NO: 10460 - protein, 190 aa, Homo sapiens
  Payload ID: 2094;
  Gene Symbol: CDHR5;
  Gene Name: cadherin-related family member 5;
  ENSP ID: ENSP00000435082
MGSWALLWPPLLFTGLLVRPPGTMAQAQYCSVNKDIFEVEENTNVTEPLVDIHVPEGQEVTLGALSTPFAFRIQGNQLFLNVTPDYEEKSLLEAQLLCQSGGTLDTKVNSTVIPETQLQAEDRDKDDILFYTLQEMTAGASDYFSLVSVNRPALRLDRPLDFYERPNMTFWLLVRPSVAGHSGGECGTQP

SEQ ID NO: 10461 - protein, 165 aa, Homo sapiens
  Payload ID: 2094;
  Gene Symbol: CDHR5;
  Gene Name: cadherin-related family member 5;
  ENSP ID: ENSP00000436295
MGSWALLWPPLLFTGLLVRPPGTMAQAQYCSVNKDIFEVEENTNVTEPLVDIHVPEGQEVTLGALSTPFAFRIQGNQLFLNVTPDYEEKSLLEAQLLCQSGGTLTKEIRVEEDTKVNSTVIPETQLQAEDRDKDDILFYTLQEMTAGASDYFSLVSVNRPALRLD

SEQ ID NO: 10462 - protein, 106 aa, Homo sapiens
  Payload ID: 2094;
  Gene Symbol: CDHR5;
  Gene Name: cadherin-related family member 5;
  ENSP ID: ENSP00000437255
MGSWALLWPPLLFTGLLVRPPGTMAQAQYCSVNKDIFEVEENTNVTEPLVDIHVPEGQEVTLGALSTPFAFRIQGNQLFLNVTPDYEKAGPFRDEAAWAHTLSTDH

SEQ ID NO: 10463 - protein, 845 aa, Homo sapiens
  Payload ID: 2094;
  Gene Symbol: CDHR5;
  Gene Name: cadherin-related family member 5;
  ENSP ID: ENSP00000480151
MGSWALLWPPLLFTGLLVRPPGTMAQAQYCSVNKDIFEVEENTNVTEPLVDIHVPEGQEVTLGALSTPFAFRIQGNQLFLNVTPDYEEKSLLEAQLLCQSGGTLVTQLRVFVSVLDVNDNAPEFPFKTKEIRVEEDTKVNSTVIPETQLQAEDRDKDDILFYTLQEMTAGASDYFSLVSVNRPALRLDRPLDFYERPNMTFWLLVRDTPGENVEPSHTATATLVLNVVPADLRPPWFLPCTFSDGYVCIQAQYHGAVPTGHILPSPLVLRPGPIYAEDGDRGINQPIIYSIFRGNVNGTFIIHPDSGNLTVARSVPSPMTFLLLVKGQQADLARYSVTQVTVEAVAAAGSPPRFPQSLYRGTVARGAGAGVVVKDAAAPSQPLRIQAQDPEFSDLNSAITYRITNHSHFRMEGEVVLTTTTLAQAGAFYAEVEAHNTVTSGTATTVIEIQVSEQEPPSTDVPPSPEAGGTTGPWTSTTSEVPRPPEPSQGPSTTSSGGGTGPHPPSGTTLRPPTSSTPGGSPGAENSTSHQPATPGGDTAQTPKPGTSQPMPPGVGTSTSHQPATPSGGTAQTPEPGTSQPMPPSMGTSTSHQPATPGGGTAQTPEAGTSQPMPPGMGTSTSHQPTTPGGGTAQTPEPGTSQPMPLSKSTPSSGGGPSEDKRFSVVDMAALGGVLGALLLLALLGLAVLVHKHYGPRLKCCSGKAPEPQPQGFDNQAFLPDHKANWAPVPSPTHDPKPAEAPMPAEPAPPGPASPGGAPEPPAAARAGGSPTAVRSILTKERRPEGGYKAVWFGEDIGTEADVVVLNAPTLDVDGASDSGSGDEGEGAGRGGGPYDAPGGDDSYI

SEQ ID NO: 10464 - protein, 651 aa, Homo sapiens
  Payload ID: 2094;
  Gene Symbol: CDHR5;
  Gene Name: cadherin-related family member 5;
  ENSP ID: ENSP00000482865
MGSWALLWPPLLFTGLLVRPPGTMAQAQYCSVNKDIFEVEENTNVTEPLVDIHVPEGQEVTLGALSTPFAFRIQGNQLFLNVTPDYEEKSLLEAQLLCQSGGTLVTQLRVFVSVLDVNDNAPEFPFKTKEIRVEEDTKVNSTVIPETQLQAEDRDKDDILFYTLQEMTAGASDYFSLVSVNRPALRLDRPLDFYERPNMTFWLLVRDTPGENVEPSHTATATLVLNVVPADLRPPWFLPCTFSDGYVCIQAQYHGAVPTGHILPSPLVLRPGPIYAEDGDRGINQPIIYSIFRGNVNGTFIIHPDSGNLTVARSVPSPMTFLLLVKGQQADLARYSVTQVTVEAVAAAGSPPRFPQSLYRGTVARGAGAGVVVKDAAAPSQPLRIQAQDPEFSDLNSAITYRITNHSHFRMEGEVVLTTTTLAQAGAFYAEVEAHNTVTSGTATTVIEIQVSEQEPPSTGGGPSEDKRFSVVDMAALGGVLGALLLLALLGLAVLVHKHYGPRLKCCSGKAPEPQPQGFDNQAFLPDHKANWAPVPSPTHDPKPAEAPMPAEPAPPGPASPGGAPEPPAAARAGGSPTAVRSILTKERRPEGGYKAVWFGEDIGTEADVVVLNAPTLDVDGASDSGSGDEGEGAGRGGGPYDAPGGDDSYI

SEQ ID NO: 10465 - protein, 15 aa, Homo sapiens
  Payload ID: 2094;
  Gene Symbol: CDHR5;
  Gene Name: cadherin-related family member 5;
  ENSP ID: ENSP00000487773
MTAGASDYFSLVSVN

SEQ ID NO: 10466 - protein, 165 aa, Homo sapiens; identical to SEQ ID NO: 10461
  Payload ID: 2094;
  Gene Symbol: CDHR5;
  Gene Name: cadherin-related family member 5;
  ENSP ID: ENSP00000487868

SEQ ID NO: 10467 - protein, 106 aa, Homo sapiens; identical to SEQ ID NO: 10462
  Payload ID: 2094;
  Gene Symbol: CDHR5;
  Gene Name: cadherin-related family member 5;
  ENSP ID: ENSP00000488183

SEQ ID NO: 10468 - protein, 190 aa, Homo sapiens; identical to SEQ ID NO: 10460
  Payload ID: 2094;
  Gene Symbol: CDHR5;
  Gene Name: cadherin-related family member 5;
  ENSP ID: ENSP00000488189

SEQ ID NO: 10469 - protein, 845 aa, Homo sapiens; identical to SEQ ID NO: 10463
  Payload ID: 2094;
  Gene Symbol: CDHR5;
  Gene Name: cadherin-related family member 5;
  ENSP ID: ENSP00000488376

SEQ ID NO: 10470 - protein, 261 aa, Homo sapiens
  Payload ID: 2095;
  Gene Symbol: CALB1;
  Gene Name: calbindin 1, 28kDa;
  Uniprot ID:  P05937;
  ENSP ID: ENSP00000265431
MAESHLQSSLITASQFFEIWLHFDADGSGYLEGKELQNLIQELQQARKKAGLELSPEMKTFVDQYGQRDDGKIGIVELAHVLPTEENFLLLFRCQQLKSCEEFMKTWRKYDTDHSGFIETEELKNFLKDLLEKANKTVDDTKLAEYTDLMLKLFDSNNDGKLELTEMARLLPVQENFLLKFQGIKMCGKEFNKAFELYDQDGNGYIDENELDALLKDLCEKNKQDLDINNITTYKKNIMALSDGGKLYRTDLALILCAGDN

SEQ ID NO: 10471 - protein, 119 aa, Homo sapiens
  Payload ID: 2095;
  Gene Symbol: CALB1;
  Gene Name: calbindin 1, 28kDa;
  ENSP ID: ENSP00000429246
MKTFVDQYGQRDDGKIGIVELAHVLPTEENFLLLFRCQQLKSCEEFMKTWRKYDTDHSGFIETEELKNFLKDLLEKANKTVDDTKLAEYTDLMLKLFDSNNDGKLELTEMARLLPVQEN

SEQ ID NO: 10472 - protein, 204 aa, Homo sapiens
  Payload ID: 2095;
  Gene Symbol: CALB1;
  Gene Name: calbindin 1, 28kDa;
  Uniprot ID:  P05937;
  ENSP ID: ENSP00000429602
MKTFVDQYGQRDDGKIGIVELAHVLPTEENFLLLFRCQQLKSCEEFMKTWRKYDTDHSGFIETEELKNFLKDLLEKANKTVDDTKLAEYTDLMLKLFDSNNDGKLELTEMARLLPVQENFLLKFQGIKMCGKEFNKAFELYDQDGNGYIDENELDALLKDLCEKNKQDLDINNITTYKKNIMALSDGGKLYRTDLALILCAGDN

SEQ ID NO: 10473 - protein, 3 aa, Homo sapiens
  Payload ID: 2095;
  Gene Symbol: CALB1;
  Gene Name: calbindin 1, 28kDa;
  ENSP ID: ENSP00000430192
MKT

SEQ ID NO: 10474 - protein, 102 aa, Homo sapiens
  Payload ID: 2095;
  Gene Symbol: CALB1;
  Gene Name: calbindin 1, 28kDa;
  ENSP ID: ENSP00000430281
MKTFVDQYGQRDDGKIGIVELAHVLPTEENFLLLFRCQQLKSCEEFMKTWRKYDTDHSGFIETEELKNFLKDLLEKANKTVDDTKLAEYTDLMLKLFDSNND

SEQ ID NO: 10475 - protein, 271 aa, Homo sapiens
  Payload ID: 2096;
  Gene Symbol: CALB2;
  Gene Name: calbindin 2;
  Uniprot ID:  P22676;
  ENSP ID: ENSP00000307508
MAGPQQQPPYLHLAELTASQFLEIWKHFDADGNGYIEGKELENFFQELEKARKGSGMMSKSDNFGEKMKEFMQKYDKNSDGKIEMAELAQILPTEENFLLCFRQHVGSSAEFMEAWRKYDTDRSGYIEANELKGFLSDLLKKANRPYDEPKLQEYTQTILRMFDLNGDGKLGLSEMSRLLPVQENFLLKFQGMKLTSEEFNAIFTFYDKDRSGYIDEHELDALLKDLYEKNKKEMNIQQLTNYRKSVMSLAEAGKLYRKDLEIVLCSEPPM

SEQ ID NO: 10476 - protein, 192 aa, Homo sapiens
  Payload ID: 2096;
  Gene Symbol: CALB2;
  Gene Name: calbindin 2;
  ENSP ID: ENSP00000340294
MAGPQQQPPYLHLAELTASQFLEIWKHFDADGNGYIEGKELENFFQELEKARKGSGMMSKSDNFGEKMKEFMQKYDKNSDGKIEMAELAQILPTEENFLLCFRQHVGSSAEFMEAWRKYDTDRSGYIEANELKGFLSDLLKKANRPYDEPKLQEYTQTILRMFDLNGDGKLGLSEMSRIEAATLTSMSWMPF

SEQ ID NO: 10477 - protein, 158 aa, Homo sapiens
  Payload ID: 2096;
  Gene Symbol: CALB2;
  Gene Name: calbindin 2;
  ENSP ID: ENSP00000454467
  MOD_RES (1)..(1): Any amino acid
XLENFFQELEKARKGSGMLAQILPTEENFLLCFRQHVGSSAEFMEAWRKYDTDRSGYIEANELKGFLSDLLKKANRPYDEPKLQEYTQTILRMFDLNGDGKLGLSEILLPVQENFLLKFQGMKLTSEEFNAIFTFYDKDRSGYIDEHELDALLKDLYE

SEQ ID NO: 10478 - protein, 235 aa, Homo sapiens
  Payload ID: 2096;
  Gene Symbol: CALB2;
  Gene Name: calbindin 2;
  ENSP ID: ENSP00000454639
  MOD_RES (1)..(1): Any amino acid
XAGPQQQPPYLHLAELTASQFLEIWKHFDADGNGYIEGKELENFFQELEKARKGSGMMSKSDNFGEKMKEFMQKYDKNSDGKIEMAELAQILPTEENFLLCFRQHVGSSAEFMEAWRKYDTDRSGYIEANELKGFLSDLLKKANRPYDEPKLQEYTQTILRMFDLNGDGKLGLSEMSRLLPVQENFLLKFQGMKLTSEEFNAIFTFYDKEMNIQQLTNYRKSVMSLAEAGKLYRK

SEQ ID NO: 10479 - protein, 271 aa, Homo sapiens; identical to SEQ ID NO: 10475
  Payload ID: 2096;
  Gene Symbol: CALB2;
  Gene Name: Calbindin 2;
  ENSP ID: ENSP00000488916

SEQ ID NO: 10480 - protein, 192 aa, Homo sapiens; identical to SEQ ID NO: 10476
  Payload ID: 2096;
  Gene Symbol: CALB2;
  Gene Name: Calbindin 2;
  ENSP ID: ENSP00000489007

SEQ ID NO: 10481 - protein, 235 aa, Homo sapiens; identical to SEQ ID NO: 10478
  Payload ID: 2096;
  Gene Symbol: CALB2;
  Gene Name: Calbindin 2;
  ENSP ID: ENSP00000489176
  MOD_RES (1)..(1): Any amino acid

SEQ ID NO: 10482 - protein, 158 aa, Homo sapiens; identical to SEQ ID NO: 10477
  Payload ID: 2096;
  Gene Symbol: CALB2;
  Gene Name: Calbindin 2;
  ENSP ID: ENSP00000489458
  MOD_RES (1)..(1): Any amino acid

SEQ ID NO: 10483 - protein, 2220 aa, Homo sapiens
  Payload ID: 2097;
  Gene Symbol: CABIN1;
  Gene Name: calcineurin binding prt 1;
  Uniprot ID:  Q9Y6J0;
  ENSP ID: ENSP00000263119
MIRIAALNASSTIEDDHEGSFKSHKTQTKEAQEAEAFALYHKALDLQKHDRFEESAKAYHELLEASLLREAVSSGDEKEGLKHPGLILKYSTYKNLAQLAAQREDLETAMEFYLEAVMLDSTDVNLWYKIGHVALRLIRIPLARHAFEEGLRCNPDHWPCLDNLITVLYTLSDYTTCLYFICKALEKDCRYSKGLVLKEKIFEEQPCLRKDSLRMFLKCDMSIHDVSVSAAETQAIVDEALGLRKKRQALIVREKEPDLKLVQPIPFFTWKCLGESLLAMYNHLTTCEPPRPSLGKRIDLSDYQDPSQPLESSMVVTPVNVIQPSTVSTNPAVAVAEPVVSYTSVATTSFPLHSPGLLETGAPVGDISGGDKSKKGVKRKKISEESGETAKRRSARVRNTKCKKEEKVDFQELLMKFLPSRLRKLDPEEEDDSFNNYEVQSEAKLESFPSIGPQRLSFDSATFMESEKQDVHEFLLENLTNGGILELMMRYLKAMGHKFLVRWPPGLAEVVLSVYHSWRRHSTSLPNPLLRDCSNKHIKDMMLMSLSCMELQLDQWLLTKGRSSAVSPRNCPAGMVNGRFGPDFPGTHCLGDLLQLSFASSQRDLFEDGWLEFVVRVYWLKARFLALQGDMEQALENYDICTEMLQSSTAIQVEAGAERRDIVIRLPNLHNDSVVSLEEIDKNLKSLERCQSLEEIQRLYEAGDYKAVVHLLRPTLCTSGFDRAKHLEFMTSIPERPAQLLLLQDSLLRLKDYRQCFECSDVALNEAVQQMVNSGEAAAKEEWVATVTQLLMGIEQALSADSSGSILKVSSSTTGLVRLTNNLIQVIDCSMAVQEEAKEPHVSSVLPWIILHRIIWQEEDTFHSLCHQQQLQNPAEEGMSETPMLPSSLMLLNTAHEYLGRRSWCCNSDGALLRFYVRVLQKELAASTSEDTHPYKEELETALEQCFYCLYSFPSKKSKARYLEEHSAQQVDLIWEDALFMFEYFKPKTLPEFDSYKTSTVSADLANLLKRIATIVPRTERPALSLDKVSAYIEGTSTEVPCLPEGADPSPPVVNELYYLLADYHFKNKEQSKAIKFYMHDICICPNRFDSWAGMALARASRIQDKLNSNELKSDGPIWKHATPVLNCFRRALEIDSSNLSLWIEYGTMSYALHSFASRQLKQWRGELPPELVQQMEGRRDSMLETAKHCFTSAARCEGDGDEEEWLIHYMLGKVAEKQQQPPTVYLLHYRQAGHYLHEEAARYPKKIHYHNPPELAMEALEVYFRLHASILKLLGKPDSGVGAEVLVNFMKEAAEGPFARGEEKNTPKASEKEKACLVDEDSHSSAGTLPGPGASLPSSSGPGLTSPPYTATPIDHDYVKCKKPHQQATPDDRSQDSTAVALSDSSSTQDFFNEPTSLLEGSRKSYTEKRLPILSSQAGATGKDLQGATEERGKNEESLESTEGFRAAEQGVQKPAAETPASACIPGKPSASTPTLWDGKKRGDLPGEPVAFPQGLPAGAEEQRQFLTEQCIASFRLCLSRFPQHYKSLYRLAFLYTYSKTHRNLQWARDVLLGSSIPWQQLQHMPAQGLFCERNKTNFFNGIWRIPVDEIDRPGSFAWHMNRSIVLLLKVLAQLRDHSTLLKVSSMLQRTPDQGKKYLRDADRQVLAQRAFILTVKVLEDTLSELAEGSERPGPKVCGLPGARMTTDVSHKASPEDGQEGLPQPKKPPLADGSGPGPEPGGKVGLLNHRPVAMDAGDSADQSGERKDKESPRAGPTEPMDTSEATVCHSDLERTPPLLPGRPARDRGPESRPTELSLEELSISARQQPTPLTPAQPAPAPAPATTTGTRAGGHPEEPLSRLSRKRKLLEDTESGKTLLLDAYRVWQQGQKGVAYDLGRVERIMSETYMLIKQVDEEAALEQAVKFCQVHLGAAAQRQASGDTPTTPKHPKDSRENFFPVTVVPTAPDPVPADSVQRPSDAHTKPRPALAAATTIITCPPSASASTLDQSKDPGPPRPHRPEATPSMASLGPEGEELARVAEGTSFPPQEPRHSPQVKMAPTSSPAEPHCWPAEAALGTGAEPTCSQEGKLRPEPRRDGEAQEAASETQPLSSPPTAASSKAPSSGSAQPPEGHPGKPEPSRAKSRPLPNMPKLVIPSAATKFPPEITVTPPTPTLLSPKGSISEETKQKLKSAILSAQSAANVRKESLCQPALEVLETSSQESSLESETDEDDDYMDI

SEQ ID NO: 10484 - protein, 590 aa, Homo sapiens
  Payload ID: 2097;
  Gene Symbol: CABIN1;
  Gene Name: calcineurin binding prt 1;
  ENSP ID: ENSP00000336991
MPRRSRRGIWRIPVDEIDRPGSFAWHMNRSIVLLLKVLAQLRDHSTLLKVSSMLQRTPDQGKKYLRDADRQVLAQRAFILTVKVLEDTLSELAEGSERPGPKVCGLPGARMTTDVSHKASPEDGQEGLPQPKKPPLADGSGPGPEPGGKVGLLNHRPVAMDAGDSADQSGERKDKESPRAGPTEPMDTSEATVCHSDLERTPPLLPGRPARDRGPESRPTELSLEELSISARQQPTPLTPAQPAPAPAPATTTGTRAGGHPEEPLSRLSRKRKLLEDTESGKTLLLDAYRVWQQGQKGVAYDLGRVERIMSETYMLIKQVDEEAALEQAVKFCQVHLGAAAQRQASGDTPTTPKHPKDSRENFFPVTVVPTAPDPVPADSVQRPSDAHTKPRPALAAATTIITCPPSASASTLDQSKDPGPPRPHRPEATPSMASLGPEGKLRPEPRRDGEAQEAASETQPLSSPPTAASSKAPSSGSAQPPEGHPGKPEPSRAKSRPLPNMPKLVIPSAATKFPPEITVTPPTPTLLSPKGSISEETKQKLKSAILSAQSAANVRKESLCQPALEVLETSSQESSLESETDEDDDYMDI

SEQ ID NO: 10485 - protein, 2220 aa, Homo sapiens; identical to SEQ ID NO: 10483
  Payload ID: 2097;
  Gene Symbol: CABIN1;
  Gene Name: calcineurin binding prt 1;
  Uniprot ID:  Q9Y6J0;
  ENSP ID: ENSP00000381364

SEQ ID NO: 10486 - protein, 2141 aa, Homo sapiens
  Payload ID: 2097;
  Gene Symbol: CABIN1;
  Gene Name: calcineurin binding prt 1;
  Uniprot ID:  Q9Y6J0;
  ENSP ID: ENSP00000384694
MIRIAALNASSTIEDDHEGSFKSHKTQTKEAQEAEAFALYHKALDLQKHDRFEESAKAYHELLEASLLREAVSSGDEKEGLKHPGLILKYSTYKNLAQLAAQREDLETAMEFYLEAVMLDSTDVNLWYKIGHVALRLIRIPLARHAFEEGLRCNPDHWPCLDNLITVLYTLSDYTTCLYFICKALEKDCRYSKGLVLKEKIFEEQPCLRKDSLRMFLKCWKCLGESLLAMYNHLTTCEPPRPSLGKRIDLSDYQDPSQPLESSMVVTPVNVIQPSTVSTNPAVAVAEPVVSYTSVATTSFPLHSPGLLETGAPVGDISGGDKSKKGVKRKKISEESGETAKRRSARVRNTKCKKEEKVDFQELLMKFLPSRLRKLDPEEEDDSFNNYEVQSEAKLESFPSIGPQRLSFDSATFMESEKQDVHEFLLENLTNGGILELMMRYLKAMGHKFLVRWPPGLAEVVLSVYHSWRRHSTSLPNPLLRDCSNKHIKDMMLMSLSCMELQLDQWLLTKGRSSAVSPRNCPAGMVNGRFGPDFPGTHCLGDLLQLSFASSQRDLFEDGWLEFVVRVYWLKARFLALQGDMEQALENYDICTEMLQSSTAIQVEAGAERRDIVIRLPNLHNDSVVSLEEIDKNLKSLERCQSLEEIQRLYEAGDYKAVVHLLRPTLCTSGFDRAKHLEFMTSIPERPAQLLLLQDSLLRLKDYRQCFECSDVALNEAVQQMVNSGEAAAKEEWVATVTQLLMGIEQALSADSSGSILKVSSSTTGLVRLTNNLIQVIDCSMAVQEEAKEPHVSSVLPWIILHRIIWQEEDTFHSLCHQQQLQNPAEEGMSETPMLPSSLMLLNTAHEYLGRRSWCCNSDGALLRFYVRVLQKELAASTSEDTHPYKEELETALEQCFYCLYSFPSKKSKARYLEEHSAQQVDLIWEDALFMFEYFKPKTLPEFDSYKTSTVSADLANLLKRIATIVPRTERPALSLDKVSAYIEGTSTEVPCLPEGADPSPPVVNELYYLLADYHFKNKEQSKAIKFYMHDICICPNRFDSWAGMALARASRIQDKLNSNELKSDGPIWKHATPVLNCFRRALEIDSSNLSLWIEYGTMSYALHSFASRQLKQWRGELPPELVQQMEGRRDSMLETAKHCFTSAARCEGDGDEEEWLIHYMLGKVAEKQQQPPTVYLLHYRQAGHYLHEEAARYPKKIHYHNPPELAMEALEVYFRLHASILKLLGKPDSGVGAEVLVNFMKEAAEGPFARGEEKNTPKASEKEKACLVDEDSHSSAGTLPGPGASLPSSSGPDRSQDSTAVALSDSSSTQDFFNEPTSLLEGSRKSYTEKRLPILSSQAGATGKDLQGATEERGKNEESLESTEGFRAAEQGVQKPAAETPASACIPGKPSASTPTLWDGKKRGDLPGEPVAFPQGLPAGAEEQRQFLTEQCIASFRLCLSRFPQHYKSLYRLAFLYTYSKTHRNLQWARDVLLGSSIPWQQLQHMPAQGLFCERNKTNFFNGIWRIPVDEIDRPGSFAWHMNRSIVLLLKVLAQLRDHSTLLKVSSMLQRTPDQGKKYLRDADRQVLAQRAFILTVKVLEDTLSELAEGSERPGPKVCGLPGARMTTDVSHKASPEDGQEGLPQPKKPPLADGSGPGPEPGGKVGLLNHRPVAMDAGDSADQSGERKDKESPRAGPTEPMDTSEATVCHSDLERTPPLLPGRPARDRGPESRPTELSLEELSISARQQPTPLTPAQPAPAPAPATTTGTRAGGHPEEPLSRLSRKRKLLEDTESGKTLLLDAYRVWQQGQKGVAYDLGRVERIMSETYMLIKQVDEEAALEQAVKFCQVHLGAAAQRQASGDTPTTPKHPKDSRENFFPVTVVPTAPDPVPADSVQRPSDAHTKPRPALAAATTIITCPPSASASTLDQSKDPGPPRPHRPEATPSMASLGPEGEELARVAEGTSFPPQEPRHSPQVKMAPTSSPAEPHCWPAEAALGTGAEPTCSQEGKLRPEPRRDGEAQEAASETQPLSSPPTAASSKAPSSGSAQPPEGHPGKPEPSRAKSRPLPNMPKLVIPSAATKFPPEITVTPPTPTLLSPKGSISEETKQKLKSAILSAQSAANVRKESLCQPALEVLETSSQESSLESETDEDDDYMDI

SEQ ID NO: 10487 - protein, 357 aa, Homo sapiens
  Payload ID: 2097;
  Gene Symbol: CABIN1;
  Gene Name: calcineurin binding prt 1;
  ENSP ID: ENSP00000394209
MIRIAALNASSTIEDDHEGSFKSHKTQTKEAQEAEAFALYHKALDLQKHDRFEESAKAYHELLEASLLREAVMLDSTDVNLWYKIGHVALRLIRIPLARHAFEEGLRCNPDHWPCLDNLITVLYTLSDYTTCLYFICKALEKDCRYSKGLVLKEKIFEEQPCLRKDSLRMFLKCDMSIHDVSVSAAETQAIVDEALGLRKKRQALIVREKEPDLKLVQPIPFFTWKCLGESLLAMYNHLTTCEPPRPSLGKRIDLSDYQDPSQPLESSMVVTPVNVIQPSTVSTNPAVAVAEPVVSYTSVATTSFPLHSPGLLETGAPVGDISGGDKSKKGVKRKKISEESGETAKRRSARVRNTKC

SEQ ID NO: 10488 - protein, 361 aa, Homo sapiens
  Payload ID: 2097;
  Gene Symbol: CABIN1;
  Gene Name: calcineurin binding prt 1;
  ENSP ID: ENSP00000412389
MIRIAALNASSTIEDDHEGSFKSHKTQTKEAQEAEAFALYHKALDLQKHDRFEESAKAYHELLEASLLREAVMLDSTDVNLWYKIGHVALRLIRIPLARHAFEEGLRCNPDHWPCLDNLITVLYTLSDYTTCLYFICKALEKDCRYSKGLVLKEKIFEEQPCLRKDSLRMFLKCDMSIHDVSVSAAETQAIVDEALGLRKKRQALIVREKEPDLKLVQPIPFFTWKCLGESLLAMYNHLTTCEPPRPSLGKRIDLSDYQDPSQPLESSMVVTPVNVIQPSTVSTNPAVAVAEPVVSYTSVATTSFPLHSPGLLETGAPVGDISGGDKSKKGVKRKKISEESGETAKRRSARVRNTKCKKEE

SEQ ID NO: 10489 - protein, 2170 aa, Homo sapiens
  Payload ID: 2097;
  Gene Symbol: CABIN1;
  Gene Name: calcineurin binding prt 1;
  ENSP ID: ENSP00000480560
MIRIAALNASSTIEDDHEGSFKSHKTQTKEAQEAEAFALYHKALDLQKHDRFEESAKAYHELLEASLLREAVSSGDEKEGLKHPGLILKYSTYKNLAQLAAQREDLETAMEFYLEAVMLDSTDVNLWYKIGHVALRLIRIPLARHAFEEGLRCNPDHWPCLDNLITVLYTLSDYTTCLYFICKALEKDCRYSKGLVLKEKIFEEQPCLRKDSLRMFLKCWKCLGESLLAMYNHLTTCEPPRPSLGKRIDLSDYQDPSQPLESSMVVTPVNVIQPSTVSTNPAVAVAEPVVSYTSVATTSFPLHSPGLLETGAPVGDISGGDKSKKGVKRKKISEESGETAKRRSARVRNTKCKKEEKVDFQELLMKFLPSRLRKLDPEEEDDSFNNYEVQSEAKLESFPSIGPQRLSFDSATFMESEKQDVHEFLLENLTNGGILELMMRYLKAMGHKFLVRWPPGLAEVVLSVYHSWRRHSTSLPNPLLRDCSNKHIKDMMLMSLSCMELQLDQWLLTKGRSSAVSPRNCPAGMVNGRFGPDFPGTHCLGDLLQLSFASSQRDLFEDGWLEFVVRVYWLKARFLALQGDMEQALENYDICTEMLQSSTAIQVEAGAERRDIVIRLPNLHNDSVVSLEEIDKNLKSLERCQSLEEIQRLYEAGDYKAVVHLLRPTLCTSGFDRAKHLEFMTSIPERPAQLLLLQDSLLRLKDYRQCFECSDVALNEAVQQMVNSGEAAAKEEWVATVTQLLMGIEQALSADSSGSILKVSSSTTGLVRLTNNLIQVIDCSMAVQEEAKEPHVSSVLPWIILHRIIWQEEDTFHSLCHQQQLQNPAEEGMSETPMLPSSLMLLNTAHEYLGRRSWCCNSDGALLRFYVRVLQKELAASTSEDTHPYKEELETALEQCFYCLYSFPSKKSKARYLEEHSAQQVDLIWEDALFMFEYFKPKTLPEFDSYKTSTVSADLANLLKRIATIVPRTERPALSLDKVSAYIEGTSTEVPCLPEGADPSPPVVNELYYLLADYHFKNKEQSKAIKFYMHDICICPNRFDSWAGMALARASRIQDKLNSNELKSDGPIWKHATPVLNCFRRALEIDSSNLSLWIEYGTMSYALHSFASRQLKQWRGELPPELVQQMEGRRDSMLETAKHCFTSAARCEGDGDEEEWLIHYMLGKVAEKQQQPPTVYLLHYRQAGHYLHEEAARYPKKIHYHNPPELAMEALEVYFRLHASILKLLGKPDSGVGAEVLVNFMKEAAEGPFARGEEKNTPKASEKEKACLVDEDSHSSAGTLPGPGASLPSSSGPGLTSPPYTATPIDHDYVKCKKPHQQATPDDRSQDSTAVALSDSSSTQDFFNEPTSLLEGSRKSYTEKRLPILSSQAGATGKDLQGATEERGKNEESLESTEGFRAAEQGVQKPAAETPASACIPGKPSASTPTLWDGKKRGDLPGEPVAFPQGLPAGAEEQRQFLTEQCIASFRLCLSRFPQHYKSLYRLAFLYTYSKTHRNLQWARDVLLGSSIPWQQLQHMPAQGLFCERNKTNFFNGIWRIPVDEIDRPGSFAWHMNRSIVLLLKVLAQLRDHSTLLKVSSMLQRTPDQGKKYLRDADRQVLAQRAFILTVKVLEDTLSELAEGSERPGPKVCGLPGARMTTDVSHKASPEDGQEGLPQPKKPPLADGSGPGPEPGGKVGLLNHRPVAMDAGDSADQSGERKDKESPRAGPTEPMDTSEATVCHSDLERTPPLLPGRPARDRGPESRPTELSLEELSISARQQPTPLTPAQPAPAPAPATTTGTRAGGHPEEPLSRLSRKRKLLEDTESGKTLLLDAYRVWQQGQKGVAYDLGRVERIMSETYMLIKQVDEEAALEQAVKFCQVHLGAAAQRQASGDTPTTPKHPKDSRENFFPVTVVPTAPDPVPADSVQRPSDAHTKPRPALAAATTIITCPPSASASTLDQSKDPGPPRPHRPEATPSMASLGPEGEELARVAEGTSFPPQEPRHSPQVKMAPTSSPAEPHCWPAEAALGTGAEPTCSQEGKLRPEPRRDGEAQEAASETQPLSSPPTAASSKAPSSGSAQPPEGHPGKPEPSRAKSRPLPNMPKLVIPSAATKFPPEITVTPPTPTLLSPKGSISEETKQKLKSAILSAQSAANVRKESLCQPALEVLETSSQESSLESETDEDDDYMDI

SEQ ID NO: 10490 - protein, 589 aa, Homo sapiens
  Payload ID: 2097;
  Gene Symbol: CABIN1;
  Gene Name: calcineurin binding prt 1;
  ENSP ID: ENSP00000481128
MPRRSRRGIWRIPVDEIDRPGSFAWHMNRSIVLLLKVLAQLRDHSTLLKVSSMLQRTPDQGKKYLRDADRQVLAQRAFILTVKVLEDTLSELAEGSERPGPKVCGLPGARMTTDVSHKASPEDGQEGLPQPKKPPLADGSGPGPEPGGKVGLLNHRPVAMDAGDSADQSGERKDKESPRAGPTEPMDTSEATVCHSDLERTPPLLPGRPARDRGPESRPTELSLEELSISARQQPTPLTPAQPAPAPAPATTTGTRAGGHPEEPLSRLSRKRKLLEDTESGKTLLLDAYRVWQQGQKGVAYDLGRVERIMSETYMLIKQVDEEAALEQAVKFCQVHLGLPPRDRPRDTPTTPKHPKDSRENFFPVTVVPTAPDPVPADSVQRPSDAHTKPRPALAAATTIITCPPSASASTLDQSKDPGPPRPHRPEATPSMASLGPEGKLRPEPRRDGEAQEAASETQPLSSPPTAASSKAPSSGSAQPPEGHPGKPEPSRAKSRPLPNMPKLVIPSAATKFPPEITVTPPTPTLLSPKGSISEETKQKLKSAILSAQSAANVRKESLCQPALEVLETSSQESSLESETDEDDDYMDI

SEQ ID NO: 10491 - protein, 195 aa, Homo sapiens
  Payload ID: 2098;
  Gene Symbol: CHP1;
  Gene Name: calcineurin-like EF-hand prt 1;
  Uniprot ID:  Q99653;
  ENSP ID: ENSP00000335632
MGSRASTLLRDEELEEIKKETGFSHSQITRLYSRFTSLDKGENGTLSREDFQRIPELAINPLGDRIINAFFPEGEDQVNFRGFMRTLAHFRPIEDNEKSKDVNGPEPLNSRSNKLHFAFRLYDLDKDEKISRDELLQVLRMMVGVNISDEQLGSIADRTIQEADQDGDSAISFTEFVKVLEKVDVEQKMSIRFLH

SEQ ID NO: 10492 - protein, 128 aa, Homo sapiens
  Payload ID: 2098;
  Gene Symbol: CHP1;
  Gene Name: calcineurin-like EF-hand prt 1;
  ENSP ID: ENSP00000440490
MGSRASTLLRDEELEEIKKETGFSHSQITRLYSRFTSLDKGENGTLSREDFQRIPELAINPLGDRIINAFFPEGEDQVNFRGFMRTLAHFRPIEDNEKSKDVNGPEPLNSRSNKLHCATHDGRSKYLR

SEQ ID NO: 10493 - protein, 123 aa, Homo sapiens
  Payload ID: 2098;
  Gene Symbol: CHP1;
  Gene Name: calcineurin-like EF-hand prt 1;
  ENSP ID: ENSP00000452772
MGSRASTLLRDEELEEIKKETGFSHSQITRLYSRFTSLDKGENGTLSREDFQRIPELAINPLGDRIINAFFPEGEDQVNFRGFMRTLAHFRPIEDNEKSKDVNGPEPLNSRSNKLHLEEERYI

SEQ ID NO: 10494 - protein, 53 aa, Homo sapiens
  Payload ID: 2098;
  Gene Symbol: CHP1;
  Gene Name: calcineurin-like EF-hand prt 1;
  ENSP ID: ENSP00000453375
MGSRASTLLRDEELEEIKKETGSGKISRGFQNLPSTHWGTGSSMPSFQRERTR

SEQ ID NO: 10495 - protein, 91 aa, Homo sapiens
  Payload ID: 2098;
  Gene Symbol: CHP1;
  Gene Name: calcineurin-like EF-hand prt 1;
  ENSP ID: ENSP00000453392
  MOD_RES (1)..(1): Any amino acid
XREDFQRIPELAINPLGDRIINAFFPEGEDQVNFRGFMRTLAHFRPIEDNEKSKDVNGPEPLNSRSNKLHFAFRLYDLDKDEKISRDELLQ

SEQ ID NO: 10496 - protein, 154 aa, Homo sapiens
  Payload ID: 2098;
  Gene Symbol: CHP1;
  Gene Name: calcineurin-like EF-hand prt 1;
  ENSP ID: ENSP00000454007
MGSRASTLLRDEELEEIKKETGFSHSQITRLYSRFTSLDKGENGTLSREDFQRIPELAINPLGDRIINAFFPEGEDQVNFRGFMRTLAHFRPIEDNEKSKDVNGPEPLNSRSNKLHFAFRLYDLDKDEKISRDELLQVLEKVDVEQKMSIRFLH

SEQ ID NO: 10497 - protein, 196 aa, Homo sapiens
  Payload ID: 2099;
  Gene Symbol: CHP2;
  Gene Name: calcineurin-like EF-hand prt 2;
  Uniprot ID:  O43745;
  ENSP ID: ENSP00000300113
MGSRSSHAAVIPDGDSIRRETGFSQASLLRLHHRFRALDRNKKGYLSRMDLQQIGALAVNPLGDRIIESFFPDGSQRVDFPGFVRVLAHFRPVEDEDTETQDPKKPEPLNSRRNKLHYAFQLYDLDRDGKISRHEMLQVLRLMVGVQVTEEQLENIADRTVQEADEDGDGAVSFVEFTKSLEKMDVEQKMSIRILK

SEQ ID NO: 10498 - protein, 122 aa, Homo sapiens
  Payload ID: 2100;
  Gene Symbol: CPPED1;
  Gene Name: calcineurin-like phosphoesterase domain containing 1;
  Uniprot ID:  Q9BRF8;
  ENSP ID: ENSP00000261660
MSAAEAGGVFHRARGRTLAAFPAEKESEWKGPFYFILGADPQFGLIKAWSTGDCDNGGDEWEQEIRLTEQAVQAINKLNPKPKFFVLCGDLIHAMPAGQRPPRAPSRGGHRRENCSPILQSR

SEQ ID NO: 10499 - protein, 314 aa, Homo sapiens
  Payload ID: 2100;
  Gene Symbol: CPPED1;
  Gene Name: calcineurin-like phosphoesterase domain containing 1;
  Uniprot ID:  Q9BRF8;
  ENSP ID: ENSP00000371193
MSAAEAGGVFHRARGRTLAAFPAEKESEWKGPFYFILGADPQFGLIKAWSTGDCDNGGDEWEQEIRLTEQAVQAINKLNPKPKFFVLCGDLIHAMPGKPWRTEQTEDLKRVLRAVDRAIPLVLVSGNHDIGNTPTAETVEEFCRTWGDDYFSFWVGGVLFLVLNSQFYENPSKCPSLKQAQDQWLDEQLSIARQRHCQHAIVFQHIPLFLESIDEDDDYYFNLSKSTRKKLADKFIHAGVKVVFSGHYHRNAGGTYQNLDMVVSSAIGCQLGRDPHGLRVVVVTAEKIVHRYYSLDELSEKGIEDDLMDLIKKK

SEQ ID NO: 10500 - protein, 172 aa, Homo sapiens
  Payload ID: 2100;
  Gene Symbol: CPPED1;
  Gene Name: calcineurin-like phosphoesterase domain containing 1;
  Uniprot ID:  Q9BRF8;
  ENSP ID: ENSP00000411127
MSAAEAGGVFHRARGRTLAAFPAEKESEWKGPFYFILGADPQFGLIKAWSTGDCDNGGDEWEQEIRLTEQAVQAINKLNPKPKFFVLCGDLIHAMPGVKVVFSGHYHRNAGGTYQNLDMVVSSAIGCQLGRDPHGLRVVVVTAEKIVHRYYSLDELSEKGIEDDLMDLIKKK

SEQ ID NO: 10501 - protein, 508 aa, Homo sapiens
  Payload ID: 2101;
  Gene Symbol: CALCR;
  Gene Name: calcitonin receptor;
  ENSP ID: ENSP00000352561
MQFSGEKISGQRDLQKSKMRFTFTSRCLALFLLLNHPTPILPAFSNQTYPTIEPKPFLYVVGRKKMMDAQYKCYDRMQQLPAYQGEGPYCNRTWDGWLCWDDTPAGVLSYQFCPDYFPDFDPSEKVTKYCDEKGVWFKHPENNRTWSNYTMCNAFTPEKLKNAYVLYYLAIVGHSLSIFTLVISLGIFVFFRKLTTIFPLNWKYRKALSLGCQRVTLHKNMFLTYILNSMIIIIHLVEVVPNGELVRRDPVSCKILHFFHQYMMACNYFWMLCEGIYLHTLIVVAVFTEKQRLRWYYLLGWGFPLVPTTIHAITRAVYFNDNCWLSVETHLLYIIHGPVMAALVVNFFFLLNIVRVLVTKMRETHEAESHMYLKAVKATMILVPLLGIQFVVFPWRPSNKMLGKIYDYVMHSLIHFQGFFVATIYCFCNNEVQTTVKRQWAQFKIQWNQRWGRRPSNRSARAAAAAAEAGDIPIYICHQELRNEPANNQGEESAEIIPLNIIEQESSA

SEQ ID NO: 10502 - protein, 162 aa, Homo sapiens
  Payload ID: 2101;
  Gene Symbol: CALCR;
  Gene Name: calcitonin receptor;
  ENSP ID: ENSP00000353385
MRFTFTSRCLALFLLLNHPTPILPAFSNQTYPTIEPKPFLYVVGRKKMMDAQYKCYDRMQQLPAYQGEGPYCNRTWDGWLCWDDTPAGVLSYQFCPDYFPDFDPSEKVTKYCDEKGVWFKHPENNRTWSNYTMCNAFTPEKLKNAYVLYYLAIVGHSCQFSP

SEQ ID NO: 10503 - protein, 474 aa, Homo sapiens
  Payload ID: 2101;
  Gene Symbol: CALCR;
  Gene Name: calcitonin receptor;
  ENSP ID: ENSP00000377959
MRFTFTSRCLALFLLLNHPTPILPAFSNQTYPTIEPKPFLYVVGRKKMMDAQYKCYDRMQQLPAYQGEGPYCNRTWDGWLCWDDTPAGVLSYQFCPDYFPDFDPSEKVTKYCDEKGVWFKHPENNRTWSNYTMCNAFTPEKLKNAYVLYYLAIVGHSLSIFTLVISLGIFVFFRSLGCQRVTLHKNMFLTYILNSMIIIIHLVEVVPNGELVRRDPVSCKILHFFHQYMMACNYFWMLCEGIYLHTLIVVAVFTEKQRLRWYYLLGWGFPLVPTTIHAITRAVYFNDNCWLSVETHLLYIIHGPVMAALVVNFFFLLNIVRVLVTKMRETHEAESHMYLKAVKATMILVPLLGIQFVVFPWRPSNKMLGKIYDYVMHSLIHFQGFFVATIYCFCNNEVQTTVKRQWAQFKIQWNQRWGRRPSNRSARAAAAAAEAGDIPIYICHQELRNEPANNQGEESAEIIPLNIIEQESSA

SEQ ID NO: 10504 - protein, 474 aa, Homo sapiens; identical to SEQ ID NO: 10503
  Payload ID: 2101;
  Gene Symbol: CALCR;
  Gene Name: calcitonin receptor;
  ENSP ID: ENSP00000389295

SEQ ID NO: 10505 - protein, 290 aa, Homo sapiens
  Payload ID: 2101;
  Gene Symbol: CALCR;
  Gene Name: calcitonin receptor;
  Uniprot ID:  P30988;
  ENSP ID: ENSP00000391369
MRFTFTSRCLALFLLLNHPTPILPAFSNQTYPTIEPKPFLYVVGRKKMMDAQYKCYDRMQQLPAYQGEGPYCNRTWDGWLCWDDTPAGVLSYQFCPDYFPDFDPSEKVTKYCDEKGVWFKHPENNRTWSNYTMCNAFTPEKLKNAYVLYYLAIVGHSLSIFTLVISLGIFVFFRKLTTIFPLNWKYRKALSLGCQRVTLHKNMFLTYILNSMIIIIHLVEVVPNGELVRRDPVSCKILHFFHQYMMACNYFWMLCEGIYLHTLIVVAVFTEKQRLRWYYLLGWAPAFHRD

SEQ ID NO: 10506 - protein, 490 aa, Homo sapiens
  Payload ID: 2101;
  Gene Symbol: CALCR;
  Gene Name: calcitonin receptor;
  ENSP ID: ENSP00000399552
MRFTFTSRCLALFLLLNHPTPILPAFSNQTYPTIEPKPFLYVVGRKKMMDAQYKCYDRMQQLPAYQGEGPYCNRTWDGWLCWDDTPAGVLSYQFCPDYFPDFDPSEKVTKYCDEKGVWFKHPENNRTWSNYTMCNAFTPEKLKNAYVLYYLAIVGHSLSIFTLVISLGIFVFFRKLTTIFPLNWKYRKALSLGCQRVTLHKNMFLTYILNSMIIIIHLVEVVPNGELVRRDPVSCKILHFFHQYMMACNYFWMLCEGIYLHTLIVVAVFTEKQRLRWYYLLGWGFPLVPTTIHAITRAVYFNDNCWLSVETHLLYIIHGPVMAALVVNFFFLLNIVRVLVTKMRETHEAESHMYLKAVKATMILVPLLGIQFVVFPWRPSNKMLGKIYDYVMHSLIHFQGFFVATIYCFCNNEVQTTVKRQWAQFKIQWNQRWGRRPSNRSARAAAAAAEAGDIPIYICHQELRNEPANNQGEESAEIIPLNIIEQESSA

SEQ ID NO: 10507 - protein, 274 aa, Homo sapiens
  Payload ID: 2101;
  Gene Symbol: CALCR;
  Gene Name: calcitonin receptor;
  Uniprot ID:  P30988;
  ENSP ID: ENSP00000413179
MRFTFTSRCLALFLLLNHPTPILPAFSNQTYPTIEPKPFLYVVGRKKMMDAQYKCYDRMQQLPAYQGEGPYCNRTWDGWLCWDDTPAGVLSYQFCPDYFPDFDPSEKVTKYCDEKGVWFKHPENNRTWSNYTMCNAFTPEKLKNAYVLYYLAIVGHSLSIFTLVISLGIFVFFRSLGCQRVTLHKNMFLTYILNSMIIIIHLVEVVPNGELVRRDPVSCKILHFFHQYMMACNYFWMLCEGIYLHTLIVVAVFTEKQRLRWYYLLGWAPAFHRD

SEQ ID NO: 10508 - protein, 461 aa, Homo sapiens [sequence omitted]

SEQ ID NO: 10509 - protein, 37 aa, Homo sapiens
  Payload ID: 2102;
  Gene Symbol: CALCRL;
  Gene Name: calcitonin receptor-like;
  ENSP ID: ENSP00000386599
MEKKCTLYFLVLLPFFMILVTAELEESPEDSIQLGVT

SEQ ID NO: 10510 - protein, 461 aa, Homo sapiens [sequence omitted]

SEQ ID NO: 10511 - protein, 461 aa, Homo sapiens [sequence omitted]

SEQ ID NO: 10512 - protein, 77 aa, Homo sapiens
  Payload ID: 2102;
  Gene Symbol: CALCRL;
  Gene Name: calcitonin receptor-like;
  ENSP ID: ENSP00000415626
MEKKCTLYFLVLLPFFMILVTAELEESPEDSIQLGVTRNKIMTAQYECYQKIMQDPIQQAEGVYCNRTWDGWLCWND

SEQ ID NO: 10513 - protein, 141 aa, Homo sapiens
  Payload ID: 2103;
  Gene Symbol: CALCA;
  Gene Name: calcitonin-related polypeptide alpha;
  Uniprot ID:  P01258;
  ENSP ID: ENSP00000331746
MGFQKFSPFLALSILVLLQAGSLHAAPFRSALESSPADPATLSEDEARLLLAALVQDYVQMKASELEQEQEREGSSLDSPRSKRCGNLSTCMLGTYTQDFNKFHTFPQTAIGVGAPGKKRDMSSDLERDHRPHVSMPQNAN

SEQ ID NO: 10514 - protein, 128 aa, Homo sapiens
  Payload ID: 2103;
  Gene Symbol: CALCA;
  Gene Name: calcitonin-related polypeptide alpha;
  Uniprot ID:  P06881;
  ENSP ID: ENSP00000354286
MGFQKFSPFLALSILVLLQAGSLHAAPFRSALESSPADPATLSEDEARLLLAALVQDYVQMKASELEQEQEREGSRIIAQKRACDTATCVTHRLAGLLSRSGGVVKNNFVPTNVGSKAFGRRRRDLQA

SEQ ID NO: 10515 - protein, 141 aa, Homo sapiens; identical to SEQ ID NO: 10513
  Payload ID: 2103;
  Gene Symbol: CALCA;
  Gene Name: calcitonin-related polypeptide alpha;
  Uniprot ID:  P01258;
  ENSP ID: ENSP00000379657

SEQ ID NO: 10516 - protein, 128 aa, Homo sapiens; identical to SEQ ID NO: 10514
  Payload ID: 2103;
  Gene Symbol: CALCA;
  Gene Name: calcitonin-related polypeptide alpha;
  Uniprot ID:  P06881;
  ENSP ID: ENSP00000417833

SEQ ID NO: 10517 - protein, 141 aa, Homo sapiens
  Payload ID: 2103;
  Gene Symbol: CALCA;
  Gene Name: calcitonin-related polypeptide alpha;
  Uniprot ID:  P01258;
  ENSP ID: ENSP00000420618
MGFQKFSPFLALSILVLLQAGSLHAAPFRSALESSPADPATLSEDEARLLLAALVQDYVQMKASELEQEQEREGSSLDSPRSKRCGNLSTCMLGTYTQDFNKFHTFPQTAIGVGAPGKKRDMSSDLERDHRPHNHCPEESL

SEQ ID NO: 10518 - protein, 127 aa, Homo sapiens
  Payload ID: 2104;
  Gene Symbol: CALCB;
  Gene Name: calcitonin-related polypeptide beta;
  Uniprot ID:  P10092;
  ENSP ID: ENSP00000346017
MGFRKFSPFLALSILVLYQAGSLQAAPFRSALESSPDPATLSKEDARLLLAALVQDYVQMKASELKQEQETQGSSSAAQKRACNTATCVTHRLAGLLSRSGGMVKSNFVPTNVGSKAFGRRRRDLQA

SEQ ID NO: 10519 - protein, 138 aa, Homo sapiens
  Payload ID: 2104;
  Gene Symbol: CALCB;
  Gene Name: calcitonin-related polypeptide beta;
  ENSP ID: ENSP00000428882
MKKEANLQRGGMGFRKFSPFLALSILVLYQAGSLQAAPFRSALESSPDPATLSKEDARLLLAALVQDYVQMKASELKQEQETQGSSSAAQKRACNTATCVTHRLAGLLSRSGGMVKSNFVPTNVGSKAFGRRRRDLQA

SEQ ID NO: 10520 - protein, 127 aa, Homo sapiens; identical to SEQ ID NO: 10518
  Payload ID: 2104;
  Gene Symbol: CALCB;
  Gene Name: calcitonin-related polypeptide beta;
  Uniprot ID:  P10092;
  ENSP ID: ENSP00000433490

SEQ ID NO: 10521 - protein, 401 aa, Homo sapiens
  Payload ID: 2105;
  Gene Symbol: CANT1;
  Gene Name: calcium activated nucleotidase 1;
  Uniprot ID:  Q8WVQ1;
  ENSP ID: ENSP00000307674
MPVQLSEHPEWNESMHSLRISVGGLPVLASMTKAADPRFRPRWKVILTFFVGAAILWLLCSHRPAPGRPPTHNAHNWRLGQAPANWYNDTYPLSPPQRTPAGIRYRIAVIADLDTESRAQEENTWFSYLKKGYLTLSDSGDKVAVEWDKDHGVLESHLAEKGRGMELSDLIVFNGKLYSVDDRTGVVYQIEGSKAVPWVILSDGDGTVEKGFKAEWLAVKDERLYVGGLGKEWTTTTGDVVNENPEWVKVVGYKGSVDHENWVSNYNALRAAAGIQPPGYLIHESACWSDTLQRWFFLPRRASQERYSEKDDERKGANLLLSASPDFGDIAVSHVGAVVPTHGFSSFKFIPNTDDQIIVALKSEEDSGRVASYIMAFTLDGRFLLPETKIGSVKYEGIEFI

SEQ ID NO: 10522 - protein, 401 aa, Homo sapiens; identical to SEQ ID NO: 10521
  Payload ID: 2105;
  Gene Symbol: CANT1;
  Gene Name: calcium activated nucleotidase 1;
  Uniprot ID:  Q8WVQ1;
  ENSP ID: ENSP00000376241

SEQ ID NO: 10523 - protein, 38 aa, Homo sapiens
  Payload ID: 2105;
  Gene Symbol: CANT1;
  Gene Name: calcium activated nucleotidase 1;
  ENSP ID: ENSP00000464841
MPVQLSEHPEWNESMHSLRISVGGLPVLASMTKAADPR

SEQ ID NO: 10524 - protein, 76 aa, Homo sapiens
  Payload ID: 2105;
  Gene Symbol: CANT1;
  Gene Name: calcium activated nucleotidase 1;
  ENSP ID: ENSP00000465769
MPVQLSEHPEWNESMHSLRISVGGLPVLASMTKAADPRFRPRWKVILTFFVGAAILWLLCSHRPAPGRPPTHNAHN

SEQ ID NO: 10525 - protein, 118 aa, Homo sapiens
  Payload ID: 2105;
  Gene Symbol: CANT1;
  Gene Name: calcium activated nucleotidase 1;
  ENSP ID: ENSP00000465816
MPVQLSEHPEWNESMHSLRISVGGLPVLASMTKAADPRFRPRWKDTGWDSVSNRSYRRPGHRVKGPRGKHLVQLPEKGLPDPVRQWGQGGRGMGQRPWGPGVPPGGEGERHGAIRPDC

SEQ ID NO: 10526 - protein, 65 aa, Homo sapiens
  Payload ID: 2105;
  Gene Symbol: CANT1;
  Gene Name: calcium activated nucleotidase 1;
  ENSP ID: ENSP00000466637
MPVQLSEHPEWNESMHSLRISVGGLPVLASMTKAADPRFRPRWKVILTFFVGAAILWLLCSHRPA

SEQ ID NO: 10527 - protein, 264 aa, Homo sapiens
  Payload ID: 2105;
  Gene Symbol: CANT1;
  Gene Name: calcium activated nucleotidase 1;
  ENSP ID: ENSP00000466743
MPVQLSEHPEWNESMHSLRISVGGLPVLASMTKAADPRFRPRWKVILTFFVGAAILWLLCSHRPAPGRPPTHNAHNWRLGQAPANWYNDTYPLSPPQRTPAGIRYRIAVIADLDTESRAQEENTWFSYLKKGYLTLSDSGDKVAVEWDKDHGVLESHLAEKGRGMELSDLIVFNGKLYSVDDRTGVVYQIEGSKAVPWVILSDGDGTVEKGNWTLSSAGDCKEAVAAGEASLTCRRSWPMDTKIKKMLPFSRNCQKSSCLSRLL

SEQ ID NO: 10528 - protein, 401 aa, Homo sapiens; identical to SEQ ID NO: 10521
  Payload ID: 2105;
  Gene Symbol: CANT1;
  Gene Name: calcium activated nucleotidase 1;
  Uniprot ID:  Q8WVQ1;
  ENSP ID: ENSP00000467437

SEQ ID NO: 10529 - protein, 15 aa, Homo sapiens
  Payload ID: 2105;
  Gene Symbol: CANT1;
  Gene Name: calcium activated nucleotidase 1;
  ENSP ID: ENSP00000467777
MPVQLSEHPEWNESM

SEQ ID NO: 10530 - protein, 38 aa, Homo sapiens; identical to SEQ ID NO: 10523
  Payload ID: 2105;
  Gene Symbol: CANT1;
  Gene Name: calcium activated nucleotidase 1;
  ENSP ID: ENSP00000467886

SEQ ID NO: 10531 - protein, 61 aa, Homo sapiens
  Payload ID: 2105;
  Gene Symbol: CANT1;
  Gene Name: calcium activated nucleotidase 1;
  ENSP ID: ENSP00000467970
MPVQLSEHPEWNESMHSLRISVGGLPVLASMTKAADPRFRPRWKVILTFFVGAAILWLLCS

SEQ ID NO: 10532 - protein, 401 aa, Homo sapiens; identical to SEQ ID NO: 10521
  Payload ID: 2105;
  Gene Symbol: CANT1;
  Gene Name: calcium activated nucleotidase 1;
  Uniprot ID:  Q8WVQ1;
  ENSP ID: ENSP00000477798

SEQ ID NO: 10533 - protein, 191 aa, Homo sapiens
  Payload ID: 2106;
  Gene Symbol: CIB1;
  Gene Name: calcium and integrin binding 1 (calmyrin);
  Uniprot ID:  Q99828;
  ENSP ID: ENSP00000333873
MGGSGSRLSKELLAEYQDLTFLTKQEILLAHRRFCELLPQEQRSVESSLRAQVPFEQILSLPELKANPFKERICRVFSTSPAKDSLSFEDFLDLLSVFSDTATPDIKSHYAFRIFDFDDDGTLNREDLSRLVNCLTGEGEDTRLSASEMKQLIDNILEESDIDRDGTINLSEFQHVISRSPDFASSFKIVL

SEQ ID NO: 10534 - protein, 231 aa, Homo sapiens
  Payload ID: 2106;
  Gene Symbol: CIB1;
  Gene Name: calcium and integrin binding 1 (calmyrin);
  Uniprot ID:  Q99828;
  ENSP ID: ENSP00000479860
MGGSGSRLSKELLAEYQDLTFLTKQEILLSVYVVLAPHLVDNEQQARSGNEHTGRPIAENTDSSPLSTRAHRRFCELLPQEQRSVESSLRAQVPFEQILSLPELKANPFKERICRVFSTSPAKDSLSFEDFLDLLSVFSDTATPDIKSHYAFRIFDFDDDGTLNREDLSRLVNCLTGEGEDTRLSASEMKQLIDNILEESDIDRDGTINLSEFQHVISRSPDFASSFKIVL

SEQ ID NO: 10535 - protein, 187 aa, Homo sapiens
  Payload ID: 2107;
  Gene Symbol: CIB2;
  Gene Name: calcium and integrin binding family member 2;
  Uniprot ID:  O75838;
  ENSP ID: ENSP00000258930
MGNKQTIFTEEQLDNYQDCTFFNKKDILKLHSRFYELAPNLVPMDYRKSPIVHVPMSLIIQMPELRENPFKERIVAAFSEDGEGNLTFNDFVDMFSVLCESAPRELKANYAFKIYDFNTDNFICKEDLELTLARLTKSELDEEEVVLVCDKVIEEADLDGDGKLGFADFEDMIAKAPDFLSTFHIRI

SEQ ID NO: 10536 - protein, 144 aa, Homo sapiens
  Payload ID: 2107;
  Gene Symbol: CIB2;
  Gene Name: calcium and integrin binding family member 2;
  Uniprot ID:  O75838;
  ENSP ID: ENSP00000442459
MDYRKSPIVHVPMSLIIQMPELRENPFKERIVAAFSEDGEGNLTFNDFVDMFSVLCESAPRELKANYAFKIYDFNTDNFICKEDLELTLARLTKSELDEEEVVLVCDKVIEEADLDGDGKLGFADFEDMIAKAPDFLSTFHIRI

SEQ ID NO: 10537 - protein, 167 aa, Homo sapiens
  Payload ID: 2107;
  Gene Symbol: CIB2;
  Gene Name: calcium and integrin binding family member 2;
  ENSP ID: ENSP00000452752
MDYRKSPIVHVPMSLIIQMPELRENPFKERIVAAFSEDGEGNLTFNDFVDMFSVLCESAPRELKANYAFKIYDFNTDNFICKEDLELTLARLTKSELDEEEVVLVCDKVIEEADLDGDGKLGFADFEDMIAKAPDFLRCCHYRGRAWAGQSRAGRDVGAEAPITRYL

SEQ ID NO: 10538 - protein, 147 aa, Homo sapiens
  Payload ID: 2107;
  Gene Symbol: CIB2;
  Gene Name: calcium and integrin binding family member 2;
  ENSP ID: ENSP00000452980
MGNKQTIFTEEQLDNYQDCTFFNKKDILKWGNRGSEGFGHSSRVTQAVHSLAPGPSCLSCTHSDCCVCFLQENPFKERIVAAFSEDGEGNLTFNDFVDMFSVLCESAPRELKANYAFKIYDFNTDNFICKEDLELTLARLTKSELDE

SEQ ID NO: 10539 - protein, 126 aa, Homo sapiens
  Payload ID: 2107;
  Gene Symbol: CIB2;
  Gene Name: calcium and integrin binding family member 2;
  ENSP ID: ENSP00000453256
MGNKQTIFTEEQLDNYQDCTFFNKKDILKLHSRFYELAPNLVPMDYRKSPIVHVPMSLIIQMPELRENPFKERIVAAFSEDGEGNLTFNDFVDMFSVLCESAPRELKANYAFKIYALSTSGSEDTA

SEQ ID NO: 10540 - protein, 54 aa, Homo sapiens
  Payload ID: 2107;
  Gene Symbol: CIB2;
  Gene Name: calcium and integrin binding family member 2;
  ENSP ID: ENSP00000453377
MDYRKSPIVHVPMSLIIQMPELRENPFKERIVAAFSEDGEGNLTFNDFVDMFSV

SEQ ID NO: 10541 - protein, 138 aa, Homo sapiens
  Payload ID: 2107;
  Gene Symbol: CIB2;
  Gene Name: calcium and integrin binding family member 2;
  Uniprot ID:  O75838;
  ENSP ID: ENSP00000453488
MGNKQTIFTEEQLDNYQENPFKERIVAAFSEDGEGNLTFNDFVDMFSVLCESAPRELKANYAFKIYDFNTDNFICKEDLELTLARLTKSELDEEEVVLVCDKVIEEADLDGDGKLGFADFEDMIAKAPDFLSTFHIRI

SEQ ID NO: 10542 - protein, 48 aa, Homo sapiens
  Payload ID: 2107;
  Gene Symbol: CIB2;
  Gene Name: calcium and integrin binding family member 2;
  ENSP ID: ENSP00000453654
RFYELAPNLVPMDYRKSPIVHVPMSLIIQMPELRGSCPNANSGSVHVE

SEQ ID NO: 10543 - protein, 92 aa, Homo sapiens
  Payload ID: 2107;
  Gene Symbol: CIB2;
  Gene Name: calcium and integrin binding family member 2;
  ENSP ID: ENSP00000453963
MGNKQTIFTEEQLDNYQDCTFFNKKDILKRIPSKKGSWRRFPRMVRGTSLSTTLWTCFPCSASRLPESSRQTMPSRSMTSTLTTSSARRTWS

SEQ ID NO: 10544 - protein, 187 aa, Homo sapiens
  Payload ID: 2108;
  Gene Symbol: CIB3;
  Gene Name: calcium and integrin binding family member 3;
  Uniprot ID:  Q96Q77;
  ENSP ID: ENSP00000269878
MGNKQTVFTHEQLEAYQDCTFFTRKEIMRLFYRYQDLAPQLVPLDYTTCPDVKVPYELIGSMPELKDNPFRQRIAQVFSEDGDGHMTLDNFLDMFSVMSEMAPRDLKAYYAFKIYDFNNDDYICAWDLEQTVTKLTRGGLSAEEVSLVCEKVLDEADGDHDGRLSLEDFQNMILRAPDFLSTFHIRI

SEQ ID NO: 10545 - protein, 138 aa, Homo sapiens
  Payload ID: 2108;
  Gene Symbol: CIB3;
  Gene Name: calcium and integrin binding family member 3;
  Uniprot ID:  Q96Q77;
  ENSP ID: ENSP00000369188
MGNKQTVFTHEQLEAYQDNPFRQRIAQVFSEDGDGHMTLDNFLDMFSVMSEMAPRDLKAYYAFKIYDFNNDDYICAWDLEQTVTKLTRGGLSAEEVSLVCEKVLDEADGDHDGRLSLEDFQNMILRAPDFLSTFHIRI

SEQ ID NO: 10546 - protein, 45 aa, Homo sapiens
  Payload ID: 2108;
  Gene Symbol: CIB3;
  Gene Name: calcium and integrin binding family member 3;
  ENSP ID: ENSP00000470250
MGNKQTVFTHEQLEAYQDCTFFTRKEIMRTWPHSSCPSTIPPAPM

SEQ ID NO: 10547 - protein, 185 aa, Homo sapiens
  Payload ID: 2109;
  Gene Symbol: CIB4;
  Gene Name: calcium and integrin binding family member 4;
  Uniprot ID:  A0PJX0;
  ENSP ID: ENSP00000288861
MGQCLRYQMHWEDLEEYQALTFLTRNEILCIHDTFLKLCPPGKYYKEATLTMDQVSSLPALRVNPFRDRICRVFSHKGMFSFEDVLGMASVFSEQACPSLKIEYAFRIYDFNENGFIDEEDLQRIILRLLNSDDMSEDLLMDLTNHVLSESDLDNDNMLSFSEFEHAMAKSPDFMNSFRIHFWGC

SEQ ID NO: 10548 - protein, 690 aa, Homo sapiens
  Payload ID: 2110;
  Gene Symbol: CALCOCO1;
  Gene Name: calcium binding and coiled-coil domain 1;
  Uniprot ID:  Q9P1Z2;
  ENSP ID: ENSP00000262059
MEESPLSRAPSRGGVNFLNVARTYIPNTKVECHYTLPPGTMPSASDWIGIFKVEAACVRDYHTFVWSSVPESTTDGSPIHTSVQFQASYLPKPGAQLYQFRYVNRQGQVCGQSPPFQFREPRPMDELVTLEEADGGSDILLVVPKATVLQNQLDESQQERNDLMQLKLQLEGQVTELRSRVQELERALATARQEHTELMEQYKGISRSHGEITEERDILSRQQGDHVARILELEDDIQTISEKVLTKEVELDRLRDTVKALTREQEKLLGQLKEVQADKEQSEAELQVAQQENHHLNLDLKEAKSWQEEQSAQAQRLKDKVAQMKDTLGQAQQRVAELEPLKEQLRGAQELAASSQQKATLLGEELASAAAARDRTIAELHRSRLEVAEVNGRLAELGLHLKEEKCQWSKERAGLLQSVEAEKDKILKLSAEILRLEKAVQEERTQNQVFKTELAREKDSSLVQLSESKRELTELRSALRVLQKEKEQLQEEKQELLEYMRKLEARLEKVADEKWNEDATTEDEEAAVGLSCPAALTDSEDESPEDMRLPPYGLCERGDPGSSPAGPREASPLVVISQPAPISPHLSGPAEDSSSDSAEDEKSVLMAAVQSGGEEANLLLPELGSAFYDMASGFTVGTLSETSTGGPATPTWKECPICKERFPAESDKDALEDHMDGHFFFSTQDPFTFE

SEQ ID NO: 10549 - protein, 606 aa, Homo sapiens
  Payload ID: 2110;
  Gene Symbol: CALCOCO1;
  Gene Name: calcium binding and coiled-coil domain 1;
  Uniprot ID:  Q9P1Z2;
  ENSP ID: ENSP00000397189
MEESPLSRAPSRGGVNFLNVARTYIPNTKVECHYTLPPGTMPSASDWIGIFKVEAACVRDYHTFVWSSVPESTTDGSPIHTSVQFQEPRPMDELVTLEEADGGSDILLVVPKATVLQNQLDESQQERNDLMQLKLQLEGQVTELRSRVQELERALATARQEHTELMEQYKGISRSHGEITEERDILSRQQGDHVARILELEDDIQTISEKVLTKEVELDRLRDTVKALTREQEKLLGQLKEVQADKEQSEAELEPLKEQLRGAQELAASSQQKATLLGEELASAAAARDRTIAELHRSRLEVAEVNGRLAELGLHLKEEKCQWSKERAGLLQSVEAEKDKILKLSAEILRLEKAVQEERTQNQVFKTELAREKDSSLVQLSESKRELTELRSALRVLQKEKEQLQEEKQELLEYMRKLEARLEKVADEKWNEDATTEDEEAAVGLSCPAALTDSEDESPEDMRLPPYGLCERGDPGSSPAGPREASPLVVISQPAPISPHLSGPAEDSSSDSEAEDEKSVLMAAVQSGGEEANLLLPELGSAFYDMASGFTVGTLSETSTGGPATPTWKECPICKERFPAESDKDALEDHMDGHFFFSTQDPFTFE

SEQ ID NO: 10550 - protein, 134 aa, Homo sapiens
  Payload ID: 2110;
  Gene Symbol: CALCOCO1;
  Gene Name: calcium binding and coiled-coil domain 1;
  ENSP ID: ENSP00000446820
MEESPLSRAPSRGGVNFLNVARTYIPNTKVECHYTLPPGTMPSASDWIGIFKVEAACVRDYHTFVWSSVPESTTDGSPIHTSVQFQASYLPKPGAQLYQFRYVNRQGQVCGQSPPFQFREPRPMDELVTLEEAD

SEQ ID NO: 10551 - protein, 149 aa, Homo sapiens
  Payload ID: 2110;
  Gene Symbol: CALCOCO1;
  Gene Name: calcium binding and coiled-coil domain 1;
  ENSP ID: ENSP00000447117
MEESPLSRAPSRGGVNFLNVARTYIPNTKVECHYTLPPGTMPSASDWIGIFKVEAACVRDYHTFVWSSVPESTTDGSPIHTSVQFQASYLPKPGAQLYQFRYVNRQGQVCGQSPPFQFREPRPMDELVTLEEADGGSDILLVVPKATVL

SEQ ID NO: 10552 - protein, 633 aa, Homo sapiens
  Payload ID: 2110;
  Gene Symbol: CALCOCO1;
  Gene Name: calcium binding and coiled-coil domain 1;
  Uniprot ID:  Q9P1Z2;
  ENSP ID: ENSP00000447647
MEESPLSRAPSRGGVNFLNVARTYIPNTKVECHYTLPPGTMPSASDWIGIFKVEAACVRDYHTFVWSSVPESTTDGSPIHTSVQFQASYLPKPGAQLYQFRYVNRQGQVCGQSPPFQFREPRPMDELVTLEEADGGSDILLVVPKATVLQNQLDESQQERNDLMQLKLQLEGQVTELRSRVQELERALATARQEHTELMEQYKGISRSHGEITEERDILSRQQGDHVARILELEDDIQTISEKVLTKEVELDRLRDTVKALTREQEKLLGQLKEVQADKEQSEAELQVAQQENHHLNLDLKEAKSWQEEQSAQAQRLKDKVAQMKDTLGQAQQRVAELEPLKEQLRGAQELAASSQQKATLLGEELASAAAARDRTIAELHRSRLEVAEVNGRLAELGLHLKEEKCQWSKERAGLLQSVEAEKDKILKLSAEILRLEKAVQEERTQNQVFKTELAREKDSSLVQLSESKRELTELRSALRVLQKEKEQLQEEKQELLEYMRKLEARLEKVADEKWNEDATTEDEEAAVGLSCPAALTDSEDESPEDMRLPPYGLCERGDPGSSPAGPREASPLVVISQPAPISPHLSGPAEDSSSDSEAEDEKSVLMAAVQSGGEEANLLLPELGSAFYDMAR

SEQ ID NO: 10553 - protein, 120 aa, Homo sapiens
  Payload ID: 2110;
  Gene Symbol: CALCOCO1;
  Gene Name: calcium binding and coiled-coil domain 1;
  ENSP ID: ENSP00000448026
MEESPLSRAPSRGGVNFLNVARTYIPNTKVECHYTLPPGTMPSASDWIGIFKVEAACVRDYHTFVWSSVPESTTDGSPIHTSVQFQASYLPKPGAQLYQFRYVNRQGQVCGQSPPFQFRE

SEQ ID NO: 10554 - protein, 159 aa, Homo sapiens
  Payload ID: 2110;
  Gene Symbol: CALCOCO1;
  Gene Name: calcium binding and coiled-coil domain 1;
  ENSP ID: ENSP00000448621
MEESPLSRAPSRGGVNFLNVARTYIPNTKVECHYTLPPGTMPSASDWIGIFKVEAACVRDYHTFVWSSVPESTTDGSPIHTSVQFQASYLPKPGAQLYQFRYVNRQGQVCGQSPPFQFREPRPMDELVTLEEADGGSDILLVVPKATVLQNQLDESQQE

SEQ ID NO: 10555 - protein, 160 aa, Homo sapiens
  Payload ID: 2110;
  Gene Symbol: CALCOCO1;
  Gene Name: calcium binding and coiled-coil domain 1;
  ENSP ID: ENSP00000449058
MEESPLSRAPSRGGVNFLNVARTYIPNTKVECHYTLPPGTMPSASDWIGIFKVEAACVRDYHTFVWSSVPESTTDGSPIHTSVQFQGTREDGKLGERSQGSGGLKEASYLPKPGAQLYQFRYVNRQGQVCGQSPPFQFREPRPMDELVTLEEADGGSDIL

SEQ ID NO: 10556 - protein, 104 aa, Homo sapiens
  Payload ID: 2110;
  Gene Symbol: CALCOCO1;
  Gene Name: calcium binding and coiled-coil domain 1;
  ENSP ID: ENSP00000449796
MEESPLSRAPSRGGVNFLNVARTYIPNTKVECHYTLPPGTMPSASDWIGIFKVEAACVRDYHTFVWSSVPESTTDGSPIHTSVQFQASYLPKPGAQLYQFRYVN

SEQ ID NO: 10557 - protein, 691 aa, Homo sapiens
  Payload ID: 2110;
  Gene Symbol: CALCOCO1;
  Gene Name: calcium binding and coiled-coil domain 1;
  Uniprot ID:  Q9P1Z2;
  ENSP ID: ENSP00000449960
MEESPLSRAPSRGGVNFLNVARTYIPNTKVECHYTLPPGTMPSASDWIGIFKVEAACVRDYHTFVWSSVPESTTDGSPIHTSVQFQASYLPKPGAQLYQFRYVNRQGQVCGQSPPFQFREPRPMDELVTLEEADGGSDILLVVPKATVLQNQLDESQQERNDLMQLKLQLEGQVTELRSRVQELERALATARQEHTELMEQYKGISRSHGEITEERDILSRQQGDHVARILELEDDIQTISEKVLTKEVELDRLRDTVKALTREQEKLLGQLKEVQADKEQSEAELQVAQQENHHLNLDLKEAKSWQEEQSAQAQRLKDKVAQMKDTLGQAQQRVAELEPLKEQLRGAQELAASSQQKATLLGEELASAAAARDRTIAELHRSRLEVAEVNGRLAELGLHLKEEKCQWSKERAGLLQSVEAEKDKILKLSAEILRLEKAVQEERTQNQVFKTELAREKDSSLVQLSESKRELTELRSALRVLQKEKEQLQEEKQELLEYMRKLEARLEKVADEKWNEDATTEDEEAAVGLSCPAALTDSEDESPEDMRLPPYGLCERGDPGSSPAGPREASPLVVISQPAPISPHLSGPAEDSSSDSEAEDEKSVLMAAVQSGGEEANLLLPELGSAFYDMASGFTVGTLSETSTGGPATPTWKECPICKERFPAESDKDALEDHMDGHFFFSTQDPFTFE

SEQ ID NO: 10558 - protein, 115 aa, Homo sapiens
  Payload ID: 2110;
  Gene Symbol: CALCOCO1;
  Gene Name: calcium binding and coiled-coil domain 1;
  ENSP ID: ENSP00000450012
MEESPLSRAPSRGGVNFLNVARTYIPNTKVECHYTLPPGTMPSASDWIGIFKVEAACVRDYHTFVWSSVPESTTDGSPIHTSVQFQASYLPKPGAQLYQFRYVNRQGQVCGQSPP

SEQ ID NO: 10559 - protein, 164 aa, Homo sapiens
  Payload ID: 2110;
  Gene Symbol: CALCOCO1;
  Gene Name: calcium binding and coiled-coil domain 1;
  ENSP ID: ENSP00000450083
MEESPLSRAPSRGGVNFLNVARTYIPNTKVECHYTLPPGTMPSASDWIGIFKVEAACVRDYHTFVWSSVPESTTDGSPIHTSVQFQASYLPKPGAQLYQFRYVNRQGQVCGQSPPFQFREPRPMDELVTLEEADGGSDILLVVPKATVLQNQLDESQQERNDLM

SEQ ID NO: 10560 - protein, 232 aa, Homo sapiens
  Payload ID: 2110;
  Gene Symbol: CALCOCO1;
  Gene Name: calcium binding and coiled-coil domain 1;
  ENSP ID: ENSP00000456437
  MOD_RES (1)..(1): Any amino acid
XEKEQLQEEKQELLEYMRKLEARLEKVADEKWNEDATTEDEEAAVGLSCPAALTDSEDESPEDMRLPPYGLCERGDPGSSPAGPREASPLVVISQPAPISPHLSGPAEDSSSDSEAEDEKSVLMAAVQSGGEEANLLLPELGSAFYDMASTIFCRAQIALLPLSPASTPSPTTSGFTVGTLSETSTGGPATPTWKECPICKERFPAESDKDALEDHMDGHFFFSTQDPFTFE

SEQ ID NO: 10561 - protein, 446 aa, Homo sapiens
  Payload ID: 2111;
  Gene Symbol: CALCOCO2;
  Gene Name: calcium binding and coiled-coil domain 2;
  Uniprot ID:  Q13137;
  ENSP ID: ENSP00000258947
MEETIKDPPTSAVLLDHCHFSQVIFNSVEKFYIPGGDVTCHYTFTQHFIPRRKDWIGIFRVGWKTTREYYTFMWVTLPIDLNNKSAKQQEVQFKAYYLPKDDEYYQFCYVDEDGVVRGASIPFQFRPENEEDILVVTTQGEVEEIEQHNKELCKENQELKDSCISLQKQNSDMQAELQKKQEELETLQSINKKLELKVKEQKDYWETELLQLKEQNQKMSSENEKMGIRVDQLQAQLSTQEKEMEKLVQGDQDKTEQLEQLKKENDHLFLSLTEQRKDQKKLEQTVEQMKQNETTAMKKQQELMDENFDLSKRLSENEIICNALQRQKERLEGENDLLKRENSRLLSYMGLDFNSLPYQVPTSDEGGARQNPGLAYGNPYSGIQESSSPSPLSIKKCPICKADDICDHTLEQQQMQPLCFNCPICDKIFPATEKQIFEDHVFCHSL

SEQ ID NO: 10562 - protein, 470 aa, Homo sapiens
  Payload ID: 2111;
  Gene Symbol: CALCOCO2;
  Gene Name: calcium binding and coiled-coil domain 2;
  Uniprot ID:  Q13137;
  ENSP ID: ENSP00000398523
MEETIKDPPTSAVLLDHCHFSQVIFNSVEKFYIPGGDVTCHYTFTQHFIPRRKDWIGIFRAFKCFQDKLEQELLKWRSQGQKLQVGWKTTREYYTFMWVTLPIDLNNKSAKQQEVQFKAYYLPKDDEYYQFCYVDEDGVVRGASIPFQFRPENEEDILVVTTQGEVEEIEQHNKELCKENQELKDSCISLQKQNSDMQAELQKKQEELETLQSINKKLELKVKEQKDYWETELLQLKEQNQKMSSENEKMGIRVDQLQAQLSTQEKEMEKLVQGDQDKTEQLEQLKKENDHLFLSLTEQRKDQKKLEQTVEQMKQNETTAMKKQQELMDENFDLSKRLSENEIICNALQRQKERLEGENDLLKRENSRLLSYMGLDFNSLPYQVPTSDEGGARQNPGLAYGNPYSGIQESSSPSPLSIKKCPICKADDICDHTLEQQQMQPLCFNCPICDKIFPATEKQIFEDHVFCHSL

SEQ ID NO: 10563 - protein, 404 aa, Homo sapiens
  Payload ID: 2111;
  Gene Symbol: CALCOCO2;
  Gene Name: calcium binding and coiled-coil domain 2;
  Uniprot ID:  Q13137;
  ENSP ID: ENSP00000406974
MEETIKDPPTSAVLLDHCHFSQVIFNSVEKFYIPGGDVTCHYTFTQHFIPRRKDWIGIFRVGWKTTREYYTFMWVTLPIDLNNKSAKQQEVQFKAYYLPKDDEYYQFCYVDEDGVVRGASIPFQFRPENEEDILVVTTQEELETLQSINKKLELKVKEQKDYWETELLQLKEQNQKMSSENEKMGIRVDQLQAQLSTQEKEMEKLVQGDQDKTEQLEQLKKENDHLFLSLTEQRKDQKKLEQTVEQMKQNETTAMKKQQELMDENFDLSKRLSENEIICNALQRQKERLEGENDLLKRENSRLLSYMGLDFNSLPYQVPTSDEGGARQNPGLAYGNPYSGIQESSSPSPLSIKKCPICKADDICDHTLEQQQMQPLCFNCPICDKIFPATEKQIFEDHVFCHSL

SEQ ID NO: 10564 - protein, 154 aa, Homo sapiens
  Payload ID: 2111;
  Gene Symbol: CALCOCO2;
  Gene Name: calcium binding and coiled-coil domain 2;
  ENSP ID: ENSP00000422697
MEETIKDPPTSAVLLDHCHFSQVIFNSVEKFYIPGGDVTCHYTFTQHFIPRRKDWIGIFRVGWKTTREYYTFMWVTLPIDLNNKSAKQQEVQFKAYYLPKDDEYYQFCYVDEDGVVRGASIPFQFRPENEEDILVVTTQFWPTACLSYGEVEEI

SEQ ID NO: 10565 - protein, 374 aa, Homo sapiens
  Payload ID: 2111;
  Gene Symbol: CALCOCO2;
  Gene Name: calcium binding and coiled-coil domain 2;
  Uniprot ID:  Q13137;
  ENSP ID: ENSP00000423437
MWVTLPIDLNNKSAKQQEVQFKAYYLPKDDEYYQFCYVDEDGVVRGASIPFQFRPENEEDILVVTTQGEVEEIEQHNKELCKENQELKDSCISLQKQNSDMQAELQKKQEELETLQSINKKLELKVKEQKDYWETELLQLKEQNQKMSSENEKMGIRVDQLQAQLSTQEKEMEKLVQGDQDKTEQLEQLKKENDHLFLSLTEQRKDQKKLEQTVEQMKQNETTAMKKQQELMDENFDLSKRLSENEIICNALQRQKERLEGENDLLKRENSRLLSYMGLDFNSLPYQVPTSDEGGARQNPGLAYGNPYSGIQESSSPSPLSIKKCPICKADDICDHTLEQQQMQPLCFNCPICDKIFPATEKQIFEDHVFCHSL

SEQ ID NO: 10566 - protein, 129 aa, Homo sapiens
  Payload ID: 2111;
  Gene Symbol: CALCOCO2;
  Gene Name: calcium binding and coiled-coil domain 2;
  ENSP ID: ENSP00000424083
  MOD_RES (1)..(1): Any amino acid
XQMKQNETTAMKKQQELMDENFDLSKRLSENEIICNALQRQKERLEGENDVSKKVLPPARSPSRNALSAKQMIFVITPWSNSRCSPFVSIVQFVTRSSQLQRSRSLKTTCSATLSEYPNLLDVYRDFIE

SEQ ID NO: 10567 - protein, 27 aa, Homo sapiens
  Payload ID: 2111;
  Gene Symbol: CALCOCO2;
  Gene Name: calcium binding and coiled-coil domain 2;
  ENSP ID: ENSP00000424169
MWVTLPIDLNNKSAKQQEVQFKAYYLP

SEQ ID NO: 10568 - protein, 467 aa, Homo sapiens
  Payload ID: 2111;
  Gene Symbol: CALCOCO2;
  Gene Name: calcium binding and coiled-coil domain 2;
  Uniprot ID:  Q13137;
  ENSP ID: ENSP00000424352
MEETIKDPPTSAVLLDHCHFSQVIFNSVEKFYIPGGDVTCHYTFTQHFIPRRKDWIGIFRCSLNQTIQLLITPDTGSIWHQVGWKTTREYYTFMWVTLPIDLNNKSAKQQEVQFKAYYLPKDDEYYQFCYVDEDGVVRGASIPFQFRPENEEDILVVTTQGEVEEIEQHNKELCKENQELKDSCISLQKQNSDMQAELQKKQEELETLQSINKKLELKVKEQKDYWETELLQLKEQNQKMSSENEKMGIRVDQLQAQLSTQEKEMEKLVQGDQDKTEQLEQLKKENDHLFLSLTEQRKDQKKLEQTVEQMKQNETTAMKKQQELMDENFDLSKRLSENEIICNALQRQKERLEGENDLLKRENSRLLSYMGLDFNSLPYQVPTSDEGGARQNPGLAYGNPYSGIQESSSPSPLSIKKCPICKADDICDHTLEQQQMQPLCFNCPICDKIFPATEKQIFEDHVFCHSL

SEQ ID NO: 10569 - protein, 193 aa, Homo sapiens
  Payload ID: 2111;
  Gene Symbol: CALCOCO2;
  Gene Name: calcium binding and coiled-coil domain 2;
  ENSP ID: ENSP00000424889
MEETIKDPPTSAVLLDHCHFSQVIFNSVEKFYIPGGDVTCHYTFTQHFIPRRKDWIGIFRVGWKTTREYYTFMWVTLPIDLNNKSAKQQEVQFKAYYLPKDDEYYQFCYVDEDGVVRGASIPFQFRPENEEDILVVTTQGEVEEIEQHNKELCKENQELKDSCISLQKQNSDMQAELQKKQEELETLQSINKK

SEQ ID NO: 10570 - protein, 259 aa, Homo sapiens
  Payload ID: 2111;
  Gene Symbol: CALCOCO2;
  Gene Name: calcium binding and coiled-coil domain 2;
  ENSP ID: ENSP00000425090
MWVTLPIDLNNKSAKQQEVQFKAYYLPKDDEYYQFCYVDEDGVVRGASIPFQFRPENEEDILVVTTQGEVEEIEQHNKELCKENQELKDSCISLQKQNSDMQAELQKKQEELETLQSINKKLELKVKEQKDYWETELLQLKEQNQKMSSENEKMGIRVDQLQAQLSTQEKEMEKLVQGDQDKTEQLEQLKKENDHLFLSLTEQRKDQKKLEQTVEQMKQNETTAMKKQQELMDENFDLSKRLSENEIICNALQRQKERL

SEQ ID NO: 10571 - protein, 168 aa, Homo sapiens
  Payload ID: 2111;
  Gene Symbol: CALCOCO2;
  Gene Name: calcium binding and coiled-coil domain 2;
  ENSP ID: ENSP00000425692
MEETIKDPPTSAVLLDHCHFSQVIFNSVEKFYIPGGDVTCHYTFTQHFIPRRKDWIGIFRVGWKTTPYYLPKDDEYYQFCYVDEDGVVRGASIPFQFRPENEEDILVVTTQGEVEEIEQHNKELCKENQELKDSCISLQKQNSDMQAELQKKQEELETLQSINKKLEL

SEQ ID NO: 10572 - protein, 43 aa, Homo sapiens
  Payload ID: 2111;
  Gene Symbol: CALCOCO2;
  Gene Name: calcium binding and coiled-coil domain 2;
  ENSP ID: ENSP00000429963
FDLSKRLSENEIICNALQRQKERLEGENDEQKWWSVPVLDPCF

SEQ ID NO: 10573 - protein, 121 aa, Homo sapiens
  Payload ID: 2111;
  Gene Symbol: CALCOCO2;
  Gene Name: calcium binding and coiled-coil domain 2;
  ENSP ID: ENSP00000461083
MEETIKDPPTSAVLLDHCHFSQVIFNSVEKFYIPGGDVTCHYTFTQHFIPRRKDWIGIFRVGWKTTREYYTFMWVTLPIDLNNKSAKQQEVQFKAYYLPKDDEYYQFCYVDEDGVVRGASI

SEQ ID NO: 10574 - protein, 108 aa, Homo sapiens
  Payload ID: 2111;
  Gene Symbol: CALCOCO2;
  Gene Name: calcium binding and coiled-coil domain 2;
  ENSP ID: ENSP00000461184
MEETIKDPPTSAVLLDHCHFSQVIFNSVEKFYIPGGDVTCHYTFTQHFIPRRKDWIGIFRRQSFVLLPRLECNGAISAHRNLRLPGSSDSPASASRVAGITGGVEDNP

SEQ ID NO: 10575 - protein, 167 aa, Homo sapiens
  Payload ID: 2112;
  Gene Symbol: CABP1;
  Gene Name: calcium binding prt 1;
  Uniprot ID:  Q9NZU7;
  ENSP ID: ENSP00000288615
MGNCVKYPLRNLSRKDRSLRPEEIEELREAFREFDKDKDGYINCRDLGNCMRTMGYMPTEMELIELSQQINMNLGGHVDFDDFVELMGPKLLAETADMIGVKELRDAFREFDTNGDGEISTSELREAMRKLLGHQVGHRDIEEIIRDVDLNGDGRVDFEEFVRMMSR

SEQ ID NO: 10576 - protein, 227 aa, Homo sapiens
  Payload ID: 2112;
  Gene Symbol: CABP1;
  Gene Name: calcium binding prt 1;
  Uniprot ID:  Q9NZU7;
  ENSP ID: ENSP00000288616
MGNCVKYPLRNLSRKMCQEEQTSYMVVQTSEEGLAADAELPGPLLMLAQNCAVMHNLLGPACIFLRKGFAENRQPDRSLRPEEIEELREAFREFDKDKDGYINCRDLGNCMRTMGYMPTEMELIELSQQINMNLGGHVDFDDFVELMGPKLLAETADMIGVKELRDAFREFDTNGDGEISTSELREAMRKLLGHQVGHRDIEEIIRDVDLNGDGRVDFEEFVRMMSR

SEQ ID NO: 10577 - protein, 370 aa, Homo sapiens
  Payload ID: 2112;
  Gene Symbol: CABP1;
  Gene Name: calcium binding prt 1;
  Uniprot ID:  Q9NZU7;
  ENSP ID: ENSP00000317310
MGGGDGAAFKRPGDGARLQRVLGLGSRREPRSLPAGGPAPRRTAPPPPGHASAGPAAMSSHIAKSESKTSLLKAAAAAASGGSRAPRHGPARDPGLPSRRLPGSCPATPQSSGDPSSRRPLCRPAPREEGARGSQRVLPQAHCRPREALPAAASRPSPSSPLPPARGRDGEERGLSPALGLRGSLRARGRGDSVPAAASEADPFLHRLRPMLSSAFGQDRSLRPEEIEELREAFREFDKDKDGYINCRDLGNCMRTMGYMPTEMELIELSQQINMNLGGHVDFDDFVELMGPKLLAETADMIGVKELRDAFREFDTNGDGEISTSELREAMRKLLGHQVGHRDIEEIIRDVDLNGDGRVDFEEFVRMMSR

SEQ ID NO: 10578 - protein, 306 aa, Homo sapiens
  Payload ID: 2112;
  Gene Symbol: CABP1;
  Gene Name: calcium binding prt 1;
  ENSP ID: ENSP00000398959
MCQCVRACVCVCVCACATQRASHSALPGTTISVKDWRLCLLDQFDACARSGLSEPRSLTLRVPSCGKPLPGPGARLGREVTPCLSFAFAWCWLKMCQEEQTSYMVVQTSEEGLAADAELPGPLLMLAQNCAVMHNLLGPACIFLRKGFAENRQPDRSLRPEEIEELREAFREFDKDKDGYINCRDLGNCMRTMGYMPTEMELIELSQQINMNLGGHVDFDDFVELMGPKLLAETADMIGVKELRDAFREFDTNGDGEISTSELREAMRKLLGHQVGHRDIEEIIRDVDLNGDGRVDFEEFVRMMSR

SEQ ID NO: 10579 - protein, 220 aa, Homo sapiens
  Payload ID: 2113;
  Gene Symbol: CABP2;
  Gene Name: calcium binding prt 2;
  Uniprot ID:  Q9NPB3;
  ENSP ID: ENSP00000294288
MGNCAKRPWRRGPKDPLQWLGSPPRGSCPSPSSSPKEQGDPAPGVQGYSVLNSLVGPACIFLRPSIAATQLDRELRPEEIEELQVAFQEFDRDRDGYIGCRELGACMRTLGYMPTEMELIEISQQISGGKVDFEDFVELMGPKLLAETADMIGVRELRDAFREFDTNGDGRISVGELRAALKALLGERLSQREVDEILQDVDLNGDGLVDFEEFVRMMSR

SEQ ID NO: 10580 - protein, 163 aa, Homo sapiens
  Payload ID: 2113;
  Gene Symbol: CABP2;
  Gene Name: calcium binding prt 2;
  Uniprot ID:  Q9NPB3;
  ENSP ID: ENSP00000312037
MGNCAKRPWRRGPKDRELRPEEIEELQVAFQEFDRDRDGYIGCRELGACMRTLGYMPTEMELIEISQQISGGKVDFEDFVELMGPKLLAETADMIGVRELRDAFREFDTNGDGRISVGELRAALKALLGERLSQREVDEILQDVDLNGDGLVDFEEFVRMMSR

SEQ ID NO: 10581 - protein, 72 aa, Homo sapiens
  Payload ID: 2113;
  Gene Symbol: CABP2;
  Gene Name: calcium binding prt 2;
  ENSP ID: ENSP00000446180
MGNCAKRPWRRGPKDPLQWLGSPPRGSCPSPSSSPKEQGDPAPGVQGYSVLNSLVGPACIFLRPSIAATQLV

SEQ ID NO: 10582 - protein, 341 aa, Homo sapiens
  Payload ID: 2114;
  Gene Symbol: CAB39;
  Gene Name: calcium binding prt 39;
  Uniprot ID:  Q9Y376;
  ENSP ID: ENSP00000258418
MPFPFGKSHKSPADIVKNLKESMAVLEKQDISDKKAEKATEEVSKNLVAMKEILYGTNEKEPQTEAVAQLAQELYNSGLLSTLVADLQLIDFEGKKDVAQIFNNILRRQIGTRTPTVEYICTQQNILFMLLKGYESPEIALNCGIMLRECIRHEPLAKIILWSEQFYDFFRYVEMSTFDIASDAFATFKDLLTRHKLLSAEFLEQHYDRFFSEYEKLLHSENYVTKRQSLKLLGELLLDRHNFTIMTKYISKPENLKLMMNLLRDKSRNIQFEAFHVFKVFVANPNKTQPILDILLKNQAKLIEFLSKFQNDRTEDEQFNDEKTYLVKQIRDLKRPAQQEA

SEQ ID NO: 10583 - protein, 341 aa, Homo sapiens; identical to SEQ ID NO: 10582
  Payload ID: 2114;
  Gene Symbol: CAB39;
  Gene Name: calcium binding prt 39;
  Uniprot ID:  Q9Y376;
  ENSP ID: ENSP00000386238

SEQ ID NO: 10584 - protein, 341 aa, Homo sapiens; identical to SEQ ID NO: 10582
  Payload ID: 2114;
  Gene Symbol: CAB39;
  Gene Name: calcium binding prt 39;
  Uniprot ID:  Q9Y376;
  ENSP ID: ENSP00000386642

SEQ ID NO: 10585 - protein, 339 aa, Homo sapiens [sequence omitted]

SEQ ID NO: 10586 - protein, 337 aa, Homo sapiens
  Payload ID: 2115;
  Gene Symbol: CAB39L;
  Gene Name: calcium binding prt 39-like;
  Uniprot ID:  Q9H9S4;
  ENSP ID: ENSP00000261669
MKKMPLFSKSHKNPAEIVKILKDNLAILEKQDKKTDKASEEVSKSLQAMKEILCGTNEKEPPTEAVAQLAQELYSSGLLVTLIADLQLIDFEGKKDVTQIFNNILRRQIGTRSPTVEYISAHPHILFMLLKGYEAPQIALRCGIMLRECIRHEPLAKIILFSNQFRDFFKYVELSTFDIASDAFATFKDLLTRHKVLVADFLEQNYDTIFEDYEKLLQSENYVTKRQSLKLLGELILDRHNFAIMTKYISKPENLKLMMNLLRDKSPNIQFEAFHVFKVFVASPHKTQPIVEILLKNQPKLIEFLSSFQKERTDDEQFADEKNYLIKQIRDLKKTAP

SEQ ID NO: 10587 - protein, 337 aa, Homo sapiens; identical to SEQ ID NO: 10586
  Payload ID: 2115;
  Gene Symbol: CAB39L;
  Gene Name: calcium binding prt 39-like;
  Uniprot ID:  Q9H9S4;
  ENSP ID: ENSP00000348113

SEQ ID NO: 10588 - protein, 337 aa, Homo sapiens; identical to SEQ ID NO: 10586
  Payload ID: 2115;
  Gene Symbol: CAB39L;
  Gene Name: calcium binding prt 39-like;
  Uniprot ID:  Q9H9S4;
  ENSP ID: ENSP00000386328

SEQ ID NO: 10589 - protein, 337 aa, Homo sapiens; identical to SEQ ID NO: 10586
  Payload ID: 2115;
  Gene Symbol: CAB39L;
  Gene Name: calcium binding prt 39-like;
  Uniprot ID:  Q9H9S4;
  ENSP ID: ENSP00000386375

SEQ ID NO: 10590 - protein, 93 aa, Homo sapiens
  Payload ID: 2115;
  Gene Symbol: CAB39L;
  Gene Name: calcium binding prt 39-like;
  ENSP ID: ENSP00000386979
MKKMPLFSKSHKNPAEIVKILKDNLAILEKQDKKTDKASEEVSKSLQAMKEILCGTNEKEPPTEAVAQLAQELYSSGLLVTLIADLQLIDFEV

SEQ ID NO: 10591 - protein, 193 aa, Homo sapiens
  Payload ID: 2115;
  Gene Symbol: CAB39L;
  Gene Name: calcium binding prt 39-like;
  ENSP ID: ENSP00000387245
MLRECIRHEPLAKIILFSNQFRDFFKYVELSTFDIASDAFATFKDLLTRHKVLVADFLEQNYDTIFEDYEKLLQSENYVTKRQSLKLLGELILDRHNFAIMTKYISKPENLKLMMNLLRDKSPNIQFEAFHVFKVFVASPHKTQPIVEILLKNQPKLIEFLSSFQKERTDDEQFADEKNYLIKQIRDLKKTAP

SEQ ID NO: 10592 - protein, 128 aa, Homo sapiens
  Payload ID: 2115;
  Gene Symbol: CAB39L;
  Gene Name: calcium binding prt 39-like;
  ENSP ID: ENSP00000404028
MKKMPLFSKSHKNPAEIVKILKDNLAILEKQDKKTDKASEEVSKSLQAMKEILCGTNEKEPPTEAVAQLAQELYSSGLLVTLIADLQLIDFEGKKDVTQIFNNILRRQIGTRSPTVEYISAHPHILFM

SEQ ID NO: 10593 - protein, 188 aa, Homo sapiens
  Payload ID: 2115;
  Gene Symbol: CAB39L;
  Gene Name: calcium binding prt 39-like;
  ENSP ID: ENSP00000409253
MKKMPLFSKSHKNPAEIVKILKDNLAILEKQDKKTDKASEEVSKSLQAMKEILCGTNEKEPPTEAVAQLAQELYSSGLLVTLIADLQLIDFEGKKDVTQIFNNILRRQIGTRSPTVEYISAHPHILFMLLKGYEAPQIALRCGIMLRECIRHEPLAKIILFSNQFRDFFKYVELSTFDIASDAFATFK

SEQ ID NO: 10594 - protein, 280 aa, Homo sapiens
  Payload ID: 2115;
  Gene Symbol: CAB39L;
  Gene Name: calcium binding prt 39-like;
  ENSP ID: ENSP00000416719
ASEEVSKSLQAMKEILCGTNEKEPPTEAVAQLAQELYSSGLLVTLIADLQLIDFEGKKDVTQIFNNILRRQIGTRSPTVEYISAHPHILFMLLKGYEAPQIALRCGIMLRECIRHEPLAKIILFSNQFRDFFKYVELSTFDIASDAFATFKIFEDYEKLLQSENYVTKRQSLKLLGELILDRHNFAIMTKYISKPENLKLMMNLLRDKSPNIQFEAFHVFKVFVASPHKTQPIVEILLKNQPKLIEFLSSFQKERTDDEQFADEKNYLIKQIRDLKKTAP

SEQ ID NO: 10595 - protein, 337 aa, Homo sapiens; identical to SEQ ID NO: 10586
  Payload ID: 2115;
  Gene Symbol: CAB39L;
  Gene Name: calcium binding prt 39-like;
  Uniprot ID:  Q9H9S4;
  ENSP ID: ENSP00000479669

SEQ ID NO: 10596 - protein, 275 aa, Homo sapiens
  Payload ID: 2116;
  Gene Symbol: CABP4;
  Gene Name: calcium binding prt 4;
  Uniprot ID:  P57796;
  ENSP ID: ENSP00000324960
MTTEQARGQQGPNLAIGRQKPPAGVVTPKSDAEEPPLTRKRSKKERGLRGSRKRTGSSGEQTGPEAPGSSNNPPSTGEGPAGAPPASPGPASSRQSHRHRPDSLHDAAQRTYGPLLNRVFGKDRELGPEELDELQAAFEEFDTDRDGYISHRELGDCMRTLGYMPTEMELLEVSQHIKMRMGGRVDFEEFVELIGPKLREETAHMLGVRELRIAFREFDRDRDGRITVAELREAVPALLGEPLAGPELDEMLREVDLNGDGTVDFDEFVMMLSRH

SEQ ID NO: 10597 - protein, 170 aa, Homo sapiens
  Payload ID: 2116;
  Gene Symbol: CABP4;
  Gene Name: calcium binding prt 4;
  Uniprot ID:  P57796;
  ENSP ID: ENSP00000401555
MTEPWLALGTSWTLPLQDRELGPEELDELQAAFEEFDTDRDGYISHRELGDCMRTLGYMPTEMELLEVSQHIKMRMGGRVDFEEFVELIGPKLREETAHMLGVRELRIAFREFDRDRDGRITVAELREAVPALLGEPLAGPELDEMLREVDLNGDGTVDFDEFVMMLSRH

SEQ ID NO: 10598 - protein, 128 aa, Homo sapiens
  Payload ID: 2116;
  Gene Symbol: CABP4;
  Gene Name: calcium binding prt 4;
  ENSP ID: ENSP00000439145
MTTEQARGQQGPNLAIGRQKPPAGVVTPKSDAEEPPLTRKRSKKERGLRGSRKRTGSSGEQTGPEAPGSSNNPPSTGEGPAGAPPASPGPASSRQSHRHRPDSLHDAAQRTYGPLLNRVFGKGMKEEG

SEQ ID NO: 10599 - protein, 173 aa, Homo sapiens
  Payload ID: 2117;
  Gene Symbol: CABP5;
  Gene Name: calcium binding prt 5;
  Uniprot ID:  Q9NP86;
  ENSP ID: ENSP00000293255
MQFPMGPACIFLRKGIAEKQRERPLGQDEIEELREAFLEFDKDRDGFISCKDLGNLMRTMGYMPTEMELIELGQQIRMNLGGRVDFDDFVELMTPKLLAETAGMIGVQEMRDAFKEFDTNGDGEITLVELQQAMQRLLGERLTPREISEVVREADVNGDGTVDFEEFVKMMSR

SEQ ID NO: 10600 - protein, 215 aa, Homo sapiens
  Payload ID: 2118;
  Gene Symbol: CABP7;
  Gene Name: calcium binding prt 7;
  Uniprot ID:  Q86V35;
  ENSP ID: ENSP00000216144
MPFHPVTAALMYRGIYTVPNLLSEQRPVDIPEDELEEIREAFKVFDRDGNGFISKQELGTAMRSLGYMPNEVELEVIIQRLDMDGDGQVDFEEFVTLLGPKLSTSGIPEKFHGTDFDTVFWKCDMQKLTVDELKRLLYDTFCEHLSMKDIENIIMTEEESHLGTAEECPVDVETCSNQQIRQTCVRKSLICAFAIAFIISVMLIAANQVLRSGMK

SEQ ID NO: 10601 - protein, 281 aa, Homo sapiens
  Payload ID: 2119;
  Gene Symbol: CABYR;
  Gene Name: calcium binding tyr-(Y)-phosphorylation regulated;
  Uniprot ID:  O75952;
  ENSP ID: ENSP00000317095
MEKSTDTDEDNVTRTEYSDKTTQFPSVYAVPGTEQTEAVGGLSSKPATPKTTTPPSSPPPTAVSPEFAYVPADPAQLAAQMLAMATSERGQPPPCSNMWTLYCLTDKNQQGHPSPPPAPGPFPQATLYLPNPKDPQFQQHPPKVTFPTYVMGDTKKTSAPPFILVGSNVQEAQGWKPLPGHAVVSQSDVLRYVAMQVPIAVPADEKYQKHTLSPQNANPPSGQDVPRPKSPVFLSVAFPVEDVAKKSSGSGDKCAPFGSYGIAGEVTVTTAHKRRKAETEN

SEQ ID NO: 10602 - protein, 475 aa, Homo sapiens
  Payload ID: 2119;
  Gene Symbol: CABYR;
  Gene Name: calcium binding tyr-(Y)-phosphorylation regulated;
  Uniprot ID:  O75952;
  ENSP ID: ENSP00000382404
MISSKPRLVVPYGLKTLLEGISRAVLKTNPSNINQFAAAYFQELTMYRVEKWSEGTTPQKKLECLKEPGKTSVESKVPTQMEKSTDTDEDNVTRTEYSDKTTQFPSVYAVPGTEQTEAVGGLSSKPATPKTTTPPSSPPPTAVSPEFAYVPADPAQLAAQMLGKVSSIHSDQSDVLMVDVATSMPVVIKEVPSSEAAEDVMVAAPLVCSGKVLEVQVVNQTSVHVDLGSQPKENEAEPSTASSVPLQDEQEPPAYDQAPEVTLQADIEVMSTVHISSVYNDVPVTEGVVYIEQLPEQIVIPFTDQVACLKENEQSKENEQSPRVSPKSVVEKTTSGMSKKSVESVKLAQLEENAKYSSVYMEAEATALLSDTSLKGQPEVPAQLLDAEGAIKIGSEKSLHLEVEITSIVSDNTGQEESGENSVPQEMEGKPVLSGEAAEAVHSGTSVKSSSGPFPPAPEGLTAPEIEPEGESTAE

SEQ ID NO: 10603 - protein, 379 aa, Homo sapiens
  Payload ID: 2119;
  Gene Symbol: CABYR;
  Gene Name: calcium binding tyr-(Y)-phosphorylation regulated;
  Uniprot ID:  O75952;
  ENSP ID: ENSP00000382419
MISSKPRLVVPYGLKTLLEGISRAVLKTNPSNINQFAAAYFQELTMYRGNTTMDIKDLVKQFHQIKVEKWSEGTTPQKKLECLKEPGKTSVESKVPTQMEKSTDTDEDNVTRTEYSDKTTQFPSVYAVPGTEQTEAVGGLSSKPATPKTTTPPSSPPPTAVSPEFAYVPADPAQLAAQMLAMATSERGQPPPCSNMWTLYCLTDKNQQGHPSPPPAPGPFPQATLYLPNPKDPQFQQHPPKVTFPTYVMGDTKKTSAPPFILVGSNVQEAQGWKPLPGHAVVSQSDVLRYVAMQVPIAVPADEKYQKHTLSPQNANPPSGQDVPRPKSPVFLSVAFPVEDVAKKSSGSGDKCAPFGSYGIAGEVTVTTAHKRRKAETEN

SEQ ID NO: 10604 - protein, 379 aa, Homo sapiens; identical to SEQ ID NO: 10603
  Payload ID: 2119;
  Gene Symbol: CABYR;
  Gene Name: calcium binding tyr-(Y)-phosphorylation regulated;
  Uniprot ID:  O75952;
  ENSP ID: ENSP00000382421

SEQ ID NO: 10605 - protein, 221 aa, Homo sapiens
  Payload ID: 2119;
  Gene Symbol: CABYR;
  Gene Name: calcium binding tyr-(Y)-phosphorylation regulated;
  Uniprot ID:  O75952;
  ENSP ID: ENSP00000399973
MISSKPRLVVPYGLKTLLEGISRAVLKTNPSNINQFAAAYFQELTMYRGNTTMDIKDLVKQFHQIKVEKWSEGTTPQKKLECLKEPGKTSVESKVPTQMEKSTDTDEDNVTRTEYSDKTTQFPSVYAVPGTEQTEAVGGLSSKPATPKTTTPPSSPPPTAVSPEFAYVPADPAQLAAQMLEDVAKKSSGSGDKCAPFGSYGIAGEVTVTTAHKRRKAETEN

SEQ ID NO: 10606 - protein, 493 aa, Homo sapiens
  Payload ID: 2119;
  Gene Symbol: CABYR;
  Gene Name: calcium binding tyr-(Y)-phosphorylation regulated;
  Uniprot ID:  O75952;
  ENSP ID: ENSP00000431142
MISSKPRLVVPYGLKTLLEGISRAVLKTNPSNINQFAAAYFQELTMYRGNTTMDIKDLVKQFHQIKVEKWSEGTTPQKKLECLKEPGKTSVESKVPTQMEKSTDTDEDNVTRTEYSDKTTQFPSVYAVPGTEQTEAVGGLSSKPATPKTTTPPSSPPPTAVSPEFAYVPADPAQLAAQMLGKVSSIHSDQSDVLMVDVATSMPVVIKEVPSSEAAEDVMVAAPLVCSGKVLEVQVVNQTSVHVDLGSQPKENEAEPSTASSVPLQDEQEPPAYDQAPEVTLQADIEVMSTVHISSVYNDVPVTEGVVYIEQLPEQIVIPFTDQVACLKENEQSKENEQSPRVSPKSVVEKTTSGMSKKSVESVKLAQLEENAKYSSVYMEAEATALLSDTSLKGQPEVPAQLLDAEGAIKIGSEKSLHLEVEITSIVSDNTGQEESGENSVPQEMEGKPVLSGEAAEAVHSGTSVKSSSGPFPPAPEGLTAPEIEPEGESTAE

SEQ ID NO: 10607 - protein, 493 aa, Homo sapiens; identical to SEQ ID NO: 10606
  Payload ID: 2119;
  Gene Symbol: CABYR;
  Gene Name: calcium binding tyr-(Y)-phosphorylation regulated;
  Uniprot ID:  O75952;
  ENSP ID: ENSP00000432870

SEQ ID NO: 10608 - protein, 73 aa, Homo sapiens
  Payload ID: 2119;
  Gene Symbol: CABYR;
  Gene Name: calcium binding tyr-(Y)-phosphorylation regulated;
  ENSP ID: ENSP00000462009
MISSKPRLVVPYGLKTLLEGISRAVLKTNPSNINQFAAAYFQELTMYRGNTTMDIKDLVKQFHQIKDGATNVC

SEQ ID NO: 10609 - protein, 73 aa, Homo sapiens; identical to SEQ ID NO: 10608
  Payload ID: 2119;
  Gene Symbol: CABYR;
  Gene Name: calcium binding tyr-(Y)-phosphorylation regulated;
  ENSP ID: ENSP00000462474

SEQ ID NO: 10610 - protein, 84 aa, Homo sapiens
  Payload ID: 2119;
  Gene Symbol: CABYR;
  Gene Name: calcium binding tyr-(Y)-phosphorylation regulated;
  ENSP ID: ENSP00000462748
MISSKPRLVVPYGLKTLLEGISRAVLKTNPSNINQFAAAYFQELTMYRGNTTMDIKDLVKQFHQIKVEKWSEGTTPQKKLECLK

SEQ ID NO: 10611 - protein, 196 aa, Homo sapiens
  Payload ID: 2119;
  Gene Symbol: CABYR;
  Gene Name: calcium binding tyr-(Y)-phosphorylation regulated;
  ENSP ID: ENSP00000462811
MISSKPRLVVPYGLKTLLEGISRAVLKTNPSNINQFAAAYFQELTMYRVEKWSEGTTPQKKLECLKEPGKTSVESKVPTQMEKSTDTDEDNVTRTEYSDKTTQFPSVYAVPGTEQTEAVGGLSSKPATPKTTTPPSSPPPTAVSPEFAYVPADPAQLAAQMLAMATSERGQPPPCSNMWTLYCLTDKNQQGHPSPP

SEQ ID NO: 10612 - protein, 293 aa, Homo sapiens
  Payload ID: 2119;
  Gene Symbol: CABYR;
  Gene Name: calcium binding tyr-(Y)-phosphorylation regulated;
  ENSP ID: ENSP00000462947
  MOD_RES (1)..(1): Any amino acid
XMPVVIKEVPSSEAAEDVMVAAPLVCSGKVLEVQVVNQTSVHVDLGSQPKENEAEPSTASSVPLQDEQEPPAYDQAPEVTLQADIEVMSTVHISSVYNDVPVTEGVVYIEQLPEQIVIPFTDQVACLKENEQSKENEQSPRVSPKSVVEKTTSGMSKKSVESVKLAQLEENAKYSSVYMEAEATALLSDTSLKGQPEVPAQLLDAEGAIKIGSEKSLHLEVEITSIVSDNTGQEESGENSVPQEMEGKPVLSGEAAEAVHSGTSVKSSSGPFPPAPEGLTAPEIEPEGESTAE

SEQ ID NO: 10613 - protein, 46 aa, Homo sapiens
  Payload ID: 2119;
  Gene Symbol: CABYR;
  Gene Name: calcium binding tyr-(Y)-phosphorylation regulated;
  ENSP ID: ENSP00000463737
MEKSTDTDEDNVTRTEYSDKTTQFPSVYAVPGTEQTEAVGGLSSKP

SEQ ID NO: 10614 - protein, 36 aa, Homo sapiens
  Payload ID: 2119;
  Gene Symbol: CABYR;
  Gene Name: calcium binding tyr-(Y)-phosphorylation regulated;
  ENSP ID: ENSP00000463781
MEKSTDTDEDNVTRTEYSDKTTQFPSVYAVPGTEQT

SEQ ID NO: 10615 - protein, 73 aa, Homo sapiens; identical to SEQ ID NO: 10608
  Payload ID: 2119;
  Gene Symbol: CABYR;
  Gene Name: calcium binding tyr-(Y)-phosphorylation regulated;
  ENSP ID: ENSP00000464595

SEQ ID NO: 10616 - protein, 493 aa, Homo sapiens; identical to SEQ ID NO: 10606
  Payload ID: 2119;
  Gene Symbol: CABYR;
  Gene Name: calcium binding tyr-(Y)-phosphorylation regulated;
  Uniprot ID:  O75952;
  ENSP ID: ENSP00000483621

SEQ ID NO: 10617 - protein, 395 aa, Homo sapiens
  Payload ID: 2119;
  Gene Symbol: CABYR;
  Gene Name: calcium binding tyr-(Y)-phosphorylation regulated;
  ENSP ID: ENSP00000486801
MEKSTDTDEDNVTRTEYSDKTTQFPSVYAVPGTEQTEAVGGLSSKPATPKTTTPPSSPPPTAVSPEFAYVPADPAQLAAQMLGKVSSIHSDQSDVLMVDVATSMPVVIKEVPSSEAAEDVMVAAPLVCSGKVLEVQVVNQTSVHVDLGSQPKENEAEPSTASSVPLQDEQEPPAYDQAPEVTLQADIEVMSTVHISSVYNDVPVTEGVVYIEQLPEQIVIPFTDQVACLKENEQSKENEQSPRVSPKSVVEKTTSGMSKKSVESVKLAQLEENAKYSSVYMEAEATALLSDTSLKGQPEVPAQLLDAEGAIKIGSEKSLHLEVEITSIVSDNTGQEESGENSVPQEMEGKPVLSGEAAEAVHSGTSVKSSSGPFPPAPEGLTAPEIEPEGESTAE

SEQ ID NO: 10618 - protein, 130 aa, Homo sapiens
  Payload ID: 2120;
  Gene Symbol: CACFD1;
  Gene Name: calcium channel flower domain containing 1;
  Uniprot ID:  Q9UGQ2;
  ENSP ID: ENSP00000291722
MSSSGGAPGASASSAPPAQEEGMTWWYRWLCRLSGVLGAVSCAISGLFNCITIHPLNIAAGVWMMMAVVPIVISLTLTTLLGNAIAFATGVLYGLSALGKKGDAISYARIQQQRQQADEEKLAETLEGEL

SEQ ID NO: 10619 - protein, 172 aa, Homo sapiens
  Payload ID: 2120;
  Gene Symbol: CACFD1;
  Gene Name: calcium channel flower domain containing 1;
  Uniprot ID:  Q9UGQ2;
  ENSP ID: ENSP00000317121
MSSSGGAPGASASSAPPAQEEGMTWWYRWLCRLSGVLGAVSCAISGLFNCITIHPLNIAAGVWMIMNAFILLLCEAPFCCQFIEFANTVAEKVDRLRSWQKAVFYCGMAVVPIVISLTLTTLLGNAIAFATGVLYGLSALGKKGDAISYARIQQQRQQADEEKLAETLEGEL

SEQ ID NO: 10620 - protein, 114 aa, Homo sapiens
  Payload ID: 2120;
  Gene Symbol: CACFD1;
  Gene Name: calcium channel flower domain containing 1;
  ENSP ID: ENSP00000414495
MLTAAGSTAELSACAISGLFNCITIHPLNIAAGVWMIMNAFILLLCEAPFCCQFIEFANTVAEKVDRLRSWQKAVFYCGMAVVPIVISLTLTTLLGNAIAFATGVLYGLSALGK

SEQ ID NO: 10621 - protein, 233 aa, Homo sapiens
  Payload ID: 2120;
  Gene Symbol: CACFD1;
  Gene Name: calcium channel flower domain containing 1;
  Uniprot ID:  Q9UGQ2;
  ENSP ID: ENSP00000440832
MSSSGGAPGASASSAPPAQEEGMTWWYRWLCRLSGVLGAVSCAISGLFNCITIHPLNIAAGVWMIMNAFILLLCEAPFCCQFIEFANTVAEKVDRLRSWQKAVFYCGMAVVPIVISLTLTTLLGNAIAFATGVLYGLSALGKKAQTEAGSFAAQHPREPGPFSEGTRQAFATPAVVSGEIRMPAGAMRSPMPGSSSRGSRRMRRSSRRPWRGSCEGLGAPPSLSPLLALCGSK

SEQ ID NO: 10622 - protein, 191 aa, Homo sapiens
  Payload ID: 2120;
  Gene Symbol: CACFD1;
  Gene Name: calcium channel flower domain containing 1;
  Uniprot ID:  Q9UGQ2;
  ENSP ID: ENSP00000444328
MSSSGGAPGASASSAPPAQEEGMTWWYRWLCRLSGVLGAVSCAISGLFNCITIHPLNIAAGVWMMMAVVPIVISLTLTTLLGNAIAFATGVLYGLSALGKKAQTEAGSFAAQHPREPGPFSEGTRQAFATPAVVSGEIRMPAGAMRSPMPGSSSRGSRRMRRSSRRPWRGSCEGLGAPPSLSPLLALCGSK

SEQ ID NO: 10623 - protein, 233 aa, Homo sapiens; identical to SEQ ID NO: 10621
  Payload ID: 2120;
  Gene Symbol: CACFD1;
  Gene Name: Calcium channel flower domain containing 1;
  ENSP ID: ENSP00000485922

SEQ ID NO: 10624 - protein, 130 aa, Homo sapiens; identical to SEQ ID NO: 10618
  Payload ID: 2120;
  Gene Symbol: CACFD1;
  Gene Name: Calcium channel flower domain containing 1;
  ENSP ID: ENSP00000486098

SEQ ID NO: 10625 - protein, 172 aa, Homo sapiens; identical to SEQ ID NO: 10619
  Payload ID: 2120;
  Gene Symbol: CACFD1;
  Gene Name: Calcium channel flower domain containing 1;
  ENSP ID: ENSP00000486696

SEQ ID NO: 10626 - protein, 191 aa, Homo sapiens; identical to SEQ ID NO: 10622
  Payload ID: 2120;
  Gene Symbol: CACFD1;
  Gene Name: Calcium channel flower domain containing 1;
  ENSP ID: ENSP00000486812

SEQ ID NO: 10627 - protein, 114 aa, Homo sapiens; identical to SEQ ID NO: 10620
  Payload ID: 2120;
  Gene Symbol: CACFD1;
  Gene Name: Calcium channel flower domain containing 1;
  ENSP ID: ENSP00000486907

SEQ ID NO: 10628 - protein, 1103 aa, Homo sapiens
  Payload ID: 2121;
  Gene Symbol: CACNA2D1;
  Gene Name: calcium channel, voltage-dependent, alpha 2/delta subunit 1;
  Uniprot ID:  P54289;
  ENSP ID: ENSP00000348589
MAAGCLLALTLTLFQSLLIGPSSEEPFPSAVTIKSWVDKMQEDLVTLAKTASGVNQLVDIYEKYQDLYTVEPNNARQLVEIAARDIEKLLSNRSKALVRLALEAEKVQAAHQWREDFASNEVVYYNAKDDLDPEKNDSEPGSQRIKPVFIEDANFGRQISYQHAAVHIPTDIYEGSTIVLNELNWTSALDEVFKKNREEDPSLLWQVFGSATGLARYYPASPWVDNSRTPNKIDLYDVRRRPWYIQGAASPKDMLILVDVSGSVSGLTLKLIRTSVSEMLETLSDDDFVNVASFNSNAQDVSCFQHLVQANVRNKKVLKDAVNNITAKGITDYKKGFSFAFEQLLNYNVSRANCNKIIMLFTDGGEERAQEIFNKYNKDKKVRVFTFSVGQHNYDRGPIQWMACENKGYYYEIPSIGAIRINTQEYLDVLGRPMVLAGDKAKQVQWTNVYLDALELGLVITGTLPVFNITGQFENKTNLKNQLILGVMGVDVSLEDIKRLTPRFTLCPNGYYFAIDPNGYVLLHPNLQPKPIGVGIPTINLRKRRPNIQNPKSQEPVTLDFLDAELENDIKVEIRNKMIDGESGEKTFRTLVKSQDERYIDKGNRTYTWTPVNGTDYSLALVLPTYSFYYIKAKLEETITQARYSETLKPDNFEESGYTFIAPRDYCNDLKISDNNTEFLLNFNEFIDRKTPNNPSCNADLINRVLLDAGFTNELVQNYWSKQKNIKGVKARFVVTDGGITRVYPKEAGENWQENPETYEDSFYKRSLDNDNYVFTAPYFNKSGPGAYESGIMVSKAVEIYIQGKLLKPAVVGIKIDVNSWIENFTKTSIRDPCAGPVCDCKRNSDVMDCVILDDGGFLLMANHDDYTNQIGRFFGEIDPSLMRHLVNISVYAFNKSYDYQSVCEPGAAPKQGAGHRSAYVPSVADILQIGWWATAAAWSILQQFLLSLTFPRLLEAVEMEDDDFTASLSKQSCITEQTQYFFDNDSKSFSGVLDCGNCSRIFHGEKLMNTNLIFIMVESKGTCPCDTRLLIQAEQTSDGPNPCDMVKQPRYRKGPDVCFDNNVLEDYTDCGGVSGLNPSLWYIIGIQFLLLWLVSGSTHRLL

SEQ ID NO: 10629 - protein, 1091 aa, Homo sapiens
  Payload ID: 2121;
  Gene Symbol: CACNA2D1;
  Gene Name: calcium channel, voltage-dependent, alpha 2/delta subunit 1;
  Uniprot ID:  P54289;
  ENSP ID: ENSP00000349320
MAAGCLLALTLTLFQSLLIGPSSEEPFPSAVTIKSWVDKMQEDLVTLAKTASGVNQLVDIYEKYQDLYTVEPNNARQLVEIAARDIEKLLSNRSKALVRLALEAEKVQAAHQWREDFASNEVVYYNAKDDLDPEKNDSEPGSQRIKPVFIEDANFGRQISYQHAAVHIPTDIYEGSTIVLNELNWTSALDEVFKKNREEDPSLLWQVFGSATGLARYYPASPWVDNSRTPNKIDLYDVRRRPWYIQGAASPKDMLILVDVSGSVSGLTLKLIRTSVSEMLETLSDDDFVNVASFNSNAQDVSCFQHLVQANVRNKKVLKDAVNNITAKGITDYKKGFSFAFEQLLNYNVSRANCNKIIMLFTDGGEERAQEIFNKYNKDKKVRVFTFSVGQHNYDRGPIQWMACENKGYYYEIPSIGAIRINTQEYLDVLGRPMVLAGDKAKQVQWTNVYLDALELGLVITGTLPVFNITGQFENKTNLKNQLILGVMGVDVSLEDIKRLTPRFTLCPNGYYFAIDPNGYVLLHPNLQPKNPKSQEPVTLDFLDAELENDIKVEIRNKMIDGESGEKTFRTLVKSQDERYIDKGNRTYTWTPVNGTDYSLALVLPTYSFYYIKAKLEETITQARSKKGKMKDSETLKPDNFEESGYTFIAPRDYCNDLKISDNNTEFLLNFNEFIDRKTPNNPSCNADLINRVLLDAGFTNELVQNYWSKQKNIKGVKARFVVTDGGITRVYPKEAGENWQENPETYEDSFYKRSLDNDNYVFTAPYFNKSGPGAYESGIMVSKAVEIYIQGKLLKPAVVGIKIDVNSWIENFTKTSIRDPCAGPVCDCKRNSDVMDCVILDDGGFLLMANHDDYTNQIGRFFGEIDPSLMRHLVNISVYAFNKSYDYQSVCEPGAAPKQGAGHRSAYVPSVADILQIGWWATAAAWSILQQFLLSLTFPRLLEAVEMEDDDFTASLSKQSCITEQTQYFFDNDSKSFSGVLDCGNCSRIFHGEKLMNTNLIFIMVESKGTCPCDTRLLIQAEQTSDGPNPCDMVKQPRYRKGPDVCFDNNVLEDYTDCGGVSGLNPSLWYIIGIQFLLLWLVSGSTHRLL

SEQ ID NO: 10630 - protein, 309 aa, Homo sapiens
  Payload ID: 2121;
  Gene Symbol: CACNA2D1;
  Gene Name: calcium channel, voltage-dependent, alpha 2/delta subunit 1;
  ENSP ID: ENSP00000405395
MAAGCLLALTLTLFQSLLIGPSSEEPFPSAVTIKSWVDKMQEDLVTLAKTASGVNQLVDIYEKYQDLYTVEPNNARQLVEIAARDIEKLLSNRSKALVRLALEAEKVQAAHQWREDFASNEVVYYNAKDDLDPEKNDSEPGSQRIKPVFIEDANFGRQISYQHAAVHIPTDIYEGSTIVLNELNWTSALDEVFKKNREEDPSLLWQVFGSATGLARYYPASPWVDNSRTPNKIDLYDVRRRPWYIQGAASPKDMLILVDVSGSVSGLTLKLIRTSVSEMLETLSDDDFVNVASDSKEISPSPEEIFNAE

SEQ ID NO: 10631 - protein, 280 aa, Homo sapiens
  Payload ID: 2121;
  Gene Symbol: CACNA2D1;
  Gene Name: calcium channel, voltage-dependent, alpha 2/delta subunit 1;
  ENSP ID: ENSP00000409374
  MOD_RES (1)..(1): Any amino acid
XKRLTPRFTLCPNGYYFAIDPNGYVLLHPNLQPKPIGVGIPTINLRKRRPNIQEPVTLDFLDAELENDIKVEIRNKMIDGESGEKTFRTLVKSQDERYIDKGNRTYTWTPVNGTDYSLALVLPTYSFYYIKAKLEETITQARYSETLKPDNFEESGYTFIAPRDYCNDLKISDNNTEFLLNFNEFIDRKTPNNPSCNADLINRVLLDAGFTNELVQNYWSKQKNIKGVKARFVVTDGGITRVYPKEAGENWQENPETYEDSFYKRSLDNDNYVFTAPYFN

SEQ ID NO: 10632 - protein, 1145 aa, Homo sapiens
  Payload ID: 2122;
  Gene Symbol: CACNA2D2;
  Gene Name: calcium channel, voltage-dependent, alpha 2/delta subunit 2;
  Uniprot ID:  Q9NY47;
  ENSP ID: ENSP00000266039
MAVPARTCGASRPGPARTARPWPGCGPHPGPGTRRPTSGPPRPLWLLLPLLPLLAAPGASAYSFPQQHTMQHWARRLEQEVDGVMRIFGGVQQLREIYKDNRNLFEVQENEPQKLVEKVAGDIESLLDRKVQALKRLADAAENFQKAHRWQDNIKEEDIVYYDAKADAELDDPESEDVERGSKASTLRLDFIEDPNFKNKVNYSYAAVQIPTDIYKGSTVILNELNWTEALENVFMENRRQDPTLLWQVFGSATGVTRYYPATPWRAPKKIDLYDVRRRPWYIQGASSPKDMVIIVDVSGSVSGLTLKLMKTSVCEMLDTLSDDDYVNVASFNEKAQPVSCFTHLVQANVRNKKVFKEAVQGMVAKGTTGYKAGFEYAFDQLQNSNITRANCNKMIMMFTDGGEDRVQDVFEKYNWPNRTVRVFTFSVGQHNYDVTPLQWMACANKGYYFEIPSIGAIRINTQEYLDVLGRPMVLAGKEAKQVQWTNVYEDALGLGLVVTGTLPVFNLTQDGPGEKKNQLILGVMGIDVALNDIKRLTPNYTLGANGYVFAIDLNGYVLLHPNLKPQTTNFREPVTLDFLDAELEDENKEEIRRSMIDGNKGHKQIRTLVKSLDERYIDEVTRNYTWVPIRSTNYSLGLVLPPYSTFYLQANLSDQILQVKYFEFLLPSSFESEGHVFIAPREYCKDLNASDNNTEFLKNFIELMEKVTPDSKQCNNFLLHNLILDTGITQQLVERVWRDQDLNTYSLLAVFAATDGGITRVFPNKAAEDWTENPEPFNASFYRRSLDNHGYVFKPPHQDALLRPLELENDTVGILVSTAVELSLGRRTLRPAVVGVKLDLEAWAEKFKVLASNRTHQDQPQKCGPNSHCEMDCEVNNEDLLCVLIDDGGFLVLSNQNHQWDQVGRFFSEVDANLMLALYNNSFYTRKESYDYQAACAPQPPGNLGAAPRGVFVPTVADFLNLAWWTSAAAWSLFQQLLYGLIYHSWFQADPAEAEGSPETRESSCVMKQTQYYFGSVNASYNAIIDCGNCSRLFHAQRLTNTNLLFVVAEKPLCSQCEAGRLLQKETHCPADGPEQCELVQRPRYRRGPHICFDYNATEDTSDCGRGASFPPSLGVLVSLQLLLLLGLPPRPQPQVLVHASRRL

SEQ ID NO: 10633 - protein, 1076 aa, Homo sapiens
  Payload ID: 2122;
  Gene Symbol: CACNA2D2;
  Gene Name: calcium channel, voltage-dependent, alpha 2/delta subunit 2;
  Uniprot ID:  Q9NY47;
  ENSP ID: ENSP00000354228
MQHWARRLEQEVDGVMRIFGGVQQLREIYKDNRNLFEVQENEPQKLVEKVAGDIESLLDRKVQALKRLADAAENFQKAHRWQDNIKEEDIVYYDAKADAELDDPESEDVERGSKASTLRLDFIEDPNFKNKVNYSYAAVQIPTDIYKGSTVILNELNWTEALENVFMENRRQDPTLLWQVFGSATGVTRYYPATPWRAPKKIDLYDVRRRPWYIQGASSPKDMVIIVDVSGSVSGLTLKLMKTSVCEMLDTLSDDDYVNVASFNEKAQPVSCFTHLVQANVRNKKVFKEAVQGMVAKGTTGYKAGFEYAFDQLQNSNITRANCNKMIMMFTDGGEDRVQDVFEKYNWPNRTVRVFTFSVGQHNYDVTPLQWMACANKGYYFEIPSIGAIRINTQEYLDVLGRPMVLAGKEAKQVQWTNVYEDALGLGLVVTGTLPVFNLTQDGPGEKKNQLILGVMGIDVALNDIKRLTPNYTLGANGYVFAIDLNGYVLLHPNLKPQTTNFREPVTLDFLDAELEDENKEEIRRSMIDGNKGHKQIRTLVKSLDERYIDEVTRNYTWVPIRSTNYSLGLVLPPYSTFYLQANLSDQILQVKYFEFLLPSSFESEGHVFIAPREYCKDLNASDNNTEFLKNFIELMEKVTPDSKQCNNFLLHNLILDTGITQQLVERVWRDQDLNTYSLLAVFAATDGGITRVFPNKAAEDWTENPEPFNASFYRRSLDNHGYVFKPPHQDALLRPLELENDTVGILVSTAVELSLGRRTLRPAVVGVKLDLEAWAEKFKVLASNRTHQDQPQKCGPNSHCEMDCEVNNEDLLCVLIDDGGFLVLSNQNHQWDQVGRFFSEVDANLMLALYNNSFYTRKESYDYQAACAPQPPGNLGAAPRGVFVPTVADFLNLAWWTSAAAWSLFQQLLYGLIYHSWFQADPAEAEGSPETRESSCVMKQTQYYFGSVNASYNAIIDCGNCSRLFHAQRLTNTNLLFVVAEKPLCSQCEAGRLLQKETHCPADGPEQCELVQRPRYRRGPHICFDYNATEDTSDCGRGASFPPSLGVLVSLQLLLLLGLPPRPQPQVLVHASRRL

SEQ ID NO: 10634 - protein, 1143 aa, Homo sapiens
  Payload ID: 2122;
  Gene Symbol: CACNA2D2;
  Gene Name: calcium channel, voltage-dependent, alpha 2/delta subunit 2;
  Uniprot ID:  Q9NY47;
  ENSP ID: ENSP00000390329
MAVPARTCGASRPGPARTARPWPGCGPHPGPGTRRPTSGPPRPLWLLLPLLPLLAAPGASAYSFPQQHTMQHWARRLEQEVDGVMRIFGGVQQLREIYKDNRNLFEVQENEPQKLVEKVAGDIESLLDRKVQALKRLADAAENFQKAHRWQDNIKEEDIVYYDAKADAELDDPESEDVERGSKASTLRLDFIEDPNFKNKVNYSYAAVQIPTDIYKGSTVILNELNWTEALENVFMENRRQDPTLLWQVFGSATGVTRYYPATPWRAPKKIDLYDVRRRPWYIQGASSPKDMVIIVDVSGSVSGLTLKLMKTSVCEMLDTLSDDDYVNVASFNEKAQPVSCFTHLVQANVRNKKVFKEAVQGMVAKGTTGYKAGFEYAFDQLQNSNITRANCNKMIMMFTDGGEDRVQDVFEKYNWPNRTVRVFTFSVGQHNYDVTPLQWMACANKGYYFEIPSIGAIRINTQEYLDVLGRPMVLAGKEAKQVQWTNVYEDALGLGLVVTGTLPVFNLTQDGPGEKKNQLILGVMGIDVALNDIKRLTPNYTLGANGYVFAIDLNGYVLLHPNLKPQTTNFREPVTLDFLDAELEDENKEEIRRSMIDGNKGHKQIRTLVKSLDERYIDEVTRNYTWVPIRSTNYSLGLVLPPYSTFYLQANLSDQILQVKYFEFLLPSSFESEGHVFIAPREYCKDLNASDNNTEFLKNFIELMEKVTPDSKQCNNFLLHNLILDTGITQQLVERVWRDQDLNTYSLLAVFAATDGGITRVFPNKAAEDWTENPEPFNASFYRRSLDNHGYVFKPPHQDALLRPLELENDTVGILVSTAVELSLGRRTLRPAVVGVKLDLEAWAEKFKVLASNRTHQDQPQKCGPNSHCEMDCEVNNEDLLCVLIDDGGFLVLSNQNHQWDQVGRFFSEVDANLMLALYNNSFYTRKESYDYQAACAPQPPGNLGAAPRGVFVPTVADFLNLAWWTSAAAWSLFQQLLYGLIYHSWFQADPAEAEGSPETRESSCVMKQTQYYFGSVNASYNAIIDCGNCSRLFHAQRLTNTNLLFVVAEKPLCSQCEAGRLLQKETHSDGPEQCELVQRPRYRRGPHICFDYNATEDTSDCGRGASFPPSLGVLVSLQLLLLLGLPPRPQPQVLVHASRRL

SEQ ID NO: 10635 - protein, 1144 aa, Homo sapiens
  Payload ID: 2122;
  Gene Symbol: CACNA2D2;
  Gene Name: calcium channel, voltage-dependent, alpha 2/delta subunit 2;
  ENSP ID: ENSP00000404631
MAVPARTCGASRPGPARTARPWPGCGPHPGPGTRRPTSGPPRPLWLLLPLLPLLAAPGASAYSFPQQHTMQHWARRLEQEVDGVMRIFGGVQQLREIYKDNRNLFEVQENEPQKLVEKVAGDIESLLDRKVQALKRLADAAENFQKAHRWQDNIKEEDIVYYDAKADAELDDPESEDVERGSKASTLRLDFIEDPNFKNKVNYSYAAVQIPTDIYKGSTVILNELNWTEALENVFMENRRQDPTLLWQVFGSATGVTRYYPATPWRAPKKIDLYDVRRRPWYIQGASSPKDMVIIVDVSGSVSGLTLKLMKTSVCEMLDTLSDDDYVNVASFNEKAQPVSCFTHLVQANVRNKKVFKEAVQGMVAKGTTGYKAGFEYAFDQLQNSNITRANCNKMIMMFTDGGEDRVQDVFEKYNWPNRTVRVFTFSVGQHNYDVTPLQWMACANKGYYFEIPSIGAIRINTQEYLDVLGRPMVLAGKEAKQVQWTNVYEDALGLGLVVTGTLPVFNLTQDGPGEKKNQLILGVMGIDVALNDIKRLTPNYTLGANGYVFAIDLNGYVLLHPNLKPQTTNFREPVTLDFLDAELEDENKEEIRRSMIDGNKGHKQIRTLVKSLDERYIDEVTRNYTWVPIRSTNYSLGLVLPPYSTFYLQANLSDQILQVKYFEFLLPSSFESEGHVFIAPREYCKDLNASDNNTEFLKNFIELMEKVTPDSKQCNNFLLHNLILDTGITQQLVERVWRDQDLNTYSLLAVFAATDGGITRVFPNKAAEDWTENPEPFNASFYRRSLDNHGYVFKPPHQDALLRPLELENDTVGILVSTAVELSLGRRTLRPAVVGVKLDLEAWAEKFKVLASNRTHQDQPQKQCGPNSHCEMDCEVNNEDLLCVLIDDGGFLVLSNQNHQWDQVGRFFSEVDANLMLALYNNSFYTRKESYDYQAACAPQPPGNLGAAPRGVFVPTVADFLNLAWWTSAAAWSLFQQLLYGLIYHSWFQADPAEAEGSPETRESSCVMKQTQYYFGSVNASYNAIIDCGNCSRLFHAQRLTNTNLLFVVAEKPLCSQCEAGRLLQKETHSDGPEQCELVQRPRYRRGPHICFDYNATEDTSDCGRGASFPPSLGVLVSLQLLLLLGLPPRPQPQVLVHASRRL

SEQ ID NO: 10636 - protein, 1153 aa, Homo sapiens
  Payload ID: 2122;
  Gene Symbol: CACNA2D2;
  Gene Name: calcium channel, voltage-dependent, alpha 2/delta subunit 2;
  ENSP ID: ENSP00000407393
MAVPARTCGASRPGPARTARPWPGCGPHPGPGTRRPTSGPPRPLWLLLPLLPLLAAPGASAYSFPQQHTMQHWARRLEQEVDGVMRIFGGVQQLREIYKDNRNLFEVQENEPQKLVEKVAGDIESLLDRKVQALKRLADAAENFQKAHRWQDNIKEEDIVYYDAKADAELDDPESEDVERGSKASTLRLDFIEDPNFKNKVNYSYAAVQIPTDIYKGSTVILNELNWTEALENVFMENRRQDPTLLWQVFGSATGVTRYYPATPWRAPKKIDLYDVRRRPWYIQGASSPKDMVIIVDVSGSVSGLTLKLMKTSVCEMLDTLSDDDYVNVASFNEKAQPVSCFTHLVQANVRNKKVFKEAVQGMVAKGTTGYKAGFEYAFDQLQNSNITRANCNKMIMMFTDGGEDRVQDVFEKYNWPNRTVRVFTFSVGQHNYDVTPLQWMACANKGYYFEIPSIGAIRINTQEYLDVLGRPMVLAGKEAKQVQWTNVYEDALGLGLVVTGTLPVFNLTQDGPGEKKNQLILGVMGIDVALNDIKRLTPNYTLGANGYVFAIDLNGYVLLHPNLKPQTTNFREPVTLDFLDAELEDENKEEIRRSMIDGNKGHKQIRTLVKSLDERYIDEVTRNYTWVPIRSTNYSLGLVLPPYSTFYLQANLSDQILQVKLPISKLKDFEFLLPSSFESEGHVFIAPREYCKDLNASDNNTEFLKNFIELMEKVTPDSKQCNNFLLHNLILDTGITQQLVERVWRDQDLNTYSLLAVFAATDGGITRVFPNKAAEDWTENPEPFNASFYRRSLDNHGYVFKPPHQDALLRPLELENDTVGILVSTAVELSLGRRTLRPAVVGVKLDLEAWAEKFKVLASNRTHQDQPQKQCGPNSHCEMDCEVNNEDLLCVLIDDGGFLVLSNQNHQWDQVGRFFSEVDANLMLALYNNSFYTRKESYDYQAACAPQPPGNLGAAPRGVFVPTVADFLNLAWWTSAAAWSLFQQLLYGLIYHSWFQADPAEAEGSPETRESSCVMKQTQYYFGSVNASYNAIIDCGNCSRLFHAQRLTNTNLLFVVAEKPLCSQCEAGRLLQKETHCPADGPEQCELVQRPRYRRGPHICFDYNATEDTSDCGRGASFPPSLGVLVSLQLLLLLGLPPRPQPQVLVHASRRL

SEQ ID NO: 10637 - protein, 1150 aa, Homo sapiens
  Payload ID: 2122;
  Gene Symbol: CACNA2D2;
  Gene Name: calcium channel, voltage-dependent, alpha 2/delta subunit 2;
  Uniprot ID:  Q9NY47;
  ENSP ID: ENSP00000418081
MAVPARTCGASRPGPARTARPWPGCGPHPGPGTRRPTSGPPRPLWLLLPLLPLLAAPGASAYSFPQQHTMQHWARRLEQEVDGVMRIFGGVQQLREIYKDNRNLFEVQENEPQKLVEKVAGDIESLLDRKVQALKRLADAAENFQKAHRWQDNIKEEDIVYYDAKADAELDDPESEDVERGSKASTLRLDFIEDPNFKNKVNYSYAAVQIPTDIYKGSTVILNELNWTEALENVFMENRRQDPTLLWQVFGSATGVTRYYPATPWRAPKKIDLYDVRRRPWYIQGASSPKDMVIIVDVSGSVSGLTLKLMKTSVCEMLDTLSDDDYVNVASFNEKAQPVSCFTHLVQANVRNKKVFKEAVQGMVAKGTTGYKAGFEYAFDQLQNSNITRANCNKMIMMFTDGGEDRVQDVFEKYNWPNRTVRVFTFSVGQHNYDVTPLQWMACANKGYYFEIPSIGAIRINTQEYLDVLGRPMVLAGKEAKQVQWTNVYEDALGLGLVVTGTLPVFNLTQDGPGEKKNQLILGVMGIDVALNDIKRLTPNYTLGANGYVFAIDLNGYVLLHPNLKPQTTNFREPVTLDFLDAELEDENKEEIRRSMIDGNKGHKQIRTLVKSLDERYIDEVTRNYTWVPIRSTNYSLGLVLPPYSTFYLQANLSDQILQVKLPISKLKDFEFLLPSSFESEGHVFIAPREYCKDLNASDNNTEFLKNFIELMEKVTPDSKQCNNFLLHNLILDTGITQQLVERVWRDQDLNTYSLLAVFAATDGGITRVFPNKAAEDWTENPEPFNASFYRRSLDNHGYVFKPPHQDALLRPLELENDTVGILVSTAVELSLGRRTLRPAVVGVKLDLEAWAEKFKVLASNRTHQDQPQKCGPNSHCEMDCEVNNEDLLCVLIDDGGFLVLSNQNHQWDQVGRFFSEVDANLMLALYNNSFYTRKESYDYQAACAPQPPGNLGAAPRGVFVPTVADFLNLAWWTSAAAWSLFQQLLYGLIYHSWFQADPAEAEGSPETRESSCVMKQTQYYFGSVNASYNAIIDCGNCSRLFHAQRLTNTNLLFVVAEKPLCSQCEAGRLLQKETHSDGPEQCELVQRPRYRRGPHICFDYNATEDTSDCGRGASFPPSLGVLVSLQLLLLLGLPPRPQPQVLVHASRRL

SEQ ID NO: 10638 - protein, 1091 aa, Homo sapiens
  Payload ID: 2123;
  Gene Symbol: CACNA2D3;
  Gene Name: calcium channel, voltage-dependent, alpha 2/delta subunit 3;
  Uniprot ID:  Q8IZS8;
  ENSP ID: ENSP00000288197
MAGPGSPRRASRGASALLAAALLYAALGDVVRSEQQIPLSVVKLWASAFGGEIKSIAAKYSGSQLLQKKYKEYEKDVAIEEIDGLQLVKKLAKNMEEMFHKKSEAVRRLVEAAEEAHLKHEFDADLQYEYFNAVLINERDKDGNFLELGKEFILAPNDHFNNLPVNISLSDVQVPTNMYNKDPAIVNGVYWSESLNKVFVDNFDRDPSLIWQYFGSAKGFFRQYPGIKWEPDENGVIAFDCRNRKWYIQAATSPKDVVILVDVSGSMKGLRLTIAKQTVSSILDTLGDDDFFNIIAYNEELHYVEPCLNGTLVQADRTNKEHFREHLDKLFAKGIGMLDIALNEAFNILSDFNHTGQGSICSQAIMLITDGAVDTYDTIFAKYNWPDRKVRIFTYLIGREAAFADNLKWMACANKGFFTQISTLADVQENVMEYLHVLSRPKVIDQEHDVVWTEAYIDSTLPQAQKLTDDQGPVLMTTVAMPVFSKQNETRSKGILLGVVGTDVPVKELLKTIPKYKLGIHGYAFAITNNGYILTHPELRLLYEEGKKRRKPNYSSVDLSEVEWEDRDDVLRNAMVNRKTGKFSMEVKKTVDKGKRVLVMTNDYYYTDIKGTPFSLGVALSRGHGKYFFRGNVTIEEGLHDLEHPDVSLADEWSYCNTDLHPEHRHLSQLEAIKLYLKGKEPLLQCDKELIQEVLFDAVVSAPIEAYWTSLALNKSENSDKGVEVAFLGTRTGLSRINLFVGAEQLTNQDFLKAGDKENIFNADHFPLWYRRAAEQIPGSFVYSIPFSTGPVNKSNVVTASTSIQLLDERKSPVVAAVGIQMKLEFFQRKFWTASRQCASLDGKCSISCDDETVNCYLIDNNGFILVSEDYTQTGDFFGEIEGAVMNKLLTMGSFKRITLYDYQAMCRANKESSDGAHGLLDPYNAFLSAVKWIMTELVLFLVEFNLCSWWHSDMTAKAQKLKQTLEPCDTEYPAFVSERTIKETTGNIACEDCSKSFVIQQIPSSNLFMVVVDSSCLCESVAPITMAPIEIRYNESLKCERLKAQKIRRRPESCHGFHPEENARECGGAPSLQAQTVLLLLPLLLMLFSR

SEQ ID NO: 10639 - protein, 1091 aa, Homo sapiens; identical to SEQ ID NO: 10638
  Payload ID: 2123;
  Gene Symbol: CACNA2D3;
  Gene Name: calcium channel, voltage-dependent, alpha 2/delta subunit 3;
  Uniprot ID:  Q8IZS8;
  ENSP ID: ENSP00000389506

SEQ ID NO: 10640 - protein, 997 aa, Homo sapiens
  Payload ID: 2123;
  Gene Symbol: CACNA2D3;
  Gene Name: calcium channel, voltage-dependent, alpha 2/delta subunit 3;
  Uniprot ID:  Q8IZS8;
  ENSP ID: ENSP00000417279
MEEMFHKKSEAVRRLVEAAEEAHLKHEFDADLQYEYFNAVLINERDKDGNFLELGKEFILAPNDHFNNLPVNISLSDVQVPTNMYNKDPAIVNGVYWSESLNKVFVDNFDRDPSLIWQYFGSAKGFFRQYPGIKWEPDENGVIAFDCRNRKWYIQAATSPKDVVILVDVSGSMKGLRLTIAKQTVSSILDTLGDDDFFNIIAYNEELHYVEPCLNGTLVQADRTNKEHFREHLDKLFAKGIGMLDIALNEAFNILSDFNHTGQGSICSQAIMLITDGAVDTYDTIFAKYNWPDRKVRIFTYLIGREAAFADNLKWMACANKGFFTQISTLADVQENVMEYLHVLSRPKVIDQEHDVVWTEAYIDSTLPQAQKLTDDQGPVLMTTVAMPVFSKQNETRSKGILLGVVGTDVPVKELLKTIPKYKLGIHGYAFAITNNGYILTHPELRLLYEEGKKRRKPNYSSVDLSEVEWEDRDDVLRNAMVNRKTGKFSMEVKKTVDKGKRVLVMTNDYYYTDIKGTPFSLGVALSRGHGKYFFRGNVTIEEGLHDLEHPDVSLADEWSYCNTDLHPEHRHLSQLEAIKLYLKGKEPLLQCDKELIQEVLFDAVVSAPIEAYWTSLALNKSENSDKGVEVAFLGTRTGLSRINLFVGAEQLTNQDFLKAGDKENIFNADHFPLWYRRAAEQIPGSFVYSIPFSTGPVNKSNVVTASTSIQLLDERKSPVVAAVGIQMKLEFFQRKFWTASRQCASLDGKCSISCDDETVNCYLIDNNGFILVSEDYTQTGDFFGEIEGAVMNKLLTMGSFKRITLYDYQAMCRANKESSDGAHGLLDPYNAFLSAVKWIMTELVLFLVEFNLCSWWHSDMTAKAQKLKQTLEPCDTEYPAFVSERTIKETTGNIACEDCSKSFVIQQIPSSNLFMVVVDSSCLCESVAPITMAPIEIRYNESLKCERLKAQKIRRRPESCHGFHPEENARECGGAPSLQAQTVLLLLPLLLMLFSR

SEQ ID NO: 10641 - protein, 525 aa, Homo sapiens
  Payload ID: 2123;
  Gene Symbol: CACNA2D3;
  Gene Name: calcium channel, voltage-dependent, alpha 2/delta subunit 3;
  ENSP ID: ENSP00000417318
MEEMFHKKSEAVRRLVEAAEEAHLKHEFDADLQYEYFNAVLINERDKDGNFLELGKEFILAPNDHFNNLPVNISLSDVQVPTNMYNKDPAIVNGVYWSESLNKVFVDNFDRDPSLIWQYFGSAKGFFRQYPGIKWEPDENGVIAFDCRNRKWYIQAATSPKDVVILVDVSGSMKGLRLTIAKQTVSSILDTLGDDDFFNIIAYNEELHYVEPCLNGTLVQADRTNKEHFREHLDKLFAKGIGMLDIALNEAFNILSDFNHTGQGSICSQAIMLITDGAVDTYDTIFAKYNWPDRKVRIFTYLIGREAAFADNLKWMACANKGFFTQISTLADVQENVMEYLHVLSRPKVIDQEHDVVWTEAYIDSTLPQAQKLTDDQGPVLMTTVAMPVFSKQNETRSKGILLGVVGTDVPVKELLKTIPKYKLGIHGYAFAITNNGYILTHPELRLLYEEGKKRRKPNYSSVDLSEVEWEDRDDVLRNAMVNRKTGKFSMEVKKTVDKGFRCGAFQRSWEIFLPRECNHRRRPA

SEQ ID NO: 10642 - protein, 46 aa, Homo sapiens
  Payload ID: 2123;
  Gene Symbol: CACNA2D3;
  Gene Name: calcium channel, voltage-dependent, alpha 2/delta subunit 3;
  ENSP ID: ENSP00000417455
MEEMFHKKSEAVRRLVEAAEEAHLKHEFDADLQTLQLSMGFIGLNL

SEQ ID NO: 10643 - protein, 126 aa, Homo sapiens
  Payload ID: 2123;
  Gene Symbol: CACNA2D3;
  Gene Name: calcium channel, voltage-dependent, alpha 2/delta subunit 3;
  ENSP ID: ENSP00000418028
MEEMFHKKSEAVRRLVEAAEEAHLKHEFDADLQYEYFNAVLINERDKDGNFLELGKEFILAPNDHFNNLPVNISLSDVQVPTNMYNKDPAIVNGVYWSESLNKVFVDNFDRDPSLIWQYFGSAKGF

SEQ ID NO: 10644 - protein, 519 aa, Homo sapiens
  Payload ID: 2123;
  Gene Symbol: CACNA2D3;
  Gene Name: calcium channel, voltage-dependent, alpha 2/delta subunit 3;
  Uniprot ID:  Q8IZS8;
  ENSP ID: ENSP00000418228
MEEMFHKKSEAVRRLVEAAEEAHLKHEFDADLQYEYFNAVLINERDKDGNFLELGKEFILAPNDHFNNLPVNISLSDVQVPTNMYNKDPAIVNGVYWSESLNKVFVDNFDRDPSLIWQYFGSAKGFFRQYPGIKWEPDENGVIAFDCRNRKWYIQAATSPKDVVILVDVSGSMKGLRLTIAKQTVSSILDTLGDDDFFNIIAYNEELHYVEPCLNGTLVQADRTNKEHFREHLDKLFAKGIGMLDIALNEAFNILSDFNHTGQGSICSQAIMLITDGAVDTYDTIFAKYNWPDRKVRIFTYLIGREAAFADNLKWMACANKGFFTQISTLADVQENVMEYLHVLSRPKVIDQEHDVVWTEAYIDSTLTDDQGPVLMTTVAMPVFSKQNETRSKGILLGVVGTDVPVKELLKTIPKYKLGIHGYAFAITNNGYILTHPELRLLYEEGKKRRKPNYSSVDLSEVEWEDRDDVLRNAMVNRKTGKFSMEVKKTVDKGFRCGAFQRSWEIFLPRECNHRRRPA

SEQ ID NO: 10645 - protein, 1091 aa, Homo sapiens; identical to SEQ ID NO: 10638
  Payload ID: 2123;
  Gene Symbol: CACNA2D3;
  Gene Name: calcium channel, voltage-dependent, alpha 2/delta subunit 3;
  Uniprot ID:  Q8IZS8;
  ENSP ID: ENSP00000419101

SEQ ID NO: 10646 - protein, 519 aa, Homo sapiens; identical to SEQ ID NO: 10644
  Payload ID: 2123;
  Gene Symbol: CACNA2D3;
  Gene Name: calcium channel, voltage-dependent, alpha 2/delta subunit 3;
  Uniprot ID:  Q8IZS8;
  ENSP ID: ENSP00000478969

SEQ ID NO: 10647 - protein, 1137 aa, Homo sapiens
  Payload ID: 2124;
  Gene Symbol: CACNA2D4;
  Gene Name: calcium channel, voltage-dependent, alpha 2/delta subunit 4;
  Uniprot ID:  Q7Z3S7;
  ENSP ID: ENSP00000372169
MVCGCSALLPLPNPRPTMPATPNFLANPSSSSRWIPLQPMPVAWAFVQKTSALLWLLLLGTSLSPAWGQAKIPLETVKLWADTFGGDLYNTVTKYSGSLLLQKKYKDVESSLKIEEVDGLELVRKFSEDMENMLRRKVEAVQNLVEAAEEADLNHEFNESLVFDYYNSVLINERDEKGNFVELGAEFLLESNAHFSNLPVNTSISSVQLPTNVYNKDPDILNGVYMSEALNAVFVENFQRDPTLTWQYFGSATGFFRIYPGIKWTPDENGVITFDCRNRGWYIQAATSPKDIVILVDVSGSMKGLRMTIAKHTITTILDTLGENDFINIIAYNDYVHYIEPCFKGILVQADRDNREHFKLLVEELMVKGVGVVDQALREAFQILKQFQEAKQGSLCNQAIMLISDGAVEDYEPVFEKYNWPDCKVRVFTYLIGREVSFADRMKWIACNNKGYYTQISTLADTQENVMEYLHVLSRPMVINHDHDIIWTEAYMDSKLLSSQAQSLTLLTTVAMPVFSKKNETRSHGILLGVVGSDVALRELMKLAPRYKLGVHGYAFLNTNNGYILSHPDLRPLYREGKKLKPKPNYNSVDLSEVEWEDQAESLRTAMINRETGTLSMDVKVPMDKGKRVLFLTNDYFFTDISDTPFSLGVVLSRGHGEYILLGNTSVEEGLHDLLHPDLALAGDWIYCITDIDPDHRKLSQLEAMIRFLTRKDPDLECDEELVREVLFDAVVTAPMEAYWTALALNMSEESEHVVDMAFLGTRAGLLRSSLFVGSEKVSDRKFLTPEDEASVFTLDRFPLWYRQASEHPAGSFVFNLRWAEGPESAGEPMVVTASTAVAVTVDKRTAIAAAAGVQMKLEFLQRKFWAATRQCSTVDGPCTQSCEDSDLDCFVIDNNGFILISKRSRETGRFLGEVDGAVLTQLLSMGVFSQVTMYDYQAMCKPSSHHHSAAQPLVSPISAFLTATRWLLQELVLFLLEWSVWGSWYDRGAEAKSVFHHSHKHKKQDPLQPCDTEYPVFVYQPAIREANGIVECGPCQKVFVVQQIPNSNLLLLVTDPTCDCSIFPPVLQEATEVKYNASVKCDRMRSQKLRRRPDSCHAFHPEENAQDCGGASDTSASPPLLLLPVCAWGLLPQLLR

SEQ ID NO: 10648 - protein, 601 aa, Homo sapiens
  Payload ID: 2124;
  Gene Symbol: CACNA2D4;
  Gene Name: calcium channel, voltage-dependent, alpha 2/delta subunit 4;
  ENSP ID: ENSP00000403371
MVCGCSALLPLPNPRPTMPATPNFLANPSSSSRWIPLQPMPVAWAFVQKTSALLWLLLLGTSLSPAWGQAKIPLETVKLWADTFGGDLYNTVTKYSGSLLLQKKYKDVESSLKIEEVDGLELVRKFSEDMENMLRRKVEAVQNLVEAAEEADLNHEFNESLVFDYYNSVLINERDEKGNFVELGAEFLLESNAHFSNLPVNTSISSVQLPTNVYNKDPDILNGVYMSEALNAVFVENFQRDPTLTWQYFGSATGFFRIYPGIKWTPDENGVITFDCRNRGWYIQAATSPKDIVILVDVSGSMKGLRMTIAKHTITTILDTLGENDFINIIAYNDYVHYIEPCFKGILVQADRDNREHFKLLVEELMVKGVGVVDQALREAFQILKQFQEAKQGSLCNQAIMLISDGAVEDYEPVFEKYNWPDCKVRVFTYLIGREVSFADRMKWIACNNKGYYTQISTLADTQENVMEYLHVLSRPMVINHDHDIIWTEAYMDSKLLSSQAQSLTLLTTVAMPVFSKKNETRSHGILLGVVGSDVALRELMKLAPRYKMPSTNSRPNAPPPWTLAAWSARIRLSEHQQWLHPLPSRPPAPVQRGEETKTQT

SEQ ID NO: 10649 - protein, 192 aa, Homo sapiens
  Payload ID: 2124;
  Gene Symbol: CACNA2D4;
  Gene Name: calcium channel, voltage-dependent, alpha 2/delta subunit 4;
  ENSP ID: ENSP00000440231
  MOD_RES (1)..(1): Any amino acid
XELVREVLFDAVVTAPMEAYWTALALNMSEESEHVVDMAFLGTRAGLLRSSLFVGSEKVSDRKFLTPEDEASVFTLDRFPLWYRQASEHPAGSFVFNLRWAEGPESAGEPMVVTASTAVAVTVDKRTAIAAAAGVQMKLEFLQRKFWAATRQCSTVDGPCTQSCEDSDLDCFVIDNNGFILISKRSRESDYV

SEQ ID NO: 10650 - protein, 41 aa, Homo sapiens
  Payload ID: 2124;
  Gene Symbol: CACNA2D4;
  Gene Name: calcium channel, voltage-dependent, alpha 2/delta subunit 4;
  Uniprot ID:  Q7Z3S7;
  ENSP ID: ENSP00000442329
MKLEFLQRKFWAATRQDLDCFVIDNNGFILISKRSRESDYV

SEQ ID NO: 10651 - protein, 282 aa, Homo sapiens
  Payload ID: 2124;
  Gene Symbol: CACNA2D4;
  Gene Name: calcium channel, voltage-dependent, alpha 2/delta subunit 4;
  ENSP ID: ENSP00000443038
MKLEFLQRKFWAATRQCSTVDGPCTQSCEDSDLDCFVIDNNGFILISKRSRETGRFLGEVDGAVLTQLLSMGVFSQVTMYDYQAMCKPSSHHHSAAQPLVSPISAFLTATRWLLQELVLFLLEWSVWGSWYDRGAEAKSVFHHSHKHKKQDPLQPCDTEYPVFVYQPAIREANGIVECGPCQKVFVVQQIPNSNLLLLVTDPTCDCSIFPPVLQEATEVKYNASVKCDRMRSQKLRRRPDSCHAFHPEENAQDCGGASDTSASPPLLLLPVCAWGLLPQLLR

SEQ ID NO: 10652 - protein, 267 aa, Homo sapiens
  Payload ID: 2124;
  Gene Symbol: CACNA2D4;
  Gene Name: calcium channel, voltage-dependent, alpha 2/delta subunit 4;
  ENSP ID: ENSP00000446341
MKLEFLQRKFWAATRQDLDCFVIDNNGFILISKRSRETGRFLGEVDGAVLTQLLSMGVFSQVTMYDYQAMCKPSSHHHSAAQPLVSPISAFLTATRWLLQELVLFLLEWSVWGSWYDRGAEAKSVFHHSHKHKKQDPLQPCDTEYPVFVYQPAIREANGIVECGPCQKVFVVQQIPNSNLLLLVTDPTCDCSIFPPVLQEATEVKYNASVKCDRMRSQKLRRRPDSCHAFHPEENAQDCGGASDTSASPPLLLLPVCAWGLLPQLLR

SEQ ID NO: 10653 - protein, 56 aa, Homo sapiens
  Payload ID: 2124;
  Gene Symbol: CACNA2D4;
  Gene Name: calcium channel, voltage-dependent, alpha 2/delta subunit 4;
  ENSP ID: ENSP00000464949
MKLEFLQRKFWAATRQCSTVDGPCTQSCEDSDLDCFVIDNNGFILISKRSRESDYV

SEQ ID NO: 10654 - protein, 1154 aa, Homo sapiens
  Payload ID: 2124;
  Gene Symbol: CACNA2D4;
  Gene Name: calcium channel, voltage-dependent, alpha 2/delta subunit 4;
  Uniprot ID:  Q7Z3S7;
  ENSP ID: ENSP00000465060
MVCGCSALLPLPNPRPTMPATPNFLANPSSSSRWIPLQPMPVAWAFVQKTSALLWLLLLGTSLSPAWGQAKIPLETVKLWADTFGGDLYNTVTKYSGSLLLQKKYKDVESSLKIEEVDGLELVRKFSEDMENMLRRKVEAVQNLVEAAEEADLNHEFNESLVFDYYNSVLINERDEKGNFVELGAEFLLESNAHFSNLPVNTSISSVQLPTNVYNKDPDILNGVYMSEALNAVFVENFQRDPTLTWQYFGSATGFFRIYPGIKWTPDENGVITFDCRNRGWYIQAATSPKDIVILVDVSGSMKGLRMTIAKHTITTILDTLGENDFINIIAYNDYVHYIEPCFKGILVQADRDNREHFKLLVEELMVKGVGVVDQALREAFQILKQFQEAKQGSLCNQAIMLISDGAVEDYEPVFEKYNWPDCKVRVFTYLIGREVSFADRMKWIACNNKGYYTQISTLADTQENVMEYLHVLSRPMVINHDHDIIWTEAYMDSKLLSSQAQSLTLLTTVAMPVFSKKNETRSHGILLGVVGSDVALRELMKLAPRYKLGVHGYAFLNTNNGYILSHPDLRPLYREGKKLKPKPNYNSVDLSEVEWEDQAESLRTAMINRETGTLSMDVKVPMDKGKRVLFLTNDYFFTDISDTPFSLGVVLSRGHGEYILLGNTSVEEGLHDLLHPDLALAGDWIYCITDIDPDHRKLSQLEAMIRFLTRKDPDLECDEELVREVLFDAVVTAPMEAYWTALALNMSEESEHVVDMAFLGTRAGLLRSSLFVGSEKVSDRKFLTPEDEASVFTLDRFPLWYRQASEHPAGSFVFNLRWAEGPESAGEPMVVTASTAVAVTVDKRTAIAAAAGVQMKLEFLQRKFWAATRQCSTVDGPCTQSCEDSDLDCFVIDNNGFILISKRSRETGRFLGEVDGAVLTQLLSMGVFSQVTMYDYQAMCKPSSHHHSAAQPLVSPISAFLTATRWLLQELVLFLLEWSVWGSWYDRGAEAKSVFHHSHKHKKQDPLQPCDTEYPVFVYQPAIREANGIVECGPCQKVFVVQQIPNSNLLLLVTDPTCDCSIFPPVLQEATEVKYNASVKCDRMRSQKLRRRPDSCHAFHPEVRVEADRGWAGFSSPNPLCLGLCPCRQEHIGMPMNTPVPVLLGGNIRVYAL

SEQ ID NO: 10655 - protein, 1112 aa, Homo sapiens
  Payload ID: 2124;
  Gene Symbol: CACNA2D4;
  Gene Name: calcium channel, voltage-dependent, alpha 2/delta subunit 4;
  ENSP ID: ENSP00000465372
MVCGCSALLPLPNPRPTMPATPNFLANPSSSSRWIPLQPMPVAWAFVQKTSALLWLLLLGTSLSPAWGQAKIPLETVKLWADTFGGDLYNTVTKYSGSLLLQKKYKDVESSLKIEEVDGLELVRKFSEDMENMLRRKVEAVQNLVEAAEEADLNHEFNESLVFDYYNSVLINERDEKGNFVELGAEFLLESNAHFSNLPVNTSISSVQLPTNVYNKDPDILNGVYMSEALNAVFVENFQRDPTLTWQYFGSATGFFRIYPGIKWTPDENGVITFDCRNRGWYIQAATSPKDIVILVDVSGSMKGLRMTIAKHTITTILDTLGENDFINIIAYNDYVHYIEPCFKGILVQADRDNREHFKLLVEELMVKGVGVVDQALREAFQILKQFQEAKQGSLCNQAIMLISDGAVEDYEPVFEKYNWPDCKVRVFTYLIGREVSFADRMKWIACNNKGYYTQISTLADTQENVMEYLHVLSRPMVINHDHDIIWTEAYMDSKLLSSQAQSLTLLTTVAMPVFSKKNETRSHGILLGVVGSDVALRELMKLAPRYKYREGKKLKPKPNYNSVDLSEVEWEDQAESLRTAMINRETGTLSMDVKVPMDKGKRVLFLTNDYFFTDISDTPFSLGVVLSRGHGEYILLGNTSVEEGLHDLLHPDLALAGDWIYCITDIDPDHRKLSQLEAMIRFLTRKDPDLECDEELVREVLFDAVVTAPMEAYWTALALNMSEESEHVVDMAFLGTRAGLLRSSLFVGSEKVSDRKFLTPEDEASVFTLDRFPLWYRQASEHPAGSFVFNLRWAEGPESAGEPMVVTASTAVAVTVDKRTAIAAAAGVQMKLEFLQRKFWAATRQCSTVDGPCTQSCEDSDLDCFVIDNNGFILISKRSRETGRFLGEVDGAVLTQLLSMGVFSQVTMYDYQAMCKPSSHHHSAAQPLVSPISAFLTATRWLLQELVLFLLEWSVWGSWYDRGAEAKSVFHHSHKHKKQDPLQPCDTEYPVFVYQPAIREANGIVECGPCQKVFVVQQIPNSNLLLLVTDPTCDCSIFPPVLQEATEVKYNASVKCDRMRSQKLRRRPDSCHAFHPEENAQDCGGASDTSASPPLLLLPVCAWGLLPQLLR

SEQ ID NO: 10656 - protein, 56 aa, Homo sapiens; identical to SEQ ID NO: 10653
  Payload ID: 2124;
  Gene Symbol: CACNA2D4;
  Gene Name: calcium channel, voltage-dependent, alpha 2/delta subunit 4;
  ENSP ID: ENSP00000467333

SEQ ID NO: 10657 - protein, 1090 aa, Homo sapiens
  Payload ID: 2124;
  Gene Symbol: CACNA2D4;
  Gene Name: calcium channel, voltage-dependent, alpha 2/delta subunit 4;
  Uniprot ID:  Q7Z3S7;
  ENSP ID: ENSP00000467697
MAVALGTRRRDRVKLWADTFGGDLYNTVTKYSGSLLLQKKYKDVESSLKIEEVDGLELVRKFSEDMENMLRRKVEAVQNLVEAAEEADLNHEFNESLVFDYYNSVLINERDEKGNFVELGAEFLLESNAHFSNLPVNTSISSVQLPTNVYNKDPDILNGVYMSEALNAVFVENFQRDPTLTWQYFGSATGFFRIYPGIKWTPDENGVITFDCRNRGWYIQAATSPKDIVILVDVSGSMKGLRMTIAKHTITTILDTLGENDFINIIAYNDYVHYIEPCFKGILVQADRDNREHFKLLVEELMVKGVGVVDQALREAFQILKQFQEAKQGSLCNQAIMLISDGAVEDYEPVFEKYNWPDCKVRVFTYLIGREVSFADRMKWIACNNKGYYTQISTLADTQENVMEYLHVLSRPMVINHDHDIIWTEAYMDSKLLSSQAQSLTLLTTVAMPVFSKKNETRSHGILLGVVGSDVALRELMKLAPRYKLGVHGYAFLNTNNGYILSHPDLRPLYREGKKLKPKPNYNSVDLSEVEWEDQAESLRTAMINRETGTLSMDVKVPMDKGKRVLFLTNDYFFTDISDTPFSLGVVLSRGHGEYILLGNTSVEEGLHDLLHPDLALAGDWIYCITDIDPDHRKLSQLEAMIRFLTRKDPDLECDEELVREVLFDAVVTAPMEAYWTALALNMSEESEHVVDMAFLGTRAGLLRSSLFVGSEKVSDRKFLTPEDEASVFTLDRFPLWYRQASEHPAGSFVFNLRWAEGPESAGEPMVVTASTAVAVTVDKRTAIAAAAGVQMKLEFLQRKFWAATRQCSTVDGPCTQSCEDSDLDCFVIDNNGFILISKRSRETGRFLGEVDGAVLTQLLSMGVFSQVTMYDYQAMCKPSSHHHSAAQPLVSPISAFLTATRWLLQELVLFLLEWSVWGSWYDRGAEAKSVFHHSHKHKKQDPLQPCDTEYPVFVYQPAIREANGIVECGPCQKVFVVQQIPNSNLLLLVTDPTCDCSIFPPVLQEATEVKYNASVKCDRMRSQKLRRRPDSCHAFHPEVRVEADRGWAGFSSPNPLCLGLCPCRQEHIGMPMNTPVPVLLGGNIRVYAL

SEQ ID NO: 10658 - protein, 780 aa, Homo sapiens
  Payload ID: 2124;
  Gene Symbol: CACNA2D4;
  Gene Name: calcium channel, voltage-dependent, alpha 2/delta subunit 4;
  ENSP ID: ENSP00000468080
MVCGCSALLPLPNPRPTMPATPNFLANPSSSSRWIPLQPMPVAWAFVQKTSALLWLLLLGTSLSPAWGQAKIPLETVKLWADTFGGDLYNTVTKYSGSLLLQKKYKDVESSLKIEEVDGLELVRKFSEDMENMLRRKVEAVQNLVEAAEEADLNHEFNESLVFDYYNSVLINERDEKGNFVELGAEFLLESNAHFSNLPVNTSISSVQLPTNVYNKDPDILNGVYMSEALNAVFVENFQRDPTLTWQYFGSATGFFRIYPGILVQADRDNREHFKLLVEELMVKGVGVVDQALREAFQILKQFQEAKQGSLCNQAIMLISDGAVEDYEPVFEKYNWPDCKISTLADTQENVMEYLHVLSRPMVINHDHDIIWTEAYMDSKLLSSQAQSLTLLTTVAMPVFSKKNETRSHGILLGVVGSDVALRELMKLAPRYKLGVHGYAFLNTNNGYILSHPDLRPLYREGKKLKPKPNYNSVDLSEVEWEDQAESKRVLFLTNDYFFTDISDTPFSLGVVLSRGHGEYILLGNTSVEEGLHDLLHPDLALAGDWIYCITDIDPDHRKLSQLEAMIRFLTRKDPDLECDEELVREVLFDAVVTAPMEAYWTALALNMSEESEHVVDMAFLGTRAGLLRSSLFVGSEKVSDRKFLTPEDEASVFTLDRFPLWYRQASEHPAGSFVFNLRWAEGPESAGEPMVVTASTAVAVTVDKRTAIAAAAGVQMKLEFLQRKFWAATRQCSTVDGPCTQSCEDSDLDCFVIDNNGFILISKRSREPGIKLRKKPIQT

SEQ ID NO: 10659 - protein, 284 aa, Homo sapiens
  Payload ID: 2124;
  Gene Symbol: CACNA2D4;
  Gene Name: calcium channel, voltage-dependent, alpha 2/delta subunit 4;
  ENSP ID: ENSP00000468167
  MOD_RES (1)..(1): Any amino acid
XGVQMKLEFLQRKFWAATRQCSTVDGPCTQSCEDSDLDCFVIDNNGFILISKRSRETGRFLGEVDGAVLTQLLSMGVFSQVTMYDYQAMCKPSSHHHSAAQPLPISAFLTATRWLLQELVLFLLEWSVWGSWYDRGAEAKSVFHHSHKHKKQDPLQPCDTEYPVFVYQPAIREANGIVECGPCQKVFVVQQIPNSNLLLLVTDPTCDCSIFPPVLQEATEVKYNASVKCDRMRSQKLRRRPDSCHAFHPEENAQDCGGASDTSASPPLLLLPVCAWGLLPQLLR

SEQ ID NO: 10660 - protein, 1073 aa, Homo sapiens
  Payload ID: 2124;
  Gene Symbol: CACNA2D4;
  Gene Name: calcium channel, voltage-dependent, alpha 2/delta subunit 4;
  Uniprot ID:  Q7Z3S7;
  ENSP ID: ENSP00000468530
MAVALGTRRRDRVKLWADTFGGDLYNTVTKYSGSLLLQKKYKDVESSLKIEEVDGLELVRKFSEDMENMLRRKVEAVQNLVEAAEEADLNHEFNESLVFDYYNSVLINERDEKGNFVELGAEFLLESNAHFSNLPVNTSISSVQLPTNVYNKDPDILNGVYMSEALNAVFVENFQRDPTLTWQYFGSATGFFRIYPGIKWTPDENGVITFDCRNRGWYIQAATSPKDIVILVDVSGSMKGLRMTIAKHTITTILDTLGENDFINIIAYNDYVHYIEPCFKGILVQADRDNREHFKLLVEELMVKGVGVVDQALREAFQILKQFQEAKQGSLCNQAIMLISDGAVEDYEPVFEKYNWPDCKVRVFTYLIGREVSFADRMKWIACNNKGYYTQISTLADTQENVMEYLHVLSRPMVINHDHDIIWTEAYMDSKLLSSQAQSLTLLTTVAMPVFSKKNETRSHGILLGVVGSDVALRELMKLAPRYKLGVHGYAFLNTNNGYILSHPDLRPLYREGKKLKPKPNYNSVDLSEVEWEDQAESLRTAMINRETGTLSMDVKVPMDKGKRVLFLTNDYFFTDISDTPFSLGVVLSRGHGEYILLGNTSVEEGLHDLLHPDLALAGDWIYCITDIDPDHRKLSQLEAMIRFLTRKDPDLECDEELVREVLFDAVVTAPMEAYWTALALNMSEESEHVVDMAFLGTRAGLLRSSLFVGSEKVSDRKFLTPEDEASVFTLDRFPLWYRQASEHPAGSFVFNLRWAEGPESAGEPMVVTASTAVAVTVDKRTAIAAAAGVQMKLEFLQRKFWAATRQCSTVDGPCTQSCEDSDLDCFVIDNNGFILISKRSRETGRFLGEVDGAVLTQLLSMGVFSQVTMYDYQAMCKPSSHHHSAAQPLVSPISAFLTATRWLLQELVLFLLEWSVWGSWYDRGAEAKSVFHHSHKHKKQDPLQPCDTEYPVFVYQPAIREANGIVECGPCQKVFVVQQIPNSNLLLLVTDPTCDCSIFPPVLQEATEVKYNASVKCDRMRSQKLRRRPDSCHAFHPEENAQDCGGASDTSASPPLLLLPVCAWGLLPQLLR

SEQ ID NO: 10661 - protein, 523 aa, Homo sapiens
  Payload ID: 2125;
  Gene Symbol: CACNB1;
  Gene Name: calcium channel, voltage-dependent, beta 1 subunit;
  Uniprot ID:  Q02641;
  ENSP ID: ENSP00000345461
MVQKTSMSRGPYPPSQEIPMEVFDPSPQGKYSKRKGRFKRSDGSTSSDTTSNSFVRQGSAESYTSRPSDSDVSLEEDREALRKEAERQALAQLEKAKTKPVAFAVRTNVGYNPSPGDEVPVQGVAITFEPKDFLHIKEKYNNDWWIGRLVKEGCEVGFIPSPVKLDSLRLLQEQKLRQNRLGSSKSGDNSSSSLGDVVTGTRRPTPPASGNEMTNLAFELDPLELEEEEAELGEQSGSAKTSVSSVTTPPPHGKRIPFFKKTEHVPPYDVVPSMRPIILVGPSLKGYEVTDMMQKALFDFLKHRFDGRISITRVTADISLAKRSVLNNPSKHIIIERSNTRSSLAEVQSEIERIFELARTLQLVALDADTINHPAQLSKTSLAPIIVYIKITSPKVLQRLIKSRGKSQSKHLNVQIAASEKLAQCPPEMFDIILDENQLEDACEHLAEYLEAYWKATHPPSSTPPNPLLNRTMATAALAASPAPVSNLQVQVLTSLRRNLGFWGGLESSQRGSVVPQEQEHAM

SEQ ID NO: 10662 - protein, 598 aa, Homo sapiens
  Payload ID: 2125;
  Gene Symbol: CACNB1;
  Gene Name: calcium channel, voltage-dependent, beta 1 subunit;
  Uniprot ID:  Q02641;
  ENSP ID: ENSP00000377840
MVQKTSMSRGPYPPSQEIPMEVFDPSPQGKYSKRKGRFKRSDGSTSSDTTSNSFVRQGSAESYTSRPSDSDVSLEEDREALRKEAERQALAQLEKAKTKPVAFAVRTNVGYNPSPGDEVPVQGVAITFEPKDFLHIKEKYNNDWWIGRLVKEGCEVGFIPSPVKLDSLRLLQEQKLRQNRLGSSKSGDNSSSSLGDVVTGTRRPTPPASAKQKQKSTEHVPPYDVVPSMRPIILVGPSLKGYEVTDMMQKALFDFLKHRFDGRISITRVTADISLAKRSVLNNPSKHIIIERSNTRSSLAEVQSEIERIFELARTLQLVALDADTINHPAQLSKTSLAPIIVYIKITSPKVLQRLIKSRGKSQSKHLNVQIAASEKLAQCPPEMFDIILDENQLEDACEHLAEYLEAYWKATHPPSSTPPNPLLNRTMATAALAASPAPVSNLQGPYLASGDQPLERATGEHASMHEYPGELGQPPGLYPSSHPPGRAGTLRALSRQDTFDADTPGSRNSAYTELGDSCVDMETDPSEGPGLGDPAGGGTPPARQGSWEDEEEDYEEELTDNRNRGRNKARYCAEGGGPVLGRNKNELEGWGRGVYIR

SEQ ID NO: 10663 - protein, 478 aa, Homo sapiens
  Payload ID: 2125;
  Gene Symbol: CACNB1;
  Gene Name: calcium channel, voltage-dependent, beta 1 subunit;
  Uniprot ID:  Q02641;
  ENSP ID: ENSP00000377847
MVQKTSMSRGPYPPSQEIPMEVFDPSPQGKYSKRKGRFKRSDGSTSSDTTSNSFVRQGSAESYTSRPSDSDVSLEEDREALRKEAERQALAQLEKAKTKPVAFAVRTNVGYNPSPGDEVPVQGVAITFEPKDFLHIKEKYNNDWWIGRLVKEGCEVGFIPSPVKLDSLRLLQEQKLRQNRLGSSKSGDNSSSSLGDVVTGTRRPTPPASAKQKQKSTEHVPPYDVVPSMRPIILVGPSLKGYEVTDMMQKALFDFLKHRFDGRISITRVTADISLAKRSVLNNPSKHIIIERSNTRSSLAEVQSEIERIFELARTLQLVALDADTINHPAQLSKTSLAPIIVYIKITSPKVLQRLIKSRGKSQSKHLNVQIAASEKLAQCPPEMFDIILDENQLEDACEHLAEYLEAYWKATHPPSSTPPNPLLNRTMATAALAASPAPVSNLQVQVLTSLRRNLGFWGGLESSQRGSVVPQEQEHAM

SEQ ID NO: 10664 - protein, 216 aa, Homo sapiens
  Payload ID: 2125;
  Gene Symbol: CACNB1;
  Gene Name: calcium channel, voltage-dependent, beta 1 subunit;
  ENSP ID: ENSP00000477612
MVQKTSMSRGPYPPSQEIPMEVFDPSPQGKYSKRKGRFKRSDGSTSSDTTSNSFVRQGSAESYTSRPSDSDVSLEEDREALRKEAERQALAQLEKAKTKPVAFAVRTNVGYNPSPGDEVPVQGVAITFEPKDFLHIKEKYNNDWWIGRLVKEGCEVGFIPSPVKLDSLRLLQEQKLRQNRLGSSKSGDNSSSSLGDVVTGTRRPTPPASDRACAPL

SEQ ID NO: 10665 - protein, 632 aa, Homo sapiens
  Payload ID: 2126;
  Gene Symbol: CACNB2;
  Gene Name: calcium channel, voltage-dependent, beta 2 subunit;
  Uniprot ID:  Q08289;
  ENSP ID: ENSP00000282343
MNQGSGLDLLKISYGKGARRKNRFKGSDGSTSSDTTSNSFVRQGSADSYTSRPSDSDVSLEEDREAVRREAERQAQAQLEKAKTKPVAFAVRTNVSYSAAHEDDVPVPGMAISFEAKDFLHVKEKFNNDWWIGRLVKEGCEIGFIPSPVKLENMRLQHEQRAKQGKFYSSKSGGNSSSSLGDIVPSSRKSTPPSSAIDIDATGLDAEENDIPANHRSPKPSANSVTSPHSKEKRMPFFKKTEHTPPYDVVPSMRPVVLVGPSLKGYEVTDMMQKALFDFLKHRFEGRISITRVTADISLAKRSVLNNPSKHAIIERSNTRSSLAEVQSEIERIFELARTLQLVVLDADTINHPAQLSKTSLAPIIVYVKISSPKVLQRLIKSRGKSQAKHLNVQMVAADKLAQCPPELFDVILDENQLEDACEHLADYLEAYWKATHPPSSSLPNPLLSRTLATSSLPLSPTLASNSQGSQGDQRTDRSAPIRSASQAEEEPSVEPVKKSQHRSSSSAPHHNHRSGTSRGLSRQETFDSETQESRDSAYVEPKEDYSHDHVDHYASHRDHNHRDETHGSSDHRHRESRHRSRDVDREQDHNECNKQRSRHKSKDRYCEKDGEVISKKRNEAGEWNRDVYIRQ

SEQ ID NO: 10666 - protein, 660 aa, Homo sapiens
  Payload ID: 2126;
  Gene Symbol: CACNB2;
  Gene Name: calcium channel, voltage-dependent, beta 2 subunit;
  Uniprot ID:  Q08289;
  ENSP ID: ENSP00000320025
MVQRDMSKSPPTAAAAVAQEIQMELLENVAPAGALGAAAQSYGKGARRKNRFKGSDGSTSSDTTSNSFVRQGSADSYTSRPSDSDVSLEEDREAVRREAERQAQAQLEKAKTKPVAFAVRTNVSYSAAHEDDVPVPGMAISFEAKDFLHVKEKFNNDWWIGRLVKEGCEIGFIPSPVKLENMRLQHEQRAKQGKFYSSKSGGNSSSSLGDIVPSSRKSTPPSSAIDIDATGLDAEENDIPANHRSPKPSANSVTSPHSKEKRMPFFKKTEHTPPYDVVPSMRPVVLVGPSLKGYEVTDMMQKALFDFLKHRFEGRISITRVTADISLAKRSVLNNPSKHAIIERSNTRSSLAEVQSEIERIFELARTLQLVVLDADTINHPAQLSKTSLAPIIVYVKISSPKVLQRLIKSRGKSQAKHLNVQMVAADKLAQCPPELFDVILDENQLEDACEHLADYLEAYWKATHPPSSSLPNPLLSRTLATSSLPLSPTLASNSQGSQGDQRTDRSAPIRSASQAEEEPSVEPVKKSQHRSSSSAPHHNHRSGTSRGLSRQETFDSETQESRDSAYVEPKEDYSHDHVDHYASHRDHNHRDETHGSSDHRHRESRHRSRDVDREQDHNECNKQRSRHKSKDRYCEKDGEVISKKRNEAGEWNRDVYIRQ

SEQ ID NO: 10667 - protein, 636 aa, Homo sapiens
  Payload ID: 2126;
  Gene Symbol: CACNB2;
  Gene Name: calcium channel, voltage-dependent, beta 2 subunit;
  Uniprot ID:  Q08289;
  ENSP ID: ENSP00000344474
MVQRDMSKSPPTAAAAVAQEIQMELLENVAPAGALGAAAQSYGKGARRKNRFKGSDGSTSSDTTSNSFVRQGSADSYTSRPSDSDVSLEEDREAVRREAERQAQAQLEKAKTKPVAFAVRTNVSYSAAHEDDVPVPGMAISFEAKDFLHVKEKFNNDWWIGRLVKEGCEIGFIPSPVKLENMRLQHEQRAKQGKFYSSKSGGNSSSSLGDIVPSSRKSTPPSSGAKSADEQDQWKTAGLFWRFTTEHTPPYDVVPSMRPVVLVGPSLKGYEVTDMMQKALFDFLKHRFEGRISITRVTADISLAKRSVLNNPSKHAIIERSNTRSSLAEVQSEIERIFELARTLQLVVLDADTINHPAQLSKTSLAPIIVYVKISSPKVLQRLIKSRGKSQAKHLNVQMVAADKLAQCPPELFDVILDENQLEDACEHLADYLEAYWKATHPPSSSLPNPLLSRTLATSSLPLSPTLASNSQGSQGDQRTDRSAPIRSASQAEEEPSVEPVKKSQHRSSSSAPHHNHRSGTSRGLSRQETFDSETQESRDSAYVEPKEDYSHDHVDHYASHRDHNHRDETHGSSDHRHRESRHRSRDVDREQDHNECNKQRSRHKSKDRYCEKDGEVISKKRNEAGEWNRDVYIRQ

SEQ ID NO: 10668 - protein, 612 aa, Homo sapiens
  Payload ID: 2126;
  Gene Symbol: CACNB2;
  Gene Name: calcium channel, voltage-dependent, beta 2 subunit;
  Uniprot ID:  Q08289;
  ENSP ID: ENSP00000366532
MKATWIRLLKRAKGGRLKNSDICGSADSYTSRPSDSDVSLEEDREAVRREAERQAQAQLEKAKTKPVAFAVRTNVSYSAAHEDDVPVPGMAISFEAKDFLHVKEKFNNDWWIGRLVKEGCEIGFIPSPVKLENMRLQHEQRAKQGKFYSSKSGGNSSSSLGDIVPSSRKSTPPSSAIDIDATGLDAEENDIPANHRSPKPSANSVTSPHSKEKRMPFFKKTEHTPPYDVVPSMRPVVLVGPSLKGYEVTDMMQKALFDFLKHRFEGRISITRVTADISLAKRSVLNNPSKHAIIERSNTRSSLAEVQSEIERIFELARTLQLVVLDADTINHPAQLSKTSLAPIIVYVKISSPKVLQRLIKSRGKSQAKHLNVQMVAADKLAQCPPELFDVILDENQLEDACEHLADYLEAYWKATHPPSSSLPNPLLSRTLATSSLPLSPTLASNSQGSQGDQRTDRSAPIRSASQAEEEPSVEPVKKSQHRSSSSAPHHNHRSGTSRGLSRQETFDSETQESRDSAYVEPKEDYSHDHVDHYASHRDHNHRDETHGSSDHRHRESRHRSRDVDREQDHNECNKQRSRHKSKDRYCEKDGEVISKKRNEAGEWNRDVYIRQ

SEQ ID NO: 10669 - protein, 567 aa, Homo sapiens
  Payload ID: 2126;
  Gene Symbol: CACNB2;
  Gene Name: calcium channel, voltage-dependent, beta 2 subunit;
  Uniprot ID:  Q08289;
  ENSP ID: ENSP00000366536
MQCCGLVHRRRVRVSYGSADSYTSRPSDSDVSLEEDREAVRREAERQAQAQLEKAKTKPVAFAVRTNVSYSAAHEDDVPVPGMAISFEAKDFLHVKEKFNNDWWIGRLVKEGCEIGFIPSPVKLENMRLQHEQRAKQGKFYSSKSGGNSSSSLGDIVPSSRKSTPPSSAKQKQKSTEHTPPYDVVPSMRPVVLVGPSLKGYEVTDMMQKALFDFLKHRFEGRISITRVTADISLAKRSVLNNPSKHAIIERSNTRSSLAEVQSEIERIFELARTLQLVVLDADTINHPAQLSKTSLAPIIVYVKISSPKVLQRLIKSRGKSQAKHLNVQMVAADKLAQCPPELFDVILDENQLEDACEHLADYLEAYWKATHPPSSSLPNPLLSRTLATSSLPLSPTLASNSQGSQGDQRTDRSAPIRSASQAEEEPSVEPVKKSQHRSSSSAPHHNHRSGTSRGLSRQETFDSETQESRDSAYVEPKEDYSHDHVDHYASHRDHNHRDETHGSSDHRHRESRHRSRDVDREQDHNECNKQRSRHKSKDRYCEKDGEVISKKRNEAGEWNRDVYIRQ

SEQ ID NO: 10670 - protein, 410 aa, Homo sapiens
  Payload ID: 2126;
  Gene Symbol: CACNB2;
  Gene Name: calcium channel, voltage-dependent, beta 2 subunit;
  ENSP ID: ENSP00000366545
MVQRDMSKSPPTAAAAVAQEIQMELLENVAPAGALGAAAQSYGKGARRKNRFKGSDGSTSSDTTSNSFVRQGSADSYTSRPSDSDVSLEEDREAVRREAERQAQAQLEKAKTKPVAFAVRTNVSYSAAHEDDVPVPGMAISFEAKDFLHVKEVLQRLIKSRGKSQAKHLNVQMVAADKLAQCPPELFDVILDENQLEDACEHLADYLEAYWKATHPPSSSLPNPLLSRTLATSSLPLSPTLASNSQGSQGDQRTDRSAPIRSASQAEEEPSVEPVKKSQHRSSSSAPHHNHRSGTSRGLSRQETFDSETQESRDSAYVEPKEDYSHDHVDHYASHRDHNHRDETHGSSDHRHRESRHRSRDVDREQDHNECNKQRSRHKSKDRYCEKDGEVISKKRNEAGEWNRDVYIRQ

SEQ ID NO: 10671 - protein, 606 aa, Homo sapiens
  Payload ID: 2126;
  Gene Symbol: CACNB2;
  Gene Name: calcium channel, voltage-dependent, beta 2 subunit;
  Uniprot ID:  Q08289;
  ENSP ID: ENSP00000366546
MLDRRLIAPQTKYIIPGGSADSYTSRPSDSDVSLEEDREAVRREAERQAQAQLEKAKTKPVAFAVRTNVSYSAAHEDDVPVPGMAISFEAKDFLHVKEKFNNDWWIGRLVKEGCEIGFIPSPVKLENMRLQHEQRAKQGKFYSSKSGGNSSSSLGDIVPSSRKSTPPSSAIDIDATGLDAEENDIPANHRSPKPSANSVTSPHSKEKRMPFFKKTEHTPPYDVVPSMRPVVLVGPSLKGYEVTDMMQKALFDFLKHRFEGRISITRVTADISLAKRSVLNNPSKHAIIERSNTRSSLAEVQSEIERIFELARTLQLVVLDADTINHPAQLSKTSLAPIIVYVKISSPKVLQRLIKSRGKSQAKHLNVQMVAADKLAQCPPELFDVILDENQLEDACEHLADYLEAYWKATHPPSSSLPNPLLSRTLATSSLPLSPTLASNSQGSQGDQRTDRSAPIRSASQAEEEPSVEPVKKSQHRSSSSAPHHNHRSGTSRGLSRQETFDSETQESRDSAYVEPKEDYSHDHVDHYASHRDHNHRDETHGSSDHRHRESRHRSRDVDREQDHNECNKQRSRHKSKDRYCEKDGEVISKKRNEAGEWNRDVYIRQ

SEQ ID NO: 10672 - protein, 608 aa, Homo sapiens
  Payload ID: 2126;
  Gene Symbol: CACNB2;
  Gene Name: calcium channel, voltage-dependent, beta 2 subunit;
  Uniprot ID:  Q08289;
  ENSP ID: ENSP00000366548
MNQGSGLDLLKISYGKGARRKNRFKGSDGSTSSDTTSNSFVRQGSADSYTSRPSDSDVSLEEDREAVRREAERQAQAQLEKAKTKPVAFAVRTNVSYSAAHEDDVPVPGMAISFEAKDFLHVKEKFNNDWWIGRLVKEGCEIGFIPSPVKLENMRLQHEQRAKQGKFYSSKSGGNSSSSLGDIVPSSRKSTPPSSGAKSADEQDQWKTAGLFWRFTTEHTPPYDVVPSMRPVVLVGPSLKGYEVTDMMQKALFDFLKHRFEGRISITRVTADISLAKRSVLNNPSKHAIIERSNTRSSLAEVQSEIERIFELARTLQLVVLDADTINHPAQLSKTSLAPIIVYVKISSPKVLQRLIKSRGKSQAKHLNVQMVAADKLAQCPPELFDVILDENQLEDACEHLADYLEAYWKATHPPSSSLPNPLLSRTLATSSLPLSPTLASNSQGSQGDQRTDRSAPIRSASQAEEEPSVEPVKKSQHRSSSSAPHHNHRSGTSRGLSRQETFDSETQESRDSAYVEPKEDYSHDHVDHYASHRDHNHRDETHGSSDHRHRESRHRSRDVDREQDHNECNKQRSRHKSKDRYCEKDGEVISKKRNEAGEWNRDVYIRQ

SEQ ID NO: 10673 - protein, 605 aa, Homo sapiens
  Payload ID: 2126;
  Gene Symbol: CACNB2;
  Gene Name: calcium channel, voltage-dependent, beta 2 subunit;
  Uniprot ID:  Q08289;
  ENSP ID: ENSP00000379821
MQCCGLVHRRRVRVSYGSADSYTSRPSDSDVSLEEDREAVRREAERQAQAQLEKAKTKPVAFAVRTNVSYSAAHEDDVPVPGMAISFEAKDFLHVKEKFNNDWWIGRLVKEGCEIGFIPSPVKLENMRLQHEQRAKQGKFYSSKSGGNSSSSLGDIVPSSRKSTPPSSAIDIDATGLDAEENDIPANHRSPKPSANSVTSPHSKEKRMPFFKKTEHTPPYDVVPSMRPVVLVGPSLKGYEVTDMMQKALFDFLKHRFEGRISITRVTADISLAKRSVLNNPSKHAIIERSNTRSSLAEVQSEIERIFELARTLQLVVLDADTINHPAQLSKTSLAPIIVYVKISSPKVLQRLIKSRGKSQAKHLNVQMVAADKLAQCPPELFDVILDENQLEDACEHLADYLEAYWKATHPPSSSLPNPLLSRTLATSSLPLSPTLASNSQGSQGDQRTDRSAPIRSASQAEEEPSVEPVKKSQHRSSSSAPHHNHRSGTSRGLSRQETFDSETQESRDSAYVEPKEDYSHDHVDHYASHRDHNHRDETHGSSDHRHRESRHRSRDVDREQDHNECNKQRSRHKSKDRYCEKDGEVISKKRNEAGEWNRDVYIRQ

SEQ ID NO: 10674 - protein, 164 aa, Homo sapiens
  Payload ID: 2126;
  Gene Symbol: CACNB2;
  Gene Name: calcium channel, voltage-dependent, beta 2 subunit;
  ENSP ID: ENSP00000478676
MYLWRRTGRQCAPIRSASQAEEEPSVEPVKKSQHRSSSSAPHHNHRSGTSRGLSRQETFDSETQESRDSAYVEPKEDYSHDHVDHYASHRDHNHRDETHGSSDHRHRESRHRSRDVDREQDHNECNKQRSRHKSKDRYCEKDGEVISKKRNEAGEWNRDVYIRQ

SEQ ID NO: 10675 - protein, 581 aa, Homo sapiens
  Payload ID: 2126;
  Gene Symbol: CACNB2;
  Gene Name: calcium channel, voltage-dependent, beta 2 subunit;
  ENSP ID: ENSP00000479756
MQCCGLVHRRRVRVSYGSADSYTSRPSDSDVSLEEDREAVRREAERQAQAQLEKAKTKPVAFAVRTNVSYSAAHEDDVPVPGMAISFEAKDFLHVKEKFNNDWWIGRLVKEGCEIGFIPSPVKLENMRLQHEQRAKQGKFYSSKSGGNSSSSLGDIVPSSRKSTPPSSGAKSADEQDQWKTAGLFWRFTTEHTPPYDVVPSMRPVVLVGPSLKGYEVTDMMQKALFDFLKHRFEGRISITRVTADISLAKRSVLNNPSKHAIIERSNTRSSLAEVQSEIERIFELARTLQLVVLDADTINHPAQLSKTSLAPIIVYVKISSPKVLQRLIKSRGKSQAKHLNVQMVAADKLAQCPPELFDVILDENQLEDACEHLADYLEAYWKATHPPSSSLPNPLLSRTLATSSLPLSPTLASNSQGSQGDQRTDRSAPIRSASQAEEEPSVEPVKKSQHRSSSSAPHHNHRSGTSRGLSRQETFDSETQESRDSAYVEPKEDYSHDHVDHYASHRDHNHRDETHGSSDHRHRESRHRSRDVDREQDHNECNKQRSRHKSKDRYCEKDGEVISKKRNEAGEWNRDVYIRQ

SEQ ID NO: 10676 - protein, 355 aa, Homo sapiens
  Payload ID: 2126;
  Gene Symbol: CACNB2;
  Gene Name: calcium channel, voltage-dependent, beta 2 subunit;
  ENSP ID: ENSP00000480260
MQCCGLVHRRRVRVSYGSADSYTSRPSDSDVSLEEDREAVRREAERQAQAQLEKAKTKPVAFAVRTNVSYSAAHEDDVPVPGMAISFEAKDFLHVKEVLQRLIKSRGKSQAKHLNVQMVAADKLAQCPPELFDVILDENQLEDACEHLADYLEAYWKATHPPSSSLPNPLLSRTLATSSLPLSPTLASNSQGSQGDQRTDRSAPIRSASQAEEEPSVEPVKKSQHRSSSSAPHHNHRSGTSRGLSRQETFDSETQESRDSAYVEPKEDYSHDHVDHYASHRDHNHRDETHGSSDHRHRESRHRSRDVDREQDHNECNKQRSRHKSKDRYCEKDGEVISKKRNEAGEWNRDVYIRQ

SEQ ID NO: 10677 - protein, 176 aa, Homo sapiens
  Payload ID: 2126;
  Gene Symbol: CACNB2;
  Gene Name: calcium channel, voltage-dependent, beta 2 subunit;
  ENSP ID: ENSP00000480563
MLDRRLIAPQTKYIIPGGSADSYTSRPSDSDVSLEEDREAVRREAERQAQAQLEKAKTKPVAFAVRTNVSYSAAHEDDVPVPGMAISFEAKDFLHVKEKFNNDWWIGRLVKEGCEIGFIPSPVKLENMRLQHEQRAKQGKFYSSKSGGNSSSSLGDIVPSSRKSTPPSSDRAHSSV

SEQ ID NO: 10678 - protein, 484 aa, Homo sapiens
  Payload ID: 2127;
  Gene Symbol: CACNB3;
  Gene Name: calcium channel, voltage-dependent, beta 3 subunit;
  Uniprot ID:  P54284;
  ENSP ID: ENSP00000301050
MYDDSYVPGFEDSEAGSADSYTSRPSLDSDVSLEEDRESARREVESQAQQQLERAKHKPVAFAVRTNVSYCGVLDEECPVQGSGVNFEAKDFLHIKEKYSNDWWIGRLVKEGGDIAFIPSPQRLESIRLKQEQKARRSGNPSSLSDIGNRRSPPPSLAKQKQKQAEHVPPYDVVPSMRPVVLVGPSLKGYEVTDMMQKALFDFLKHRFDGRISITRVTADLSLAKRSVLNNPGKRTIIERSSARSSIAEVQSEIERIFELAKSLQLVVLDADTINHPAQLAKTSLAPIIVFVKVSSPKVLQRLIRSRGKSQMKHLTVQMMAYDKLVQCPPESFDVILDENQLEDACEHLAEYLEVYWRATHHPAPGPGLLGPPSAIPGLQNQQLLGERGEEHSPLERDSLMPSDEASESSRQAWTGSSQRSSRHLEEDYADAYQDLYQPHRQHTSGLPSANGHDPQDRLLAQDSEHNHSDRNWQRNRPWPKDSY

SEQ ID NO: 10679 - protein, 483 aa, Homo sapiens
  Payload ID: 2127;
  Gene Symbol: CACNB3;
  Gene Name: calcium channel, voltage-dependent, beta 3 subunit;
  Uniprot ID:  P54284;
  ENSP ID: ENSP00000444160
MSFSDSSATFLLNEGSADSYTSRPSLDSDVSLEEDRESARREVESQAQQQLERAKHKPVAFAVRTNVSYCGVLDEECPVQGSGVNFEAKDFLHIKEKYSNDWWIGRLVKEGGDIAFIPSPQRLESIRLKQEQKARRSGNPSSLSDIGNRRSPPPSLAKQKQKQAEHVPPYDVVPSMRPVVLVGPSLKGYEVTDMMQKALFDFLKHRFDGRISITRVTADLSLAKRSVLNNPGKRTIIERSSARSSIAEVQSEIERIFELAKSLQLVVLDADTINHPAQLAKTSLAPIIVFVKVSSPKVLQRLIRSRGKSQMKHLTVQMMAYDKLVQCPPESFDVILDENQLEDACEHLAEYLEVYWRATHHPAPGPGLLGPPSAIPGLQNQQLLGERGEEHSPLERDSLMPSDEASESSRQAWTGSSQRSSRHLEEDYADAYQDLYQPHRQHTSGLPSANGHDPQDRLLAQDSEHNHSDRNWQRNRPWPKDSY

SEQ ID NO: 10680 - protein, 471 aa, Homo sapiens
  Payload ID: 2127;
  Gene Symbol: CACNB3;
  Gene Name: calcium channel, voltage-dependent, beta 3 subunit;
  Uniprot ID:  P54284;
  ENSP ID: ENSP00000445495
MEGSADSYTSRPSLDSDVSLEEDRESARREVESQAQQQLERAKHKPVAFAVRTNVSYCGVLDEECPVQGSGVNFEAKDFLHIKEKYSNDWWIGRLVKEGGDIAFIPSPQRLESIRLKQEQKARRSGNPSSLSDIGNRRSPPPSLAKQKQKQAEHVPPYDVVPSMRPVVLVGPSLKGYEVTDMMQKALFDFLKHRFDGRISITRVTADLSLAKRSVLNNPGKRTIIERSSARSSIAEVQSEIERIFELAKSLQLVVLDADTINHPAQLAKTSLAPIIVFVKVSSPKVLQRLIRSRGKSQMKHLTVQMMAYDKLVQCPPESFDVILDENQLEDACEHLAEYLEVYWRATHHPAPGPGLLGPPSAIPGLQNQQLLGERGEEHSPLERDSLMPSDEASESSRQAWTGSSQRSSRHLEEDYADAYQDLYQPHRQHTSGLPSANGHDPQDRLLAQDSEHNHSDRNWQRNRPWPKDSY

SEQ ID NO: 10681 - protein, 457 aa, Homo sapiens
  Payload ID: 2127;
  Gene Symbol: CACNB3;
  Gene Name: calcium channel, voltage-dependent, beta 3 subunit;
  ENSP ID: ENSP00000446529
MYDDSYVPGFEDSEAGSADSYTSRPSLDSDVSLEEDRESARREVESQAQQQLERAKHKPVAFAVRTNVSYCGVLDEECPVQGSGVNFEAKDFLHIKEKYSNDWWIGRLVKEGGDIAFIPSPQRLESIRLKQEQKARRSGNPSSLSDIGNRRSPPPSLAKQKQKQVTDMMQKALFDFLKHRFDGRISITRVTADLSLAKRSVLNNPGKRTIIERSSARSSIAEVQSEIERIFELAKSLQLVVLDADTINHPAQLAKTSLAPIIVFVKVSSPKVLQRLIRSRGKSQMKHLTVQMMAYDKLVQCPPESFDVILDENQLEDACEHLAEYLEVYWRATHHPAPGPGLLGPPSAIPGLQNQQLLGERGEEHSPLERDSLMPSDEASESSRQAWTGSSQRSSRHLEEDYADAYQDLYQPHRQHTSGLPSANGHDPQDRLLAQDSEHNHSDRNWQRNRPWPKDSY

SEQ ID NO: 10682 - protein, 105 aa, Homo sapiens
  Payload ID: 2127;
  Gene Symbol: CACNB3;
  Gene Name: calcium channel, voltage-dependent, beta 3 subunit;
  ENSP ID: ENSP00000446611
MSFSDSSATFLLNEGSADSYTSRPSLDSDVSLEEDRESARREVESQAQQQLERAKHKPVAFAVRTNVSYCGVLDEECPVQGSGVNFEAKDFLHIKEEIWEPFQPE

SEQ ID NO: 10683 - protein, 84 aa, Homo sapiens
  Payload ID: 2127;
  Gene Symbol: CACNB3;
  Gene Name: calcium channel, voltage-dependent, beta 3 subunit;
  ENSP ID: ENSP00000447261
QQLERAKHKPVAFAVRTNVSYCGVLDEECPVQGSGVNFEAKDFLHIKENLGGPPCLSHSFALHPVISVLVPHTSLENRAPDFVP

SEQ ID NO: 10684 - protein, 37 aa, Homo sapiens
  Payload ID: 2127;
  Gene Symbol: CACNB3;
  Gene Name: calcium channel, voltage-dependent, beta 3 subunit;
  ENSP ID: ENSP00000447462
MYDDSYVPGFEDSEAPPAEASSAAGILSSCPAWRAWR

SEQ ID NO: 10685 - protein, 55 aa, Homo sapiens
  Payload ID: 2127;
  Gene Symbol: CACNB3;
  Gene Name: calcium channel, voltage-dependent, beta 3 subunit;
  ENSP ID: ENSP00000448074
MRPVVLVGPSLKGYEVTDMMQKALFDFLKHRFDGRISITRVTADLSLAKRSVLNN

SEQ ID NO: 10686 - protein, 76 aa, Homo sapiens
  Payload ID: 2127;
  Gene Symbol: CACNB3;
  Gene Name: calcium channel, voltage-dependent, beta 3 subunit;
  ENSP ID: ENSP00000448076
  MOD_RES (1)..(1): Any amino acid
XKDFLHIKEKYSNDWWIGRLVKEGGDIAFIPSPQRLESIRLKQEQKARRSGNPSSLSDIGNRRSPPPSLGGTCSPI

SEQ ID NO: 10687 - protein, 122 aa, Homo sapiens
  Payload ID: 2127;
  Gene Symbol: CACNB3;
  Gene Name: calcium channel, voltage-dependent, beta 3 subunit;
  ENSP ID: ENSP00000448137
MRPVVLVGPSLKGYEVTDMMQKALFDFLKHRFDGRISITRVTADLSLAKRSVLNNPGKRTIIERSSARSSIAEVQSEIERIFELAKSLQLVVLDADTINHPAQLAKTSLAPIIVFVKVSSPK

SEQ ID NO: 10688 - protein, 443 aa, Homo sapiens
  Payload ID: 2127;
  Gene Symbol: CACNB3;
  Gene Name: calcium channel, voltage-dependent, beta 3 subunit;
  Uniprot ID:  P54284;
  ENSP ID: ENSP00000448304
MYDDSYVPGFEDSEAGSADSYTSRPSLDSDVSLEEDRESARREVESQAQQQLERAKKYSNDWWIGRLVKEGGDIAFIPSPQRLESIRLKQEQKARRSGNPSSLSDIGNRRSPPPSLAKQKQKQAEHVPPYDVVPSMRPVVLVGPSLKGYEVTDMMQKALFDFLKHRFDGRISITRVTADLSLAKRSVLNNPGKRTIIERSSARSSIAEVQSEIERIFELAKSLQLVVLDADTINHPAQLAKTSLAPIIVFVKVSSPKVLQRLIRSRGKSQMKHLTVQMMAYDKLVQCPPESFDVILDENQLEDACEHLAEYLEVYWRATHHPAPGPGLLGPPSAIPGLQNQQLLGERGEEHSPLERDSLMPSDEASESSRQAWTGSSQRSSRHLEEDYADAYQDLYQPHRQHTSGLPSANGHDPQDRLLAQDSEHNHSDRNWQRNRPWPKDSY

SEQ ID NO: 10689 - protein, 151 aa, Homo sapiens
  Payload ID: 2127;
  Gene Symbol: CACNB3;
  Gene Name: calcium channel, voltage-dependent, beta 3 subunit;
  ENSP ID: ENSP00000449389
MEGSADSYTSRPSLDSDVSLEEDRESARREVESQAQQQLERAKHKPVAFAVRTNVSYCGVLDEECPVQGSGVNFEAKDFLHIKEKYSNDWWIGRLVKEGGDIAFIPSPQRLESIRLKQEQKARRSGNPSSLSDIGNRRSPPPSLGGTCSPI

SEQ ID NO: 10690 - protein, 144 aa, Homo sapiens
  Payload ID: 2127;
  Gene Symbol: CACNB3;
  Gene Name: calcium channel, voltage-dependent, beta 3 subunit;
  ENSP ID: ENSP00000449497
MYDDSYVPGFEDSEAGSADSYTSRPSLDSDVSLEEDRESARREVESQAQQQLERAKHKPVAFAVRTNVSYCGVLDEECPVQGSGVNFEAKDFLHIKEYSNDWWIGRLVKEGGDIAFIPSPQRLESIRLKQEQKARRSGNPSSLS

SEQ ID NO: 10691 - protein, 458 aa, Homo sapiens
  Payload ID: 2128;
  Gene Symbol: CACNB4;
  Gene Name: calcium channel, voltage-dependent, beta 4 subunit;
  Uniprot ID:  O00305;
  ENSP ID: ENSP00000201943
MSSSSYAKNGTADGPHSPTSQVARGTTTRRSRLKRSDGSTTSTSFILRQGSADSYTSRPSDSDVSLEEDREAIRQEREQQAAIQLERAKSKPVAFAVKTNVSYCGALDEDVPVPSTAISFDAKDFLHIKEKYNNDWWIGRLVKEGCEIGFIPSPLRLENIRIQQEQKRGRFHGGKSSGNSSSSLGEMVSGTFRATPTSTAKQKQKVTEHIPPYDVVPSMRPVVLVGPSLKGYEVTDMMQKALFDFLKHRFDGRISITRVTADISLAKRSVLNNPSKRAIIERSNTRSSLAEVQSEIERIFELARSLQLVVLDADTINHPAQLIKTSLAPIIVHVKVSSPKVLQRLIKSRGKSQSKHLNVQLVAADKLAQCPPSQRMRHSNHSTENSPIERRSLMTSDENYHNERARKSRNRLSSSSQHSRDHYPLVEEDYPDSYQDTYKPHRNRGSPGGYSHDSRHRL

SEQ ID NO: 10692 - protein, 207 aa, Homo sapiens
  Payload ID: 2128;
  Gene Symbol: CACNB4;
  Gene Name: calcium channel, voltage-dependent, beta 4 subunit;
  ENSP ID: ENSP00000353425
MYDNLYLHGIEDSEAGSADSYTSRPSDSDVSLEEDREAIRQEREQQAAIQLERAKSKPVAFAVKTNVSYCGALDEDVPVPSTAISFDAKDFLHIKEKYNNDWWIGRLVKEGCEIGFIPSPLRLENIRIQQEQKRGRFHGGKSSGNSSSSLGEMVSGTFRATPTSTAKQKQKVTEHIPPYDVVPSMRPVVLVGPSLKGYEDFNNESDS

SEQ ID NO: 10693 - protein, 473 aa, Homo sapiens
  Payload ID: 2128;
  Gene Symbol: CACNB4;
  Gene Name: calcium channel, voltage-dependent, beta 4 subunit;
  ENSP ID: ENSP00000380490
MAGSADSYTSRPSDSDVSLEEDREAIRQEREQQAAIQLERAKSKPVAFAVKTNVSYCGALDEDVPVPSTAISFDAKDFLHIKEKYNNDWWIGRLVKEGCEIGFIPSPLRLENIRIQQEQKRGRFHGGKSSGNSSSSLGEMVSGTFRATPTSTAKQKQKVTEHIPPYDVVPSMRPVVLVGPSLKGYEVTDMMQKALFDFLKHRFDGRISITRVTADISLAKRSVLNNPSKRAIIERSNTRSSLAEVQSEIERIFELARSLQLVVLDADTINHPAQLIKTSLAPIIVHVKVSSPKVLQRLIKSRGKSQSKHLNVQLVAADKLAQCPPEMFDVILDENQLEDACEHLGEYLEAYWRATHTTSSTPMTPLLGRNLGSTALSPYPTAISGLQSQRMRHSNHSTENSPIERRSLMTSDENYHNERARKSRNRLSSSSQHSRDHYPLVEEDYPDSYQDTYKPHRNRGSPGGYSHDSRHRL

SEQ ID NO: 10694 - protein, 515 aa, Homo sapiens
  Payload ID: 2128;
  Gene Symbol: CACNB4;
  Gene Name: calcium channel, voltage-dependent, beta 4 subunit;
  ENSP ID: ENSP00000390161
AAVLTGFSLAPVCRVQVARGTTTRRSRLKRSDGSTTSTSFILRQGSADSYTSRPSDSDVSLEEDREAIRQEREQQAAIQLERAKSKPVAFAVKTNVSYCGALDEDVPVPSTAISFDAKDFLHIKEKYNNDWWIGRLVKEGCEIGFIPSPLRLENIRIQQEQKRGRFHGGKSSGNSSSSLGEMVSGTFRATPTSTAKQKQKVTEHIPPYDVVPSMRPVVLVGPSLKGYEVTDMMQKALFDFLKHRFDGRISITRVTADISLAKRSVLNNPSKRAIIERSNTRSSLAEVQSEIERIFELARSLQLVVLDADTINHPAQLIKTSLAPIIVHVKVSSPKVLQRLIKSRGKSQSKHLNVQLVAADKLAQCPPEMFDVILDENQLEDACEHLGEYLEAYWRATHTTSSTPMTPLLGRNLGSTALSPYPTAISGLQSQRMRHSNHSTENSPIERRSLMTSDENYHNERARKSRNRLSSSSQHSRDHYPLVEEDYPDSYQDTYKPHRNRGSPGGYSHDSRHRL

SEQ ID NO: 10695 - protein, 108 aa, Homo sapiens
  Payload ID: 2128;
  Gene Symbol: CACNB4;
  Gene Name: calcium channel, voltage-dependent, beta 4 subunit;
  ENSP ID: ENSP00000399242
MAGSADSYTSRPSDSDVSLEEDREAIRQEREQQAAIQLERAKSKPVAFAVKTNVSYCGALDEDVPVPSTAISFDAKDFLHIKEKYNNDWWIGRLVKEGCEIGFIPSPL

SEQ ID NO: 10696 - protein, 502 aa, Homo sapiens
  Payload ID: 2128;
  Gene Symbol: CACNB4;
  Gene Name: calcium channel, voltage-dependent, beta 4 subunit;
  Uniprot ID:  O00305;
  ENSP ID: ENSP00000410978
MDVVARGTTTRRSRLKRSDGSTTSTSFILRQGSADSYTSRPSDSDVSLEEDREAIRQEREQQAAIQLERAKSKPVAFAVKTNVSYCGALDEDVPVPSTAISFDAKDFLHIKEKYNNDWWIGRLVKEGCEIGFIPSPLRLENIRIQQEQKRGRFHGGKSSGNSSSSLGEMVSGTFRATPTSTAKQKQKVTEHIPPYDVVPSMRPVVLVGPSLKGYEVTDMMQKALFDFLKHRFDGRISITRVTADISLAKRSVLNNPSKRAIIERSNTRSSLAEVQSEIERIFELARSLQLVVLDADTINHPAQLIKTSLAPIIVHVKVSSPKVLQRLIKSRGKSQSKHLNVQLVAADKLAQCPPEMFDVILDENQLEDACEHLGEYLEAYWRATHTTSSTPMTPLLGRNLGSTALSPYPTAISGLQSQRMRHSNHSTENSPIERRSLMTSDENYHNERARKSRNRLSSSSQHSRDHYPLVEEDYPDSYQDTYKPHRNRGSPGGYSHDSRHRL

SEQ ID NO: 10697 - protein, 520 aa, Homo sapiens
  Payload ID: 2128;
  Gene Symbol: CACNB4;
  Gene Name: calcium channel, voltage-dependent, beta 4 subunit;
  Uniprot ID:  O00305;
  ENSP ID: ENSP00000438949
MSSSSYAKNGTADGPHSPTSQVARGTTTRRSRLKRSDGSTTSTSFILRQGSADSYTSRPSDSDVSLEEDREAIRQEREQQAAIQLERAKSKPVAFAVKTNVSYCGALDEDVPVPSTAISFDAKDFLHIKEKYNNDWWIGRLVKEGCEIGFIPSPLRLENIRIQQEQKRGRFHGGKSSGNSSSSLGEMVSGTFRATPTSTAKQKQKVTEHIPPYDVVPSMRPVVLVGPSLKGYEVTDMMQKALFDFLKHRFDGRISITRVTADISLAKRSVLNNPSKRAIIERSNTRSSLAEVQSEIERIFELARSLQLVVLDADTINHPAQLIKTSLAPIIVHVKVSSPKVLQRLIKSRGKSQSKHLNVQLVAADKLAQCPPEMFDVILDENQLEDACEHLGEYLEAYWRATHTTSSTPMTPLLGRNLGSTALSPYPTAISGLQSQRMRHSNHSTENSPIERRSLMTSDENYHNERARKSRNRLSSSSQHSRDHYPLVEEDYPDSYQDTYKPHRNRGSPGGYSHDSRHRL

SEQ ID NO: 10698 - protein, 486 aa, Homo sapiens
  Payload ID: 2128;
  Gene Symbol: CACNB4;
  Gene Name: calcium channel, voltage-dependent, beta 4 subunit;
  Uniprot ID:  O00305;
  ENSP ID: ENSP00000443893
MYDNLYLHGIEDSEAGSADSYTSRPSDSDVSLEEDREAIRQEREQQAAIQLERAKSKPVAFAVKTNVSYCGALDEDVPVPSTAISFDAKDFLHIKEKYNNDWWIGRLVKEGCEIGFIPSPLRLENIRIQQEQKRGRFHGGKSSGNSSSSLGEMVSGTFRATPTSTAKQKQKVTEHIPPYDVVPSMRPVVLVGPSLKGYEVTDMMQKALFDFLKHRFDGRISITRVTADISLAKRSVLNNPSKRAIIERSNTRSSLAEVQSEIERIFELARSLQLVVLDADTINHPAQLIKTSLAPIIVHVKVSSPKVLQRLIKSRGKSQSKHLNVQLVAADKLAQCPPEMFDVILDENQLEDACEHLGEYLEAYWRATHTTSSTPMTPLLGRNLGSTALSPYPTAISGLQSQRMRHSNHSTENSPIERRSLMTSDENYHNERARKSRNRLSSSSQHSRDHYPLVEEDYPDSYQDTYKPHRNRGSPGGYSHDSRHRL

SEQ ID NO: 10699 - protein, 114 aa, Homo sapiens
  Payload ID: 2129;
  Gene Symbol: CBARP;
  Gene Name: calcium channel, voltage-dependent, beta subunit associated regulatory prt;
  ENSP ID: ENSP00000215376
MQPTATMATAATTTTTTTATVALTTSWDNATGRPTAEPDPILDNYVLLVVVMSLFVGGTLVVLSGVLLLCKRCWDVHQRLNRAMEEAEKTTTTYLDNGTHPAQGVGGPRRVLSE

SEQ ID NO: 10700 - protein, 725 aa, Homo sapiens
  Payload ID: 2129;
  Gene Symbol: CBARP;
  Gene Name: calcium channel, voltage-dependent, beta subunit associated regulatory prt;
  Uniprot ID:  Q8N350;
  ENSP ID: ENSP00000371917
MATAATTTTTTTATVALTTSWDNATGRPTAEPDPILDNYVLLVVVMSLFVGGTLVVLSGVLLLCKRCWDVHQRLNRAMEEAEKTTTTYLDNGTHPAQDPDFRGEDPECQDAETERFLSTSSTGRRVSFNEAALFEQSRKTQDKGRQGGWQSTAAGASGMGGGRALMARCCRRYTLTEGDFHHLKNARLTHLHLPPLKIVTIHECDSGEASSATTPHPATSPKATLAIFQPPGKALTGRSVGPSSALPGDPYNSAAGATDFAEISPSASSDSGEGTSLDAGTRSTKAGGPGAAAGPGEAGPGSGAGTVLQFLTRLRRHASLDGASPYFKVKKWKLEPSQRAASLDTRGSPKRHHFQRQRAASESTEQEEGDAPQEDFIQYIARAGDAVAFPHPRPFLASPPPALGRLEAAEAAGGASPDSPPERGAGSAGPEQQQPPLEPDAERDAGPEQAQTSYRDLWSLRASLELHAAASDHSSSGNDRDSVRSGDSSGSGSGGAAPAFPPPSPPAPRPKDGEARRLLQMDSGYASIEGRGAGDDTEPPAAPARPRSPRAWPRRPRRDYSIDEKTDALFHEFLRHDPHFDDTPAAARHRARAHPHARKQWQRGRQHSDPGARAAPALAGTPAPPAGAARPARAPLRRGDSVDGPPDGRTLGGAGDDPAIPVIEEEPGGGGCPGSGLCVLPSGSVLDKLAAGLDERLFPPRLAEPVVATPALVAAAPTSPDHSPA

SEQ ID NO: 10701 - protein, 49 aa, Homo sapiens
  Payload ID: 2129;
  Gene Symbol: CBARP;
  Gene Name: calcium channel, voltage-dependent, beta subunit associated regulatory prt;
  ENSP ID: ENSP00000464878
MQPTATMATAATTTTTTTATVALTTSWDNATGRPTSQTPSWTTTCCWWW

SEQ ID NO: 10702 - protein, 453 aa, Homo sapiens
  Payload ID: 2129;
  Gene Symbol: CBARP;
  Gene Name: calcium channel, voltage-dependent, beta subunit associated regulatory prt;
  ENSP ID: ENSP00000465260
MQPTATMATAATTTTTTTATVALTTSWDNATGRPTAEPDPILDNYVLLVVVMSLFVGGTLVVLSGVLLLCKRCWDVHQRLNRAMEEAEKTTTTYLDNGTHPAQDPDFRGEDPECQDAETERFLSTSSTGRRVSFNEAALFEQSRKTQDKGRRYTLTEGDFHHLKNARLTHLHLPPLKIVTIHECDSGEASSATTPHPATSPKATLAIFQPPGKALTGRSVGPSSALPGDPYNSAAGATDFAEISPSASSDSGEGTSLDAGTRSTKAGGPGAAAGPGEAGPGSGAGTVLQFLTRLRRHASLDGASPYFKVKKWKLEPSQRAASLDTRGSPKRHHFQRQRAASESTEQEEGDAPQEDFIQYIARAGDAVAFPHPRPFLASPPPALGRYFSVDGGARGGPVGPCPPSPPPRRPRERSPGPVDTRSPASSGKAPPRGGLTGATSPAWTRGGKQGETG

SEQ ID NO: 10703 - protein, 91 aa, Homo sapiens
  Payload ID: 2129;
  Gene Symbol: CBARP;
  Gene Name: calcium channel, voltage-dependent, beta subunit associated regulatory prt;
  ENSP ID: ENSP00000466109
  MOD_RES (1)..(1): Any amino acid
XTSSTGRRVSFNEAALFEQSRKTQDKGRRYTLTEGDFHHLKNARLTHLHLPPLKIVTIHECDSGEASSATTPHPATSPKATLAIFQLRPAR

SEQ ID NO: 10704 - protein, 222 aa, Homo sapiens
  Payload ID: 2130;
  Gene Symbol: CACNG1;
  Gene Name: calcium channel, voltage-dependent, gamma subunit 1;
  Uniprot ID:  Q06432;
  ENSP ID: ENSP00000226021
MSQTKMLKVRVTLFCILAGIVLAMTAVVTDHWAVLSPHMEHHNTTCEAAHFGLWRICTKRIPMDDSKTCGPITLPGEKNCSYFRHFNPGESSEIFEFTTQKEYSISAAAIAIFSLGFIILGSLCVLLSLGKKRDYLLRPASMFYAFAGLCILVSVEVMRQSVKRMIDSEDTVWIEYYYSWSFACACAAFILLFLGGLALLLFSLPRMPRNPWESCMDAEPEH

SEQ ID NO: 10705 - protein, 323 aa, Homo sapiens
  Payload ID: 2131;
  Gene Symbol: CACNG2;
  Gene Name: calcium channel, voltage-dependent, gamma subunit 2;
  Uniprot ID:  Q9Y698;
  ENSP ID: ENSP00000300105
MGLFDRGVQMLLTTVGAFAAFSLMTIAVGTDYWLYSRGVCKTKSVSENETSKKNEEVMTHSGLWRTCCLEGNFKGLCKQIDHFPEDADYEADTAEYFLRAVRASSIFPILSVILLFMGGLCIAASEFYKTRHNIILSAGIFFVSAGLSNIIGIIVYISANAGDPSKSDSKKNSYSYGWSFYFGALSFIIAEMVGVLAVHMFIDRHKQLRATARATDYLQASAITRIPSYRYRYQRRSRSSSRSTEPSHSRDASPVGIKGFNTLPSTEISMYTLSRDPLKAATTPTATYNSDRDNSFLQVHNCIQKENKDSLHSNTANRRTTPV

SEQ ID NO: 10706 - protein, 315 aa, Homo sapiens
  Payload ID: 2132;
  Gene Symbol: CACNG3;
  Gene Name: calcium channel, voltage-dependent, gamma subunit 3;
  Uniprot ID:  O60359;
  ENSP ID: ENSP00000005284
MRMCDRGIQMLITTVGAFAAFSLMTIAVGTDYWLYSRGVCRTKSTSDNETSRKNEEVMTHSGLWRTCCLEGAFRGVCKKIDHFPEDADYEQDTAEYLLRAVRASSVFPILSVTLLFFGGLCVAASEFHRSRHNVILSAGIFFVSAGLSNIIGIIVYISANAGDPGQRDSKKSYSYGWSFYFGAFSFIIAEIVGVVAVHIYIEKHQQLRAKSHSEFLKKSTFARLPPYRYRFRRRSSSRSTEPRSRDLSPISKGFHTIPSTDISMFTLSRDPSKITMGTLLNSDRDHAFLQFHNSTPKEFKESLHNNPANRRTTPV

SEQ ID NO: 10707 - protein, 327 aa, Homo sapiens
  Payload ID: 2133;
  Gene Symbol: CACNG4;
  Gene Name: calcium channel, voltage-dependent, gamma subunit 4;
  Uniprot ID:  Q9UBN1;
  ENSP ID: ENSP00000262138
MVRCDRGLQMLLTTAGAFAAFSLMAIAIGTDYWLYSSAHICNGTNLTMDDGPPPRRARGDLTHSGLWRVCCIEGIYKGHCFRINHFPEDNDYDHDSSEYLLRIVRASSVFPILSTILLLLGGLCIGAGRIYSRKNNIVLSAGILFVAAGLSNIIGIIVYISSNTGDPSDKRDEDKKNHYNYGWSFYFGALSFIVAETVGVLAVNIYIEKNKELRFKTKREFLKASSSSPYARMPSYRYRRRRSRSSSRSTEASPSRDVSPMGLKITGAIPMGELSMYTLSREPLKVTTAASYSPDQEASFLQVHDFFQQDLKEGFHVSMLNRRTTPV

SEQ ID NO: 10708 - protein, 275 aa, Homo sapiens
  Payload ID: 2134;
  Gene Symbol: CACNG5;
  Gene Name: calcium channel, voltage-dependent, gamma subunit 5;
  Uniprot ID:  Q9UF02;
  ENSP ID: ENSP00000303092
MSACGRKALTLLSSVFAVCGLGLLGIAVSTDYWLYLEEGVIVPQNQSTEIKMSLHSGLWRVCFLAGEERGRCFTIEYVMPMNTQLTSESTVNVLKMIRSATPFPLVSLFFMFIGFILNNIGHIRPHRTILAFVSGIFFILSGLSLVVGLVLYISSINDEMLNRTKDAETYFNYKYGWSFAFAAISFLLTESAGVMSVYLFMKRYTAEDMYRPHPGFYRPRLSNCSDYSGQFLHPDAWVRGRSPSDISSEASLQMNSNYPALLKCPDYDQMSSSPC

SEQ ID NO: 10709 - protein, 275 aa, Homo sapiens; identical to SEQ ID NO: 10708
  Payload ID: 2134;
  Gene Symbol: CACNG5;
  Gene Name: calcium channel, voltage-dependent, gamma subunit 5;
  Uniprot ID:  Q9UF02;
  ENSP ID: ENSP00000436836

SEQ ID NO: 10710 - protein, 260 aa, Homo sapiens
  Payload ID: 2135;
  Gene Symbol: CACNG6;
  Gene Name: calcium channel, voltage-dependent, gamma subunit 6;
  Uniprot ID:  Q9BXT2;
  ENSP ID: ENSP00000252729
MMWSNFFLQEENRRRGAAGRRRAHGQGRSGLTPEREGKVKLALLLAAVGATLAVLSVGTEFWVELNTYKANGSAVCEAAHLGLWKACTKRLWQADVPVDRDTCGPAELPGEANCTYFKFFTTGENARIFQRTTKKEVNLAAAVIAVLGLAVMALGCLCIIMVLSKGAEFLLRVGAVCFGLSGLLLLVSLEVFRHSVRALLQRVSPEPPPAPRLTYEYSWSLGCGVGAGLILLLGAGCFLLLTLPSWPWGSLCPKRGHRAT

SEQ ID NO: 10711 - protein, 214 aa, Homo sapiens
  Payload ID: 2135;
  Gene Symbol: CACNG6;
  Gene Name: calcium channel, voltage-dependent, gamma subunit 6;
  ENSP ID: ENSP00000319097
MMWSNFFLQEENRRRGAAGRRRAHGQGRSGLTPEREGKVKLALLLAAVGATLAVLSVGTEFWVELNTYKANGSAVCEAAHLGLWKACTKRLWQADVPVDRDTCGPAELPGEANCTYFKFFTTGENARIFQRTTKKGLLLLVSLEVFRHSVRALLQRVSPEPPPAPRLTYEYSWSLGCGVGAGLILLLGAGCFLLLTLPSWPWGSLCPKRGHRAT

SEQ ID NO: 10712 - protein, 189 aa, Homo sapiens
  Payload ID: 2135;
  Gene Symbol: CACNG6;
  Gene Name: calcium channel, voltage-dependent, gamma subunit 6;
  ENSP ID: ENSP00000319135
MMWSNFFLQEENRRRGAAGRRRAHGQGRSGLTPEREGKVKLALLLAAVGATLAVLSVGTEFWVELNTYKANGSAVCEAAHLGLWKACTKRLWQADVPVDRDTCGPAELPGGLLLLVSLEVFRHSVRALLQRVSPEPPPAPRLTYEYSWSLGCGVGAGLILLLGAGCFLLLTLPSWPWGSLCPKRGHRAT

SEQ ID NO: 10713 - protein, 275 aa, Homo sapiens
  Payload ID: 2136;
  Gene Symbol: CACNG7;
  Gene Name: calcium channel, voltage-dependent, gamma subunit 7;
  Uniprot ID:  P62955;
  ENSP ID: ENSP00000222212
MSHCSSRALTLLSSVFGACGLLLVGIAVSTDYWLYMEEGTVLPQNQTTEVKMALHAGLWRVCFFAGREKGRCVASEYFLEPEINLVTENTENILKTVRTATPFPMVSLFLVFTAFVISNIGHIRPQRTILAFVSGIFFILSGLSLVVGLVLYISSINDEVMNRPSSSEQYFHYRYGWSFAFAASSFLLKEGAGVMSVYLFTKRYAEEEMYRPHPAFYRPRLSDCSDYSGQFLQPEAWRRGRSPSDISSDVSIQMTQNYPPAIKYPDHLHISTSPC

SEQ ID NO: 10714 - protein, 198 aa, Homo sapiens
  Payload ID: 2136;
  Gene Symbol: CACNG7;
  Gene Name: calcium channel, voltage-dependent, gamma subunit 7;
  ENSP ID: ENSP00000375646
MSHCSSRALTLLSSVFGACGLLLVGIAVSTDYWLYMEEGTVLPQNQTTEVKMALHAGLWRVCFFAGREKGRCVASEYFLEPEINLVTENTENILKTVRTATPFPMVSLFLVFTAFVISNIGHIRPQRTILAFVSGIFFILSGLSLVVGLVLYISSINDEVMNRPSSSEQYFHYRYGWSFAFAASSFLLKEVTSVGPRL

SEQ ID NO: 10715 - protein, 275 aa, Homo sapiens; identical to SEQ ID NO: 10713
  Payload ID: 2136;
  Gene Symbol: CACNG7;
  Gene Name: calcium channel, voltage-dependent, gamma subunit 7;
  Uniprot ID:  P62955;
  ENSP ID: ENSP00000375647

SEQ ID NO: 10716 - protein, 425 aa, Homo sapiens
  Payload ID: 2137;
  Gene Symbol: CACNG8;
  Gene Name: calcium channel, voltage-dependent, gamma subunit 8;
  Uniprot ID:  Q8WXS5;
  ENSP ID: ENSP00000270458
LESLKRWNEERGLWCEKGVQVLLTTVGAFAAFGLMTIAISTDYWLYTRALICNTTNLTAGGDDGTPHRGGGGASEKKDPGGLTHSGLWRICCLEGLKRGVCVKINHFPEDTDYDHDSAEYLLRVVRASSIFPILSAILLLLGGVCVAASRVYKSKRNIILGAGILFVAAGLSNIIGVIVYISANAGEPGPKRDEEKKNHYSYGWSFYFGGLSFILAEVIGVLAVNIYIERSREAHCQSRSDLLKAGGGAGGSGGSGPSAILRLPSYRFRYRRRSRSSSRSSEPSPSRDASPGGPGGPGFASTDISMYTLSRDPSKGSVAAGLAGAGGGGGGAVGAFGGAAGGAGGGGGGGGGAGAERDRGGASGFLTLHNAFPKEAGGGVTVTVTGPPAPPAPAPPAPSAPAPGTLAKEAAASNTNTLNRKTTPV

SEQ ID NO: 10717 - protein, 2186 aa, Homo sapiens
  Payload ID: 2138;
  Gene Symbol: CACNA1C;
  Gene Name: calcium channel, voltage-dependent, L type, alpha 1C subunit;
  Uniprot ID:  Q13936;
  ENSP ID: ENSP00000266376
MVNENTRMYIPEENHQGSNYGSPRPAHANMNANAAAGLAPEHIPTPGAALSWQAAIDAARQAKLMGSAGNATISTVSSTQRKRQQYGKPKKQGSTTATRPPRALLCLTLKNPIRRACISIVEWKPFEIIILLTIFANCVALAIYIPFPEDDSNATNSNLERVEYLFLIIFTVEAFLKVIAYGLLFHPNAYLRNGWNLLDFIIVVVGLFSAILEQATKADGANALGGKGAGFDVKALRAFRVLRPLRLVSGVPSLQVVLNSIIKAMVPLLHIALLVLFVIIIYAIIGLELFMGKMHKTCYNQEGIADVPAEDDPSPCALETGHGRQCQNGTVCKPGWDGPKHGITNFDNFAFAMLTVFQCITMEGWTDVLYWVNDAVGRDWPWIYFVTLIIIGSFFVLNLVLGVLSGEFSKEREKAKARGDFQKLREKQQLEEDLKGYLDWITQAEDIDPENEDEGMDEEKPRNMSMPTSETESVNTENVAGGDIEGENCGARLAHRISKSKFSRYWRRWNRFCRRKCRAAVKSNVFYWLVIFLVFLNTLTIASEHYNQPNWLTEVQDTANKALLALFTAEMLLKMYSLGLQAYFVSLFNRFDCFVVCGGILETILVETKIMSPLGISVLRCVRLLRIFKITRYWNSLSNLVASLLNSVRSIASLLLLLFLFIIIFSLLGMQLFGGKFNFDEMQTRRSTFDNFPQSLLTVFQILTGEDWNSVMYDGIMAYGGPSFPGMLVCIYFIILFICGNYILLNVFLAIAVDNLADAESLTSAQKEEEEEKERKKLARTASPEKKQELVEKPAVGESKEEKIELKSITADGESPPATKINMDDLQPNENEDKSPYPNPETTGEEDEEEPEMPVGPRPRPLSELHLKEKAVPMPEASAFFIFSSNNRFRLQCHRIVNDTIFTNLILFFILLSSISLAAEDPVQHTSFRNHILFYFDIVFTTIFTIEIALKILGNADYVFTSIFTLEIILKMTAYGAFLHKGSFCRNYFNILDLLVVSVSLISFGIQSSAINVVKILRVLRVLRPLRAINRAKGLKHVVQCVFVAIRTIGNIVIVTTLLQFMFACIGVQLFKGKLYTCSDSSKQTEAECKGNYITYKDGEVDHPIIQPRSWENSKFDFDNVLAAMMALFTVSTFEGWPELLYRSIDSHTEDKGPIYNYRVEISIFFIIYIIIIAFFMMNIFVGFVIVTFQEQGEQEYKNCELDKNQRQCVEYALKARPLRRYIPKNQHQYKVWYVVNSTYFEYLMFVLILLNTICLAMQHYGQSCLFKIAMNILNMLFTGLFTVEMILKLIAFKPKGYFSDPWNVFDFLIVIGSIIDVILSETNHYFCDAWNTFDALIVVGSIVDIAITEVNPAEHTQCSPSMNAEENSRISITFFRLFRVMRLVKLLSRGEGIRTLLWTFIKSFQALPYVALLIVMLFFIYAVIGMQVFGKIALNDTTEINRNNNFQTFPQAVLLLFRCATGEAWQDIMLACMPGKKCAPESEPSNSTEGETPCGSSFAVFYFISFYMLCAFLIINLFVAVIMDNFDYLTRDWSILGPHHLDEFKRIWAEYDPEAKGRIKHLDVVTLLRRIQPPLGFGKLCPHRVACKRLVSMNMPLNSDGTVMFNATLFALVRTALRIKTEGNLEQANEELRAIIKKIWKRTSMKLLDQVVPPAGDDEVTVGKFYATFLIQEYFRKFKKRKEQGLVGKPSQRNALSLQAGLRTLHDIGPEIRRAISGDLTAEEELDKAMKEAVSAASEDDIFRRAGGLFGNHVSYYQSDGRSAFPQTFTTQRPLHINKAGSSQGDTESPSHEKLVDSTFTPSSYSSTGSNANINNANNTALGRLPRPAGYPSTVSTVEGHGPPLSPAIRVQEVAWKLSSNRCHSRESQAAMAGQEETSQDETYEVKMNHDTEACSEPSLLSTEMLSYQDDENRQLTLPEEDKRDIRQSPKRGFLRSASLGRRASFHLECLKRQKDRGGDISQKTVLPLHLVHHQALAVAGLSPLLQRSHSPASFPRPFATPPATPGSRGWPPQPVPTLRLEGVESSEKLNSSFPSIHCGSWAETTPGGGGSSAARRVRPVSLMVPSQAGAPGRQFHGSASSLVEAVLISEGLGQFAQDPKFIEVTTQELADACDMTIEEMESAADNILSGGAPQSPNGALLPFVNCRDAGQDRAGGEEDAGCVRARGRPSEEELQDSRVYVSSL

SEQ ID NO: 10718 - protein, 2173 aa, Homo sapiens
  Payload ID: 2138;
  Gene Symbol: CACNA1C;
  Gene Name: calcium channel, voltage-dependent, L type, alpha 1C subunit;
  ENSP ID: ENSP00000329877
MVNENTRMYIPEENHQGSNYGSPRPAHANMNANAAAGLAPEHIPTPGAALSWQAAIDAARQAKLMGSAGNATISTVSSTQRKRQQYGKPKKQGSTTATRPPRALLCLTLKNPIRRACISIVEWKPFEIIILLTIFANCVALAIYIPFPEDDSNATNSNLERVEYLFLIIFTVEAFLKVIAYGLLFHPNAYLRNGWNLLDFIIVVVGLFSAILEQATKADGANALGGKGAGFDVKALRAFRVLRPLRLVSGVPSLQVVLNSIIKAMVPLLHIALLVLFVIIIYAIIGLELFMGKMHKTCYNQEGIADVPAEDDPSPCALETGHGRQCQNGTVCKPGWDGPKHGITNFDNFAFAMLTVFQCITMEGWTDVLYWVNDAVGRDWPWIYFVTLIIIGSFFVLNLVLGVLSGEFSKEREKAKARGDFQKLREKQQLEEDLKGYLDWITQAEDIDPENEDEGMDEEKPRNMSMPTSETESVNTENVAGGDIEGENCGARLAHRISKSKFSRYWRRWNRFCRRKCRAAVKSNVFYWLVIFLVFLNTLTIASEHYNQPNWLTEVQDTANKALLALFTAEMLLKMYSLGLQAYFVSLFNRFDCFVVCGGILETILVETKIMSPLGISVLRCVRLLRIFKITRYWNSLSNLVASLLNSVRSIASLLLLLFLFIIIFSLLGMQLFGGKFNFDEMQTRRSTFDNFPQSLLTVFQILTGEDWNSVMYDGIMAYGGPSFPGMLVCIYFIILFICGNYILLNVFLAIAVDNLADAESLTSAQKEEEEEKERKKLARTASPEKKQELVEKPAVGESKEEKIELKSITADGESPPATKINMDDLQPNENEDKSPYPNPETTGEEDEEEPEMPVGPRPRPLSELHLKEKAVPMPEASAFFIFSSNNRFRLQCHRIVNDTIFTNLILFFILLSSISLAAEDPVQHTSFRNHILGNADYVFTSIFTLEIILKMTAYGAFLHKGSFCRNYFNILDLLVVSVSLISFGIQSSAINVVKILRVLRVLRPLRAINRAKGLKHVVQCVFVAIRTIGNIVIVTTLLQFMFACIGVQLFKGKLYTCSDSSKQTEAECKGNYITYKDGEVDHPIIQPRSWENSKFDFDNVLAAMMALFTVSTFEGWPELLYRSIDSHTEDKGPIYNYRVEISIFFIIYIIIIAFFMMNIFVGFVIVTFQEQGEQEYKNCELDKNQRQCVEYALKARPLRRYIPKNQHQYKVWYVVNSTYFEYLMFVLILLNTICLAMQHYGQSCLFKIAMNILNMLFTGLFTVEMILKLIAFKPKHYFCDAWNTFDALIVVGSIVDIAITEVNPAEHTQCSPSMNAEENSRISITFFRLFRVMRLVKLLSRGEGIRTLLWTFIKSFQALPYVALLIVMLFFIYAVIGMQVFGKIALNDTTEINRNNNFQTFPQAVLLLFRCATGEAWQDIMLACMPGKKCAPESEPSNSTEGETPCGSSFAVFYFISFYMLCAFLIINLFVAVIMDNFDYLTRDWSILGPHHLDEFKRIWAEYDPEAKGRIKHLDVVTLLRRIQPPLGFGKLCPHRVACKRLVSMNMPLNSDGTVMFNATLFALVRTALRIKTEGNLEQANEELRAIIKKIWKRTSMKLLDQVVPPAGDDEVTVGKFYATFLIQEYFRKFKKRKEQGLVGKPSQRNALSLQAGLRTLHDIGPEIRRAISGDLTAEEELDKAMKEAVSAASEDDIFRRAGGLFGNHVSYYQSDGRSAFPQTFTTQRPLHINKAGSSQGDTESPSHEKLVDSTFTPSSYSSTGSNANINNANNTALGRLPRPAGYPSTVSTVEGHGPPLSPAIRVQEVAWKLSSNRERHVPMCEDLELRRDSGSAGTQAHCLLLRRANPSRCHSRESQAAMAGQEETSQDETYEVKMNHDTEACSEPSLLSTEMLSYQDDENRQLTLPEEDKRDIRQSPKRGFLRSASLGRRASFHLECLKRQKDRGGDISQKTVLPLHLVHHQALAVAGLSPLLQRSHSPASFPRPFATPPATPGSRGWPPQPVPTLRLEGVESSEKLNSSFPSIHCGSWAETTPGGGGSSAARRVRPVSLMVPSQAGAPGRQFHGSASSLVEAVLISEGLGQFAQDPKFIEVTTQELADACDMTIEEMESAADNILSGGAPQSPNGALLPFVNCRDAGQDRAGGEEDAGCVRARGRPSEEELQDSRVYVSSL

SEQ ID NO: 10719 - protein, 2163 aa, Homo sapiens
  Payload ID: 2138;
  Gene Symbol: CACNA1C;
  Gene Name: calcium channel, voltage-dependent, L type, alpha 1C subunit;
  ENSP ID: ENSP00000336982
MVNENTRMYIPEENHQGSNYGSPRPAHANMNANAAAGLAPEHIPTPGAALSWQAAIDAARQAKLMGSAGNATISTVSSTQRKRQQYGKPKKQGSTTATRPPRALLCLTLKNPIRRACISIVEWKPFEIIILLTIFANCVALAIYIPFPEDDSNATNSNLERVEYLFLIIFTVEAFLKVIAYGLLFHPNAYLRNGWNLLDFIIVVVGLFSAILEQATKADGANALGGKGAGFDVKALRAFRVLRPLRLVSGVPSLQVVLNSIIKAMVPLLHIALLVLFVIIIYAIIGLELFMGKMHKTCYNQEGIADVPAEDDPSPCALETGHGRQCQNGTVCKPGWDGPKHGITNFDNFAFAMLTVFQCITMEGWTDVLYWVNDAVGRDWPWIYFVTLIIIGSFFVLNLVLGVLSGEFSKEREKAKARGDFQKLREKQQLEEDLKGYLDWITQAEDIDPENEDEGMDEEKPRNRGTPAGMLDQKKGKFAWFSHSTETHVSMPTSETESVNTENVAGGDIEGENCGARLAHRISKSKFSRYWRRWNRFCRRKCRAAVKSNVFYWLVIFLVFLNTLTIASEHYNQPNWLTEVQDTANKALLALFTAEMLLKMYSLGLQAYFVSLFNRFDCFVVCGGILETILVETKIMSPLGISVLRCVRLLRIFKITRYWNSLSNLVASLLNSVRSIASLLLLLFLFIIIFSLLGMQLFGGKFNFDEMQTRRSTFDNFPQSLLTVFQILTGEDWNSVMYDGIMAYGGPSFPGMLVCIYFIILFICGNYILLNVFLAIAVDNLADAESLTSAQKEEEEEKERKKLARTASPEKKQELVEKPAVGESKEEKIELKSITADGESPPATKINMDDLQPNENEDKSPYPNPETTGEEDEEEPEMPVGPRPRPLSELHLKEKAVPMPEASAFFIFSSNNRFRLQCHRIVNDTIFTNLILFFILLSSISLAAEDPVQHTSFRNHILFYFDIVFTTIFTIEIALKMTAYGAFLHKGSFCRNYFNILDLLVVSVSLISFGIQSSAINVVKILRVLRVLRPLRAINRAKGLKHVVQCVFVAIRTIGNIVIVTTLLQFMFACIGVQLFKGKLYTCSDSSKQTEAECKGNYITYKDGEVDHPIIQPRSWENSKFDFDNVLAAMMALFTVSTFEGWPELLYRSIDSHTEDKGPIYNYRVEISIFFIIYIIIIAFFMMNIFVGFVIVTFQEQGEQEYKNCELDKNQRQCVEYALKARPLRRYIPKNQHQYKVWYVVNSTYFEYLMFVLILLNTICLAMQHYGQSCLFKIAMNILNMLFTGLFTVEMILKLIAFKPKHYFCDAWNTFDALIVVGSIVDIAITEVNPAEHTQCSPSMNAEENSRISITFFRLFRVMRLVKLLSRGEGIRTLLWTFIKSFQALPYVALLIVMLFFIYAVIGMQVFGKIALNDTTEINRNNNFQTFPQAVLLLFRCATGEAWQDIMLACMPGKKCAPESEPSNSTEGETPCGSSFAVFYFISFYMLCAFLIINLFVAVIMDNFDYLTRDWSILGPHHLDEFKRIWAEYDPEAKGRIKHLDVVTLLRRIQPPLGFGKLCPHRVACKRLVSMNMPLNSDGTVMFNATLFALVRTALRIKTEGNLEQANEELRAIIKKIWKRTSMKLLDQVVPPAGDDEVTVGKFYATFLIQEYFRKFKKRKEQGLVGKPSQRNALSLQAGLRTLHDIGPEIRRAISGDLTAEEELDKAMKEAVSAASEDDIFRRAGGLFGNHVSYYQSDGRSAFPQTFTTQRPLHINKAGSSQGDTESPSHEKLVDSTFTPSSYSSTGSNANINNANNTALGRLPRPAGYPSTVSTVEGHGPPLSPAIRVQEVAWKLSSNRCHSRESQAAMAGQEETSQDETYEVKMNHDTEACSEPSLLSTEMLSYQDDENRQLTLPEEDKRDIRQSPKRGFLRSASLGRRASFHLECLKRQKDRGGDISQKTVLPLHLVHHQALAVAGLSPLLQRSHSPASFPRPFATPPATPGSRGWPPQPVPTLRLEGVESSEKLNSSFPSIHCGSWAETTPGGGGSSAARRVRPVSLMVPSQAGAPGRQFHGSASSLVEAVLISEGLGQFAQDPKFIEVTTQELADACDMTIEEMESAADNILSGGAPQSPNGALLPFVNCRDAGQDRAGGEEDAGCVRARGRPSEEELQDSRVYVSSL

SEQ ID NO: 10720 - protein, 2179 aa, Homo sapiens
  Payload ID: 2138;
  Gene Symbol: CACNA1C;
  Gene Name: calcium channel, voltage-dependent, L type, alpha 1C subunit;
  Uniprot ID:  Q13936;
  ENSP ID: ENSP00000341092
MVNENTRMYIPEENHQGSNYGSPRPAHANMNANAAAGLAPEHIPTPGAALSWQAAIDAARQAKLMGSAGNATISTVSSTQRKRQQYGKPKKQGSTTATRPPRALLCLTLKNPIRRACISIVEWKPFEIIILLTIFANCVALAIYIPFPEDDSNATNSNLERVEYLFLIIFTVEAFLKVIAYGLLFHPNAYLRNGWNLLDFIIVVVGLFSAILEQATKADGANALGGKGAGFDVKALRAFRVLRPLRLVSGVPSLQVVLNSIIKAMVPLLHIALLVLFVIIIYAIIGLELFMGKMHKTCYNQEGIADVPAEDDPSPCALETGHGRQCQNGTVCKPGWDGPKHGITNFDNFAFAMLTVFQCITMEGWTDVLYWVNDAVGRDWPWIYFVTLIIIGSFFVLNLVLGVLSGEFSKEREKAKARGDFQKLREKQQLEEDLKGYLDWITQAEDIDPENEDEGMDEEKPRNMSMPTSETESVNTENVAGGDIEGENCGARLAHRISKSKFSRYWRRWNRFCRRKCRAAVKSNVFYWLVIFLVFLNTLTIASEHYNQPNWLTEVQDTANKALLALFTAEMLLKMYSLGLQAYFVSLFNRFDCFVVCGGILETILVETKIMSPLGISVLRCVRLLRIFKITRYWNSLSNLVASLLNSVRSIASLLLLLFLFIIIFSLLGMQLFGGKFNFDEMQTRRSTFDNFPQSLLTVFQILTGEDWNSVMYDGIMAYGGPSFPGMLVCIYFIILFICGNYILLNVFLAIAVDNLADAESLTSAQKEEEEEKERKKLARTASPEKKQELVEKPAVGESKEEKIELKSITADGESPPATKINMDDLQPNENEDKSPYPNPETTGEEDEEEPEMPVGPRPRPLSELHLKEKAVPMPEASAFFIFSSNNRFRLQCHRIVNDTIFTNLILFFILLSSISLAAEDPVQHTSFRNHILFYFDIVFTTIFTIEIALKMTAYGAFLHKGSFCRNYFNILDLLVVSVSLISFGIQSSAINVVKILRVLRVLRPLRAINRAKGLKHVVQCVFVAIRTIGNIVIVTTLLQFMFACIGVQLFKGKLYTCSDSSKQTEAECKGNYITYKDGEVDHPIIQPRSWENSKFDFDNVLAAMMALFTVSTFEGWPELLYRSIDSHTEDKGPIYNYRVEISIFFIIYIIIIAFFMMNIFVGFVIVTFQEQGEQEYKNCELDKNQRQCVEYALKARPLRRYIPKNQHQYKVWYVVNSTYFEYLMFVLILLNTICLAMQHYGQSCLFKIAMNILNMLFTGLFTVEMILKLIAFKPKHYFCDAWNTFDALIVVGSIVDIAITEVNPAEHTQCSPSMGPSCSHPPLAVLTAPPVADGFQNAEENSRISITFFRLFRVMRLVKLLSRGEGIRTLLWTFIKSFQALPYVALLIVMLFFIYAVIGMQVFGKIALNDTTEINRNNNFQTFPQAVLLLFRCATGEAWQDIMLACMPGKKCAPESEPSNSTEGETPCGSSFAVFYFISFYMLCAFLIINLFVAVIMDNFDYLTRDWSILGPHHLDEFKRIWAEYDPEAKGRIKHLDVVTLLRRIQPPLGFGKLCPHRVACKRLVSMNMPLNSDGTVMFNATLFALVRTALRIKTEEGPSPSEAHQGAEDPFRPAGNLEQANEELRAIIKKIWKRTSMKLLDQVVPPAGDDEVTVGKFYATFLIQEYFRKFKKRKEQGLVGKPSQRNALSLQAGLRTLHDIGPEIRRAISGDLTAEEELDKAMKEAVSAASEDDIFRRAGGLFGNHVSYYQSDGRSAFPQTFTTQRPLHINKAGSSQGDTESPSHEKLVDSTFTPSSYSSTGSNANINNANNTALGRLPRPAGYPSTVSTVEGHGPPLSPAIRVQEVAWKLSSNRCHSRESQAAMAGQEETSQDETYEVKMNHDTEACSEPSLLSTEMLSYQDDENRQLTLPEEDKRDIRQSPKRGFLRSASLGRRASFHLECLKRQKDRGGDISQKTVLPLHLVHHQALAVAGLSPLLQRSHSPASFPRPFATPPATPGSRGWPPQPVPTLRLEGVESSEKLNSSFPSIHCGSWAETTPGGGGSSAARRVRPVSLMVPSQAGAPGRQFHGSASSLVEAVLISEGLGQFAQDPKFIEVTTQELADACDMTIEEMESAADNILSGGAPQSPNGALLPFVNCRDAGQDRAGGEEDAGCVRARGRPSEEELQDSRVYVSSL

SEQ ID NO: 10721 - protein, 2146 aa, Homo sapiens
  Payload ID: 2138;
  Gene Symbol: CACNA1C;
  Gene Name: calcium channel, voltage-dependent, L type, alpha 1C subunit;
  Uniprot ID:  Q13936;
  ENSP ID: ENSP00000382500
MVNENTRMYIPEENHQGSNYGSPRPAHANMNANAAAGLAPEHIPTPGAALSWQAAIDAARQAKLMGSAGNATISTVSSTQRKRQQYGKPKKQGSTTATRPPRALLCLTLKNPIRRACISIVEWKPFEIIILLTIFANCVALAIYIPFPEDDSNATNSNLERVEYLFLIIFTVEAFLKVIAYGLLFHPNAYLRNGWNLLDFIIVVVGLFSAILEQATKADGANALGGKGAGFDVKALRAFRVLRPLRLVSGVPSLQVVLNSIIKAMVPLLHIALLVLFVIIIYAIIGLELFMGKMHKTCYNQEGIADVPAEDDPSPCALETGHGRQCQNGTVCKPGWDGPKHGITNFDNFAFAMLTVFQCITMEGWTDVLYWVNDAVGRDWPWIYFVTLIIIGSFFVLNLVLGVLSGEFSKEREKAKARGDFQKLREKQQLEEDLKGYLDWITQAEDIDPENEDEGMDEEKPRNMSMPTSETESVNTENVAGGDIEGENCGARLAHRISKSKFSRYWRRWNRFCRRKCRAAVKSNVFYWLVIFLVFLNTLTIASEHYNQPNWLTEVQDTANKALLALFTAEMLLKMYSLGLQAYFVSLFNRFDCFVVCGGILETILVETKIMSPLGISVLRCVRLLRIFKITRYWNSLSNLVASLLNSVRSIASLLLLLFLFIIIFSLLGMQLFGGKFNFDEMQTRRSTFDNFPQSLLTVFQILTGEDWNSVMYDGIMAYGGPSFPGMLVCIYFIILFICGNYILLNVFLAIAVDNLADAESLTSAQKEEEEEKERKKLARTASPEKKQELVEKPAVGESKEEKIELKSITADGESPPATKINMDDLQPNENEDKSPYPNPETTGEEDEEEPEMPVGPRPRPLSELHLKEKAVPMPEASAFFIFSSNNRFRLQCHRIVNDTIFTNLILFFILLSSISLAAEDPVQHTSFRNHILGNADYVFTSIFTLEIILKMTAYGAFLHKGSFCRNYFNILDLLVVSVSLISFGIQSSAINVVKILRVLRVLRPLRAINRAKGLKHVVQCVFVAIRTIGNIVIVTTLLQFMFACIGVQLFKGKLYTCSDSSKQTEAECKGNYITYKDGEVDHPIIQPRSWENSKFDFDNVLAAMMALFTVSTFEGWPELLYRSIDSHTEDKGPIYNYRVEISIFFIIYIIIIAFFMMNIFVGFVIVTFQEQGEQEYKNCELDKNQRQCVEYALKARPLRRYIPKNQHQYKVWYVVNSTYFEYLMFVLILLNTICLAMQHYGQSCLFKIAMNILNMLFTGLFTVEMILKLIAFKPKHYFCDAWNTFDALIVVGSIVDIAITEVNNAEENSRISITFFRLFRVMRLVKLLSRGEGIRTLLWTFIKSFQALPYVALLIVMLFFIYAVIGMQVFGKIALNDTTEINRNNNFQTFPQAVLLLFRCATGEAWQDIMLACMPGKKCAPESEPSNSTEGETPCGSSFAVFYFISFYMLCAFLIINLFVAVIMDNFDYLTRDWSILGPHHLDEFKRIWAEYDPEAKGRIKHLDVVTLLRRIQPPLGFGKLCPHRVACKRLVSMNMPLNSDGTVMFNATLFALVRTALRIKTEEGPSPSEAHQGAEDPFRPAGNLEQANEELRAIIKKIWKRTSMKLLDQVVPPAGDDEVTVGKFYATFLIQEYFRKFKKRKEQGLVGKPSQRNALSLQAGLRTLHDIGPEIRRAISGDLTAEEELDKAMKEAVSAASEDDIFRRAGGLFGNHVSYYQSDGRSAFPQTFTTQRPLHINKAGSSQGDTESPSHEKLVDSTFTPSSYSSTGSNANINNANNTALGRLPRPAGYPSTVSTVEGHGPPLSPAIRVQEVAWKLSSNRCHSRESQAAMAGQEETSQDETYEVKMNHDTEACSEPSLLSTEMLSYQDDENRQLTLPEEDKRDIRQSPKRGFLRSASLGRRASFHLECLKRQKDRGGDISQKTVLPLHLVHHQALAVAGLSPLLQRSHSPASFPRPFATPPATPGSRGWPPQPVPTLRLEGVESSEKLNSSFPSIHCGSWAETTPGGGGSSAARRVRPVSLMVPSQAGAPGRQFHGSASSLVEAVLISEGLGQFAQDPKFIEVTTQELADACDMTIEEMESAADNILSGGAPQSPNGALLPFVNCRDAGQDRAGGEEDAGCVRARGRPSEEELQDSRVYVSSL

SEQ ID NO: 10722 - protein, 2146 aa, Homo sapiens
  Payload ID: 2138;
  Gene Symbol: CACNA1C;
  Gene Name: calcium channel, voltage-dependent, L type, alpha 1C subunit;
  Uniprot ID:  Q13936;
  ENSP ID: ENSP00000382504
MVNENTRMYIPEENHQGSNYGSPRPAHANMNANAAAGLAPEHIPTPGAALSWQAAIDAARQAKLMGSAGNATISTVSSTQRKRQQYGKPKKQGSTTATRPPRALLCLTLKNPIRRACISIVEWKPFEIIILLTIFANCVALAIYIPFPEDDSNATNSNLERVEYLFLIIFTVEAFLKVIAYGLLFHPNAYLRNGWNLLDFIIVVVGLFSAILEQATKADGANALGGKGAGFDVKALRAFRVLRPLRLVSGVPSLQVVLNSIIKAMVPLLHIALLVLFVIIIYAIIGLELFMGKMHKTCYNQEGIADVPAEDDPSPCALETGHGRQCQNGTVCKPGWDGPKHGITNFDNFAFAMLTVFQCITMEGWTDVLYWVNDAVGRDWPWIYFVTLIIIGSFFVLNLVLGVLSGEFSKEREKAKARGDFQKLREKQQLEEDLKGYLDWITQAEDIDPENEDEGMDEEKPRNMSMPTSETESVNTENVAGGDIEGENCGARLAHRISKSKFSRYWRRWNRFCRRKCRAAVKSNVFYWLVIFLVFLNTLTIASEHYNQPNWLTEVQDTANKALLALFTAEMLLKMYSLGLQAYFVSLFNRFDCFVVCGGILETILVETKIMSPLGISVLRCVRLLRIFKITRYWNSLSNLVASLLNSVRSIASLLLLLFLFIIIFSLLGMQLFGGKFNFDEMQTRRSTFDNFPQSLLTVFQILTGEDWNSVMYDGIMAYGGPSFPGMLVCIYFIILFICGNYILLNVFLAIAVDNLADAESLTSAQKEEEEEKERKKLARTASPEKKQELVEKPAVGESKEEKIELKSITADGESPPATKINMDDLQPNENEDKSPYPNPETTGEEDEEEPEMPVGPRPRPLSELHLKEKAVPMPEASAFFIFSSNNRFRLQCHRIVNDTIFTNLILFFILLSSISLAAEDPVQHTSFRNHILFYFDIVFTTIFTIEIALKMTAYGAFLHKGSFCRNYFNILDLLVVSVSLISFGIQSSAINVVKILRVLRVLRPLRAINRAKGLKHVVQCVFVAIRTIGNIVIVTTLLQFMFACIGVQLFKGKLYTCSDSSKQTEAECKGNYITYKDGEVDHPIIQPRSWENSKFDFDNVLAAMMALFTVSTFEGWPELLYRSIDSHTEDKGPIYNYRVEISIFFIIYIIIIAFFMMNIFVGFVIVTFQEQGEQEYKNCELDKNQRQCVEYALKARPLRRYIPKNQHQYKVWYVVNSTYFEYLMFVLILLNTICLAMQHYGQSCLFKIAMNILNMLFTGLFTVEMILKLIAFKPKHYFCDAWNTFDALIVVGSIVDIAITEVNNAEENSRISITFFRLFRVMRLVKLLSRGEGIRTLLWTFIKSFQALPYVALLIVMLFFIYAVIGMQVFGKIALNDTTEINRNNNFQTFPQAVLLLFRCATGEAWQDIMLACMPGKKCAPESEPSNSTEGETPCGSSFAVFYFISFYMLCAFLIINLFVAVIMDNFDYLTRDWSILGPHHLDEFKRIWAEYDPEAKGRIKHLDVVTLLRRIQPPLGFGKLCPHRVACKRLVSMNMPLNSDGTVMFNATLFALVRTALRIKTEEGPSPSEAHQGAEDPFRPAGNLEQANEELRAIIKKIWKRTSMKLLDQVVPPAGDDEVTVGKFYATFLIQEYFRKFKKRKEQGLVGKPSQRNALSLQAGLRTLHDIGPEIRRAISGDLTAEEELDKAMKEAVSAASEDDIFRRAGGLFGNHVSYYQSDGRSAFPQTFTTQRPLHINKAGSSQGDTESPSHEKLVDSTFTPSSYSSTGSNANINNANNTALGRLPRPAGYPSTVSTVEGHGPPLSPAIRVQEVAWKLSSNRCHSRESQAAMAGQEETSQDETYEVKMNHDTEACSEPSLLSTEMLSYQDDENRQLTLPEEDKRDIRQSPKRGFLRSASLGRRASFHLECLKRQKDRGGDISQKTVLPLHLVHHQALAVAGLSPLLQRSHSPASFPRPFATPPATPGSRGWPPQPVPTLRLEGVESSEKLNSSFPSIHCGSWAETTPGGGGSSAARRVRPVSLMVPSQAGAPGRQFHGSASSLVEAVLISEGLGQFAQDPKFIEVTTQELADACDMTIEEMESAADNILSGGAPQSPNGALLPFVNCRDAGQDRAGGEEDAGCVRARGRPSEEELQDSRVYVSSL

SEQ ID NO: 10723 - protein, 2138 aa, Homo sapiens
  Payload ID: 2138;
  Gene Symbol: CACNA1C;
  Gene Name: calcium channel, voltage-dependent, L type, alpha 1C subunit;
  Uniprot ID:  Q13936;
  ENSP ID: ENSP00000382506
MVNENTRMYIPEENHQGSNYGSPRPAHANMNANAAAGLAPEHIPTPGAALSWQAAIDAARQAKLMGSAGNATISTVSSTQRKRQQYGKPKKQGSTTATRPPRALLCLTLKNPIRRACISIVEWKPFEIIILLTIFANCVALAIYIPFPEDDSNATNSNLERVEYLFLIIFTVEAFLKVIAYGLLFHPNAYLRNGWNLLDFIIVVVGLFSAILEQATKADGANALGGKGAGFDVKALRAFRVLRPLRLVSGVPSLQVVLNSIIKAMVPLLHIALLVLFVIIIYAIIGLELFMGKMHKTCYNQEGIADVPAEDDPSPCALETGHGRQCQNGTVCKPGWDGPKHGITNFDNFAFAMLTVFQCITMEGWTDVLYWVNDAVGRDWPWIYFVTLIIIGSFFVLNLVLGVLSGEFSKEREKAKARGDFQKLREKQQLEEDLKGYLDWITQAEDIDPENEDEGMDEEKPRNMSMPTSETESVNTENVAGGDIEGENCGARLAHRISKSKFSRYWRRWNRFCRRKCRAAVKSNVFYWLVIFLVFLNTLTIASEHYNQPNWLTEVQDTANKALLALFTAEMLLKMYSLGLQAYFVSLFNRFDCFVVCGGILETILVETKIMSPLGISVLRCVRLLRIFKITRYWNSLSNLVASLLNSVRSIASLLLLLFLFIIIFSLLGMQLFGGKFNFDEMQTRRSTFDNFPQSLLTVFQILTGEDWNSVMYDGIMAYGGPSFPGMLVCIYFIILFICGNYILLNVFLAIAVDNLADAESLTSAQKEEEEEKERKKLARTASPEKKQELVEKPAVGESKEEKIELKSITADGESPPATKINMDDLQPNENEDKSPYPNPETTGEEDEEEPEMPVGPRPRPLSELHLKEKAVPMPEASAFFIFSSNNRFRLQCHRIVNDTIFTNLILFFILLSSISLAAEDPVQHTSFRNHILFYFDIVFTTIFTIEIALKMTAYGAFLHKGSFCRNYFNILDLLVVSVSLISFGIQSSAINVVKILRVLRVLRPLRAINRAKGLKHVVQCVFVAIRTIGNIVIVTTLLQFMFACIGVQLFKGKLYTCSDSSKQTEAECKGNYITYKDGEVDHPIIQPRSWENSKFDFDNVLAAMMALFTVSTFEGWPELLYRSIDSHTEDKGPIYNYRVEISIFFIIYIIIIAFFMMNIFVGFVIVTFQEQGEQEYKNCELDKNQRQCVEYALKARPLRRYIPKNQHQYKVWYVVNSTYFEYLMFVLILLNTICLAMQHYGQSCLFKIAMNILNMLFTGLFTVEMILKLIAFKPKGYFSDPWNVFDFLIVIGSIIDVILSETNPAEHTQCSPSMNAEENSRISITFFRLFRVMRLVKLLSRGEGIRTLLWTFIKSFQALPYVALLIVMLFFIYAVIGMQVFGKIALNDTTEINRNNNFQTFPQAVLLLFRCATGEAWQDIMLACMPGKKCAPESEPSNSTEGETPCGSSFAVFYFISFYMLCAFLIINLFVAVIMDNFDYLTRDWSILGPHHLDEFKRIWAEYDPEAKGRIKHLDVVTLLRRIQPPLGFGKLCPHRVACKRLVSMNMPLNSDGTVMFNATLFALVRTALRIKTEGNLEQANEELRAIIKKIWKRTSMKLLDQVVPPAGDDEVTVGKFYATFLIQEYFRKFKKRKEQGLVGKPSQRNALSLQAGLRTLHDIGPEIRRAISGDLTAEEELDKAMKEAVSAASEDDIFRRAGGLFGNHVSYYQSDGRSAFPQTFTTQRPLHINKAGSSQGDTESPSHEKLVDSTFTPSSYSSTGSNANINNANNTALGRLPRPAGYPSTVSTVEGHGPPLSPAIRVQEVAWKLSSNRCHSRESQAAMAGQEETSQDETYEVKMNHDTEACSEPSLLSTEMLSYQDDENRQLTLPEEDKRDIRQSPKRGFLRSASLGRRASFHLECLKRQKDRGGDISQKTVLPLHLVHHQALAVAGLSPLLQRSHSPASFPRPFATPPATPGSRGWPPQPVPTLRLEGVESSEKLNSSFPSIHCGSWAETTPGGGGSSAARRVRPVSLMVPSQAGAPGRQFHGSASSLVEAVLISEGLGQFAQDPKFIEVTTQELADACDMTIEEMESAADNILSGGAPQSPNGALLPFVNCRDAGQDRAGGEEDAGCVRARGRPSEEELQDSRVYVSSL

SEQ ID NO: 10724 - protein, 2138 aa, Homo sapiens
  Payload ID: 2138;
  Gene Symbol: CACNA1C;
  Gene Name: calcium channel, voltage-dependent, L type, alpha 1C subunit;
  Uniprot ID:  Q13936;
  ENSP ID: ENSP00000382510
MVNENTRMYIPEENHQGSNYGSPRPAHANMNANAAAGLAPEHIPTPGAALSWQAAIDAARQAKLMGSAGNATISTVSSTQRKRQQYGKPKKQGSTTATRPPRALLCLTLKNPIRRACISIVEWKPFEIIILLTIFANCVALAIYIPFPEDDSNATNSNLERVEYLFLIIFTVEAFLKVIAYGLLFHPNAYLRNGWNLLDFIIVVVGLFSAILEQATKADGANALGGKGAGFDVKALRAFRVLRPLRLVSGVPSLQVVLNSIIKAMVPLLHIALLVLFVIIIYAIIGLELFMGKMHKTCYNQEGIADVPAEDDPSPCALETGHGRQCQNGTVCKPGWDGPKHGITNFDNFAFAMLTVFQCITMEGWTDVLYWVNDAVGRDWPWIYFVTLIIIGSFFVLNLVLGVLSGEFSKEREKAKARGDFQKLREKQQLEEDLKGYLDWITQAEDIDPENEDEGMDEEKPRNMSMPTSETESVNTENVAGGDIEGENCGARLAHRISKSKFSRYWRRWNRFCRRKCRAAVKSNVFYWLVIFLVFLNTLTIASEHYNQPNWLTEVQDTANKALLALFTAEMLLKMYSLGLQAYFVSLFNRFDCFVVCGGILETILVETKIMSPLGISVLRCVRLLRIFKITRYWNSLSNLVASLLNSVRSIASLLLLLFLFIIIFSLLGMQLFGGKFNFDEMQTRRSTFDNFPQSLLTVFQILTGEDWNSVMYDGIMAYGGPSFPGMLVCIYFIILFICGNYILLNVFLAIAVDNLADAESLTSAQKEEEEEKERKKLARTASPEKKQELVEKPAVGESKEEKIELKSITADGESPPATKINMDDLQPNENEDKSPYPNPETTGEEDEEEPEMPVGPRPRPLSELHLKEKAVPMPEASAFFIFSSNNRFRLQCHRIVNDTIFTNLILFFILLSSISLAAEDPVQHTSFRNHILGNADYVFTSIFTLEIILKMTAYGAFLHKGSFCRNYFNILDLLVVSVSLISFGIQSSAINVVKILRVLRVLRPLRAINRAKGLKHVVQCVFVAIRTIGNIVIVTTLLQFMFACIGVQLFKGKLYTCSDSSKQTEAECKGNYITYKDGEVDHPIIQPRSWENSKFDFDNVLAAMMALFTVSTFEGWPELLYRSIDSHTEDKGPIYNYRVEISIFFIIYIIIIAFFMMNIFVGFVIVTFQEQGEQEYKNCELDKNQRQCVEYALKARPLRRYIPKNQHQYKVWYVVNSTYFEYLMFVLILLNTICLAMQHYGQSCLFKIAMNILNMLFTGLFTVEMILKLIAFKPKHYFCDAWNTFDALIVVGSIVDIAITEVNPAEHTQCSPSMNAEENSRISITFFRLFRVMRLVKLLSRGEGIRTLLWTFIKSFQALPYVALLIVMLFFIYAVIGMQVFGKIALNDTTEINRNNNFQTFPQAVLLLFRCATGEAWQDIMLACMPGKKCAPESEPSNSTEGETPCGSSFAVFYFISFYMLCAFLIINLFVAVIMDNFDYLTRDWSILGPHHLDEFKRIWAEYDPEAKGRIKHLDVVTLLRRIQPPLGFGKLCPHRVACKRLVSMNMPLNSDGTVMFNATLFALVRTALRIKTEGNLEQANEELRAIIKKIWKRTSMKLLDQVVPPAGDDEVTVGKFYATFLIQEYFRKFKKRKEQGLVGKPSQRNALSLQAGLRTLHDIGPEIRRAISGDLTAEEELDKAMKEAVSAASEDDIFRRAGGLFGNHVSYYQSDGRSAFPQTFTTQRPLHINKAGSSQGDTESPSHEKLVDSTFTPSSYSSTGSNANINNANNTALGRLPRPAGYPSTVSTVEGHGPPLSPAIRVQEVAWKLSSNRCHSRESQAAMAGQEETSQDETYEVKMNHDTEACSEPSLLSTEMLSYQDDENRQLTLPEEDKRDIRQSPKRGFLRSASLGRRASFHLECLKRQKDRGGDISQKTVLPLHLVHHQALAVAGLSPLLQRSHSPASFPRPFATPPATPGSRGWPPQPVPTLRLEGVESSEKLNSSFPSIHCGSWAETTPGGGGSSAARRVRPVSLMVPSQAGAPGRQFHGSASSLVEAVLISEGLGQFAQDPKFIEVTTQELADACDMTIEEMESAADNILSGGAPQSPNGALLPFVNCRDAGQDRAGGEEDAGCVRARGRPSEEELQDSRVYVSSL

SEQ ID NO: 10725 - protein, 2138 aa, Homo sapiens
  Payload ID: 2138;
  Gene Symbol: CACNA1C;
  Gene Name: calcium channel, voltage-dependent, L type, alpha 1C subunit;
  Uniprot ID:  Q13936;
  ENSP ID: ENSP00000382512
MVNENTRMYIPEENHQGSNYGSPRPAHANMNANAAAGLAPEHIPTPGAALSWQAAIDAARQAKLMGSAGNATISTVSSTQRKRQQYGKPKKQGSTTATRPPRALLCLTLKNPIRRACISIVEWKPFEIIILLTIFANCVALAIYIPFPEDDSNATNSNLERVEYLFLIIFTVEAFLKVIAYGLLFHPNAYLRNGWNLLDFIIVVVGLFSAILEQATKADGANALGGKGAGFDVKALRAFRVLRPLRLVSGVPSLQVVLNSIIKAMVPLLHIALLVLFVIIIYAIIGLELFMGKMHKTCYNQEGIADVPAEDDPSPCALETGHGRQCQNGTVCKPGWDGPKHGITNFDNFAFAMLTVFQCITMEGWTDVLYWMQDAMGYELPWVYFVSLVIFGSFFVLNLVLGVLSGEFSKEREKAKARGDFQKLREKQQLEEDLKGYLDWITQAEDIDPENEDEGMDEEKPRNMSMPTSETESVNTENVAGGDIEGENCGARLAHRISKSKFSRYWRRWNRFCRRKCRAAVKSNVFYWLVIFLVFLNTLTIASEHYNQPNWLTEVQDTANKALLALFTAEMLLKMYSLGLQAYFVSLFNRFDCFVVCGGILETILVETKIMSPLGISVLRCVRLLRIFKITRYWNSLSNLVASLLNSVRSIASLLLLLFLFIIIFSLLGMQLFGGKFNFDEMQTRRSTFDNFPQSLLTVFQILTGEDWNSVMYDGIMAYGGPSFPGMLVCIYFIILFICGNYILLNVFLAIAVDNLADAESLTSAQKEEEEEKERKKLARTASPEKKQELVEKPAVGESKEEKIELKSITADGESPPATKINMDDLQPNENEDKSPYPNPETTGEEDEEEPEMPVGPRPRPLSELHLKEKAVPMPEASAFFIFSSNNRFRLQCHRIVNDTIFTNLILFFILLSSISLAAEDPVQHTSFRNHILFYFDIVFTTIFTIEIALKMTAYGAFLHKGSFCRNYFNILDLLVVSVSLISFGIQSSAINVVKILRVLRVLRPLRAINRAKGLKHVVQCVFVAIRTIGNIVIVTTLLQFMFACIGVQLFKGKLYTCSDSSKQTEAECKGNYITYKDGEVDHPIIQPRSWENSKFDFDNVLAAMMALFTVSTFEGWPELLYRSIDSHTEDKGPIYNYRVEISIFFIIYIIIIAFFMMNIFVGFVIVTFQEQGEQEYKNCELDKNQRQCVEYALKARPLRRYIPKNQHQYKVWYVVNSTYFEYLMFVLILLNTICLAMQHYGQSCLFKIAMNILNMLFTGLFTVEMILKLIAFKPKGYFSDPWNVFDFLIVIGSIIDVILSETNPAEHTQCSPSMNAEENSRISITFFRLFRVMRLVKLLSRGEGIRTLLWTFIKSFQALPYVALLIVMLFFIYAVIGMQVFGKIALNDTTEINRNNNFQTFPQAVLLLFRCATGEAWQDIMLACMPGKKCAPESEPSNSTEGETPCGSSFAVFYFISFYMLCAFLIINLFVAVIMDNFDYLTRDWSILGPHHLDEFKRIWAEYDPEAKGRIKHLDVVTLLRRIQPPLGFGKLCPHRVACKRLVSMNMPLNSDGTVMFNATLFALVRTALRIKTEGNLEQANEELRAIIKKIWKRTSMKLLDQVVPPAGDDEVTVGKFYATFLIQEYFRKFKKRKEQGLVGKPSQRNALSLQAGLRTLHDIGPEIRRAISGDLTAEEELDKAMKEAVSAASEDDIFRRAGGLFGNHVSYYQSDGRSAFPQTFTTQRPLHINKAGSSQGDTESPSHEKLVDSTFTPSSYSSTGSNANINNANNTALGRLPRPAGYPSTVSTVEGHGPPLSPAIRVQEVAWKLSSNRCHSRESQAAMAGQEETSQDETYEVKMNHDTEACSEPSLLSTEMLSYQDDENRQLTLPEEDKRDIRQSPKRGFLRSASLGRRASFHLECLKRQKDRGGDISQKTVLPLHLVHHQALAVAGLSPLLQRSHSPASFPRPFATPPATPGSRGWPPQPVPTLRLEGVESSEKLNSSFPSIHCGSWAETTPGGGGSSAARRVRPVSLMVPSQAGAPGRQFHGSASSLVEAVLISEGLGQFAQDPKFIEVTTQELADACDMTIEEMESAADNILSGGAPQSPNGALLPFVNCRDAGQDRAGGEEDAGCVRARGRPSEEELQDSRVYVSSL

SEQ ID NO: 10726 - protein, 2158 aa, Homo sapiens
  Payload ID: 2138;
  Gene Symbol: CACNA1C;
  Gene Name: calcium channel, voltage-dependent, L type, alpha 1C subunit;
  Uniprot ID:  Q13936;
  ENSP ID: ENSP00000382515
MVNENTRMYIPEENHQGSNYGSPRPAHANMNANAAAGLAPEHIPTPGAALSWQAAIDAARQAKLMGSAGNATISTVSSTQRKRQQYGKPKKQGSTTATRPPRALLCLTLKNPIRRACISIVEWKPFEIIILLTIFANCVALAIYIPFPEDDSNATNSNLERVEYLFLIIFTVEAFLKVIAYGLLFHPNAYLRNGWNLLDFIIVVVGLFSAILEQATKADGANALGGKGAGFDVKALRAFRVLRPLRLVSGVPSLQVVLNSIIKAMVPLLHIALLVLFVIIIYAIIGLELFMGKMHKTCYNQEGIADVPAEDDPSPCALETGHGRQCQNGTVCKPGWDGPKHGITNFDNFAFAMLTVFQCITMEGWTDVLYWVNDAVGRDWPWIYFVTLIIIGSFFVLNLVLGVLSGEFSKEREKAKARGDFQKLREKQQLEEDLKGYLDWITQAEDIDPENEDEGMDEEKPRNMSMPTSETESVNTENVAGGDIEGENCGARLAHRISKSKFSRYWRRWNRFCRRKCRAAVKSNVFYWLVIFLVFLNTLTIASEHYNQPNWLTEVQDTANKALLALFTAEMLLKMYSLGLQAYFVSLFNRFDCFVVCGGILETILVETKIMSPLGISVLRCVRLLRIFKITRYWNSLSNLVASLLNSVRSIASLLLLLFLFIIIFSLLGMQLFGGKFNFDEMQTRRSTFDNFPQSLLTVFQILTGEDWNSVMYDGIMAYGGPSFPGMLVCIYFIILFICGNYILLNVFLAIAVDNLADAESLTSAQKEEEEEKERKKLARTASPEKKQELVEKPAVGESKEEKIELKSITADGESPPATKINMDDLQPNENEDKSPYPNPETTGEEDEEEPEMPVGPRPRPLSELHLKEKAVPMPEASAFFIFSSNNRFRLQCHRIVNDTIFTNLILFFILLSSISLAAEDPVQHTSFRNHILFYFDIVFTTIFTIEIALKILGNADYVFTSIFTLEIILKMTAYGAFLHKGSFCRNYFNILDLLVVSVSLISFGIQSSAINVVKILRVLRVLRPLRAINRAKGLKHVVQCVFVAIRTIGNIVIVTTLLQFMFACIGVQLFKGKLYTCSDSSKQTEAECKGNYITYKDGEVDHPIIQPRSWENSKFDFDNVLAAMMALFTVSTFEGWPELLYRSIDSHTEDKGPIYNYRVEISIFFIIYIIIIAFFMMNIFVGFVIVTFQEQGEQEYKNCELDKNQRQCVEYALKARPLRRYIPKNQHQYKVWYVVNSTYFEYLMFVLILLNTICLAMQHYGQSCLFKIAMNILNMLFTGLFTVEMILKLIAFKPKHYFCDAWNTFDALIVVGSIVDIAITEVNPAEHTQCSPSMNAEENSRISITFFRLFRVMRLVKLLSRGEGIRTLLWTFIKSFQALPYVALLIVMLFFIYAVIGMQVFGKIALNDTTEINRNNNFQTFPQAVLLLFRCATGEAWQDIMLACMPGKKCAPESEPSNSTEGETPCGSSFAVFYFISFYMLCAFLIINLFVAVIMDNFDYLTRDWSILGPHHLDEFKRIWAEYDPEAKGRIKHLDVVTLLRRIQPPLGFGKLCPHRVACKRLVSMNMPLNSDGTVMFNATLFALVRTALRIKTEGNLEQANEELRAIIKKIWKRTSMKLLDQVVPPAGDDEVTVGKFYATFLIQEYFRKFKKRKEQGLVGKPSQRNALSLQAGLRTLHDIGPEIRRAISGDLTAEEELDKAMKEAVSAASEDDIFRRAGGLFGNHVSYYQSDGRSAFPQTFTTQRPLHINKAGSSQGDTESPSHEKLVDSTFTPSSYSSTGSNANINNANNTALGRLPRPAGYPSTVSTVEGHGPPLSPAIRVQEVAWKLSSNRCHSRESQAAMAGQEETSQDETYEVKMNHDTEACSEPSLLSTEMLSYQDDENRQLTLPEEDKRDIRQSPKRGFLRSASLGRRASFHLECLKRQKDRGGDISQKTVLPLHLVHHQALAVAGLSPLLQRSHSPASFPRPFATPPATPGSRGWPPQPVPTLRLEGVESSEKLNSSFPSIHCGSWAETTPGGGGSSAARRVRPVSLMVPSQAGAPGRQFHGSASSLVEAVLISEGLGQFAQDPKFIEVTTQELADACDMTIEEMESAADNILSGGAPQSPNGALLPFVNCRDAGQDRAGGEEDAGCVRARGRPSEEELQDSRVYVSSL

SEQ ID NO: 10727 - protein, 2173 aa, Homo sapiens
  Payload ID: 2138;
  Gene Symbol: CACNA1C;
  Gene Name: calcium channel, voltage-dependent, L type, alpha 1C subunit;
  ENSP ID: ENSP00000382526
MVNENTRMYIPEENHQGSNYGSPRPAHANMNANAAAGLAPEHIPTPGAALSWQAAIDAARQAKLMGSAGNATISTVSSTQRKRQQYGKPKKQGSTTATRPPRALLCLTLKNPIRRACISIVEWKPFEIIILLTIFANCVALAIYIPFPEDDSNATNSNLERVEYLFLIIFTVEAFLKVIAYGLLFHPNAYLRNGWNLLDFIIVVVGLFSAILEQATKADGANALGGKGAGFDVKALRAFRVLRPLRLVSGVPSLQVVLNSIIKAMVPLLHIALLVLFVIIIYAIIGLELFMGKMHKTCYNQEGIADVPAEDDPSPCALETGHGRQCQNGTVCKPGWDGPKHGITNFDNFAFAMLTVFQCITMEGWTDVLYWMQDAMGYELPWVYFVSLVIFGSFFVLNLVLGVLSGEFSKEREKAKARGDFQKLREKQQLEEDLKGYLDWITQAEDIDPENEDEGMDEEKPRNMSMPTSETESVNTENVAGGDIEGENCGARLAHRISKSKFSRYWRRWNRFCRRKCRAAVKSNVFYWLVIFLVFLNTLTIASEHYNQPNWLTEVQDTANKALLALFTAEMLLKMYSLGLQAYFVSLFNRFDCFVVCGGILETILVETKIMSPLGISVLRCVRLLRIFKITRYWNSLSNLVASLLNSVRSIASLLLLLFLFIIIFSLLGMQLFGGKFNFDEMQTRRSTFDNFPQSLLTVFQILTGEDWNSVMYDGIMAYGGPSFPGMLVCIYFIILFICGNYILLNVFLAIAVDNLADAESLTSAQKEEEEEKERKKLARTASPEKKQELVEKPAVGESKEEKIELKSITADGESPPATKINMDDLQPNENEDKSPYPNPETTGEEDEEEPEMPVGPRPRPLSELHLKEKAVPMPEASAFFIFSSNNRFRLQCHRIVNDTIFTNLILFFILLSSISLAAEDPVQHTSFRNHILFYFDIVFTTIFTIEIALKMTAYGAFLHKGSFCRNYFNILDLLVVSVSLISFGIQSSAINVVKILRVLRVLRPLRAINRAKGLKHVVQCVFVAIRTIGNIVIVTTLLQFMFACIGVQLFKGKLYTCSDSSKQTEAECKGNYITYKDGEVDHPIIQPRSWENSKFDFDNVLAAMMALFTVSTFEGWPELLYRSIDSHTEDKGPIYNYRVEISIFFIIYIIIIAFFMMNIFVGFVIVTFQEQGEQEYKNCELDKNQRQCVEYALKARPLRRYIPKNQHQYKVWYVVNSTYFEYLMFVLILLNTICLAMQHYGQSCLFKIAMNILNMLFTGLFTVEMILKLIAFKPKGYFSDPWNVFDFLIVIGSIIDVILSETNPAEHTQCSPSMNAEENSRISITFFRLFRVMRLVKLLSRGEGIRTLLWTFIKSFQALPYVALLIVMLFFIYAVIGMQVFGKIALNDTTEINRNNNFQTFPQAVLLLFRCATGEAWQDIMLACMPGKKCAPESEPSNSTEGETPCGSSFAVFYFISFYMLCAFLIINLFVAVIMDNFDYLTRDWSILGPHHLDEFKRIWAEYDPEAKGRIKHLDVVTLLRRIQPPLGFGKLCPHRVACKRLVSMNMPLNSDGTVMFNATLFALVRTALRIKTEGNLEQANEELRAIIKKIWKRTSMKLLDQVVPPAGDDEVTVGKFYATFLIQEYFRKFKKRKEQGLVGKPSQRNALSLQAGLRTLHDIGPEIRRAISGDLTAEEELDKAMKEAVSAASEDDIFRRAGGLFGNHVSYYQSDGRSAFPQTFTTQRPLHINKAGSSQGDTESPSHEKLVDSTFTPSSYSSTGSNANINNANNTALGRLPRPAGYPSTVSTVEGHGPPLSPAIRVQEVAWKLSSNRERHVPMCEDLELRRDSGSAGTQAHCLLLRRANPSRCHSRESQAAMAGQEETSQDETYEVKMNHDTEACSEPSLLSTEMLSYQDDENRQLTLPEEDKRDIRQSPKRGFLRSASLGRRASFHLECLKRQKDRGGDISQKTVLPLHLVHHQALAVAGLSPLLQRSHSPASFPRPFATPPATPGSRGWPPQPVPTLRLEGVESSEKLNSSFPSIHCGSWAETTPGGGGSSAARRVRPVSLMVPSQAGAPGRQFHGSASSLVEAVLISEGLGQFAQDPKFIEVTTQELADACDMTIEEMESAADNILSGGAPQSPNGALLPFVNCRDAGQDRAGGEEDAGCVRARGRPSEEELQDSRVYVSSL

SEQ ID NO: 10728 - protein, 2157 aa, Homo sapiens
  Payload ID: 2138;
  Gene Symbol: CACNA1C;
  Gene Name: calcium channel, voltage-dependent, L type, alpha 1C subunit;
  Uniprot ID:  Q13936;
  ENSP ID: ENSP00000382530
MVNENTRMYIPEENHQGSNYGSPRPAHANMNANAAAGLAPEHIPTPGAALSWQAAIDAARQAKLMGSAGNATISTVSSTQRKRQQYGKPKKQGSTTATRPPRALLCLTLKNPIRRACISIVEWKPFEIIILLTIFANCVALAIYIPFPEDDSNATNSNLERVEYLFLIIFTVEAFLKVIAYGLLFHPNAYLRNGWNLLDFIIVVVGLFSAILEQATKADGANALGGKGAGFDVKALRAFRVLRPLRLVSGVPSLQVVLNSIIKAMVPLLHIALLVLFVIIIYAIIGLELFMGKMHKTCYNQEGIADVPAEDDPSPCALETGHGRQCQNGTVCKPGWDGPKHGITNFDNFAFAMLTVFQCITMEGWTDVLYWVNDAVGRDWPWIYFVTLIIIGSFFVLNLVLGVLSGEFSKEREKAKARGDFQKLREKQQLEEDLKGYLDWITQAEDIDPENEDEGMDEEKPRNMSMPTSETESVNTENVAGGDIEGENCGARLAHRISKSKFSRYWRRWNRFCRRKCRAAVKSNVFYWLVIFLVFLNTLTIASEHYNQPNWLTEVQDTANKALLALFTAEMLLKMYSLGLQAYFVSLFNRFDCFVVCGGILETILVETKIMSPLGISVLRCVRLLRIFKITRYWNSLSNLVASLLNSVRSIASLLLLLFLFIIIFSLLGMQLFGGKFNFDEMQTRRSTFDNFPQSLLTVFQILTGEDWNSVMYDGIMAYGGPSFPGMLVCIYFIILFICGNYILLNVFLAIAVDNLADAESLTSAQKEEEEEKERKKLARTASPEKKQELVEKPAVGESKEEKIELKSITADGESPPATKINMDDLQPNENEDKSPYPNPETTGEEDEEEPEMPVGPRPRPLSELHLKEKAVPMPEASAFFIFSSNNRFRLQCHRIVNDTIFTNLILFFILLSSISLAAEDPVQHTSFRNHILFYFDIVFTTIFTIEIALKMTAYGAFLHKGSFCRNYFNILDLLVVSVSLISFGIQSSAINVVKILRVLRVLRPLRAINRAKGLKHVVQCVFVAIRTIGNIVIVTTLLQFMFACIGVQLFKGKLYTCSDSSKQTEAECKGNYITYKDGEVDHPIIQPRSWENSKFDFDNVLAAMMALFTVSTFEGWPELLYRSIDSHTEDKGPIYNYRVEISIFFIIYIIIIAFFMMNIFVGFVIVTFQEQGEQEYKNCELDKNQRQCVEYALKARPLRRYIPKNQHQYKVWYVVNSTYFEYLMFVLILLNTICLAMQHYGQSCLFKIAMNILNMLFTGLFTVEMILKLIAFKPKHYFCDAWNTFDALIVVGSIVDIAITEVNPAEHTQCSPSMNAEENSRISITFFRLFRVMRLVKLLSRGEGIRTLLWTFIKSFQALPYVALLIVMLFFIYAVIGMQVFGKIALNDTTEINRNNNFQTFPQAVLLLFRCATGEAWQDIMLACMPGKKCAPESEPSNSTEGETPCGSSFAVFYFISFYMLCAFLIINLFVAVIMDNFDYLTRDWSILGPHHLDEFKRIWAEYDPEAKGRIKHLDVVTLLRRIQPPLGFGKLCPHRVACKRLVSMNMPLNSDGTVMFNATLFALVRTALRIKTEEGPSPSEAHQGAEDPFRPAGNLEQANEELRAIIKKIWKRTSMKLLDQVVPPAGDDEVTVGKFYATFLIQEYFRKFKKRKEQGLVGKPSQRNALSLQAGLRTLHDIGPEIRRAISGDLTAEEELDKAMKEAVSAASEDDIFRRAGGLFGNHVSYYQSDGRSAFPQTFTTQRPLHINKAGSSQGDTESPSHEKLVDSTFTPSSYSSTGSNANINNANNTALGRLPRPAGYPSTVSTVEGHGPPLSPAIRVQEVAWKLSSNRCHSRESQAAMAGQEETSQDETYEVKMNHDTEACSEPSLLSTEMLSYQDDENRQLTLPEEDKRDIRQSPKRGFLRSASLGRRASFHLECLKRQKDRGGDISQKTVLPLHLVHHQALAVAGLSPLLQRSHSPASFPRPFATPPATPGSRGWPPQPVPTLRLEGVESSEKLNSSFPSIHCGSWAETTPGGGGSSAARRVRPVSLMVPSQAGAPGRQFHGSASSLVEAVLISEGLGQFAQDPKFIEVTTQELADACDMTIEEMESAADNILSGGAPQSPNGALLPFVNCRDAGQDRAGGEEDAGCVRARGRPSEEELQDSRVYVSSL

SEQ ID NO: 10729 - protein, 2155 aa, Homo sapiens
  Payload ID: 2138;
  Gene Symbol: CACNA1C;
  Gene Name: calcium channel, voltage-dependent, L type, alpha 1C subunit;
  Uniprot ID:  Q13936;
  ENSP ID: ENSP00000382537
MVNENTRMYIPEENHQGSNYGSPRPAHANMNANAAAGLAPEHIPTPGAALSWQAAIDAARQAKLMGSAGNATISTVSSTQRKRQQYGKPKKQGSTTATRPPRALLCLTLKNPIRRACISIVEWKPFEIIILLTIFANCVALAIYIPFPEDDSNATNSNLERVEYLFLIIFTVEAFLKVIAYGLLFHPNAYLRNGWNLLDFIIVVVGLFSAILEQATKADGANALGGKGAGFDVKALRAFRVLRPLRLVSGVPSLQVVLNSIIKAMVPLLHIALLVLFVIIIYAIIGLELFMGKMHKTCYNQEGIADVPAEDDPSPCALETGHGRQCQNGTVCKPGWDGPKHGITNFDNFAFAMLTVFQCITMEGWTDVLYWVNDAVGRDWPWIYFVTLIIIGSFFVLNLVLGVLSGEFSKEREKAKARGDFQKLREKQQLEEDLKGYLDWITQAEDIDPENEDEGMDEEKPRNMSMPTSETESVNTENVAGGDIEGENCGARLAHRISKSKFSRYWRRWNRFCRRKCRAAVKSNVFYWLVIFLVFLNTLTIASEHYNQPNWLTEVQDTANKALLALFTAEMLLKMYSLGLQAYFVSLFNRFDCFVVCGGILETILVETKIMSPLGISVLRCVRLLRIFKITRYWNSLSNLVASLLNSVRSIASLLLLLFLFIIIFSLLGMQLFGGKFNFDEMQTRRSTFDNFPQSLLTVFQILTGEDWNSVMYDGIMAYGGPSFPGMLVCIYFIILFICGNYILLNVFLAIAVDNLADAESLTSAQKEEEEEKERKKLARTASPEKKQELVEKPAVGESKEEKIELKSITADGESPPATKINMDDLQPNENEDKSPYPNPETTGEEDEEEPEMPVGPRPRPLSELHLKEKAVPMPEASAFFIFSSNNRFRLQCHRIVNDTIFTNLILFFILLSSISLAAEDPVQHTSFRNHILGNADYVFTSIFTLEIILKMTAYGAFLHKGSFCRNYFNILDLLVVSVSLISFGIQSSAINVVKILRVLRVLRPLRAINRAKGLKHVVQCVFVAIRTIGNIVIVTTLLQFMFACIGVQLFKGKLYTCSDSSKQTEAECKGNYITYKDGEVDHPIIQPRSWENSKFDFDNVLAAMMALFTVSTFEGWPELLYRSIDSHTEDKGPIYNYRVEISIFFIIYIIIIAFFMMNIFVGFVIVTFQEQGEQEYKNCELDKNQRQCVEYALKARPLRRYIPKNQHQYKVWYVVNSTYFEYLMFVLILLNTICLAMQHYGQSCLFKIAMNILNMLFTGLFTVEMILKLIAFKPKGYFSDPWNVFDFLIVIGSIIDVILSETNHYFCDAWNTFDALIVVGSIVDIAITEVNNAEENSRISITFFRLFRVMRLVKLLSRGEGIRTLLWTFIKSFQALPYVALLIVMLFFIYAVIGMQVFGKIALNDTTEINRNNNFQTFPQAVLLLFRCATGEAWQDIMLACMPGKKCAPESEPSNSTEGETPCGSSFAVFYFISFYMLCAFLIINLFVAVIMDNFDYLTRDWSILGPHHLDEFKRIWAEYDPEAKGRIKHLDVVTLLRRIQPPLGFGKLCPHRVACKRLVSMNMPLNSDGTVMFNATLFALVRTALRIKTEGNLEQANEELRAIIKKIWKRTSMKLLDQVVPPAGDDEVTVGKFYATFLIQEYFRKFKKRKEQGLVGKPSQRNALSLQAGLRTLHDIGPEIRRAISGDLTAEEELDKAMKEAVSAASEDDIFRRAGGLFGNHVSYYQSDGRSAFPQTFTTQRPLHINKAGSSQGDTESPSHEKLVDSTFTPSSYSSTGSNANINNANNTALGRLPRPAGYPSTVSTVEGHGPPLSPAIRVQEVAWKLSSNRCHSRESQAAMAGQEETSQDETYEVKMNHDTEACSEPSLLSTEMLSYQDDENRQLTLPEEDKRDIRQSPKRGFLRSASLGRRASFHLECLKRQKDRGGDISQKTVLPLHLVHHQALAVAGLSPLLQRSHSPASFPRPFATPPATPGSRGWPPQPVPTLRLEGVESSEKLNSSFPSIHCGSWAETTPGGGGSSAARRVRPVSLMVPSQAGAPGRQFHGSASSLVEAVLISEGLGQFAQDPKFIEVTTQELADACDMTIEEMESAADNILSGGAPQSPNGALLPFVNCRDAGQDRAGGEEDAGCVRARGRPSEEELQDSRVYVSSL

SEQ ID NO: 10730 - protein, 2209 aa, Homo sapiens
  Payload ID: 2138;
  Gene Symbol: CACNA1C;
  Gene Name: calcium channel, voltage-dependent, L type, alpha 1C subunit;
  ENSP ID: ENSP00000382542
MVNENTRMYIPEENHQGSNYGSPRPAHANMNANAAAGLAPEHIPTPGAALSWQAAIDAARQAKLMGSAGNATISTVSSTQRKRQQYGKPKKQGSTTATRPPRALLCLTLKNPIRRACISIVEWKPFEIIILLTIFANCVALAIYIPFPEDDSNATNSNLERVEYLFLIIFTVEAFLKVIAYGLLFHPNAYLRNGWNLLDFIIVVVGLFSAILEQATKADGANALGGKGAGFDVKALRAFRVLRPLRLVSGVPSLQVVLNSIIKAMVPLLHIALLVLFVIIIYAIIGLELFMGKMHKTCYNQEGIADVPAEDDPSPCALETGHGRQCQNGTVCKPGWDGPKHGITNFDNFAFAMLTVFQCITMEGWTDVLYWMQDAMGYELPWVYFVSLVIFGSFFVLNLVLGVLSGEFSKEREKAKARGDFQKLREKQQLEEDLKGYLDWITQAEDIDPENEDEGMDEEKPRNMSMPTSETESVNTENVAGGDIEGENCGARLAHRISKSKFSRYWRRWNRFCRRKCRAAVKSNVFYWLVIFLVFLNTLTIASEHYNQPNWLTEVQDTANKALLALFTAEMLLKMYSLGLQAYFVSLFNRFDCFVVCGGILETILVETKIMSPLGISVLRCVRLLRIFKITRYWNSLSNLVASLLNSVRSIASLLLLLFLFIIIFSLLGMQLFGGKFNFDEMQTRRSTFDNFPQSLLTVFQILTGEDWNSVMYDGIMAYGGPSFPGMLVCIYFIILFICGNYILLNVFLAIAVDNLADAESLTSAQKEEEEEKERKKLARTASPEKKQELVEKPAVGESKEEKIELKSITADGESPPATKINMDDLQPNENEDKSPYPNPETTGEEDEEEPEMPVGPRPRPLSELHLKEKAVPMPEASAFFIFSSNNRFRLQCHRIVNDTIFTNLILFFILLSSISLAAEDPVQHTSFRNHILFYFDIVFTTIFTIEIALKMTAYGAFLHKGSFCRNYFNILDLLVVSVSLISFGIQSSAINVVKILRVLRVLRPLRAINRAKGLKHVVQCVFVAIRTIGNIVIVTTLLQFMFACIGVQLFKGKLYTCSDSSKQTEAECKGNYITYKDGEVDHPIIQPRSWENSKFDFDNVLAAMMALFTVSTFEGWPELLYRSIDSHTEDKGPIYNYRVEISIFFIIYIIIIAFFMMNIFVGFVIVTFQEQGEQEYKNCELDKNQRQCVEYALKARPLRRYIPKNQHQYKVWYVVNSTYFEYLMFVLILLNTICLAMQHYGQSCLFKIAMNILNMLFTGLFTVEMILKLIAFKPKHYFCDAWNTFDALIVVGSIVDIAITEVNPAEHTQCSPSMNAEENSRISITFFRLFRVMRLVKLLSRGEGIRTLLWTFIKSFQALPYVALLIVMLFFIYAVIGMQVFGKIALNDTTEINRNNNFQTFPQAVLLLFRCATGEAWQDIMLACMPGKKCAPESEPSNSTEGETPCGSSFAVFYFISFYMLCAFLIINLFVAVIMDNFDYLTRDWSILGPHHLDEFKRIWAEYDPEAKGRIKHLDVVTLLRRIQPPLGFGKLCPHRVACKRLVSMNMPLNSDGTVMFNATLFALVRTALRIKTEGNLEQANEELRAIIKKIWKRTSMKLLDQVVPPAGDDEVTVGKFYATFLIQEYFRKFKKRKEQGLVGKPSQRNALSLQAGLRTLHDIGPEIRRAISGDLTAEEELDKAMKEAVSAASEDDIFRRAGGLFGNHVSYYQSDGRSAFPQTFTTQRPLHINKAGSSQGDTESPSHEKLVDSTFTPSSYSSTGSNANINNANNTALGRLPRPAGYPSTVSTVEGHGPPLSPAIRVQEVAWKLSSNRMHCCDMLDGGTFPPALGPRRAPPCLHQQLQGSLAGLREDTPCIVPGHASLCCSSRVGEWLPAGCTAPQHARCHSRESQAAMAGQEETSQDETYEVKMNHDTEACSEPSLLSTEMLSYQDDENRQLTLPEEDKRDIRQSPKRGFLRSASLGRRASFHLECLKRQKDRGGDISQKTVLPLHLVHHQALAVAGLSPLLQRSHSPASFPRPFATPPATPGSRGWPPQPVPTLRLEGVESSEKLNSSFPSIHCGSWAETTPGGGGSSAARRVRPVSLMVPSQAGAPGRQFHGSASSLVEAVLISEGLGQFAQDPKFIEVTTQELADACDMTIEEMESAADNILSGGAPQSPNGALLPFVNCRDAGQDRAGGEEDAGCVRARGRPSEEELQDSRVYVSSL

SEQ ID NO: 10731 - protein, 2157 aa, Homo sapiens
  Payload ID: 2138;
  Gene Symbol: CACNA1C;
  Gene Name: calcium channel, voltage-dependent, L type, alpha 1C subunit;
  Uniprot ID:  Q13936;
  ENSP ID: ENSP00000382546
MVNENTRMYIPEENHQGSNYGSPRPAHANMNANAAAGLAPEHIPTPGAALSWQAAIDAARQAKLMGSAGNATISTVSSTQRKRQQYGKPKKQGSTTATRPPRALLCLTLKNPIRRACISIVEWKPFEIIILLTIFANCVALAIYIPFPEDDSNATNSNLERVEYLFLIIFTVEAFLKVIAYGLLFHPNAYLRNGWNLLDFIIVVVGLFSAILEQATKADGANALGGKGAGFDVKALRAFRVLRPLRLVSGVPSLQVVLNSIIKAMVPLLHIALLVLFVIIIYAIIGLELFMGKMHKTCYNQEGIADVPAEDDPSPCALETGHGRQCQNGTVCKPGWDGPKHGITNFDNFAFAMLTVFQCITMEGWTDVLYWVNDAVGRDWPWIYFVTLIIIGSFFVLNLVLGVLSGEFSKEREKAKARGDFQKLREKQQLEEDLKGYLDWITQAEDIDPENEDEGMDEEKPRNMSMPTSETESVNTENVAGGDIEGENCGARLAHRISKSKFSRYWRRWNRFCRRKCRAAVKSNVFYWLVIFLVFLNTLTIASEHYNQPNWLTEVQDTANKALLALFTAEMLLKMYSLGLQAYFVSLFNRFDCFVVCGGILETILVETKIMSPLGISVLRCVRLLRIFKITRYWNSLSNLVASLLNSVRSIASLLLLLFLFIIIFSLLGMQLFGGKFNFDEMQTRRSTFDNFPQSLLTVFQILTGEDWNSVMYDGIMAYGGPSFPGMLVCIYFIILFICGNYILLNVFLAIAVDNLADAESLTSAQKEEEEEKERKKLARTASPEKKQELVEKPAVGESKEEKIELKSITADGESPPATKINMDDLQPNENEDKSPYPNPETTGEEDEEEPEMPVGPRPRPLSELHLKEKAVPMPEASAFFIFSSNNRFRLQCHRIVNDTIFTNLILFFILLSSISLAAEDPVQHTSFRNHILGNADYVFTSIFTLEIILKMTAYGAFLHKGSFCRNYFNILDLLVVSVSLISFGIQSSAINVVKILRVLRVLRPLRAINRAKGLKHVVQCVFVAIRTIGNIVIVTTLLQFMFACIGVQLFKGKLYTCSDSSKQTEAECKGNYITYKDGEVDHPIIQPRSWENSKFDFDNVLAAMMALFTVSTFEGWPELLYRSIDSHTEDKGPIYNYRVEISIFFIIYIIIIAFFMMNIFVGFVIVTFQEQGEQEYKNCELDKNQRQCVEYALKARPLRRYIPKNQHQYKVWYVVNSTYFEYLMFVLILLNTICLAMQHYGQSCLFKIAMNILNMLFTGLFTVEMILKLIAFKPKHYFCDAWNTFDALIVVGSIVDIAITEVNPAEHTQCSPSMNAEENSRISITFFRLFRVMRLVKLLSRGEGIRTLLWTFIKSFQALPYVALLIVMLFFIYAVIGMQVFGKIALNDTTEINRNNNFQTFPQAVLLLFRCATGEAWQDIMLACMPGKKCAPESEPSNSTEGETPCGSSFAVFYFISFYMLCAFLIINLFVAVIMDNFDYLTRDWSILGPHHLDEFKRIWAEYDPEAKGRIKHLDVVTLLRRIQPPLGFGKLCPHRVACKRLVSMNMPLNSDGTVMFNATLFALVRTALRIKTEEGPSPSEAHQGAEDPFRPAGNLEQANEELRAIIKKIWKRTSMKLLDQVVPPAGDDEVTVGKFYATFLIQEYFRKFKKRKEQGLVGKPSQRNALSLQAGLRTLHDIGPEIRRAISGDLTAEEELDKAMKEAVSAASEDDIFRRAGGLFGNHVSYYQSDGRSAFPQTFTTQRPLHINKAGSSQGDTESPSHEKLVDSTFTPSSYSSTGSNANINNANNTALGRLPRPAGYPSTVSTVEGHGPPLSPAIRVQEVAWKLSSNRCHSRESQAAMAGQEETSQDETYEVKMNHDTEACSEPSLLSTEMLSYQDDENRQLTLPEEDKRDIRQSPKRGFLRSASLGRRASFHLECLKRQKDRGGDISQKTVLPLHLVHHQALAVAGLSPLLQRSHSPASFPRPFATPPATPGSRGWPPQPVPTLRLEGVESSEKLNSSFPSIHCGSWAETTPGGGGSSAARRVRPVSLMVPSQAGAPGRQFHGSASSLVEAVLISEGLGQFAQDPKFIEVTTQELADACDMTIEEMESAADNILSGGAPQSPNGALLPFVNCRDAGQDRAGGEEDAGCVRARGRPSEEELQDSRVYVSSL

SEQ ID NO: 10732 - protein, 2166 aa, Homo sapiens
  Payload ID: 2138;
  Gene Symbol: CACNA1C;
  Gene Name: calcium channel, voltage-dependent, L type, alpha 1C subunit;
  Uniprot ID:  Q13936;
  ENSP ID: ENSP00000382547
MVNENTRMYIPEENHQGSNYGSPRPAHANMNANAAAGLAPEHIPTPGAALSWQAAIDAARQAKLMGSAGNATISTVSSTQRKRQQYGKPKKQGSTTATRPPRALLCLTLKNPIRRACISIVEWKPFEIIILLTIFANCVALAIYIPFPEDDSNATNSNLERVEYLFLIIFTVEAFLKVIAYGLLFHPNAYLRNGWNLLDFIIVVVGLFSAILEQATKADGANALGGKGAGFDVKALRAFRVLRPLRLVSGVPSLQVVLNSIIKAMVPLLHIALLVLFVIIIYAIIGLELFMGKMHKTCYNQEGIADVPAEDDPSPCALETGHGRQCQNGTVCKPGWDGPKHGITNFDNFAFAMLTVFQCITMEGWTDVLYWVNDAVGRDWPWIYFVTLIIIGSFFVLNLVLGVLSGEFSKEREKAKARGDFQKLREKQQLEEDLKGYLDWITQAEDIDPENEDEGMDEEKPRNMSMPTSETESVNTENVAGGDIEGENCGARLAHRISKSKFSRYWRRWNRFCRRKCRAAVKSNVFYWLVIFLVFLNTLTIASEHYNQPNWLTEVQDTANKALLALFTAEMLLKMYSLGLQAYFVSLFNRFDCFVVCGGILETILVETKIMSPLGISVLRCVRLLRIFKITRYWNSLSNLVASLLNSVRSIASLLLLLFLFIIIFSLLGMQLFGGKFNFDEMQTRRSTFDNFPQSLLTVFQILTGEDWNSVMYDGIMAYGGPSFPGMLVCIYFIILFICGNYILLNVFLAIAVDNLADAESLTSAQKEEEEEKERKKLARTASPEKKQELVEKPAVGESKEEKIELKSITADGESPPATKINMDDLQPNENEDKSPYPNPETTGEEDEEEPEMPVGPRPRPLSELHLKEKAVPMPEASAFFIFSSNNRFRLQCHRIVNDTIFTNLILFFILLSSISLAAEDPVQHTSFRNHILFYFDIVFTTIFTIEIALKMTAYGAFLHKGSFCRNYFNILDLLVVSVSLISFGIQSSAINVVKILRVLRVLRPLRAINRAKGLKHVVQCVFVAIRTIGNIVIVTTLLQFMFACIGVQLFKGKLYTCSDSSKQTEAECKGNYITYKDGEVDHPIIQPRSWENSKFDFDNVLAAMMALFTVSTFEGWPELLYRSIDSHTEDKGPIYNYRVEISIFFIIYIIIIAFFMMNIFVGFVIVTFQEQGEQEYKNCELDKNQRQCVEYALKARPLRRYIPKNQHQYKVWYVVNSTYFEYLMFVLILLNTICLAMQHYGQSCLFKIAMNILNMLFTGLFTVEMILKLIAFKPKGYFSDPWNVFDFLIVIGSIIDVILSETNHYFCDAWNTFDALIVVGSIVDIAITEVNPAEHTQCSPSMNAEENSRISITFFRLFRVMRLVKLLSRGEGIRTLLWTFIKSFQALPYVALLIVMLFFIYAVIGMQVFGKIALNDTTEINRNNNFQTFPQAVLLLFRCATGEAWQDIMLACMPGKKCAPESEPSNSTEGETPCGSSFAVFYFISFYMLCAFLIINLFVAVIMDNFDYLTRDWSILGPHHLDEFKRIWAEYDPEAKGRIKHLDVVTLLRRIQPPLGFGKLCPHRVACKRLVSMNMPLNSDGTVMFNATLFALVRTALRIKTEGNLEQANEELRAIIKKIWKRTSMKLLDQVVPPAGDDEVTVGKFYATFLIQEYFRKFKKRKEQGLVGKPSQRNALSLQAGLRTLHDIGPEIRRAISGDLTAEEELDKAMKEAVSAASEDDIFRRAGGLFGNHVSYYQSDGRSAFPQTFTTQRPLHINKAGSSQGDTESPSHEKLVDSTFTPSSYSSTGSNANINNANNTALGRLPRPAGYPSTVSTVEGHGPPLSPAIRVQEVAWKLSSNRCHSRESQAAMAGQEETSQDETYEVKMNHDTEACSEPSLLSTEMLSYQDDENRQLTLPEEDKRDIRQSPKRGFLRSASLGRRASFHLECLKRQKDRGGDISQKTVLPLHLVHHQALAVAGLSPLLQRSHSPASFPRPFATPPATPGSRGWPPQPVPTLRLEGVESSEKLNSSFPSIHCGSWAETTPGGGGSSAARRVRPVSLMVPSQAGAPGRQFHGSASSLVEAVLISEGLGQFAQDPKFIEVTTQELADACDMTIEEMESAADNILSGGAPQSPNGALLPFVNCRDAGQDRAGGEEDAGCVRARGRPSEEELQDSRVYVSSL

SEQ ID NO: 10733 - protein, 2138 aa, Homo sapiens
  Payload ID: 2138;
  Gene Symbol: CACNA1C;
  Gene Name: calcium channel, voltage-dependent, L type, alpha 1C subunit;
  Uniprot ID:  Q13936;
  ENSP ID: ENSP00000382549
MVNENTRMYIPEENHQGSNYGSPRPAHANMNANAAAGLAPEHIPTPGAALSWQAAIDAARQAKLMGSAGNATISTVSSTQRKRQQYGKPKKQGSTTATRPPRALLCLTLKNPIRRACISIVEWKPFEIIILLTIFANCVALAIYIPFPEDDSNATNSNLERVEYLFLIIFTVEAFLKVIAYGLLFHPNAYLRNGWNLLDFIIVVVGLFSAILEQATKADGANALGGKGAGFDVKALRAFRVLRPLRLVSGVPSLQVVLNSIIKAMVPLLHIALLVLFVIIIYAIIGLELFMGKMHKTCYNQEGIADVPAEDDPSPCALETGHGRQCQNGTVCKPGWDGPKHGITNFDNFAFAMLTVFQCITMEGWTDVLYWMQDAMGYELPWVYFVSLVIFGSFFVLNLVLGVLSGEFSKEREKAKARGDFQKLREKQQLEEDLKGYLDWITQAEDIDPENEDEGMDEEKPRNMSMPTSETESVNTENVAGGDIEGENCGARLAHRISKSKFSRYWRRWNRFCRRKCRAAVKSNVFYWLVIFLVFLNTLTIASEHYNQPNWLTEVQDTANKALLALFTAEMLLKMYSLGLQAYFVSLFNRFDCFVVCGGILETILVETKIMSPLGISVLRCVRLLRIFKITRYWNSLSNLVASLLNSVRSIASLLLLLFLFIIIFSLLGMQLFGGKFNFDEMQTRRSTFDNFPQSLLTVFQILTGEDWNSVMYDGIMAYGGPSFPGMLVCIYFIILFICGNYILLNVFLAIAVDNLADAESLTSAQKEEEEEKERKKLARTASPEKKQELVEKPAVGESKEEKIELKSITADGESPPATKINMDDLQPNENEDKSPYPNPETTGEEDEEEPEMPVGPRPRPLSELHLKEKAVPMPEASAFFIFSSNNRFRLQCHRIVNDTIFTNLILFFILLSSISLAAEDPVQHTSFRNHILGNADYVFTSIFTLEIILKMTAYGAFLHKGSFCRNYFNILDLLVVSVSLISFGIQSSAINVVKILRVLRVLRPLRAINRAKGLKHVVQCVFVAIRTIGNIVIVTTLLQFMFACIGVQLFKGKLYTCSDSSKQTEAECKGNYITYKDGEVDHPIIQPRSWENSKFDFDNVLAAMMALFTVSTFEGWPELLYRSIDSHTEDKGPIYNYRVEISIFFIIYIIIIAFFMMNIFVGFVIVTFQEQGEQEYKNCELDKNQRQCVEYALKARPLRRYIPKNQHQYKVWYVVNSTYFEYLMFVLILLNTICLAMQHYGQSCLFKIAMNILNMLFTGLFTVEMILKLIAFKPKHYFCDAWNTFDALIVVGSIVDIAITEVNPAEHTQCSPSMNAEENSRISITFFRLFRVMRLVKLLSRGEGIRTLLWTFIKSFQALPYVALLIVMLFFIYAVIGMQVFGKIALNDTTEINRNNNFQTFPQAVLLLFRCATGEAWQDIMLACMPGKKCAPESEPSNSTEGETPCGSSFAVFYFISFYMLCAFLIINLFVAVIMDNFDYLTRDWSILGPHHLDEFKRIWAEYDPEAKGRIKHLDVVTLLRRIQPPLGFGKLCPHRVACKRLVSMNMPLNSDGTVMFNATLFALVRTALRIKTEGNLEQANEELRAIIKKIWKRTSMKLLDQVVPPAGDDEVTVGKFYATFLIQEYFRKFKKRKEQGLVGKPSQRNALSLQAGLRTLHDIGPEIRRAISGDLTAEEELDKAMKEAVSAASEDDIFRRAGGLFGNHVSYYQSDGRSAFPQTFTTQRPLHINKAGSSQGDTESPSHEKLVDSTFTPSSYSSTGSNANINNANNTALGRLPRPAGYPSTVSTVEGHGPPLSPAIRVQEVAWKLSSNRCHSRESQAAMAGQEETSQDETYEVKMNHDTEACSEPSLLSTEMLSYQDDENRQLTLPEEDKRDIRQSPKRGFLRSASLGRRASFHLECLKRQKDRGGDISQKTVLPLHLVHHQALAVAGLSPLLQRSHSPASFPRPFATPPATPGSRGWPPQPVPTLRLEGVESSEKLNSSFPSIHCGSWAETTPGGGGSSAARRVRPVSLMVPSQAGAPGRQFHGSASSLVEAVLISEGLGQFAQDPKFIEVTTQELADACDMTIEEMESAADNILSGGAPQSPNGALLPFVNCRDAGQDRAGGEEDAGCVRARGRPSEEELQDSRVYVSSL

SEQ ID NO: 10734 - protein, 2138 aa, Homo sapiens
  Payload ID: 2138;
  Gene Symbol: CACNA1C;
  Gene Name: calcium channel, voltage-dependent, L type, alpha 1C subunit;
  Uniprot ID:  Q13936;
  ENSP ID: ENSP00000382552
MVNENTRMYIPEENHQGSNYGSPRPAHANMNANAAAGLAPEHIPTPGAALSWQAAIDAARQAKLMGSAGNATISTVSSTQRKRQQYGKPKKQGSTTATRPPRALLCLTLKNPIRRACISIVEWKPFEIIILLTIFANCVALAIYIPFPEDDSNATNSNLERVEYLFLIIFTVEAFLKVIAYGLLFHPNAYLRNGWNLLDFIIVVVGLFSAILEQATKADGANALGGKGAGFDVKALRAFRVLRPLRLVSGVPSLQVVLNSIIKAMVPLLHIALLVLFVIIIYAIIGLELFMGKMHKTCYNQEGIADVPAEDDPSPCALETGHGRQCQNGTVCKPGWDGPKHGITNFDNFAFAMLTVFQCITMEGWTDVLYWVNDAVGRDWPWIYFVTLIIIGSFFVLNLVLGVLSGEFSKEREKAKARGDFQKLREKQQLEEDLKGYLDWITQAEDIDPENEDEGMDEEKPRNMSMPTSETESVNTENVAGGDIEGENCGARLAHRISKSKFSRYWRRWNRFCRRKCRAAVKSNVFYWLVIFLVFLNTLTIASEHYNQPNWLTEVQDTANKALLALFTAEMLLKMYSLGLQAYFVSLFNRFDCFVVCGGILETILVETKIMSPLGISVLRCVRLLRIFKITRYWNSLSNLVASLLNSVRSIASLLLLLFLFIIIFSLLGMQLFGGKFNFDEMQTRRSTFDNFPQSLLTVFQILTGEDWNSVMYDGIMAYGGPSFPGMLVCIYFIILFICGNYILLNVFLAIAVDNLADAESLTSAQKEEEEEKERKKLARTASPEKKQELVEKPAVGESKEEKIELKSITADGESPPATKINMDDLQPNENEDKSPYPNPETTGEEDEEEPEMPVGPRPRPLSELHLKEKAVPMPEASAFFIFSSNNRFRLQCHRIVNDTIFTNLILFFILLSSISLAAEDPVQHTSFRNHILGNADYVFTSIFTLEIILKMTAYGAFLHKGSFCRNYFNILDLLVVSVSLISFGIQSSAINVVKILRVLRVLRPLRAINRAKGLKHVVQCVFVAIRTIGNIVIVTTLLQFMFACIGVQLFKGKLYTCSDSSKQTEAECKGNYITYKDGEVDHPIIQPRSWENSKFDFDNVLAAMMALFTVSTFEGWPELLYRSIDSHTEDKGPIYNYRVEISIFFIIYIIIIAFFMMNIFVGFVIVTFQEQGEQEYKNCELDKNQRQCVEYALKARPLRRYIPKNQHQYKVWYVVNSTYFEYLMFVLILLNTICLAMQHYGQSCLFKIAMNILNMLFTGLFTVEMILKLIAFKPKGYFSDPWNVFDFLIVIGSIIDVILSETNPAEHTQCSPSMNAEENSRISITFFRLFRVMRLVKLLSRGEGIRTLLWTFIKSFQALPYVALLIVMLFFIYAVIGMQVFGKIALNDTTEINRNNNFQTFPQAVLLLFRCATGEAWQDIMLACMPGKKCAPESEPSNSTEGETPCGSSFAVFYFISFYMLCAFLIINLFVAVIMDNFDYLTRDWSILGPHHLDEFKRIWAEYDPEAKGRIKHLDVVTLLRRIQPPLGFGKLCPHRVACKRLVSMNMPLNSDGTVMFNATLFALVRTALRIKTEGNLEQANEELRAIIKKIWKRTSMKLLDQVVPPAGDDEVTVGKFYATFLIQEYFRKFKKRKEQGLVGKPSQRNALSLQAGLRTLHDIGPEIRRAISGDLTAEEELDKAMKEAVSAASEDDIFRRAGGLFGNHVSYYQSDGRSAFPQTFTTQRPLHINKAGSSQGDTESPSHEKLVDSTFTPSSYSSTGSNANINNANNTALGRLPRPAGYPSTVSTVEGHGPPLSPAIRVQEVAWKLSSNRCHSRESQAAMAGQEETSQDETYEVKMNHDTEACSEPSLLSTEMLSYQDDENRQLTLPEEDKRDIRQSPKRGFLRSASLGRRASFHLECLKRQKDRGGDISQKTVLPLHLVHHQALAVAGLSPLLQRSHSPASFPRPFATPPATPGSRGWPPQPVPTLRLEGVESSEKLNSSFPSIHCGSWAETTPGGGGSSAARRVRPVSLMVPSQAGAPGRQFHGSASSLVEAVLISEGLGQFAQDPKFIEVTTQELADACDMTIEEMESAADNILSGGAPQSPNGALLPFVNCRDAGQDRAGGEEDAGCVRARGRPSEEELQDSRVYVSSL

SEQ ID NO: 10735 - protein, 2144 aa, Homo sapiens
  Payload ID: 2138;
  Gene Symbol: CACNA1C;
  Gene Name: calcium channel, voltage-dependent, L type, alpha 1C subunit;
  Uniprot ID:  Q13936;
  ENSP ID: ENSP00000382557
MVNENTRMYIPEENHQGSNYGSPRPAHANMNANAAAGLAPEHIPTPGAALSWQAAIDAARQAKLMGSAGNATISTVSSTQRKRQQYGKPKKQGSTTATRPPRALLCLTLKNPIRRACISIVEWKPFEIIILLTIFANCVALAIYIPFPEDDSNATNSNLERVEYLFLIIFTVEAFLKVIAYGLLFHPNAYLRNGWNLLDFIIVVVGLFSAILEQATKADGANALGGKGAGFDVKALRAFRVLRPLRLVSGVPSLQVVLNSIIKAMVPLLHIALLVLFVIIIYAIIGLELFMGKMHKTCYNQEGIADVPAEDDPSPCALETGHGRQCQNGTVCKPGWDGPKHGITNFDNFAFAMLTVFQCITMEGWTDVLYWVNDAVGRDWPWIYFVTLIIIGSFFVLNLVLGVLSGEFSKEREKAKARGDFQKLREKQQLEEDLKGYLDWITQAEDIDPENEDEGMDEEKPRNMSMPTSETESVNTENVAGGDIEGENCGARLAHRISKSKFSRYWRRWNRFCRRKCRAAVKSNVFYWLVIFLVFLNTLTIASEHYNQPNWLTEVQDTANKALLALFTAEMLLKMYSLGLQAYFVSLFNRFDCFVVCGGILETILVETKIMSPLGISVLRCVRLLRIFKITRYWNSLSNLVASLLNSVRSIASLLLLLFLFIIIFSLLGMQLFGGKFNFDEMQTRRSTFDNFPQSLLTVFQILTGEDWNSVMYDGIMAYGGPSFPGMLVCIYFIILFICGNYILLNVFLAIAVDNLADAESLTSAQKEEEEEKERKKLARTASPEKKQELVEKPAVGESKEEKIELKSITADGESPPATKINMDDLQPNENEDKSPYPNPETTGEEDEEEPEMPVGPRPRPLSELHLKEKAVPMPEASAFFIFSSNNRFRLQCHRIVNDTIFTNLILFFILLSSISLAAEDPVQHTSFRNHILFYFDIVFTTIFTIEIALKMTAYGAFLHKGSFCRNYFNILDLLVVSVSLISFGIQSSAINVVKILRVLRVLRPLRAINRAKGLKHVVQCVFVAIRTIGNIVIVTTLLQFMFACIGVQLFKGKLYTCSDSSKQTEAECKGNYITYKDGEVDHPIIQPRSWENSKFDFDNVLAAMMALFTVSTFEGWPELLYRSIDSHTEDKGPIYNYRVEISIFFIIYIIIIAFFMMNIFVGFVIVTFQEQGEQEYKNCELDKNQRQCVEYALKARPLRRYIPKNQHQYKVWYVVNSTYFEYLMFVLILLNTICLAMQHYGQSCLFKIAMNILNMLFTGLFTVEMILKLIAFKPKHYFCDAWNTFDALIVVGSIVDIAITENAEENSRISITFFRLFRVMRLVKLLSRGEGIRTLLWTFIKSFQALPYVALLIVMLFFIYAVIGMQVFGKIALNDTTEINRNNNFQTFPQAVLLLFRCATGEAWQDIMLACMPGKKCAPESEPSNSTEGETPCGSSFAVFYFISFYMLCAFLIINLFVAVIMDNFDYLTRDWSILGPHHLDEFKRIWAEYDPEAKGRIKHLDVVTLLRRIQPPLGFGKLCPHRVACKRLVSMNMPLNSDGTVMFNATLFALVRTALRIKTEEGPSPSEAHQGAEDPFRPAGNLEQANEELRAIIKKIWKRTSMKLLDQVVPPAGDDEVTVGKFYATFLIQEYFRKFKKRKEQGLVGKPSQRNALSLQAGLRTLHDIGPEIRRAISGDLTAEEELDKAMKEAVSAASEDDIFRRAGGLFGNHVSYYQSDGRSAFPQTFTTQRPLHINKAGSSQGDTESPSHEKLVDSTFTPSSYSSTGSNANINNANNTALGRLPRPAGYPSTVSTVEGHGPPLSPAIRVQEVAWKLSSNRCHSRESQAAMAGQEETSQDETYEVKMNHDTEACSEPSLLSTEMLSYQDDENRQLTLPEEDKRDIRQSPKRGFLRSASLGRRASFHLECLKRQKDRGGDISQKTVLPLHLVHHQALAVAGLSPLLQRSHSPASFPRPFATPPATPGSRGWPPQPVPTLRLEGVESSEKLNSSFPSIHCGSWAETTPGGGGSSAARRVRPVSLMVPSQAGAPGRQFHGSASSLVEAVLISEGLGQFAQDPKFIEVTTQELADACDMTIEEMESAADNILSGGAPQSPNGALLPFVNCRDAGQDRAGGEEDAGCVRARGRPSEEELQDSRVYVSSL

SEQ ID NO: 10736 - protein, 2138 aa, Homo sapiens
  Payload ID: 2138;
  Gene Symbol: CACNA1C;
  Gene Name: calcium channel, voltage-dependent, L type, alpha 1C subunit;
  Uniprot ID:  Q13936;
  ENSP ID: ENSP00000382563
MVNENTRMYIPEENHQGSNYGSPRPAHANMNANAAAGLAPEHIPTPGAALSWQAAIDAARQAKLMGSAGNATISTVSSTQRKRQQYGKPKKQGSTTATRPPRALLCLTLKNPIRRACISIVEWKPFEIIILLTIFANCVALAIYIPFPEDDSNATNSNLERVEYLFLIIFTVEAFLKVIAYGLLFHPNAYLRNGWNLLDFIIVVVGLFSAILEQATKADGANALGGKGAGFDVKALRAFRVLRPLRLVSGVPSLQVVLNSIIKAMVPLLHIALLVLFVIIIYAIIGLELFMGKMHKTCYNQEGIADVPAEDDPSPCALETGHGRQCQNGTVCKPGWDGPKHGITNFDNFAFAMLTVFQCITMEGWTDVLYWVNDAVGRDWPWIYFVTLIIIGSFFVLNLVLGVLSGEFSKEREKAKARGDFQKLREKQQLEEDLKGYLDWITQAEDIDPENEDEGMDEEKPRNMSMPTSETESVNTENVAGGDIEGENCGARLAHRISKSKFSRYWRRWNRFCRRKCRAAVKSNVFYWLVIFLVFLNTLTIASEHYNQPNWLTEVQDTANKALLALFTAEMLLKMYSLGLQAYFVSLFNRFDCFVVCGGILETILVETKIMSPLGISVLRCVRLLRIFKITRYWNSLSNLVASLLNSVRSIASLLLLLFLFIIIFSLLGMQLFGGKFNFDEMQTRRSTFDNFPQSLLTVFQILTGEDWNSVMYDGIMAYGGPSFPGMLVCIYFIILFICGNYILLNVFLAIAVDNLADAESLTSAQKEEEEEKERKKLARTASPEKKQELVEKPAVGESKEEKIELKSITADGESPPATKINMDDLQPNENEDKSPYPNPETTGEEDEEEPEMPVGPRPRPLSELHLKEKAVPMPEASAFFIFSSNNRFRLQCHRIVNDTIFTNLILFFILLSSISLAAEDPVQHTSFRNHILFYFDIVFTTIFTIEIALKMTAYGAFLHKGSFCRNYFNILDLLVVSVSLISFGIQSSAINVVKILRVLRVLRPLRAINRAKGLKHVVQCVFVAIRTIGNIVIVTTLLQFMFACIGVQLFKGKLYTCSDSSKQTEAECKGNYITYKDGEVDHPIIQPRSWENSKFDFDNVLAAMMALFTVSTFEGWPELLYRSIDSHTEDKGPIYNYRVEISIFFIIYIIIIAFFMMNIFVGFVIVTFQEQGEQEYKNCELDKNQRQCVEYALKARPLRRYIPKNQHQYKVWYVVNSTYFEYLMFVLILLNTICLAMQHYGQSCLFKIAMNILNMLFTGLFTVEMILKLIAFKPKHYFCDAWNTFDALIVVGSIVDIAITEVNPAEHTQCSPSMNAEENSRISITFFRLFRVMRLVKLLSRGEGIRTLLWTFIKSFQALPYVALLIVMLFFIYAVIGMQVFGKIALNDTTEINRNNNFQTFPQAVLLLFRCATGEAWQDIMLACMPGKKCAPESEPSNSTEGETPCGSSFAVFYFISFYMLCAFLIINLFVAVIMDNFDYLTRDWSILGPHHLDEFKRIWAEYDPEAKGRIKHLDVVTLLRRIQPPLGFGKLCPHRVACKRLVSMNMPLNSDGTVMFNATLFALVRTALRIKTEGNLEQANEELRAIIKKIWKRTSMKLLDQVVPPAGDDEVTVGKFYATFLIQEYFRKFKKRKEQGLVGKPSQRNALSLQAGLRTLHDIGPEIRRAISGDLTAEEELDKAMKEAVSAASEDDIFRRAGGLFGNHVSYYQSDGRSAFPQTFTTQRPLHINKAGSSQGDTESPSHEKLVDSTFTPSSYSSTGSNANINNANNTALGRLPRPAGYPSTVSTVEGHGPPLSPAIRVQEVAWKLSSNRCHSRESQAAMAGQEETSQDETYEVKMNHDTEACSEPSLLSTEMLSYQDDENRQLTLPEEDKRDIRQSPKRGFLRSASLGRRASFHLECLKRQKDRGGDISQKTVLPLHLVHHQALAVAGLSPLLQRSHSPASFPRPFATPPATPGSRGWPPQPVPTLRLEGVESSEKLNSSFPSIHCGSWAETTPGGGGSSAARRVRPVSLMVPSQAGAPGRQFHGSASSLVEAVLISEGLGQFAQDPKFIEVTTQELADACDMTIEEMESAADNILSGGAPQSPNGALLPFVNCRDAGQDRAGGEEDAGCVRARGRPSEEELQDSRVYVSSL

SEQ ID NO: 10737 - protein, 2157 aa, Homo sapiens
  Payload ID: 2138;
  Gene Symbol: CACNA1C;
  Gene Name: calcium channel, voltage-dependent, L type, alpha 1C subunit;
  Uniprot ID:  Q13936;
  ENSP ID: ENSP00000385724
MVNENTRMYIPEENHQGSNYGSPRPAHANMNANAAAGLAPEHIPTPGAALSWQAAIDAARQAKLMGSAGNATISTVSSTQRKRQQYGKPKKQGSTTATRPPRALLCLTLKNPIRRACISIVEWKPFEIIILLTIFANCVALAIYIPFPEDDSNATNSNLERVEYLFLIIFTVEAFLKVIAYGLLFHPNAYLRNGWNLLDFIIVVVGLFSAILEQATKADGANALGGKGAGFDVKALRAFRVLRPLRLVSGVPSLQVVLNSIIKAMVPLLHIALLVLFVIIIYAIIGLELFMGKMHKTCYNQEGIADVPAEDDPSPCALETGHGRQCQNGTVCKPGWDGPKHGITNFDNFAFAMLTVFQCITMEGWTDVLYWVNDAVGRDWPWIYFVTLIIIGSFFVLNLVLGVLSGEFSKEREKAKARGDFQKLREKQQLEEDLKGYLDWITQAEDIDPENEDEGMDEEKPRNMSMPTSETESVNTENVAGGDIEGENCGARLAHRISKSKFSRYWRRWNRFCRRKCRAAVKSNVFYWLVIFLVFLNTLTIASEHYNQPNWLTEVQDTANKALLALFTAEMLLKMYSLGLQAYFVSLFNRFDCFVVCGGILETILVETKIMSPLGISVLRCVRLLRIFKITRYWNSLSNLVASLLNSVRSIASLLLLLFLFIIIFSLLGMQLFGGKFNFDEMQTRRSTFDNFPQSLLTVFQILTGEDWNSVMYDGIMAYGGPSFPGMLVCIYFIILFICGNYILLNVFLAIAVDNLADAESLTSAQKEEEEEKERKKLARTASPEKKQELVEKPAVGESKEEKIELKSITADGESPPATKINMDDLQPNENEDKSPYPNPETTGEEDEEEPEMPVGPRPRPLSELHLKEKAVPMPEASAFFIFSSNNRFRLQCHRIVNDTIFTNLILFFILLSSISLAAEDPVQHTSFRNHILFYFDIVFTTIFTIEIALKMTAYGAFLHKGSFCRNYFNILDLLVVSVSLISFGIQSSAINVVKILRVLRVLRPLRAINRAKGLKHVVQCVFVAIRTIGNIVIVTTLLQFMFACIGVQLFKGKLYTCSDSSKQTEAECKGNYITYKDGEVDHPIIQPRSWENSKFDFDNVLAAMMALFTVSTFEGWPELLYRSIDSHTEDKGPIYNYRVEISIFFIIYIIIIAFFMMNIFVGFVIVTFQEQGEQEYKNCELDKNQRQCVEYALKARPLRRYIPKNQHQYKVWYVVNSTYFEYLMFVLILLNTICLAMQHYGQSCLFKIAMNILNMLFTGLFTVEMILKLIAFKPKGYFSDPWNVFDFLIVIGSIIDVILSETNPAEHTQCSPSMNAEENSRISITFFRLFRVMRLVKLLSRGEGIRTLLWTFIKSFQALPYVALLIVMLFFIYAVIGMQVFGKIALNDTTEINRNNNFQTFPQAVLLLFRCATGEAWQDIMLACMPGKKCAPESEPSNSTEGETPCGSSFAVFYFISFYMLCAFLIINLFVAVIMDNFDYLTRDWSILGPHHLDEFKRIWAEYDPEAKGRIKHLDVVTLLRRIQPPLGFGKLCPHRVACKRLVSMNMPLNSDGTVMFNATLFALVRTALRIKTEEGPSPSEAHQGAEDPFRPAGNLEQANEELRAIIKKIWKRTSMKLLDQVVPPAGDDEVTVGKFYATFLIQEYFRKFKKRKEQGLVGKPSQRNALSLQAGLRTLHDIGPEIRRAISGDLTAEEELDKAMKEAVSAASEDDIFRRAGGLFGNHVSYYQSDGRSAFPQTFTTQRPLHINKAGSSQGDTESPSHEKLVDSTFTPSSYSSTGSNANINNANNTALGRLPRPAGYPSTVSTVEGHGPPLSPAIRVQEVAWKLSSNRCHSRESQAAMAGQEETSQDETYEVKMNHDTEACSEPSLLSTEMLSYQDDENRQLTLPEEDKRDIRQSPKRGFLRSASLGRRASFHLECLKRQKDRGGDISQKTVLPLHLVHHQALAVAGLSPLLQRSHSPASFPRPFATPPATPGSRGWPPQPVPTLRLEGVESSEKLNSSFPSIHCGSWAETTPGGGGSSAARRVRPVSLMVPSQAGAPGRQFHGSASSLVEAVLISEGLGQFAQDPKFIEVTTQELADACDMTIEEMESAADNILSGGAPQSPNGALLPFVNCRDAGQDRAGGEEDAGCVRARGRPSEEELQDSRVYVSSL

SEQ ID NO: 10738 - protein, 2209 aa, Homo sapiens
  Payload ID: 2138;
  Gene Symbol: CACNA1C;
  Gene Name: calcium channel, voltage-dependent, L type, alpha 1C subunit;
  ENSP ID: ENSP00000385896
MVNENTRMYIPEENHQGSNYGSPRPAHANMNANAAAGLAPEHIPTPGAALSWQAAIDAARQAKLMGSAGNATISTVSSTQRKRQQYGKPKKQGSTTATRPPRALLCLTLKNPIRRACISIVEWKPFEIIILLTIFANCVALAIYIPFPEDDSNATNSNLERVEYLFLIIFTVEAFLKVIAYGLLFHPNAYLRNGWNLLDFIIVVVGLFSAILEQATKADGANALGGKGAGFDVKALRAFRVLRPLRLVSGVPSLQVVLNSIIKAMVPLLHIALLVLFVIIIYAIIGLELFMGKMHKTCYNQEGIADVPAEDDPSPCALETGHGRQCQNGTVCKPGWDGPKHGITNFDNFAFAMLTVFQCITMEGWTDVLYWMQDAMGYELPWVYFVSLVIFGSFFVLNLVLGVLSGEFSKEREKAKARGDFQKLREKQQLEEDLKGYLDWITQAEDIDPENEDEGMDEEKPRNMSMPTSETESVNTENVAGGDIEGENCGARLAHRISKSKFSRYWRRWNRFCRRKCRAAVKSNVFYWLVIFLVFLNTLTIASEHYNQPNWLTEVQDTANKALLALFTAEMLLKMYSLGLQAYFVSLFNRFDCFVVCGGILETILVETKIMSPLGISVLRCVRLLRIFKITRYWNSLSNLVASLLNSVRSIASLLLLLFLFIIIFSLLGMQLFGGKFNFDEMQTRRSTFDNFPQSLLTVFQILTGEDWNSVMYDGIMAYGGPSFPGMLVCIYFIILFICGNYILLNVFLAIAVDNLADAESLTSAQKEEEEEKERKKLARTASPEKKQELVEKPAVGESKEEKIELKSITADGESPPATKINMDDLQPNENEDKSPYPNPETTGEEDEEEPEMPVGPRPRPLSELHLKEKAVPMPEASAFFIFSSNNRFRLQCHRIVNDTIFTNLILFFILLSSISLAAEDPVQHTSFRNHILFYFDIVFTTIFTIEIALKMTAYGAFLHKGSFCRNYFNILDLLVVSVSLISFGIQSSAINVVKILRVLRVLRPLRAINRAKGLKHVVQCVFVAIRTIGNIVIVTTLLQFMFACIGVQLFKGKLYTCSDSSKQTEAECKGNYITYKDGEVDHPIIQPRSWENSKFDFDNVLAAMMALFTVSTFEGWPELLYRSIDSHTEDKGPIYNYRVEISIFFIIYIIIIAFFMMNIFVGFVIVTFQEQGEQEYKNCELDKNQRQCVEYALKARPLRRYIPKNQHQYKVWYVVNSTYFEYLMFVLILLNTICLAMQHYGQSCLFKIAMNILNMLFTGLFTVEMILKLIAFKPKGYFSDPWNVFDFLIVIGSIIDVILSETNPAEHTQCSPSMNAEENSRISITFFRLFRVMRLVKLLSRGEGIRTLLWTFIKSFQALPYVALLIVMLFFIYAVIGMQVFGKIALNDTTEINRNNNFQTFPQAVLLLFRCATGEAWQDIMLACMPGKKCAPESEPSNSTEGETPCGSSFAVFYFISFYMLCAFLIINLFVAVIMDNFDYLTRDWSILGPHHLDEFKRIWAEYDPEAKGRIKHLDVVTLLRRIQPPLGFGKLCPHRVACKRLVSMNMPLNSDGTVMFNATLFALVRTALRIKTEGNLEQANEELRAIIKKIWKRTSMKLLDQVVPPAGDDEVTVGKFYATFLIQEYFRKFKKRKEQGLVGKPSQRNALSLQAGLRTLHDIGPEIRRAISGDLTAEEELDKAMKEAVSAASEDDIFRRAGGLFGNHVSYYQSDGRSAFPQTFTTQRPLHINKAGSSQGDTESPSHEKLVDSTFTPSSYSSTGSNANINNANNTALGRLPRPAGYPSTVSTVEGHGPPLSPAIRVQEVAWKLSSNRMHCCDMLDGGTFPPALGPRRAPPCLHQQLQGSLAGLREDTPCIVPGHASLCCSSRVGEWLPAGCTAPQHARCHSRESQAAMAGQEETSQDETYEVKMNHDTEACSEPSLLSTEMLSYQDDENRQLTLPEEDKRDIRQSPKRGFLRSASLGRRASFHLECLKRQKDRGGDISQKTVLPLHLVHHQALAVAGLSPLLQRSHSPASFPRPFATPPATPGSRGWPPQPVPTLRLEGVESSEKLNSSFPSIHCGSWAETTPGGGGSSAARRVRPVSLMVPSQAGAPGRQFHGSASSLVEAVLISEGLGQFAQDPKFIEVTTQELADACDMTIEEMESAADNILSGGAPQSPNGALLPFVNCRDAGQDRAGGEEDAGCVRARGRPSEEELQDSRVYVSSL

SEQ ID NO: 10739 - protein, 1279 aa, Homo sapiens
  Payload ID: 2138;
  Gene Symbol: CACNA1C;
  Gene Name: calcium channel, voltage-dependent, L type, alpha 1C subunit;
  ENSP ID: ENSP00000437936
MVNENTRMYIPEENHQGSNYGSPRPAHANMNANAAAGLAPEHIPTPGAALSWQAAIDAARQAKLMGSAGNATISTVSSTQRKRQQYGKPKKQGSTTATRPPRALLCLTLKNPIRRACISIVEWKPFEIIILLTIFANCVALAIYIPFPEDDSNATNSNLERVEYLFLIIFTVEAFLKVIAYGLLFHPNAYLRNGWNLLDFIIVVVGLFSAILEQATKADGANALGGKGAGFDVKALRAFRVLRPLRLVSGVPSLQVVLNSIIKAMVPLLHIALLVLFVIIIYAIIGLELFMGKMHKTCYNQEGIADVPAEDDPSPCALETGHGRQCQNGTVCKPGWDGPKHGITNFDNFAFAMLTVFQCITMEGWTDVLYWVNDAVGRDWPWIYFVTLIIIGSFFVLNLVLGVLSGEFSKEREKAKARGDFQKLREKQQLEEDLKGYLDWITQAEDIDPENEDEGMDEEKPRNMSMPTSETESVNTENVAGGDIEGENCGARLAHRISKSKFSRYWRRWNRFCRRKCRAAVKSNVFYWLVIFLVFLNTLTIASEHYNQPNWLTEVQDTANKALLALFTAEMLLKMYSLGLQAYFVSLFNRFDCFVVCGGILETILVETKIMSPLGISVLRCVRLLRIFKITRYWNSLSNLVASLLNSVRSIASLLLLLFLFIIIFSLLGMQLFGGKFNFDEMQTRRSTFDNFPQSLLTVFQILTGEDWNSVMYDGIMAYGGPSFPGMLVCIYFIILFICGNYILLNVFLAIAVDNLADAESLTSAQKEEEEEKERKKLARTASPEKKQELVEKPAVGESKEEKIELKSITADGESPPATKINMDDLQPNENEDKSPYPNPETTGEEDEEEPEMPVGPRPRPLSELHLKEKAVPMPEASAFFIFSSNNRFRLQCHRIVNDTIFTNLILFFILLSSISLAAEDPVQHTSFRNHILGNADYVFTSIFTLEIILKMTAYGAFLHKGSFCRNYFNILDLLVVSVSLISFGIQSSAINVVKILRVLRVLRPLRAINRAKGLKHVVQCVFVAIRTIGNIVIVTTLLQFMFACIGVQLFKGKLYTCSDSSKQTEAECKGNYITYKDGEVDHPIIQPRSWENSKFDFDNVLAAMMALFTVSTFEGWPELLYRSIDSHTEDKGPIYNYRVEISIFFIIYIIIIAFFMMNIFVGFVIVTFQEQGEQEYKNCELDKNQRQCVEYALKARPLRRYIPKNQHQYKVWYVVNSTYFEYLMFVLILLNTICLAMQHYGQSCLFKIAMNILNMLFTGLFTVEMILKLIAFKPKVGL

SEQ ID NO: 10740 - protein, 100 aa, Homo sapiens
  Payload ID: 2138;
  Gene Symbol: CACNA1C;
  Gene Name: calcium channel, voltage-dependent, L type, alpha 1C subunit;
  ENSP ID: ENSP00000445849
MLRAFVQPGTPAYQPLPSHLSANTEVKFKGTLVHEAQLNYFYISPGGSNYGSPRPAHANMNANAAAGLAPEHIPTPGAALSWQAAIDAARQAKLMGSAGN

SEQ ID NO: 10741 - protein, 243 aa, Homo sapiens
  Payload ID: 2138;
  Gene Symbol: CACNA1C;
  Gene Name: calcium channel, voltage-dependent, L type, alpha 1C subunit;
  ENSP ID: ENSP00000478996
  MOD_RES (1)..(1): Any amino acid
XSFPGMLVCIYFIILFICGNYILLNVFLAIAVDNLADAESLTSAQKEEEEEKERKKLARTASPEKKQELVEKPAVGESKEEKIELKSITADGESPPATKINMDDLQPNENEDKSPYPNPETTGEEDEEEPEMPVGPRPRPLSELHLKEKAVPMPEASAFFIFSSNNRFRLQCHRIVNDTIFTNLILFFILLSSISLAAEDPVQHTSFRNHVCIACVFCTPSPWGCARPTASVADIIVQSGAQF

SEQ ID NO: 10742 - protein, 2039 aa, Homo sapiens
  Payload ID: 2138;
  Gene Symbol: CACNA1C;
  Gene Name: calcium channel, voltage-dependent, L type, alpha 1C subunit;
  ENSP ID: ENSP00000479029
ERVEYLFLIIFTVEAFLKVIAYGLLFHPNAYLRNGWNLLDFIIVVVGLFSAILEQATKADGANALGGKGAGFDVKALRAFRVLRPLRLVSGVPSLQVVLNSIIKAMVPLLHIALLVLFVIIIYAIIGLELFMGKMHKTCYNQEGIADVPAEDDPSPCALETGHGRQCQNGTVCKPGWDGPKHGITNFDNFAFAMLTVFQCITMEGWTDVLYWMQDAMGYELPWVYFVSLVIFGSFFVLNLVLGVLSGEFSKEREKAKARGDFQKLREKQQLEEDLKGYLDWITQAEDIDPENEDEGMDEEKPRNMSMPTSETESVNTENVAGGDIEGENCGARLAHRISKSKFSRYWRRWNRFCRRKCRAAVKSNVFYWLVIFLVFLNTLTIASEHYNQPNWLTEVQDTANKALLALFTAEMLLKMYSLGLQAYFVSLFNRFDCFVVCGGILETILVETKIMSPLGISVLRCVRLLRIFKITRYWNSLSNLVASLLNSVRSIASLLLLLFLFIIIFSLLGMQLFGGKFNFDEMQTRRSTFDNFPQSLLTVFQILTGEDWNSVMYDGIMAYGGPSFPGMLVCIYFIILFICGNYILLNVFLAIAVDNLADAESLTSAQKEEEEEKERKKLARTASPEKKQELVEKPAVGESKEEKIELKSITADGESPPATKINMDDLQPNENEDKSPYPNPETTGEEDEEEPEMPVGPRPRPLSELHLKEKAVPMPEASAFFIFSSNNRFRLQCHRIVNDTIFTNLILFFILLSSISLAAEDPVQHTSFRNHILFYFDIVFTTIFTIEIALKMTAYGAFLHKGSFCRNYFNILDLLVVSVSLISFGIQSSAINVVKILRVLRVLRPLRAINRAKGLKHVVQCVFVAIRTIGNIVIVTTLLQFMFACIGVQLFKGKLYTCSDSSKQTEAECKGNYITYKDGEVDHPIIQPRSWENSKFDFDNVLAAMMALFTVSTFEGWPELLYRSIDSHTEDKGPIYNYRVEISIFFIIYIIIIAFFMMNIFVGFVIVTFQEQGEQEYKNCELDKNQRQCVEYALKARPLRRYIPKNQHQYKVWYVVNSTYFEYLMFVLILLNTICLAMQHYGQSCLFKIAMNILNMLFTGLFTVEMILKLIAFKPKHYFCDAWNTFDALIVVGSIVDIAITEVNNAEENSRISITFFRLFRVMRLVKLLSRGEGIRTLLWTFIKSFQALPYVALLIVMLFFIYAVIGMQVFGKIALNDTTEINRNNNFQTFPQAVLLLFRCATGEAWQDIMLACMPGKKCAPESEPSNSTEGETPCGSSFAVFYFISFYMLCAFLIINLFVAVIMDNFDYLTRDWSILGPHHLDEFKRIWAEYDPEAKGRIKHLDVVTLLRRIQPPLGFGKLCPHRVACKRLVSMNMPLNSDGTVMFNATLFALVRTALRIKTEGNLEQANEELRAIIKKIWKRTSMKLLDQVVPPAGDDEVTVGKFYATFLIQEYFRKFKKRKEQGLVGKPSQRNALSLQAGLRTLHDIGPEIRRAISGDLTAEEELDKAMKEAVSAASEDDIFRRAGGLFGNHVSYYQSDGRSAFPQTFTTQRPLHINKAGSSQGDTESPSHEKLVDSTFTPSSYSSTGSNANINNANNTALGRLPRPAGYPSTVSTVEGHGPPLSPAIRVQEVAWKLSSNRMHCCDMLDGGTFPPALGPRRAPPCLHQQLQGSLAGLREDTPCIVPGHASLCCSSRVGEWLPAGCTAPQHARCHSRESQAAMAGQEETSQDETYEVKMNHDTEACSEPSLLSTEMLSYQDDENRQLTLPEEDKRDIRQSPKRGFLRSASLGRRASFHLECLKRQKDRGGDISQKTVLPLHLVHHQALAVAGLSPLLQRSHSPASFPRPFATPPATPGSRGWPPQPVPTLRLEGVESSEKLNSSFPSIHCGSWAETTPGGGGSSAARRVRPVSLMVPSQAGAPGRQFHGSASSLVEAVLISEGLGQFAQDPKFIEVTTQELADACDMTIEEMESAADNILSGGAPQSPNGALLPFVNCRDAGQDRAGGEEDAGCVRARGRPSEEELQDSRVYVSSL

SEQ ID NO: 10743 - protein, 144 aa, Homo sapiens
  Payload ID: 2138;
  Gene Symbol: CACNA1C;
  Gene Name: calcium channel, voltage-dependent, L type, alpha 1C subunit;
  ENSP ID: ENSP00000479274
MAYVCKLLMSKTRPLVMIGVAWVMLLYRSIDSHTEDKGPIYNYRVEISIFFIIYIIIIAFFMMNIFVGFVIVTFQEQGEQEYKNCELDKNQRQCVEYALKARPLRRYIPKNQHQYKVWYVVNSTYFEYLMFVLILLNTICLAMQ

SEQ ID NO: 10744 - protein, 2027 aa, Homo sapiens
  Payload ID: 2138;
  Gene Symbol: CACNA1C;
  Gene Name: calcium channel, voltage-dependent, L type, alpha 1C subunit;
  ENSP ID: ENSP00000480292
ERVEYLFLIIFTVEAFLKVIAYGLLFHPNAYLRNGWNLLDFIIVVVGLFSAILEQATKADGANALGGKGAGFDVKALRAFRVLRPLRLVSGVPSLQVVLNSIIKAMVPLLHIALLVLFVIIIYAIIGLELFMGKMHKTCYNQEGIADVPAEDDPSPCALETGHGRQCQNGTVCKPGWDGPKHGITNFDNFAFAMLTVFQCITMEGWTDVLYWVNDAVGRDWPWIYFVTLIIIGSFFVLNLVLGVLSGEFSKEREKAKARGDFQKLREKQQLEEDLKGYLDWITQAEDIDPENEDEGMDEEKPRNMSMPTSETESVNTENVAGGDIEGENCGARLAHRISKSKFSRYWRRWNRFCRRKCRAAVKSNVFYWLVIFLVFLNTLTIASEHYNQPNWLTEVQDTANKALLALFTAEMLLKMYSLGLQAYFVSLFNRFDCFVVCGGILETILVETKIMSPLGISVLRCVRLLRIFKITRYWNSLSNLVASLLNSVRSIASLLLLLFLFIIIFSLLGMQLFGGKFNFDEMQTRRSTFDNFPQSLLTVFQILTGEDWNSVMYDGIMAYGGPSFPGMLVCIYFIILFICGNYILLNVFLAIAVDNLADAESLTSAQKEEEEEKERKKLARTASPEKKQELVEKPAVGESKEEKIELKSITADGESPPATKINMDDLQPNENEDKSPYPNPETTGEEDEEEPEMPVGPRPRPLSELHLKEKAVPMPEASAFFIFSSNNRFRLQCHRIVNDTIFTNLILFFILLSSISLAAEDPVQHTSFRNHILFYFDIVFTTIFTIEIALKILGNADYVFTSIFTLEIILKMTAYGAFLHKGSFCRNYFNILDLLVVSVSLISFGIQSSAINVVKILRVLRVLRPLRAINRAKGLKHVVQCVFVAIRTIGNIVIVTTLLQFMFACIGVQLFKGKLYTCSDSSKQTEAECKGNYITYKDGEVDHPIIQPRSWENSKFDFDNVLAAMMALFTVSTFEGWPELLYRSIDSHTEDKGPIYNYRVEISIFFIIYIIIIAFFMMNIFVGFVIVTFQEQGEQEYKNCELDKNQRQCVEYALKARPLRRYIPKNQHQYKVWYVVNSTYFEYLMFVLILLNTICLAMQHYGQSCLFKIAMNILNMLFTGLFTVEMILKLIAFKPKGYFSDPWNVFDFLIVIGSIIDVILSETNHYFCDAWNTFDALIVVGSIVDIAITEVNPAEHTQCSPSMNAEENSRISITFFRLFRVMRLVKLLSRGEGIRTLLWTFIKSFQALPYVALLIVMLFFIYAVIGMQVFGKIALNDTTEINRNNNFQTFPQAVLLLFRCATGEAWQDIMLACMPGKKCAPESEPSNSTEGETPCGSSFAVFYFISFYMLCAFLIINLFVAVIMDNFDYLTRDWSILGPHHLDEFKRIWAEYDPEAKGRIKHLDVVTLLRRIQPPLGFGKLCPHRVACKRLVSMNMPLNSDGTVMFNATLFALVRTALRIKTEGNLEQANEELRAIIKKIWKRTSMKLLDQVVPPAGDDEVTVGKFYATFLIQEYFRKFKKRKEQGLVGKPSQRNALSLQAGLRTLHDIGPEIRRAISGDLTAEEELDKAMKEAVSAASEDDIFRRAGGLFGNHVSYYQSDGRSAFPQTFTTQRPLHINKAGSSQGDTESPSHEKLVDSTFTPSSYSSTGSNANINNANNTALGRLPRPAGYPSTVSTVEGHGPPLSPAIRVQEVAWKLSSNRCHSRESQAAMAGQEETSQDETYEVKMNHDTEACSEPSLLSTEMLSYQDDENRQLTLPEEDKRDIRQSPKRGFLRSASLGRRASFHLECLKRQKDRGGDISQKTVLPLHLVHHQALAVAGLSPLLQRSHSPASFPRPFATPPATPGSRGWPPQPVPTLRLEGVESSEKLNSSFPSIHCGSWAETTPGGGGSSAARRVRPVSLMVPSQAGAPGRQFHGSASSLVEAVLISEGLGQFAQDPKFIEVTTQELADACDMTIEEMESAADNILSGGAPQSPNGALLPFVNCRDAGQDRAGGEEDAGCVRARGRPSEEELQDSRVYVSSL

SEQ ID NO: 10745 - protein, 2062 aa, Homo sapiens
  Payload ID: 2138;
  Gene Symbol: CACNA1C;
  Gene Name: calcium channel, voltage-dependent, L type, alpha 1C subunit;
  ENSP ID: ENSP00000480922
ERVEYLFLIIFTVEAFLKVIAYGLLFHPNAYLRNGWNLLDFIIVVVGLFSAILEQATKADGANALGGKGAGFDVKALRAFRVLRPLRLVSGVPSLQVVLNSIIKAMVPLLHIALLVLFVIIIYAIIGLELFMGKMHKTCYNQEGIADVPAEDDPSPCALETGHGRQCQNGTVCKPGWDGPKHGITNFDNFAFAMLTVFQCITMEGWTDVLYWVNDAVGRDWPWIYFVTLIIIGSFFVLNLVLGVLSGEFSKEREKAKARGDFQKLREKQQLEEDLKGYLDWITQAEDIDPENEDEGMDEEKPRNMSMPTSETESVNTENVAGGDIEGENCGARLAHRISKSKFSRYWRRWNRFCRRKCRAAVKSNVFYWLVIFLVFLNTLTIASEHYNQPNWLTEVQDTANKALLALFTAEMLLKMYSLGLQAYFVSLFNRFDCFVVCGGILETILVETKIMSPLGISVLRCVRLLRIFKITRYWNSLSNLVASLLNSVRSIASLLLLLFLFIIIFSLLGMQLFGGKFNFDEMQTRRSTFDNFPQSLLTVFQILTGEDWNSVMYDGIMAYGGPSFPGMLVCIYFIILFICGNYILLNVFLAIAVDNLADAESLTSAQKEEEEEKERKKLARTASPEKKQELVEKPAVGESKEEKIELKSITADGESPPATKINMDDLQPNENEDKSPYPNPETTGEEDEEEPEMPVGPRPRPLSELHLKEKAVPMPEASAFFIFSSNNRFRLQCHRIVNDTIFTNLILFFILLSSISLAAEDPVQHTSFRNHILFYFDIVFTTIFTIEIALKILGNADYVFTSIFTLEIILKMTAYGAFLHKGSFCRNYFNILDLLVVSVSLISFGIQSSAINVVKILRVLRVLRPLRAINRAKGLKHVVQCVFVAIRTIGNIVIVTTLLQFMFACIGVQLFKGKLYTCSDSSKQTEAECKGNYITYKDGEVDHPIIQPRSWENSKFDFDNVLAAMMALFTVSTFEGWPELLYRSIDSHTEDKGPIYNYRVEISIFFIIYIIIIAFFMMNIFVGFVIVTFQEQGEQEYKNCELDKNQRQCVEYALKARPLRRYIPKNQHQYKVWYVVNSTYFEYLMFVLILLNTICLAMQHYGQSCLFKIAMNILNMLFTGLFTVEMILKLIAFKPKGYFSDPWNVFDFLIVIGSIIDVILSETNHYFCDAWNTFDALIVVGSIVDIAITEVNPAEHTQCSPSMNAEENSRISITFFRLFRVMRLVKLLSRGEGIRTLLWTFIKSFQALPYVALLIVMLFFIYAVIGMQVFGKIALNDTTEINRNNNFQTFPQAVLLLFRCATGEAWQDIMLACMPGKKCAPESEPSNSTEGETPCGSSFAVFYFISFYMLCAFLIINLFVAVIMDNFDYLTRDWSILGPHHLDEFKRIWAEYDPEAKGRIKHLDVVTLLRRIQPPLGFGKLCPHRVACKRLVSMNMPLNSDGTVMFNATLFALVRTALRIKTEGNLEQANEELRAIIKKIWKRTSMKLLDQVVPPAGDDEVTVGKFYATFLIQEYFRKFKKRKEQGLVGKPSQRNALSLQAGLRTLHDIGPEIRRAISGDLTAEEELDKAMKEAVSAASEDDIFRRAGGLFGNHVSYYQSDGRSAFPQTFTTQRPLHINKAGSSQGDTESPSHEKLVDSTFTPSSYSSTGSNANINNANNTALGRLPRPAGYPSTVSTVEGHGPPLSPAIRVQEVAWKLSSNRERHVPMCEDLELRRDSGSAGTQAHCLLLRRANPSRCHSRESQAAMAGQEETSQDETYEVKMNHDTEACSEPSLLSTEMLSYQDDENRQLTLPEEDKRDIRQSPKRGFLRSASLGRRASFHLECLKRQKDRGGDISQKTVLPLHLVHHQALAVAGLSPLLQRSHSPASFPRPFATPPATPGSRGWPPQPVPTLRLEGVESSEKLNSSFPSIHCGSWAETTPGGGGSSAARRVRPVSLMVPSQAGAPGRQFHGSASSLVEAVLISEGLGQFAQDPKFIEVTTQELADACDMTIEEMESAADNILSGGAPQSPNGALLPFVNCRDAGQDRAGGEEDAGCVRARGRPSEEELQDSRVYVSSL

SEQ ID NO: 10746 - protein, 829 aa, Homo sapiens
  Payload ID: 2138;
  Gene Symbol: CACNA1C;
  Gene Name: calcium channel, voltage-dependent, L type, alpha 1C subunit;
  ENSP ID: ENSP00000482910
MFIVSQNAEENSRISITFFRLFRVMRLVKLLSRGEGIRTLLWTFIKSFQALPYVALLIVMLFFIYAVIGMQVFGKIALNDTTEINRNNNFQTFPQAVLLLFRCATGEAWQDIMLACMPGKKCAPESEPSNSTEGETPCGSSFAVFYFISFYMLCAFLIINLFVAVIMDNFDYLTRDWSILGPHHLDEFKRIWAEYDPEAKGRIKHLDVVTLLRRIQPPLGFGKLCPHRVACKRLVSMNMPLNSDGTVMFNATLFALVRTALRIKTEGNLEQANEELRAIIKKIWKRTSMKLLDQVVPPAGDDEVTVGKFYATFLIQEYFRKFKKRKEQGLVGKPSQRNALSLQAGLRTLHDIGPEIRRAISGDLTAEEELDKAMKEAVSAASEDDIFRRAGGLFGNHVSYYQSDGRSAFPQTFTTQRPLHINKAGSSQGDTESPSHEKLVDSTFTPSSYSSTGSNANINNANNTALGRLPRPAGYPSTVSTVEGHGPPLSPAIRVQEVAWKLSSNRCHSRESQAAMAGQEETSQDETYEVKMNHDTEACSEPSLLSTEMLSYQDDENRQLTLPEEDKRDIRQSPKRGFLRSASLGRRASFHLECLKRQKDRGGDISQKTVLPLHLVHHQALAVAGLSPLLQRSHSPASFPRPFATPPATPGSRGWPPQPVPTLRLEGVESSEKLNSSFPSIHCGSWAETTPGGGGSSAARRVRPVSLMVPSQAGAPGRQFHGSASSLVEAVLISEGLGQFAQDPKFIEVTTQELADACDMTIEEMESAADNILSGGAPQSPNGALLPFVNCRDAGQDRAGGEEDAGCVRARGRPSEEELQDSRVYVSSL

SEQ ID NO: 10747 - protein, 2014 aa, Homo sapiens
  Payload ID: 2138;
  Gene Symbol: CACNA1C;
  Gene Name: calcium channel, voltage-dependent, L type, alpha 1C subunit;
  ENSP ID: ENSP00000483335
ERVEYLFLIIFTVEAFLKVIAYGLLFHPNAYLRNGWNLLDFIIVVVGLFSAILEQATKADGANALGGKGAGFDVKALRAFRVLRPLRLVSGVPSLQVVLNSIIKAMVPLLHIALLVLFVIIIYAIIGLELFMGKMHKTCYNQEGIADVPAEDDPSPCALETGHGRQCQNGTVCKPGWDGPKHGITNFDNFAFAMLTVFQCITMEGWTDVLYWMQDAMGYELPWVYFVSLVIFGSFFVLNLVLGVLSGEFSKEREKAKARGDFQKLREKQQLEEDLKGYLDWITQAEDIDPENEDEGMDEEKPRNMSMPTSETESVNTENVAGGDIEGENCGARLAHRISKSKFSRYWRRWNRFCRRKCRAAVKSNVFYWLVIFLVFLNTLTIASEHYNQPNWLTEVQDTANKALLALFTAEMLLKMYSLGLQAYFVSLFNRFDCFVVCGGILETILVETKIMSPLGISVLRCVRLLRIFKITRYWNSLSNLVASLLNSVRSIASLLLLLFLFIIIFSLLGMQLFGGKFNFDEMQTRRSTFDNFPQSLLTVFQILTGEDWNSVMYDGIMAYGGPSFPGMLVCIYFIILFICGNYILLNVFLAIAVDNLADAESLTSAQKEEEEEKERKKLARTASPEKKQELVEKPAVGESKEEKIELKSITADGESPPATKINMDDLQPNENEDKSPYPNPETTGEEDEEEPEMPVGPRPRPLSELHLKEKAVPMPEASAFFIFSSNNRFRLQCHRIVNDTIFTNLILFFILLSSISLAAEDPVQHTSFRNHILFYFDIVFTTIFTIEIALKMTAYGAFLHKGSFCRNYFNILDLLVVSVSLISFGIQSSAINVVKILRVLRVLRPLRAINRAKGLKHVVQCVFVAIRTIGNIVIVTTLLQFMFACIGVQLFKGKLYTCSDSSKQTEAECKGNYITYKDGEVDHPIIQPRSWENSKFDFDNVLAAMMALFTVSTFEGWPELLYRSIDSHTEDKGPIYNYRVEISIFFIIYIIIIAFFMMNIFVGFVIVTFQEQGEQEYKNCELDKNQRQCVEYALKARPLRRYIPKNQHQYKVWYVVNSTYFEYLMFVLILLNTICLAMQHYGQSCLFKIAMNILNMLFTGLFTVEMILKLIAFKPKGYFSDPWNVFDFLIVIGSIIDVILSETNPAEHTQCSPSMNAEENSRISITFFRLFRVMRLVKLLSRGEGIRTLLWTFIKSFQALPYVALLIVMLFFIYAVIGMQVFGKIALNDTTEINRNNNFQTFPQAVLLLFRCATGEAWQDIMLACMPGKKCAPESEPSNSTEGETPCGSSFAVFYFISFYMLCAFLIINLFVAVIMDNFDYLTRDWSILGPHHLDEFKRIWAEYDPEAKGRIKHLDVVTLLRRIQPPLGFGKLCPHRVACKRLVSMNMPLNSDGTVMFNATLFALVRTALRIKTEGNLEQANEELRAIIKKIWKRTSMKLLDQVVPPAGDDEVTVGKFYATFLIQEYFRKFKKRKEQGLVGKPSQRNALSLQAGLRTLHDIGPEIRRAISGDLTAEEELDKAMKEAVSAASEDDIFRRAGGLFGNHVSYYQSDGRSAFPQTFTTQRPLHINKAGSSQGDTESPSHEKLVDSTFTPSSYSSTGSNANINNANNTALGRLPRPAGYPSTVSTVEGHGPPLSPAIRVQEVAWKLSSNRERHVPMCEDLELRRDSGSAGTQAHCLLLRRANPSRCHSRESQAAMAGQEETSQDETYEVKMNHDTEACSEPSLLSTEMLSYQDDENRQLTLPEEDKRDIRQSPKRGFLRSASLGRRASFHLECLKRQKDRGGDISQKTVLPLHLVHHQALAVAGLSPLLQRSHSPASFPRPFATPPATPGSRGWPPQPVPTLRLEGVESSEKLNSSFPSIHCGSWAETTPGGGGSSAARRVRPVSLMVPSQAGAPGRQFHGSASSLVEAVLISEGLGQFAQDPKFIEVTTQELADACDMTIEEMESAADNILSGGAPQSPNGALLPFVNCRDAGQDRAGGEEDAGCVRARGRPSEEELQDSRVYVSSL

SEQ ID NO: 10748 - protein, 2014 aa, Homo sapiens
  Payload ID: 2138;
  Gene Symbol: CACNA1C;
  Gene Name: calcium channel, voltage-dependent, L type, alpha 1C subunit;
  ENSP ID: ENSP00000484796
ERVEYLFLIIFTVEAFLKVIAYGLLFHPNAYLRNGWNLLDFIIVVVGLFSAILEQATKADGANALGGKGAGFDVKALRAFRVLRPLRLVSGVPSLQVVLNSIIKAMVPLLHIALLVLFVIIIYAIIGLELFMGKMHKTCYNQEGIADVPAEDDPSPCALETGHGRQCQNGTVCKPGWDGPKHGITNFDNFAFAMLTVFQCITMEGWTDVLYWVNDAVGRDWPWIYFVTLIIIGSFFVLNLVLGVLSGEFSKEREKAKARGDFQKLREKQQLEEDLKGYLDWITQAEDIDPENEDEGMDEEKPRNMSMPTSETESVNTENVAGGDIEGENCGARLAHRISKSKFSRYWRRWNRFCRRKCRAAVKSNVFYWLVIFLVFLNTLTIASEHYNQPNWLTEVQDTANKALLALFTAEMLLKMYSLGLQAYFVSLFNRFDCFVVCGGILETILVETKIMSPLGISVLRCVRLLRIFKITRYWNSLSNLVASLLNSVRSIASLLLLLFLFIIIFSLLGMQLFGGKFNFDEMQTRRSTFDNFPQSLLTVFQILTGEDWNSVMYDGIMAYGGPSFPGMLVCIYFIILFICGNYILLNVFLAIAVDNLADAESLTSAQKEEEEEKERKKLARTASPEKKQELVEKPAVGESKEEKIELKSITADGESPPATKINMDDLQPNENEDKSPYPNPETTGEEDEEEPEMPVGPRPRPLSELHLKEKAVPMPEASAFFIFSSNNRFRLQCHRIVNDTIFTNLILFFILLSSISLAAEDPVQHTSFRNHILGNADYVFTSIFTLEIILKMTAYGAFLHKGSFCRNYFNILDLLVVSVSLISFGIQSSAINVVKILRVLRVLRPLRAINRAKGLKHVVQCVFVAIRTIGNIVIVTTLLQFMFACIGVQLFKGKLYTCSDSSKQTEAECKGNYITYKDGEVDHPIIQPRSWENSKFDFDNVLAAMMALFTVSTFEGWPELLYRSIDSHTEDKGPIYNYRVEISIFFIIYIIIIAFFMMNIFVGFVIVTFQEQGEQEYKNCELDKNQRQCVEYALKARPLRRYIPKNQHQYKVWYVVNSTYFEYLMFVLILLNTICLAMQHYGQSCLFKIAMNILNMLFTGLFTVEMILKLIAFKPKHYFCDAWNTFDALIVVGSIVDIAITEVNPAEHTQCSPSMNAEENSRISITFFRLFRVMRLVKLLSRGEGIRTLLWTFIKSFQALPYVALLIVMLFFIYAVIGMQVFGKIALNDTTEINRNNNFQTFPQAVLLLFRCATGEAWQDIMLACMPGKKCAPESEPSNSTEGETPCGSSFAVFYFISFYMLCAFLIINLFVAVIMDNFDYLTRDWSILGPHHLDEFKRIWAEYDPEAKGRIKHLDVVTLLRRIQPPLGFGKLCPHRVACKRLVSMNMPLNSDGTVMFNATLFALVRTALRIKTEGNLEQANEELRAIIKKIWKRTSMKLLDQVVPPAGDDEVTVGKFYATFLIQEYFRKFKKRKEQGLVGKPSQRNALSLQAGLRTLHDIGPEIRRAISGDLTAEEELDKAMKEAVSAASEDDIFRRAGGLFGNHVSYYQSDGRSAFPQTFTTQRPLHINKAGSSQGDTESPSHEKLVDSTFTPSSYSSTGSNANINNANNTALGRLPRPAGYPSTVSTVEGHGPPLSPAIRVQEVAWKLSSNRERHVPMCEDLELRRDSGSAGTQAHCLLLRRANPSRCHSRESQAAMAGQEETSQDETYEVKMNHDTEACSEPSLLSTEMLSYQDDENRQLTLPEEDKRDIRQSPKRGFLRSASLGRRASFHLECLKRQKDRGGDISQKTVLPLHLVHHQALAVAGLSPLLQRSHSPASFPRPFATPPATPGSRGWPPQPVPTLRLEGVESSEKLNSSFPSIHCGSWAETTPGGGGSSAARRVRPVSLMVPSQAGAPGRQFHGSASSLVEAVLISEGLGQFAQDPKFIEVTTQELADACDMTIEEMESAADNILSGGAPQSPNGALLPFVNCRDAGQDRAGGEEDAGCVRARGRPSEEELQDSRVYVSSL

SEQ ID NO: 10749 - protein, 2161 aa, Homo sapiens
  Payload ID: 2139;
  Gene Symbol: CACNA1D;
  Gene Name: calcium channel, voltage-dependent, L type, alpha 1D subunit;
  Uniprot ID:  Q01668;
  ENSP ID: ENSP00000288133
MMMMMMMKKMQHQRQQQADHANEANYARGTRLPLSGEGPTSQPNSSKQTVLSWQAAIDAARQAKAAQTMSTSAPPPVGSLSQRKRQQYAKSKKQGNSSNSRPARALFCLSLNNPIRRACISIVEWKPFDIFILLAIFANCVALAIYIPFPEDDSNSTNHNLEKVEYAFLIIFTVETFLKIIAYGLLLHPNAYVRNGWNLLDFVIVIVGLFSVILEQLTKETEGGNHSSGKSGGFDVKALRAFRVLRPLRLVSGVPSLQVVLNSIIKAMVPLLHIALLVLFVIIIYAIIGLELFIGKMHKTCFFADSDIVAEEDPAPCAFSGNGRQCTANGTECRSGWVGPNGGITNFDNFAFAMLTVFQCITMEGWTDVLYWMNDAMGFELPWVYFVSLVIFGSFFVLNLVLGVLSGEFSKEREKAKARGDFQKLREKQQLEEDLKGYLDWITQAEDIDPENEEEGGEEGKRNTSMPTSETESVNTENVSGEGENRGCCGSLCQAISKSKLSRRWRRWNRFNRRRCRAAVKSVTFYWLVIVLVFLNTLTISSEHYNQPDWLTQIQDIANKVLLALFTCEMLVKMYSLGLQAYFVSLFNRFDCFVVCGGITETILVELEIMSPLGISVFRCVRLLRIFKVTRHWTSLSNLVASLLNSMKSIASLLLLLFLFIIIFSLLGMQLFGGKFNFDETQTKRSTFDNFPQALLTVFQILTGEDWNAVMYDGIMAYGGPSSSGMIVCIYFIILFICGNYILLNVFLAIAVDNLADAESLNTAQKEEAEEKERKKIARKESLENKKNNKPEVNQIANSDNKVTIDDYREEDEDKDPYPPCDVPVGEEEEEEEEDEPEVPAGPRPRRISELNMKEKIAPIPEGSAFFILSKTNPIRVGCHKLINHHIFTNLILVFIMLSSAALAAEDPIRSHSFRNTILGYFDYAFTAIFTVEILLKMTTFGAFLHKGAFCRNYFNLLDMLVVGVSLVSFGIQSSAISVVKILRVLRVLRPLRAINRAKGLKHVVQCVFVAIRTIGNIMIVTTLLQFMFACIGVQLFKGKFYRCTDEAKSNPEECRGLFILYKDGDVDSPVVRERIWQNSDFNFDNVLSAMMALFTVSTFEGWPALLYKAIDSNGENIGPIYNHRVEISIFFIIYIIIVAFFMMNIFVGFVIVTFQEQGEKEYKNCELDKNQRQCVEYALKARPLRRYIPKNPYQYKFWYVVNSSPFEYMMFVLIMLNTLCLAMQHYEQSKMFNDAMDILNMVFTGVFTVEMVLKVIAFKPKGYFSDAWNTFDSLIVIGSIIDVALSEADPTESENVPVPTATPGNSEESNRISITFFRLFRVMRLVKLLSRGEGIRTLLWTFIKSFQALPYVALLIAMLFFIYAVIGMQMFGKVAMRDNNQINRNNNFQTFPQAVLLLFRCATGEAWQEIMLACLPGKLCDPESDYNPGEEYTCGSNFAIVYFISFYMLCAFLIINLFVAVIMDNFDYLTRDWSILGPHHLDEFKRIWSEYDPEAKGRIKHLDVVTLLRRIQPPLGFGKLCPHRVACKRLVAMNMPLNSDGTVMFNATLFALVRTALKIKTEGNLEQANEELRAVIKKIWKKTSMKLLDQVVPPAGDDEVTVGKFYATFLIQDYFRKFKKRKEQGLVGKYPAKNTTIALQAGLRTLHDIGPEIRRAISCDLQDDEPEETKREEEDDVFKRNGALLGNHVNHVNSDRRDSLQQTNTTHRPLHVQRPSIPPASDTEKPLFPPAGNSVCHNHHNHNSIGKQVPTSTNANLNNANMSKAAHGKRPSIGNLEHVSENGHHSSHKHDREPQRRSSVKRTRYYETYIRSDSGDEQLPTICREDPEIHGYFRDPHCLGEQEYFSSEECYEDDSSPTWSRQNYGYYSRYPGRNIDSERPRGYHHPQGFLEDDDSPVCYDSRRSPRRRLLPPTPASHRRSSFNFECLRRQSSQEEVPSSPIFPHRTALPLHLMQQQIMAVAGLDSSKAQKYSPSHSTRSWATPPATPPYRDWTPCYTPLIQVEQSEALDQVNGSLPSLHRSSWYTDEPDISYRTFTPASLTVPSSFRNKNSDKQRSADSLVEAVLISEGLGRYARDPKFVSATKHEIADACDLTIDEMESAASTLLNGNVRPRANGDVGPLSHRQDYELQDFGPGYSDEEPDPGRDEEDLADEMICITTL

SEQ ID NO: 10750 - protein, 2181 aa, Homo sapiens
  Payload ID: 2139;
  Gene Symbol: CACNA1D;
  Gene Name: calcium channel, voltage-dependent, L type, alpha 1D subunit;
  Uniprot ID:  Q01668;
  ENSP ID: ENSP00000288139
MMMMMMMKKMQHQRQQQADHANEANYARGTRLPLSGEGPTSQPNSSKQTVLSWQAAIDAARQAKAAQTMSTSAPPPVGSLSQRKRQQYAKSKKQGNSSNSRPARALFCLSLNNPIRRACISIVEWKPFDIFILLAIFANCVALAIYIPFPEDDSNSTNHNLEKVEYAFLIIFTVETFLKIIAYGLLLHPNAYVRNGWNLLDFVIVIVGLFSVILEQLTKETEGGNHSSGKSGGFDVKALRAFRVLRPLRLVSGVPSLQVVLNSIIKAMVPLLHIALLVLFVIIIYAIIGLELFIGKMHKTCFFADSDIVAEEDPAPCAFSGNGRQCTANGTECRSGWVGPNGGITNFDNFAFAMLTVFQCITMEGWTDVLYWVNDAIGWEWPWVYFVSLIILGSFFVLNLVLGVLSGEFSKEREKAKARGDFQKLREKQQLEEDLKGYLDWITQAEDIDPENEEEGGEEGKRNTSMPTSETESVNTENVSGEGENRGCCGSLWCWWRRRGAAKAGPSGCRRWGQAISKSKLSRRWRRWNRFNRRRCRAAVKSVTFYWLVIVLVFLNTLTISSEHYNQPDWLTQIQDIANKVLLALFTCEMLVKMYSLGLQAYFVSLFNRFDCFVVCGGITETILVELEIMSPLGISVFRCVRLLRIFKVTRHWTSLSNLVASLLNSMKSIASLLLLLFLFIIIFSLLGMQLFGGKFNFDETQTKRSTFDNFPQALLTVFQILTGEDWNAVMYDGIMAYGGPSSSGMIVCIYFIILFICGNYILLNVFLAIAVDNLADAESLNTAQKEEAEEKERKKIARKESLENKKNNKPEVNQIANSDNKVTIDDYREEDEDKDPYPPCDVPVGEEEEEEEEDEPEVPAGPRPRRISELNMKEKIAPIPEGSAFFILSKTNPIRVGCHKLINHHIFTNLILVFIMLSSAALAAEDPIRSHSFRNTILGYFDYAFTAIFTVEILLKMTTFGAFLHKGAFCRNYFNLLDMLVVGVSLVSFGIQSSAISVVKILRVLRVLRPLRAINRAKGLKHVVQCVFVAIRTIGNIMIVTTLLQFMFACIGVQLFKGKFYRCTDEAKSNPEECRGLFILYKDGDVDSPVVRERIWQNSDFNFDNVLSAMMALFTVSTFEGWPALLYKAIDSNGENIGPIYNHRVEISIFFIIYIIIVAFFMMNIFVGFVIVTFQEQGEKEYKNCELDKNQRQCVEYALKARPLRRYIPKNPYQYKFWYVVNSSPFEYMMFVLIMLNTLCLAMQHYEQSKMFNDAMDILNMVFTGVFTVEMVLKVIAFKPKGYFSDAWNTFDSLIVIGSIIDVALSEADPTESENVPVPTATPGNSEESNRISITFFRLFRVMRLVKLLSRGEGIRTLLWTFIKSFQALPYVALLIAMLFFIYAVIGMQMFGKVAMRDNNQINRNNNFQTFPQAVLLLFRCATGEAWQEIMLACLPGKLCDPESDYNPGEEYTCGSNFAIVYFISFYMLCAFLIINLFVAVIMDNFDYLTRDWSILGPHHLDEFKRIWSEYDPEAKGRIKHLDVVTLLRRIQPPLGFGKLCPHRVACKRLVAMNMPLNSDGTVMFNATLFALVRTALKIKTEGNLEQANEELRAVIKKIWKKTSMKLLDQVVPPAGDDEVTVGKFYATFLIQDYFRKFKKRKEQGLVGKYPAKNTTIALQAGLRTLHDIGPEIRRAISCDLQDDEPEETKREEEDDVFKRNGALLGNHVNHVNSDRRDSLQQTNTTHRPLHVQRPSIPPASDTEKPLFPPAGNSVCHNHHNHNSIGKQVPTSTNANLNNANMSKAAHGKRPSIGNLEHVSENGHHSSHKHDREPQRRSSVKRTRYYETYIRSDSGDEQLPTICREDPEIHGYFRDPHCLGEQEYFSSEECYEDDSSPTWSRQNYGYYSRYPGRNIDSERPRGYHHPQGFLEDDDSPVCYDSRRSPRRRLLPPTPASHRRSSFNFECLRRQSSQEEVPSSPIFPHRTALPLHLMQQQIMAVAGLDSSKAQKYSPSHSTRSWATPPATPPYRDWTPCYTPLIQVEQSEALDQVNGSLPSLHRSSWYTDEPDISYRTFTPASLTVPSSFRNKNSDKQRSADSLVEAVLISEGLGRYARDPKFVSATKHEIADACDLTIDEMESAASTLLNGNVRPRANGDVGPLSHRQDYELQDFGPGYSDEEPDPGRDEEDLADEMICITTL

SEQ ID NO: 10751 - protein, 2137 aa, Homo sapiens
  Payload ID: 2139;
  Gene Symbol: CACNA1D;
  Gene Name: calcium channel, voltage-dependent, L type, alpha 1D subunit;
  Uniprot ID:  Q01668;
  ENSP ID: ENSP00000409174
MMMMMMMKKMQHQRQQQADHANEANYARGTRLPLSGEGPTSQPNSSKQTVLSWQAAIDAARQAKAAQTMSTSAPPPVGSLSQRKRQQYAKSKKQGNSSNSRPARALFCLSLNNPIRRACISIVEWKPFDIFILLAIFANCVALAIYIPFPEDDSNSTNHNLEKVEYAFLIIFTVETFLKIIAYGLLLHPNAYVRNGWNLLDFVIVIVGLFSVILEQLTKETEGGNHSSGKSGGFDVKALRAFRVLRPLRLVSGVPSLQVVLNSIIKAMVPLLHIALLVLFVIIIYAIIGLELFIGKMHKTCFFADSDIVAEEDPAPCAFSGNGRQCTANGTECRSGWVGPNGGITNFDNFAFAMLTVFQCITMEGWTDVLYWMNDAMGFELPWVYFVSLVIFGSFFVLNLVLGVLSGEFSKEREKAKARGDFQKLREKQQLEEDLKGYLDWITQAEDIDPENEEEGGEEGKRNTSMPTSETESVNTENVSGEGENRGCCGSLCQAISKSKLSRRWRRWNRFNRRRCRAAVKSVTFYWLVIVLVFLNTLTISSEHYNQPDWLTQIQDIANKVLLALFTCEMLVKMYSLGLQAYFVSLFNRFDCFVVCGGITETILVELEIMSPLGISVFRCVRLLRIFKVTRHWTSLSNLVASLLNSMKSIASLLLLLFLFIIIFSLLGMQLFGGKFNFDETQTKRSTFDNFPQALLTVFQILTGEDWNAVMYDGIMAYGGPSSSGMIVCIYFIILFICGNYILLNVFLAIAVDNLADAESLNTAQKEEAEEKERKKIARKESLENKKNNKPEVNQIANSDNKVTIDDYREEDEDKDPYPPCDVPVGEEEEEEEEDEPEVPAGPRPRRISELNMKEKIAPIPEGSAFFILSKTNPIRVGCHKLINHHIFTNLILVFIMLSSAALAAEDPIRSHSFRNTILGYFDYAFTAIFTVEILLKMTTFGAFLHKGAFCRNYFNLLDMLVVGVSLVSFGIQSSAISVVKILRVLRVLRPLRAINRAKGLKHVVQCVFVAIRTIGNIMIVTTLLQFMFACIGVQLFKGKFYRCTDEAKSNPEECRGLFILYKDGDVDSPVVRERIWQNSDFNFDNVLSAMMALFTVSTFEGWPALLYKAIDSNGENIGPIYNHRVEISIFFIIYIIIVAFFMMNIFVGFVIVTFQEQGEKEYKNCELDKNQRQCVEYALKARPLRRYIPKNPYQYKFWYVVNSSPFEYMMFVLIMLNTLCLAMQHYEQSKMFNDAMDILNMVFTGVFTVEMVLKVIAFKPKGYFSDAWNTFDSLIVIGSIIDVALSEADNSEESNRISITFFRLFRVMRLVKLLSRGEGIRTLLWTFIKSFQALPYVALLIAMLFFIYAVIGMQMFGKVAMRDNNQINRNNNFQTFPQAVLLLFRCATGEAWQEIMLACLPGKLCDPESDYNPGEEYTCGSNFAIVYFISFYMLCAFLIINLFVAVIMDNFDYLTRDWSILGPHHLDEFKRIWSEYDPEAKGRIKHLDVVTLLRRIQPPLGFGKLCPHRVACKRLVAMNMPLNSDGTVMFNATLFALVRTALKIKTEGNLEQANEELRAVIKKIWKKTSMKLLDQVVPPAGDDEVTVGKFYATFLIQDYFRKFKKRKEQGLVGKYPAKNTTIALQAGLRTLHDIGPEIRRAISCDLQDDEPEETKREEEDDVFKRNGALLGNHVNHVNSDRRDSLQQTNTTHRPLHVQRPSIPPASDTEKPLFPPAGNSVCHNHHNHNSIGKQVPTSTNANLNNANMSKAAHGKRPSIGNLEHVSENGHHSSHKHDREPQRRSSVKRSDSGDEQLPTICREDPEIHGYFRDPHCLGEQEYFSSEECYEDDSSPTWSRQNYGYYSRYPGRNIDSERPRGYHHPQGFLEDDDSPVCYDSRRSPRRRLLPPTPASHRRSSFNFECLRRQSSQEEVPSSPIFPHRTALPLHLMQQQIMAVAGLDSSKAQKYSPSHSTRSWATPPATPPYRDWTPCYTPLIQVEQSEALDQVNGSLPSLHRSSWYTDEPDISYRTFTPASLTVPSSFRNKNSDKQRSADSLVEAVLISEGLGRYARDPKFVSATKHEIADACDLTIDEMESAASTLLNGNVRPRANGDVGPLSHRQDYELQDFGPGYSDEEPDPGRDEEDLADEMICITTL

SEQ ID NO: 10752 - protein, 1854 aa, Homo sapiens
  Payload ID: 2139;
  Gene Symbol: CACNA1D;
  Gene Name: calcium channel, voltage-dependent, L type, alpha 1D subunit;
  ENSP ID: ENSP00000418014
ANGTECRSGWVGPNGGITNFDNFAFAMLTVFQCITMEGWTDVLYWMNDAMGFELPWVYFVSLVIFGSFFVLNLVLGVLSGEFSKEREKAKARGDFQKLREKQQLEEDLKGYLDWITQAEDIDPENEEEGGEEGKRNTSMPTSETESVNTENVSGEGENRGCCGSLWCWWRRRGAAKAGPSGCRRWGQAISKSKLSRRWRRWNRFNRRRCRAAVKSVTFYWLVIVLVFLNTLTISSEHYNQPDWLTQIQDIANKVLLALFTCEMLVKMYSLGLQAYFVSLFNRFDCFVVCGGITETILVELEIMSPLGISVFRCVRLLRIFKVTRHWTSLSNLVASLLNSMKSIASLLLLLFLFIIIFSLLGMQLFGGKFNFDETQTKRSTFDNFPQALLTVFQILTGEDWNAVMYDGIMAYGGPSSSGMIVCIYFIILFICGNYILLNVFLAIAVDNLADAESLNTAQKEEAEEKERKKIARKESLENKKNNKPEVNQIANSDNKVTIDDYREEDEDKDPYPPCDVPVGEEEEEEEEDEPEVPAGPRPRRISELNMKEKIAPIPEGSAFFILSKTNPIRVGCHKLINHHIFTNLILVFIMLSSAALAAEDPIRSHSFRNTILGYFDYAFTAIFTVEILLKMTTFGAFLHKGAFCRNYFNLLDMLVVGVSLVSFGIQSSAISVVKILRVLRVLRPLRAINRAKGLKHVVQCVFVAIRTIGNIMIVTTLLQFMFACIGVQLFKGKFYRCTDEAKSNPEECRGLFILYKDGDVDSPVVRERIWQNSDFNFDNVLSAMMALFTVSTFEGWPALLYKAIDSNGENIGPIYNHRVEISIFFIIYIIIVAFFMMNIFVGFVIVTFQEQGEKEYKNCELDKNQRQCVEYALKARPLRRYIPKNPYQYKFWYVVNSSPFEYMMFVLIMLNTLCLAMQHYEQSKMFNDAMDILNMVFTGVFTVEMVLKVIAFKPKHYFTDAWNTFDALIVVGSVVDIAITEVNPTESENVPVPTATPGNSEESNRISITFFRLFRVMRLVKLLSRGEGIRTLLWTFIKSFQALPYVALLIAMLFFIYAVIGMQMFGKVAMRDNNQINRNNNFQTFPQAVLLLFRCATGEAWQEIMLACLPGKLCDPESDYNPGEEYTCGSNFAIVYFISFYMLCAFLIINLFVAVIMDNFDYLTRDWSILGPHHLDEFKRIWSEYDPEAKGRIKHLDVVTLLRRIQPPLGFGKLCPHRVACKRLVAMNMPLNSDGTVMFNATLFALVRTALKIKTEGNLEQANEELRAVIKKIWKKTSMKLLDQVVPPAGDDEVTVGKFYATFLIQDYFRKFKKRKEQGLVGKYPAKNTTIALQAGLRTLHDIGPEIRRAISCDLQDDEPEETKREEEDDVFKRNGALLGNHVNHVNSDRRDSLQQTNTTHRPLHVQRPSIPPASDTEKPLFPPAGNSVCHNHHNHNSIGKQVPTSTNANLNNANMSKAAHGKRPSIGNLEHVSENGHHSSHKHDREPQRRSSVKRTRYYETYIRSDSGDEQLPTICREDPEIHGYFRDPHCLGEQEYFSSEECYEDDSSPTWSRQNYGYYSRYPGRNIDSERPRGYHHPQGFLEDDDSPVCYDSRRSPRRRLLPPTPASHRRSSFNFECLRRQSSQEEVPSSPIFPHRTALPLHLMQQQIMAVAGLDSSKAQKYSPSHSTRSWATPPATPPYRDWTPCYTPLIQVEQSEALDQVNGSLPSLHRSSWYTDEPDISYRTFTPASLTVPSSFRNKNSDKQRSADSLVEAVLISEGLGRYARDPKFVSATKHEIADACDLTIDEMESAASTLLNGNVRPRANGDVGPLSHRQDYELQDFGPGYSDEEPDPGRDEEDLADEMICITTL

SEQ ID NO: 10753 - protein, 264 aa, Homo sapiens
  Payload ID: 2139;
  Gene Symbol: CACNA1D;
  Gene Name: calcium channel, voltage-dependent, L type, alpha 1D subunit;
  ENSP ID: ENSP00000418045
  MOD_RES (1)..(1): Any amino acid
XPCAFSGNGRQCTANGTECRSGWVGPNGGITNFDNFAFAMLTVFQCITMEGWTDVLYWVNDAIGWEWPWVYFVSLIILGSFFVLNLVLGVLSGEFSKEREKAKARGDFQKLREKQQLEEDLKGYLDWITQAEDIDPENEEEGGEEGKRNRVTVADLLKEDKKKKKFCCFRQRRAKDHASMPTSETESVNTENVSGEGENRGCCGSLCQAISKSKLSRRWRRWNRFNRRRCRAAVKSVTFYWLVIVLVFLNTLTISSEHYNQPDW

SEQ ID NO: 10754 - protein, 1966 aa, Homo sapiens
  Payload ID: 2140;
  Gene Symbol: CACNA1F;
  Gene Name: calcium channel, voltage-dependent, L type, alpha 1F subunit;
  Uniprot ID:  O60840;
  ENSP ID: ENSP00000321618
MSESEGGKDTTPEPSPANGAGPGPEWGLCPGPPAVEGESSGASGLGTPKRRNQHSKHKTVAVASAQRSPRALFCLTLANPLRRSCISIVEWKPFDILILLTIFANCVALGVYIPFPEDDSNTANHNLEQVEYVFLVIFTVETVLKIVAYGLVLHPSAYIRNGWNLLDFIIVVVGLFSVLLEQGPGRPGDAPHTGGKPGGFDVKALRAFRVLRPLRLVSGVPSLHIVLNSIMKALVPLLHIALLVLFVIIIYAIIGLELFLGRMHKTCYFLGSDMEAEEDPSPCASSGSGRACTLNQTECRGRWPGPNGGITNFDNFFFAMLTVFQCVTMEGWTDVLYWMQDAMGYELPWVYFVSLVIFGSFFVLNLVLGVLSGEFSKEREKAKARGDFQKQREKQQMEEDLRGYLDWITQAEELDMEDPSADDNLGPQLAELTNRRRGRLRWFSHSTRSTHSTSSHASLPASDTGSMTETQGDEDEEEGALASCTRCLNKIMKTRVCRRLRRANRVLRARCRRAVKSNACYWAVLLLVFLNTLTIASEHHGQPVWLTQIQEYANKVLLCLFTVEMLLKLYGLGPSAYVSSFFNRFDCFVVCGGILETTLVEVGAMQPLGISVLRCVRLLRIFKVTRHWASLSNLVASLLNSMKSIASLLLLLFLFIIIFSLLGMQLFGGKFNFDQTHTKRSTFDTFPQALLTVFQILTGEDWNVVMYDGIMAYGGPFFPGMLVCIYFIILFICGNYILLNVFLAIAVDNLASGDAGTAKDKGGEKSNEKDLPQENEGLVPGVEKEEEEGARREGADMEEEEEEEEEEEEEEEEEGAGGVELLQEVVPKEKVVPIPEGSAFFCLSQTNPLRKGCHTLIHHHVFTNLILVFIILSSVSLAAEDPIRAHSFRNHILGYFDYAFTSIFTVEILLKMTVFGAFLHRGSFCRSWFNMLDLLVVSVSLISFGIHSSAISVVKILRVLRVLRPLRAINRAKGLKHVVQCVFVAIRTIGNIMIVTTLLQFMFACIGVQLFKGKFYTCTDEAKHTPQECKGSFLVYPDGDVSRPLVRERLWVNSDFNFDNVLSAMMALFTVSTFEGWPALLYKAIDAYAEDHGPIYNYRVEISVFFIVYIIIIAFFMMNIFVGFVIITFRAQGEQEYQNCELDKNQRQCVEYALKAQPLRRYIPKNPHQYRVWATVNSAAFEYLMFLLILLNTVALAMQHYEQTAPFNYAMDILNMVFTGLFTIEMVLKIIAFKPKHYFTDAWNTFDALIVVGSIVDIAVTEVNNGGHLGESSEDSSRISITFFRLFRVMRLVKLLSKGEGIRTLLWTFIKSFQALPYVALLIAMIFFIYAVIGMQMFGKVALQDGTQINRNNNFQTFPQAVLLLFRCATGEAWQEIMLASLPGNRCDPESDFGPGEEFTCGSNFAIAYFISFFMLCAFLIINLFVAVIMDNFDYLTRDWSILGPHHLDEFKRIWSEYDPGAKGRIKHLDVVALLRRIQPPLGFGKLCPHRVACKRLVAMNMPLNSDGTVTFNATLFALVRTSLKIKTEGNLEQANQELRIVIKKIWKRMKQKLLDEVIPPPDEEEVTVGKFYATFLIQDYFRKFRRRKEKGLLGNDAAPSTSSALQAGLRSLQDLGPEMRQALTCDTEEEEEEGQEGVEEEDEKDLETNKATMVSQPSARRGSGISVSLPVGDRLPDSLSFGPSDDDRGTPTSSQPSVPQAGSNTHRRGSGALIFTIPEEGNSQPKGTKGQNKQDEDEEVPDRLSYLDEQAGTPPCSVLLPPHRAQRYMDGHLVPRRRLLPPTPAGRKPSFTIQCLQRQGSCEDLPIPGTYHRGRNSGPNRAQGSWATPPQRGRLLYAPLLLVEEGAAGEGYLGRSSGPLRTFTCLHVPGTHSDPSHGKRGSADSLVEAVLISEGLGLFARDPRFVALAKQEIADACRLTLDEMDNAASDLLAQGTSSLYSDEESILSRFDEEDLGDEMACVHAL

SEQ ID NO: 10755 - protein, 1912 aa, Homo sapiens
  Payload ID: 2140;
  Gene Symbol: CACNA1F;
  Gene Name: calcium channel, voltage-dependent, L type, alpha 1F subunit;
  Uniprot ID:  O60840;
  ENSP ID: ENSP00000365427
MSESEGGKGERILPSLQTLGASIVEWKPFDILILLTIFANCVALGVYIPFPEDDSNTANHNLEQVEYVFLVIFTVETVLKIVAYGLVLHPSAYIRNGWNLLDFIIVVVGLFSVLLEQGPGRPGDAPHTGGKPGGFDVKALRAFRVLRPLRLVSGVPSLHIVLNSIMKALVPLLHIALLVLFVIIIYAIIGLELFLGRMHKTCYFLGSDMEAEEDPSPCASSGSGRACTLNQTECRGRWPGPNGGITNFDNFFFAMLTVFQCVTMEGWTDVLYWMQDAMGYELPWVYFVSLVIFGSFFVLNLVLGVLSGEFSKEREKAKARGDFQKQREKQQMEEDLRGYLDWITQAEELDMEDPSADDNLGSMAEEGRAGHRPQLAELTNRRRGRLRWFSHSTRSTHSTSSHASLPASDTGSMTETQGDEDEEEGALASCTRCLNKIMKTRVCRRLRRANRVLRARCRRAVKSNACYWAVLLLVFLNTLTIASEHHGQPVWLTQIQEYANKVLLCLFTVEMLLKLYGLGPSAYVSSFFNRFDCFVVCGGILETTLVEVGAMQPLGISVLRCVRLLRIFKVTRHWASLSNLVASLLNSMKSIASLLLLLFLFIIIFSLLGMQLFGGKFNFDQTHTKRSTFDTFPQALLTVFQILTGEDWNVVMYDGIMAYGGPFFPGMLVCIYFIILFICGNYILLNVFLAIAVDNLASGDAGTAKDKGGEKSNEKDLPQENEGLVPGVEKEEEEGARREGADMEEEEEEEEEEEEEEEEEGAGGVELLQEVVPKEKVVPIPEGSAFFCLSQTNPLRKGCHTLIHHHVFTNLILVFIILSSVSLAAEDPIRAHSFRNHILGYFDYAFTSIFTVEILLKMTVFGAFLHRGSFCRSWFNMLDLLVVSVSLISFGIHSSAISVVKILRVLRVLRPLRAINRAKGLKHVVQCVFVAIRTIGNIMIVTTLLQFMFACIGVQLFKGKFYTCTDEAKHTPQECKGSFLVYPDGDVSRPLVRERLWVNSDFNFDNVLSAMMALFTVSTFEGWPALLYKAIDAYAEDHGPIYNYRVEISVFFIVYIIIIAFFMMNIFVGFVIITFRAQGEQEYQNCELDKNQRQCVEYALKAQPLRRYIPKNPHQYRVWATVNSAAFEYLMFLLILLNTVALAMQHYEQTAPFNYAMDILNMVFTGLFTIEMVLKIIAFKPKHYFTDAWNTFDALIVVGSIVDIAVTEVNNGGHLGESSEDSSRISITFFRLFRVMRLVKLLSKGEGIRTLLWTFIKSFQALPYVALLIAMIFFIYAVIGMQMFGKVALQDGTQINRNNNFQTFPQAVLLLFRCATGEAWQEIMLASLPGNRCDPESDFGPGEEFTCGSNFAIAYFISFFMLCAFLIINLFVAVIMDNFDYLTRDWSILGPHHLDEFKRIWSEYDPGAKGRIKHLDVVALLRRIQPPLGFGKLCPHRVACKRLVAMNMPLNSDGTVTFNATLFALVRTSLKIKTEGNLEQANQELRIVIKKIWKRMKQKLLDEVIPPPDEEEVTVGKFYATFLIQDYFRKFRRRKEKGLLGNDAAPSTSSALQAGLRSLQDLGPEMRQALTCDTEEEEEEGQEGVEEEDEKDLETNKATMVSQPSARRGSGISVSLPVGDRLPDSLSFGPSDDDRGTPTSSQPSVPQAGSNTHRRGSGALIFTIPEEGNSQPKGTKGQNKQDEDEEVPDRLSYLDEQAGTPPCSVLLPPHRAQRYMDGHLVPRRRLLPPTPAGRKPSFTIQCLQRQGSCEDLPIPGTYHRGRNSGPNRAQGSWATPPQRGRLLYAPLLLVEEGAAGEGYLGRSSGPLRTFTCLHVPGTHSDPSHGKRGSADSLVEAVLISEGLGLFARDPRFVALAKQEIADACRLTLDEMDNAASDLLAQGTSSLYSDEESILSRFDEEDLGDEMACVHAL

SEQ ID NO: 10756 - protein, 1977 aa, Homo sapiens
  Payload ID: 2140;
  Gene Symbol: CACNA1F;
  Gene Name: calcium channel, voltage-dependent, L type, alpha 1F subunit;
  Uniprot ID:  O60840;
  ENSP ID: ENSP00000365441
MSESEGGKDTTPEPSPANGAGPGPEWGLCPGPPAVEGESSGASGLGTPKRRNQHSKHKTVAVASAQRSPRALFCLTLANPLRRSCISIVEWKPFDILILLTIFANCVALGVYIPFPEDDSNTANHNLEQVEYVFLVIFTVETVLKIVAYGLVLHPSAYIRNGWNLLDFIIVVVGLFSVLLEQGPGRPGDAPHTGGKPGGFDVKALRAFRVLRPLRLVSGVPSLHIVLNSIMKALVPLLHIALLVLFVIIIYAIIGLELFLGRMHKTCYFLGSDMEAEEDPSPCASSGSGRACTLNQTECRGRWPGPNGGITNFDNFFFAMLTVFQCVTMEGWTDVLYWMQDAMGYELPWVYFVSLVIFGSFFVLNLVLGVLSGEFSKEREKAKARGDFQKQREKQQMEEDLRGYLDWITQAEELDMEDPSADDNLGSMAEEGRAGHRPQLAELTNRRRGRLRWFSHSTRSTHSTSSHASLPASDTGSMTETQGDEDEEEGALASCTRCLNKIMKTRVCRRLRRANRVLRARCRRAVKSNACYWAVLLLVFLNTLTIASEHHGQPVWLTQIQEYANKVLLCLFTVEMLLKLYGLGPSAYVSSFFNRFDCFVVCGGILETTLVEVGAMQPLGISVLRCVRLLRIFKVTRHWASLSNLVASLLNSMKSIASLLLLLFLFIIIFSLLGMQLFGGKFNFDQTHTKRSTFDTFPQALLTVFQILTGEDWNVVMYDGIMAYGGPFFPGMLVCIYFIILFICGNYILLNVFLAIAVDNLASGDAGTAKDKGGEKSNEKDLPQENEGLVPGVEKEEEEGARREGADMEEEEEEEEEEEEEEEEEGAGGVELLQEVVPKEKVVPIPEGSAFFCLSQTNPLRKGCHTLIHHHVFTNLILVFIILSSVSLAAEDPIRAHSFRNHILGYFDYAFTSIFTVEILLKMTVFGAFLHRGSFCRSWFNMLDLLVVSVSLISFGIHSSAISVVKILRVLRVLRPLRAINRAKGLKHVVQCVFVAIRTIGNIMIVTTLLQFMFACIGVQLFKGKFYTCTDEAKHTPQECKGSFLVYPDGDVSRPLVRERLWVNSDFNFDNVLSAMMALFTVSTFEGWPALLYKAIDAYAEDHGPIYNYRVEISVFFIVYIIIIAFFMMNIFVGFVIITFRAQGEQEYQNCELDKNQRQCVEYALKAQPLRRYIPKNPHQYRVWATVNSAAFEYLMFLLILLNTVALAMQHYEQTAPFNYAMDILNMVFTGLFTIEMVLKIIAFKPKHYFTDAWNTFDALIVVGSIVDIAVTEVNNGGHLGESSEDSSRISITFFRLFRVMRLVKLLSKGEGIRTLLWTFIKSFQALPYVALLIAMIFFIYAVIGMQMFGKVALQDGTQINRNNNFQTFPQAVLLLFRCATGEAWQEIMLASLPGNRCDPESDFGPGEEFTCGSNFAIAYFISFFMLCAFLIINLFVAVIMDNFDYLTRDWSILGPHHLDEFKRIWSEYDPGAKGRIKHLDVVALLRRIQPPLGFGKLCPHRVACKRLVAMNMPLNSDGTVTFNATLFALVRTSLKIKTEGNLEQANQELRIVIKKIWKRMKQKLLDEVIPPPDEEEVTVGKFYATFLIQDYFRKFRRRKEKGLLGNDAAPSTSSALQAGLRSLQDLGPEMRQALTCDTEEEEEEGQEGVEEEDEKDLETNKATMVSQPSARRGSGISVSLPVGDRLPDSLSFGPSDDDRGTPTSSQPSVPQAGSNTHRRGSGALIFTIPEEGNSQPKGTKGQNKQDEDEEVPDRLSYLDEQAGTPPCSVLLPPHRAQRYMDGHLVPRRRLLPPTPAGRKPSFTIQCLQRQGSCEDLPIPGTYHRGRNSGPNRAQGSWATPPQRGRLLYAPLLLVEEGAAGEGYLGRSSGPLRTFTCLHVPGTHSDPSHGKRGSADSLVEAVLISEGLGLFARDPRFVALAKQEIADACRLTLDEMDNAASDLLAQGTSSLYSDEESILSRFDEEDLGDEMACVHAL

SEQ ID NO: 10757 - protein, 116 aa, Homo sapiens
  Payload ID: 2140;
  Gene Symbol: CACNA1F;
  Gene Name: calcium channel, voltage-dependent, L type, alpha 1F subunit;
  ENSP ID: ENSP00000418961
DYFRKFRRRKEKGLLGNDAAPSTSSALQAGLRSLQDLGPEMRQALTCDTEEEEEEGQEGVEEEDEKDLETNKVGTSFHSPRNLIVKYFVNPLSDFDTASGKKLPQRSPLCNRKIFI

SEQ ID NO: 10758 - protein, 1873 aa, Homo sapiens
  Payload ID: 2141;
  Gene Symbol: CACNA1S;
  Gene Name: calcium channel, voltage-dependent, L type, alpha 1S subunit;
  Uniprot ID:  Q13698;
  ENSP ID: ENSP00000355192
MEPSSPQDEGLRKKQPKKPVPEILPRPPRALFCLTLENPLRKACISIVEWKPFETIILLTIFANCVALAVYLPMPEDDNNSLNLGLEKLEYFFLIVFSIEAAMKIIAYGFLFHQDAYLRSGWNVLDFTIVFLGVFTVILEQVNVIQSHTAPMSSKGAGLDVKALRAFRVLRPLRLVSGVPSLQVVLNSIFKAMLPLFHIALLVLFMVIIYAIIGLELFKGKMHKTCYFIGTDIVATVENEEPSPCARTGSGRRCTINGSECRGGWPGPNHGITHFDNFGFSMLTVYQCITMEGWTDVLYWVNDAIGNEWPWIYFVTLILLGSFFILNLVLGVLSGEFTKEREKAKSRGTFQKLREKQQLDEDLRGYMSWITQGEVMDVEDFREGKLSLDEGGSDTESLYEIAGLNKIIQFIRHWRQWNRIFRWKCHDIVKSKVFYWLVILIVALNTLSIASEHHNQPLWLTRLQDIANRVLLSLFTTEMLMKMYGLGLRQYFMSIFNRFDCFVVCSGILEILLVESGAMTPLGISVLRCIRLLRIFKITKYWTSLSNLVASLLNSIRSIASLLLLLFLFIVIFALLGMQLFGGRYDFEDTEVRRSNFDNFPQALISVFQVLTGEDWTSMMYNGIMAYGGPSYPGMLVCIYFIILFVCGNYILLNVFLAIAVDNLAEAESLTSAQKAKAEEKKRRKMSKGLPDKSEEEKSTMAKKLEQKPKGEGIPTTAKLKIDEFESNVNEVKDPYPSADFPGDDEEDEPEIPLSPRPRPLAELQLKEKAVPIPEASSFFIFSPTNKIRVLCHRIVNATWFTNFILLFILLSSAALAAEDPIRADSMRNQILKHFDIGFTSVFTVEIVLKMTTYGAFLHKGSFCRNYFNMLDLLVVAVSLISMGLESSAISVVKILRVLRVLRPLRAINRAKGLKHVVQCMFVAISTIGNIVLVTTLLQFMFACIGVQLFKGKFFRCTDLSKMTEEECRGYYYVYKDGDPMQIELRHREWVHSDFHFDNVLSAMMSLFTVSTFEGWPQLLYKAIDSNAEDVGPIYNNRVEMAIFFIIYIILIAFFMMNIFVGFVIVTFQEQGETEYKNCELDKNQRQCVQYALKARPLRCYIPKNPYQYQVWYIVTSSYFEYLMFALIMLNTICLGMQHYNQSEQMNHISDILNVAFTIIFTLEMILKLMAFKARGYFGDPWNVFDFLIVIGSIIDVILSEIDTFLASSGGLYCLGGGCGNVDPDESARISSAFFRLFRVMRLIKLLSRAEGVRTLLWTFIKSFQALPYVALLIVMLFFIYAVIGMQMFGKIALVDGTQINRNNNFQTFPQAVLLLFRCATGEAWQEILLACSYGKLCDPESDYAPGEEYTCGTNFAYYYFISFYMLCAFLVINLFVAVIMDNFDYLTRDWSILGPHHLDEFKAIWAEYDPEAKGRIKHLDVVTLLRRIQPPLGFGKFCPHRVACKRLVGMNMPLNSDGTVTFNATLFALVRTALKIKTEGNFEQANEELRAIIKKIWKRTSMKLLDQVIPPIGDDEVTVGKFYATFLIQEHFRKFMKRQEEYYGYRPKKDIVQIQAGLRTIEEEAAPEICRTVSGDLAAEEELERAMVEAAMEEGIFRRTGGLFGQVDNFLERTNSLPPVMANQRPLQFAEIEMEEMESPVFLEDFPQDPRTNPLARANTNNANANVAYGNSNHSNSHVFSSVHYEREFPEETETPATRGRALGQPCRVLGPHSKPCVEMLKGLLTQRAMPRGQAPPAPCQCPRVESSMPEDRKSSTPGSLHEETPHSRSTRENTSRCSAPATALLIQKALVRGGLGTLAADANFIMATGQALADACQMEPEEVEIMATELLKGREAPEGMASSLGCLNLGSSLGSLDQHQGSQETLIPPRL

SEQ ID NO: 10759 - protein, 1854 aa, Homo sapiens
  Payload ID: 2141;
  Gene Symbol: CACNA1S;
  Gene Name: calcium channel, voltage-dependent, L type, alpha 1S subunit;
  ENSP ID: ENSP00000356307
MEPSSPQDEGLRKKQPKKPVPEILPRPPRALFCLTLENPLRKACISIVEWKPFETIILLTIFANCVALAVYLPMPEDDNNSLNLGLEKLEYFFLIVFSIEAAMKIIAYGFLFHQDAYLRSGWNVLDFTIVFLGVFTVILEQVNVIQSHTAPMSSKGAGLDVKALRAFRVLRPLRLVSGVPSLQVVLNSIFKAMLPLFHIALLVLFMVIIYAIIGLELFKGKMHKTCYFIGTDIVATVENEEPSPCARTGSGRRCTINGSECRGGWPGPNHGITHFDNFGFSMLTVYQCITMEGWTDVLYWVNDAIGNEWPWIYFVTLILLGSFFILNLVLGVLSGEFTKEREKAKSRGTFQKLREKQQLDEDLRGYMSWITQGEVMDVEDFREGKLSLDEGGSDTESLYEIAGLNKIIQFIRHWRQWNRIFRWKCHDIVKSKVFYWLVILIVALNTLSIASEHHNQPLWLTRLQDIANRVLLSLFTTEMLMKMYGLGLRQYFMSIFNRFDCFVVCSGILEILLVESGAMTPLGISVLRCIRLLRIFKITKYWTSLSNLVASLLNSIRSIASLLLLLFLFIVIFALLGMQLFGGRYDFEDTEVRRSNFDNFPQALISVFQVLTGEDWTSMMYNGIMAYGGPSYPGMLVCIYFIILFVCGNYILLNVFLAIAVDNLAEAESLTSAQKAKAEEKKRRKMSKGLPDKSEEEKSTMAKKLEQKPKGEGIPTTAKLKIDEFESNVNEVKDPYPSADFPGDDEEDEPEIPLSPRPRPLAELQLKEKAVPIPEASSFFIFSPTNKIRVLCHRIVNATWFTNFILLFILLSSAALAAEDPIRADSMRNQILKHFDIGFTSVFTVEIVLKMTTYGAFLHKGSFCRNYFNMLDLLVVAVSLISMGLESSAISVVKILRVLRVLRPLRAINRAKGLKHVVQCMFVAISTIGNIVLVTTLLQFMFACIGVQLFKGKFFRCTDLSKMTEEECRGYYYVYKDGDPMQIELRHREWVHSDFHFDNVLSAMMSLFTVSTFEGWPQLLYKAIDSNAEDVGPIYNNRVEMAIFFIIYIILIAFFMMNIFVGFVIVTFQEQGETEYKNCELDKNQRQCVQYALKARPLRCYIPKNPYQYQVWYIVTSSYFEYLMFALIMLNTICLGMQHYNQSEQMNHISDILNVAFTIIFTLEMILKLMAFKARGYFGDPWNVFDFLIVIGSIIDVILSEIDDPDESARISSAFFRLFRVMRLIKLLSRAEGVRTLLWTFIKSFQALPYVALLIVMLFFIYAVIGMQMFGKIALVDGTQINRNNNFQTFPQAVLLLFRCATGEAWQEILLACSYGKLCDPESDYAPGEEYTCGTNFAYYYFISFYMLCAFLVINLFVAVIMDNFDYLTRDWSILGPHHLDEFKAIWAEYDPEAKGRIKHLDVVTLLRRIQPPLGFGKFCPHRVACKRLVGMNMPLNSDGTVTFNATLFALVRTALKIKTEGNFEQANEELRAIIKKIWKRTSMKLLDQVIPPIGDDEVTVGKFYATFLIQEHFRKFMKRQEEYYGYRPKKDIVQIQAGLRTIEEEAAPEICRTVSGDLAAEEELERAMVEAAMEEGIFRRTGGLFGQVDNFLERTNSLPPVMANQRPLQFAEIEMEEMESPVFLEDFPQDPRTNPLARANTNNANANVAYGNSNHSNSHVFSSVHYEREFPEETETPATRGRALGQPCRVLGPHSKPCVEMLKGLLTQRAMPRGQAPPAPCQCPRVESSMPEDRKSSTPGSLHEETPHSRSTRENTSRCSAPATALLIQKALVRGGLGTLAADANFIMATGQALADACQMEPEEVEIMATELLKGREAPEGMASSLGCLNLGSSLGSLDQHQGSQETLIPPRL

SEQ ID NO: 10760 - protein, 2237 aa, Homo sapiens [sequence omitted]

SEQ ID NO: 10761 - protein, 2237 aa, Homo sapiens
  Payload ID: 2142;
  Gene Symbol: CACNA1B;
  Gene Name: calcium channel, voltage-dependent, N type, alpha 1B subunit;
  Uniprot ID:  Q00975;
  ENSP ID: ENSP00000277551
MVRFGDELGGRYGGPGGGERARGGGAGGAGGPGPGGLQPGQRVLYKQSIAQRARTMALYNPIPVKQNCFTVNRSLFVFSEDNVVRKYAKRITEWPPFEYMILATIIANCIVLALEQHLPDGDKTPMSERLDDTEPYFIGIFCFEAGIKIIALGFVFHKGSYLRNGWNVMDFVVVLTGILATAGTDFDLRTLRAVRVLRPLKLVSGIPSLQVVLKSIMKAMVPLLQIGLLLFFAILMFAIIGLEFYMGKFHKACFPNSTDAEPVGDFPCGKEAPARLCEGDTECREYWPGPNFGITNFDNILFAILTVFQCITMEGWTDILYNTNDAAGNTWNWLYFIPLIIIGSFFMLNLVLGVLSGEFAKERERVENRRAFLKLRRQQQIERELNGYLEWIFKAEEVMLAEEDRNAEEKSPLDVLKRAATKKSRNDLIHAEEGEDRFADLCAVGSPFARASLKSGKTESSSYFRRKEKMFRFFIRRMVKAQSFYWVVLCVVALNTLCVAMVHYNQPRRLTTTLYFAEFVFLGLFLTEMSLKMYGLGPRSYFRSSFNCFDFGVIVGSVFEVVWAAIKPGSSFGISVLRALRLLRIFKVTKYWSSLRNLVVSLLNSMKSIISLLFLLFLFIVVFALLGMQLFGGQFNFQDETPTTNFDTFPAAILTVFQILTGEDWNAVMYHGIESQGGVSKGMFSSFYFIVLTLFGNYTLLNVFLAIAVDNLANAQELTKDEEEMEEAANQKLALQKAKEVAEVSPMSAANISIAARQQNSAKARSVWEQRASQLRLQNLRASCEALYSEMDPEERLRFATTRHLRPDMKTHLDRPLVVELGRDGARGPVGGKARPEAAEAPEGVDPPRRHHRHRDKDKTPAAGDQDRAEAPKAESGEPGAREERPRPHRSHSKEAAGPPEARSERGRGPGPEGGRRHHRRGSPEEAAEREPRRHRAHRHQDPSKECAGAKGERRARHRGGPRAGPREAESGEEPARRHRARHKAQPAHEAVEKETTEKEATEKEAEIVEADKEKELRNHQPREPHCDLETSGTVTVGPMHTLPSTCLQKVEEQPEDADNQRNVTRMGSQPPDPNTIVHIPVMLTGPLGEATVVPSGNVDLESQAEGKKEVEADDVMRSGPRPIVPYSSMFCLSPTNLLRRFCHYIVTMRYFEVVILVVIALSSIALAAEDPVRTDSPRNNALKYLDYIFTGVFTFEMVIKMIDLGLLLHPGAYFRDLWNILDFIVVSGALVAFAFSGSKGKDINTIKSLRVLRVLRPLKTIKRLPKLKAVFDCVVNSLKNVLNILIVYMLFMFIFAVIAVQLFKGKFFYCTDESKELERDCRGQYLDYEKEEVEAQPRQWKKYDFHYDNVLWALLTLFTVSTGEGWPMVLKHSVDATYEEQGPSPGYRMELSIFYVVYFVVFPFFFVNIFVALIIITFQEQGDKVMSECSLEKNERACIDFAISAKPLTRYMPQNRQSFQYKTWTFVVSPPFEYFIMAMIALNTVVLMMKFYDAPYEYELMLKCLNIVFTSMFSMECVLKIIAFGVLNYFRDAWNVFDFVTVLGSITDILVTEIAETNNFINLSFLRLFRAARLIKLLRQGYTIRILLWTFVQSFKALPYVCLLIAMLFFIYAIIGMQVFGNIALDDDTSINRHNNFRTFLQALMLLFRSATGEAWHEIMLSCLSNQACDEQANATECGSDFAYFYFVSFIFLCSFLMLNLFVAVIMDNFEYLTRDSSILGPHHLDEFIRVWAEYDPAACGRISYNDMFEMLKHMSPPLGLGKKCPARVAYKRLVRMNMPISNEDMTVHFTSTLMALIRTALEIKLAPAGTKQHQCDAELRKEISVVWANLPQKTLDLLVPPHKPDEMTVGKVYAALMIFDFYKQNKTTRDQMQQAPGGLSQMGPVSLFHPLKATLEQTQPAVLRGARVFLRQKSSTSLSNGGAIQNQESGIKESVSWGTQRTQDAPHEARPPLERGHSTEIPVGRSGALAVDVQMQSITRRGPDGEPQPGLESQGRAASMPRLAAETQPVTDASPMKRSISTLAQRPRGTHLCSTTPDRPPPSQASSHHHHHRCHRRRDRKQRSLEKGPSLSADMDGAPSSAVGPGLPPGEGPTGCRRERERRQERGRSQERRQPSSSSSEKQRFYSCDRFGGREPPKPKPSLSSHPTSPTAGQEPGPHPQAGSAVGFPNTTPCCRETPSASPWPLALELALTLTWGSVWTVRPLSTPCLRTLSLSRRLWPPTRAAPPGLPTCPP

SEQ ID NO: 10762 - protein, 2340 aa, Homo sapiens
  Payload ID: 2142;
  Gene Symbol: CACNA1B;
  Gene Name: calcium channel, voltage-dependent, N type, alpha 1B subunit;
  ENSP ID: ENSP00000360406
MVRFGDELGGRYGGPGGGERARGGGAGGAGGPGPGGLQPGQRVLYKQSIAQRARTMALYNPIPVKQNCFTVNRSLFVFSEDNVVRKYAKRITEWPPFEYMILATIIANCIVLALEQHLPDGDKTPMSERLDDTEPYFIGIFCFEAGIKIIALGFVFHKGSYLRNGWNVMDFVVVLTGILATAGTDFDLRTLRAVRVLRPLKLVSGIPSLQVVLKSIMKAMVPLLQIGLLLFFAILMFAIIGLEFYMGKFHKACFPNSTDAEPVGDFPCGKEAPARLCEGDTECREYWPGPNFGITNFDNILFAILTVFQCITMEGWTDILYNTNDAAGNTWNWLYFIPLIIIGSFFMLNLVLGVLSGEFAKERERVENRRAFLKLRRQQQIERELNGYLEWIFKAEEVMLAEEDRNAEEKSPLDAVLKRAATKKSRNDLIHAEEGEDRFADLCAVGSPFARASLKSGKTESSSYFRRKEKMFRFFIRRMVKAQSFYWVVLCVVALNTLCVAMVHYNQPRRLTTTLYFAEFVFLGLFLTEMSLKMYGLGPRSYFRSSFNCFDFGVIVGSVFEVVWAAIKPGSSFGISVLRALRLLRIFKVTKYWSSLRNLVVSLLNSMKSIISLLFLLFLFIVVFALLGMQLFGGQFNFQDETPTTNFDTFPAAILTVFQILTGEDWNAVMYHGIESQGGVSKGMFSSFYFIVLTLFGNYTLLNVFLAIAVDNLANAQELTKDEEEMEEAANQKLALQKAKEVAEVSPMSAANISIAARQQNSAKARSVWEQRASQLRLQNLRASCEALYSEMDPEERLRFATTRHLRPDMKTHLDRPLVVELGRDGARGPVGGKARPEAAEAPEGVDPPRRHHRHRDKDKTPAAGDQDRAEAPKAESGEPGAREERPRPHRSHSKEAAGPPEARSERGRGPGPEGGRRHHRRGSPEEAAEREPRRHRAHRHQDPSKECAGAKGERRARHRGGPRAGPREAESGEEPARRHRARHKAQPAHEAVEKETTEKEATEKEAEIVEADKEKELRNHQPREPHCDLETSGTVTVGPMHTLPSTCLQKVEEQPEDADNQRNVTRMGSQPPDPNTIVHIPVMLTGPLGEATVVPSGNVDLESQAEGKKEVEADDVMRSGPRPIVPYSSMFCLSPTNLLRRFCHYIVTMRYFEVVILVVIALSSIALAAEDPVRTDSPRNNALKYLDYIFTGVFTFEMVIKMIDLGLLLHPGAYFRDLWNILDFIVVSGALVAFAFSGSKGKDINTIKSLRVLRVLRPLKTIKRLPKLKAVFDCVVNSLKNVLNILIVYMLFMFIFAVIAVQLFKGKFFYCTDESKELERDCRGQYLDYEKEEVEAQPRQWKKYDFHYDNVLWALLTLFTVSTGEGWPMVLKHSVDATYEEQGPSPGYRMELSIFYVVYFVVFPFFFVNIFVALIIITFQEQGDKVMSECSLEKNERACIDFAISAKPLTRYMPQNRQSFQYKTWTFVVSPPFEYFIMAMIALNTVVLMMKFYDAPYEYELMLKCLNIVFTSMFSMECVLKIIAFGVLNYFRDAWNVFDFVTVLGSITDILVTEIAETNNFINLSFLRLFRAARLIKLLRQGYTIRILLWTFVQSFKALPYVCLLIAMLFFIYAIIGMQVFGNIALDDDTSINRHNNFRTFLQALMLLFRSATGEAWHEIMLSCLSNQACDEQANATECGSDFAYFYFVSFIFLCSFLMLNLFVAVIMDNFEYLTRDSSILGPHHLDEFIRVWAEYDPAACGRISYNDMFEMLKHMSPPLGLGKKCPARVAYKRLVRMNMPISNEDMTVHFTSTLMALIRTALEIKLAPAGTKQHQCDAELRKEISVVWANLPQKTLDLLVPPHKPDEMTVGKVYAALMIFDFYKQNKTTRDQMQQAPGGLSQMGPVSLFHPLKATLEQTQPAVLRGARVFLRQKSSTSLSNGGAIQNQESGIKESVSWGTQRTQDAPHEARPPLERGHSTEIPVGRSGALAVDVQMQSITRRGPDGEPQPGLESQGRAASMPRLAAETQPVTDASPMKRSISTLAQRPRGTHLCSTTPDRPPPSQASSHHHHHRCHRRRDRKQRSLEKGPSLSADMDGAPSSAVGPGLPPGEGPTGCRRERERRQERGRSQERRQPSSSSSEKQRFYSCDRFGGREPPKPKPSLSSHPTSPTAGQEPGPHPQGSGSVNGSPLLSTSGASTPGRGGRRQLPQTPLTPRPSITYKTANSSPIHFAGAQTSLPAFSPGRLSRGLSEHNALLQRDPLSQPLAPGSRIGSDPYLGQRLDSEASVHALPEDTLTFEEAVATNSGRSSRTSYVSSLTSQSHPLRRVPNGYHCTLGLSSGGRARHSYHHPDQDHWC

SEQ ID NO: 10763 - protein, 2338 aa, Homo sapiens
  Payload ID: 2142;
  Gene Symbol: CACNA1B;
  Gene Name: calcium channel, voltage-dependent, N type, alpha 1B subunit;
  ENSP ID: ENSP00000360408
MVRFGDELGGRYGGPGGGERARGGGAGGAGGPGPGGLQPGQRVLYKQSIAQRARTMALYNPIPVKQNCFTVNRSLFVFSEDNVVRKYAKRITEWPPFEYMILATIIANCIVLALEQHLPDGDKTPMSERLDDTEPYFIGIFCFEAGIKIIALGFVFHKGSYLRNGWNVMDFVVVLTGILATAGTDFDLRTLRAVRVLRPLKLVSGIPSLQVVLKSIMKAMVPLLQIGLLLFFAILMFAIIGLEFYMGKFHKACFPNSTDAEPVGDFPCGKEAPARLCEGDTECREYWPGPNFGITNFDNILFAILTVFQCITMEGWTDILYNTNDAAGNTWNWLYFIPLIIIGSFFMLNLVLGVLSGEFAKERERVENRRAFLKLRRQQQIERELNGYLEWIFKAEEVMLAEEDRNAEEKSPLDAVLKRAATKKSRNDLIHAEEGEDRFADLCAVGSPFARASLKSGKTESSSYFRRKEKMFRFFIRRMVKAQSFYWVVLCVVALNTLCVAMVHYNQPRRLTTTLYFAEFVFLGLFLTEMSLKMYGLGPRSYFRSSFNCFDFGVIVGSVFEVVWAAIKPGSSFGISVLRALRLLRIFKVTKYWSSLRNLVVSLLNSMKSIISLLFLLFLFIVVFALLGMQLFGGQFNFQDETPTTNFDTFPAAILTVFQILTGEDWNAVMYHGIESQGGVSKGMFSSFYFIVLTLFGNYTLLNVFLAIAVDNLANAQELTKDEEEMEEAANQKLALQKAKEVAEVSPMSAANISIAARQQNSAKARSVWEQRASQLRLQNLRASCEALYSEMDPEERLRFATTRHLRPDMKTHLDRPLVVELGRDGARGPVGGKARPEAAEAPEGVDPPRRHHRHRDKDKTPAAGDQDRAEAPKAESGEPGAREERPRPHRSHSKEAAGPPEARSERGRGPGPEGGRRHHRRGSPEEAAEREPRRHRAHRHQDPSKECAGAKGERRARHRGGPRAGPREAESGEEPARRHRARHKAQPAHEAVEKETTEKEATEKEAEIVEADKEKELRNHQPREPHCDLETSGTVTVGPMHTLPSTCLQKVEEQPEDADNQRNVTRMGSQPPDPNTIVHIPVMLTGPLGEATVVPSGNVDLESQAEGKKEVEADDVMRSGPRPIVPYSSMFCLSPTNLLRRFCHYIVTMRYFEVVILVVIALSSIALAAEDPVRTDSPRNNALKYLDYIFTGVFTFEMVIKMIDLGLLLHPGAYFRDLWNILDFIVVSGALVAFAFSGSKGKDINTIKSLRVLRVLRPLKTIKRLPKLKAVFDCVVNSLKNVLNILIVYMLFMFIFAVIAVQLFKGKFFYCTDESKELERDCRGQYLDYEKEEVEAQPRQWKKYDFHYDNVLWALLTLFTVSTGEGWPMVLKHSVDATYEEQGPSPGYRMELSIFYVVYFVVFPFFFVNIFVALIIITFQEQGDKVMSECSLEKNERACIDFAISAKPLTRYMPQNRQSFQYKTWTFVVSPPFEYFIMAMIALNTVVLMMKFYDAPYEYELMLKCLNIVFTSMFSMECVLKIIAFGVLNYFRDAWNVFDFVTVLGSITDILVTEIANNFINLSFLRLFRAARLIKLLRQGYTIRILLWTFVQSFKALPYVCLLIAMLFFIYAIIGMQVFGNIALDDDTSINRHNNFRTFLQALMLLFRSATGEAWHEIMLSCLSNQACDEQANATECGSDFAYFYFVSFIFLCSFLMLNLFVAVIMDNFEYLTRDSSILGPHHLDEFIRVWAEYDPAACGRISYNDMFEMLKHMSPPLGLGKKCPARVAYKRLVRMNMPISNEDMTVHFTSTLMALIRTALEIKLAPAGTKQHQCDAELRKEISVVWANLPQKTLDLLVPPHKPDEMTVGKVYAALMIFDFYKQNKTTRDQMQQAPGGLSQMGPVSLFHPLKATLEQTQPAVLRGARVFLRQKSSTSLSNGGAIQNQESGIKESVSWGTQRTQDAPHEARPPLERGHSTEIPVGRSGALAVDVQMQSITRRGPDGEPQPGLESQGRAASMPRLAAETQPVTDASPMKRSISTLAQRPRGTHLCSTTPDRPPPSQASSHHHHHRCHRRRDRKQRSLEKGPSLSADMDGAPSSAVGPGLPPGEGPTGCRRERERRQERGRSQERRQPSSSSSEKQRFYSCDRFGGREPPKPKPSLSSHPTSPTAGQEPGPHPQGSGSVNGSPLLSTSGASTPGRGGRRQLPQTPLTPRPSITYKTANSSPIHFAGAQTSLPAFSPGRLSRGLSEHNALLQRDPLSQPLAPGSRIGSDPYLGQRLDSEASVHALPEDTLTFEEAVATNSGRSSRTSYVSSLTSQSHPLRRVPNGYHCTLGLSSGGRARHSYHHPDQDHWC

SEQ ID NO: 10764 - protein, 2337 aa, Homo sapiens
  Payload ID: 2142;
  Gene Symbol: CACNA1B;
  Gene Name: calcium channel, voltage-dependent, N type, alpha 1B subunit;
  ENSP ID: ENSP00000360414
MVRFGDELGGRYGGPGGGERARGGGAGGAGGPGPGGLQPGQRVLYKQSIAQRARTMALYNPIPVKQNCFTVNRSLFVFSEDNVVRKYAKRITEWPPFEYMILATIIANCIVLALEQHLPDGDKTPMSERLDDTEPYFIGIFCFEAGIKIIALGFVFHKGSYLRNGWNVMDFVVVLTGILATAGTDFDLRTLRAVRVLRPLKLVSGIPSLQVVLKSIMKAMVPLLQIGLLLFFAILMFAIIGLEFYMGKFHKACFPNSTDAEPVGDFPCGKEAPARLCEGDTECREYWPGPNFGITNFDNILFAILTVFQCITMEGWTDILYNTNDAAGNTWNWLYFIPLIIIGSFFMLNLVLGVLSGEFAKERERVENRRAFLKLRRQQQIERELNGYLEWIFKAEEVMLAEEDRNAEEKSPLDVLKRAATKKSRNDLIHAEEGEDRFADLCAVGSPFARASLKSGKTESSSYFRRKEKMFRFFIRRMVKAQSFYWVVLCVVALNTLCVAMVHYNQPRRLTTTLYFAEFVFLGLFLTEMSLKMYGLGPRSYFRSSFNCFDFGVIVGSVFEVVWAAIKPGSSFGISVLRALRLLRIFKVTKYWSSLRNLVVSLLNSMKSIISLLFLLFLFIVVFALLGMQLFGGQFNFQDETPTTNFDTFPAAILTVFQILTGEDWNAVMYHGIESQGGVSKGMFSSFYFIVLTLFGNYTLLNVFLAIAVDNLANAQELTKDEEEMEEAANQKLALQKAKEVAEVSPMSAANISIAARQQNSAKARSVWEQRASQLRLQNLRASCEALYSEMDPEERLRFATTRHLRPDMKTHLDRPLVVELGRDGARGPVGGKARPEAAEAPEGVDPPRRHHRHRDKDKTPAAGDQDRAEAPKAESGEPGAREERPRPHRSHSKEAAGPPEARSERGRGPGPEGGRRHHRRGSPEEAAEREPRRHRAHRHQDPSKECAGAKGERRARHRGGPRAGPREAESGEEPARRHRARHKAQPAHEAVEKETTEKEATEKEAEIVEADKEKELRNHQPREPHCDLETSGTVTVGPMHTLPSTCLQKVEEQPEDADNQRNVTRMGSQPPDPNTIVHIPVMLTGPLGEATVVPSGNVDLESQAEGKKEVEADDVMRSGPRPIVPYSSMFCLSPTNLLRRFCHYIVTMRYFEVVILVVIALSSIALAAEDPVRTDSPRNNALKYLDYIFTGVFTFEMVIKMIDLGLLLHPGAYFRDLWNILDFIVVSGALVAFAFSGSKGKDINTIKSLRVLRVLRPLKTIKRLPKLKAVFDCVVNSLKNVLNILIVYMLFMFIFAVIAVQLFKGKFFYCTDESKELERDCRGQYLDYEKEEVEAQPRQWKKYDFHYDNVLWALLTLFTVSTGEGWPMVLKHSVDATYEEQGPSPGYRMELSIFYVVYFVVFPFFFVNIFVALIIITFQEQGDKVMSECSLEKNERACIDFAISAKPLTRYMPQNRQSFQYKTWTFVVSPPFEYFIMAMIALNTVVLMMKFYDAPYEYELMLKCLNIVFTSMFSMECVLKIIAFGVLNYFRDAWNVFDFVTVLGSITDILVTEIANNFINLSFLRLFRAARLIKLLRQGYTIRILLWTFVQSFKALPYVCLLIAMLFFIYAIIGMQVFGNIALDDDTSINRHNNFRTFLQALMLLFRSATGEAWHEIMLSCLSNQACDEQANATECGSDFAYFYFVSFIFLCSFLMLNLFVAVIMDNFEYLTRDSSILGPHHLDEFIRVWAEYDPAACGRISYNDMFEMLKHMSPPLGLGKKCPARVAYKRLVRMNMPISNEDMTVHFTSTLMALIRTALEIKLAPAGTKQHQCDAELRKEISVVWANLPQKTLDLLVPPHKPDEMTVGKVYAALMIFDFYKQNKTTRDQMQQAPGGLSQMGPVSLFHPLKATLEQTQPAVLRGARVFLRQKSSTSLSNGGAIQNQESGIKESVSWGTQRTQDAPHEARPPLERGHSTEIPVGRSGALAVDVQMQSITRRGPDGEPQPGLESQGRAASMPRLAAETQPVTDASPMKRSISTLAQRPRGTHLCSTTPDRPPPSQASSHHHHHRCHRRRDRKQRSLEKGPSLSADMDGAPSSAVGPGLPPGEGPTGCRRERERRQERGRSQERRQPSSSSSEKQRFYSCDRFGGREPPKPKPSLSSHPTSPTAGQEPGPHPQGSGSVNGSPLLSTSGASTPGRGGRRQLPQTPLTPRPSITYKTANSSPIHFAGAQTSLPAFSPGRLSRGLSEHNALLQRDPLSQPLAPGSRIGSDPYLGQRLDSEASVHALPEDTLTFEEAVATNSGRSSRTSYVSSLTSQSHPLRRVPNGYHCTLGLSSGGRARHSYHHPDQDHWC

SEQ ID NO: 10765 - protein, 2339 aa, Homo sapiens [sequence omitted]

SEQ ID NO: 10766 - protein, 164 aa, Homo sapiens
  Payload ID: 2142;
  Gene Symbol: CACNA1B;
  Gene Name: calcium channel, voltage-dependent, N type, alpha 1B subunit;
  ENSP ID: ENSP00000413042
  MOD_RES (1)..(1): Any amino acid
XNFRTFLQALMLLFRSATGEAWHEIMLSCLSNQACDEQANATECGSDFAYFYFVSFIFLCSFLMLNLFVAVIMDNFEYLTRDSSILGPHHLDEFIRVWAEYDPAACCRIHYKDMYSLLRCIAPPVGLGKNCPRRLAYKRLVRMNMPISNEDMTVHFTSTLMALI

SEQ ID NO: 10767 - protein, 2506 aa, Homo sapiens
  Payload ID: 2143;
  Gene Symbol: CACNA1A;
  Gene Name: calcium channel, voltage-dependent, P/Q type, alpha 1A subunit;
  Uniprot ID:  O00555;
  ENSP ID: ENSP00000353362
MARFGDEMPARYGGGGSGAAAGVVVGSGGGRGAGGSRQGGQPGAQRMYKQSMAQRARTMALYNPIPVRQNCLTVNRSLFLFSEDNVVRKYAKKITEWPPFEYMILATIIANCIVLALEQHLPDDDKTPMSERLDDTEPYFIGIFCFEAGIKIIALGFAFHKGSYLRNGWNVMDFVVVLTGILATVGTEFDLRTLRAVRVLRPLKLVSGIPSLQVVLKSIMKAMIPLLQIGLLLFFAILIFAIIGLEFYMGKFHTTCFEEGTDDIQGESPAPCGTEEPARTCPNGTKCQPYWEGPNNGITQFDNILFAVLTVFQCITMEGWTDLLYNSNDASGNTWNWLYFIPLIIIGSFFMLNLVLGVLSGEFAKERERVENRRAFLKLRRQQQIERELNGYMEWISKAEEVILAEDETDGEQRHPFDALRRTTIKKSKTDLLNPEEAEDQLADIASVGSPFARASIKSAKLENSTFFHKKERRMRFYIRRMVKTQAFYWTVLSLVALNTLCVAIVHYNQPEWLSDFLYYAEFIFLGLFMSEMFIKMYGLGTRPYFHSSFNCFDCGVIIGSIFEVIWAVIKPGTSFGISVLRALRLLRIFKVTKYWASLRNLVVSLLNSMKSIISLLFLLFLFIVVFALLGMQLFGGQFNFDEGTPPTNFDTFPAAIMTVFQILTGEDWNEVMYDGIKSQGGVQGGMVFSIYFIVLTLFGNYTLLNVFLAIAVDNLANAQELTKDEQEEEEAANQKLALQKAKEVAEVSPLSAANMSIAVKEQQKNQKPAKSVWEQRTSEMRKQNLLASREALYNEMDPDERWKAAYTRHLRPDMKTHLDRPLVVDPQENRNNNTNKSRAAEPTVDQRLGQQRAEDFLRKQARYHDRARDPSGSAGLDARRPWAGSQEAELSREGPYGRESDHHAREGSLEQPGFWEGEAERGKAGDPHRRHVHRQGGSRESRSGSPRTGADGEHRRHRAHRRPGEEGPEDKAERRARHREGSRPARGGEGEGEGPDGGERRRRHRHGAPATYEGDARREDKERRHRRRKENQGSGVPVSGPNLSTTRPIQQDLGRQDPPLAEDIDNMKNNKLATAESAAPHGSLGHAGLPQSPAKMGNSTDPGPMLAIPAMATNPQNAASRRTPNNPGNPSNPGPPKTPENSLIVTNPSGTQTNSAKTARKPDHTTVDIPPACPPPLNHTVVQVNKNANPDPLPKKEEEKKEEEEDDRGEDGPKPMPPYSSMFILSTTNPLRRLCHYILNLRYFEMCILMVIAMSSIALAAEDPVQPNAPRNNVLRYFDYVFTGVFTFEMVIKMIDLGLVLHQGAYFRDLWNILDFIVVSGALVAFAFTGNSKGKDINTIKSLRVLRVLRPLKTIKRLPKLKAVFDCVVNSLKNVFNILIVYMLFMFIFAVVAVQLFKGKFFHCTDESKEFEKDCRGKYLLYEKNEVKARDREWKKYEFHYDNVLWALLTLFTVSTGEGWPQVLKHSVDATFENQGPSPGYRMEMSIFYVVYFVVFPFFFVNIFVALIIITFQEQGDKMMEEYSLEKNERACIDFAISAKPLTRHMPQNKQSFQYRMWQFVVSPPFEYTIMAMIALNTIVLMMKFYGASVAYENALRVFNIVFTSLFSLECVLKVMAFGILNYFRDAWNIFDFVTVLGSITDILVTEFGNNFINLSFLRLFRAARLIKLLRQGYTIRILLWTFVQSFKALPYVCLLIAMLFFIYAIIGMQVFGNIGIDVEDEDSDEDEFQITEHNNFRTFFQALMLLFRSATGEAWHNIMLSCLSGKPCDKNSGILTRECGNEFAYFYFVSFIFLCSFLMLNLFVAVIMDNFEYLTRDSSILGPHHLDEYVRVWAEYDPAAWGRMPYLDMYQMLRHMSPPLGLGKKCPARVAYKRLLRMDLPVADDNTVHFNSTLMALIRTALDIKIAKGGADKQQMDAELRKEMMAIWPNLSQKTLDLLVTPHKSTDLTVGKIYAAMMIMEYYRQSKAKKLQAMREEQDRTPLMFQRMEPPSPTQEGGPGQNALPSTQLDPGGALMAHESGLKESPSWVTQRAQEMFQKTGTWSPEQGPPTDMPNSQPNSQSVEMREMGRDGYSDSEHYLPMEGQGRAASMPRLPAENQRRRGRPRGNNLSTISDTSPMKRSASVLGPKARRLDDYSLERVPPEENQRHHQRRRDRSHRASERSLGRYTDVDTGLGTDLSMTTQSGDLPSKERDQERGRPKDRKHRQHHHHHHHHHHPPPPDKDRYAQERPDHGRARARDQRWSRSPSEGREHMAHRQGSSSVSGSPAPSTSGTSTPRRGRRQLPQTPSTPRPHVSYSPVIRKAGGSGPPQQQQQQQQQQQQQAVARPGRAATSGPRRYPGPTAEPLAGDRPPTGGHSSGRSPRMERRVPGPARSESPRACRHGGARWPASGPHVSEGPPGPRHHGYYRGSDYDEADGPGSGGGEEAMAGAYDAPPPVRHASSGATGRSPRTPRASGPACASPSRHGRRLPNGYYPAHGLARPRGPGSRKGLHEPYSESDDDWC

SEQ ID NO: 10768 - protein, 103 aa, Homo sapiens
  Payload ID: 2143;
  Gene Symbol: CACNA1A;
  Gene Name: calcium channel, voltage-dependent, P/Q type, alpha 1A subunit;
  ENSP ID: ENSP00000459963
MSSWPTRPTKSTAPPRPGGKNGTTIIANCIVLALEQHLPDDDKTPMSERLDDTEPYFIGIFCFEAGIKIIALGFAFHKGSYLRNGWNVMDFVVVLTGILATVG

SEQ ID NO: 10769 - protein, 2261 aa, Homo sapiens
  Payload ID: 2143;
  Gene Symbol: CACNA1A;
  Gene Name: calcium channel, voltage-dependent, P/Q type, alpha 1A subunit;
  Uniprot ID:  O00555;
  ENSP ID: ENSP00000460092
MARFGDEMPARYGGGGSGAAAGVVVGSGGGRGAGGSRQGGQPGAQRMYKQSMAQRARTMALYNPIPVRQNCLTVNRSLFLFSEDNVVRKYAKKITEWPPFEYMILATIIANCIVLALEQHLPDDDKTPMSERLDDTEPYFIGIFCFEAGIKIIALGFAFHKGSYLRNGWNVMDFVVVLTGILATVGTEFDLRTLRAVRVLRPLKLVSGIPSLQVVLKSIMKAMIPLLQIGLLLFFAILIFAIIGLEFYMGKFHTTCFEEGTDDIQGESPAPCGTEEPARTCPNGTKCQPYWEGPNNGITQFDNILFAVLTVFQCITMEGWTDLLYNSNDASGNTWNWLYFIPLIIIGSFFMLNLVLGVLSGEFAKERERVENRRAFLKLRRQQQIERELNGYMEWISKAEEVILAEDETDGEQRHPFDGALRRTTIKKSKTDLLNPEEAEDQLADIASVGSPFARASIKSAKLENSTFFHKKERRMRFYIRRMVKTQAFYWTVLSLVALNTLCVAIVHYNQPEWLSDFLYYAEFIFLGLFMSEMFIKMYGLGTRPYFHSSFNCFDCGVIIGSIFEVIWAVIKPGTSFGISVLRALRLLRIFKVTKYWASLRNLVVSLLNSMKSIISLLFLLFLFIVVFALLGMQLFGGQFNFDEGTPPTNFDTFPAAIMTVFQILTGEDWNEVMYDGIKSQGGVQGGMVFSIYFIVLTLFGNYTLLNVFLAIAVDNLANAQELTKDEQEEEEAANQKLALQKAKEVAEVSPLSAANMSIAVKEQQKNQKPAKSVWEQRTSEMRKQNLLASREALYNEMDPDERWKAAYTRHLRPDMKTHLDRPLVVDPQENRNNNTNKSRAAEPTVDQRLGQQRAEDFLRKQARYHDRARDPSGSAGLDARRPWAGSQEAELSREGPYGRESDHHAREGSLEQPGFWEGEAERGKAGDPHRRHVHRQGGSRESRSGSPRTGADGEHRRHRAHRRPGEEGPEDKAERRARHREGSRPARGGEGEGEGPDGGERRRRHRHGAPATYEGDARREDKERRHRRRKENQGSGVPVSGPNLSTTRPIQQDLGRQDPPLAEDIDNMKNNKLATAESAAPHGSLGHAGLPQSPAKMGNSTDPGPMLAIPAMATNPQNAASRRTPNNPGNPSNPGPPKTPENSLIVTNPSGTQTNSAKTARKPDHTTVDIPPACPPPLNHTVVQVNKNANPDPLPKKEEEKKEEEEDDRGEDGPKPMPPYSSMFILSTTNPLRRLCHYILNLRYFEMCILMVIAMSSIALAAEDPVQPNAPRNNVLRYFDYVFTGVFTFEMVIKMIDLGLVLHQGAYFRDLWNILDFIVVSGALVAFAFTGNSKGKDINTIKSLRVLRVLRPLKTIKRLPKLKAVFDCVVNSLKNVFNILIVYMLFMFIFAVVAVQLFKGKFFHCTDESKEFEKDCRGKYLLYEKNEVKARDREWKKYEFHYDNVLWALLTLFTVSTGEGWPQVLKHSVDATFENQGPSPGYRMEMSIFYVVYFVVFPFFFVNIFVALIIITFQEQGDKMMEEYSLEKNERACIDFAISAKPLTRHMPQNKQSFQYRMWQFVVSPPFEYTIMAMIALNTIVLMMKFYGASVAYENALRVFNIVFTSLFSLECVLKVMAFGILNYFRDAWNIFDFVTVLGSITDILVTEFGNNFINLSFLRLFRAARLIKLLRQGYTIRILLWTFVQSFKALPYVCLLIAMLFFIYAIIGMQVFGNIGIDVEDEDSDEDEFQITEHNNFRTFFQALMLLFRSATGEAWHNIMLSCLSGKPCDKNSGILTRECGNEFAYFYFVSFIFLCSFLMLNLFVAVIMDNFEYLTRDSSILGPHHLDEYVRVWAEYDPAACGRIHYKDMYSLLRVISPPLGLGKKCPHRVACKRLLRMDLPVADDNTVHFNSTLMALIRTALDIKIAKGGADKQQMDAELRKEMMAIWPNLSQKTLDLLVTPHKSTDLTVGKIYAAMMIMEYYRQSKAKKLQAMREEQDRTPLMFQRMEPPSPTQEGGPGQNALPSTQLDPGGALMAHESGLKESPSWVTQRAQEMFQKTGTWSPEQGPPTDMPNSQPNSQSVEMREMGRDGYSDSEHYLPMEGQGRAASMPRLPAENQRRRGRPRGNNLSTISDTSPMKRSASVLGPKARRLDDYSLERVPPEENQRHHQRRRDRSHRASERSLGRYTDVDTGLGTDLSMTTQSGDLPSKERDQERGRPKDRKHRQHHHHHHHHHHPPPPDKDRYAQERPDHGRARARDQRWSRSPSEGREHMAHRQ

SEQ ID NO: 10770 - protein, 79 aa, Homo sapiens
  Payload ID: 2143;
  Gene Symbol: CACNA1A;
  Gene Name: calcium channel, voltage-dependent, P/Q type, alpha 1A subunit;
  ENSP ID: ENSP00000460276
  MOD_RES (1)..(1): Any amino acid
XKFYGASVAYENALRVFNIVFTSLFSLECVLKVMAFGILNYFRDAWNIFDFVTVLGSITDILVTEFGAWSRATPPSPRS

SEQ ID NO: 10771 - protein, 35 aa, Homo sapiens
  Payload ID: 2143;
  Gene Symbol: CACNA1A;
  Gene Name: calcium channel, voltage-dependent, P/Q type, alpha 1A subunit;
  ENSP ID: ENSP00000464729
MSSWPTRPTKSTAPPRPGGKNGRSYQRMCFTQTRE

SEQ ID NO: 10772 - protein, 1180 aa, Homo sapiens
  Payload ID: 2143;
  Gene Symbol: CACNA1A;
  Gene Name: calcium channel, voltage-dependent, P/Q type, alpha 1A subunit;
  ENSP ID: ENSP00000465598
LDFIVVSGALVAFAFTGNSKGKDINTIKSLRVLRVLRPLKTIKRLPKLKAVFDCVVNSLKNVFNILIVYMLFMFIFAVVAVQLFKGKFFHCTDESKEFEKDCRGKYLLYEKNEVKARDREWKKYEFHYDNVLWALLTLFTVSTGEGWPQVLKHSVDATFENQGPSPGYRMEMSIFYVVYFVVFPFFFVNIFVALIIITFQEQGDKMMEEYSLEKNERACIDFAISAKPLTRHMPQNKQSFQYRMWQFVVSPPFEYTIMAMIALNTIVLMMKFYGASVAYENALRVFNIVFTSLFSLECVLKVMAFGILNYFRDAWNIFDFVTVLGSITDILVTEFGNNFINLSFLRLFRAARLIKLLRQGYTIRILLWTFVQSFKALPYVCLLIAMLFFIYAIIGMQVFGNIGIDVEDEDSDEDEFQITEHNNFRTFFQALMLLFRSATGEAWHNIMLSCLSGKPCDKNSGILTRECGNEFAYFYFVSFIFLCSFLMLNLFVAVIMDNFEYLTRDSSILGPHHLDEYVRVWAEYDPAAWGRMPYLDMYQMLRHMSPPLGLGKKCPARVAYKRLLRMDLPVADDNTVHFNSTLMALIRTALDIKIAKGGADKQQMDAELRKEMMAIWPNLSQKTLDLLVTPHKSTDLTVGKIYAAMMIMEYYRQSKAKKLQAMREEQDRTPLMFQRMEPPSPTQEGGPGQNALPSTQLDPGGALMAHESGLKESPSWVTQRAQEMFQKTGTWSPEQGPPTDMPNSQPNSQSVEMREMGRDGYSDSEHYLPMEGQGRAASMPRLPAENQTISDTSPMKRSASVLGPKARRLDDYSLERVPPEENQRHHQRRRDRSHRASERSLGRYTDVDTGLGTDLSMTTQSGDLPSKERDQERGRPKDRKHRQHHHHHHHHHHPPPPDKDRYAQERPDHGRARARDQRWSRSPSEGREHMAHRQGSSSVSGSPAPSTSGTSTPRRGRRQLPQTPSTPRPHVSYSPVIRKAGGSGPPQQQQQQQQQQQQQAVARPGRAATSGPRRYPGPTAEPLAGDRPPTGGHSSGRSPRMERRVPGPARSESPRACRHGGARWPASGPHVSEGPPGPRHHGYYRGSDYDEADGPGSGGGEEAMAGAYDAPPPVRHASSGATGRSPRTPRASGPACASPSRHGRRLPNGYYPAHGLARPRGPGSRKGLHEPYSESDDDWC

SEQ ID NO: 10773 - protein, 981 aa, Homo sapiens
  Payload ID: 2143;
  Gene Symbol: CACNA1A;
  Gene Name: calcium channel, voltage-dependent, P/Q type, alpha 1A subunit;
  ENSP ID: ENSP00000467729
QEQGDKMMEEYSLEKNERACIDFAISAKPLTRHMPQNKQSFQYRMWQFVVSPPFEYTIMAMIALNTIVLMMKFYGASVAYENALRVFNIVFTSLFSLECVLKVMAFGILNYFRDAWNIFDFVTVLGSITDILVTEFGNNFINLSFLRLFRAARLIKLLRQGYTIRILLWTFVQSFKALPYVCLLIAMLFFIYAIIGMQVFGNIGIDVEDEDSDEDEFQITEHNNFRTFFQALMLLFRSATGEAWHNIMLSCLSGKPCDKNSGILTRECGNEFAYFYFVSFIFLCSFLMLNLFVAVIMDNFEYLTRDSSILGPHHLDEYVRVWAEYDPAACGRIHYKDMYSLLRVISPPLGLGKKCPHRVACKRLLRMDLPVADDNTVHFNSTLMALIRTALDIKIAKGGADKQQMDAELRKEMMAIWPNLSQKTLDLLVTPHKSTDLTVGKIYAAMMIMEYYRQSKAKKLQAMREEQDRTPLMFQRMEPPSPTQEGGPGQNALPSTQLDPGGALMAHESGLKESPSWVTQRAQEMFQKTGTWSPEQGPPTDMPNSQPNSQSVEMREMGRDGYSDSEHYLPMEGQGRAASMPRLPAENQTISDTSPMKRSASVLGPKARRLDDYSLERVPPEENQRHHQRRRDRSHRASERSLGRYTDVDTGLGTDLSMTTQSGDLPSKERDQERGRPKDRKHRQHHHHHHHHHHPPPPDKDRYAQERPDHGRARARDQRWSRSPSEGREHMAHRQGSSSVSGSPAPSTSGTSTPRRGRRQLPQTPSTPRPHVSYSPVIRKAGGSGPPQQQQQQQQQQQQQAVARPGRAATSGPRRYPGPTAEPLAGDRPPTGGHSSGRSPRMERRVPGPARSESPRACRHGGARWPASGPHVSEGPPGPRHHGYYRGSDYDEADGPGSGGGEEAMAGAYDAPPPVRHASSGATGRSPRTPRASGPACASPSRHGRRLPNGYYPAHGLARPRGPGSRKGLHEPYSESDDDWC

SEQ ID NO: 10774 - protein, 2512 aa, Homo sapiens
  Payload ID: 2143;
  Gene Symbol: CACNA1A;
  Gene Name: calcium channel, voltage-dependent, P/Q type, alpha 1A subunit;
  ENSP ID: ENSP00000479983
MARFGDEMPARYGGGGSGAAAGVVVGSGGGRGAGGSRQGGQPGAQRMYKQSMAQRARTMALYNPIPVRQNCLTVNRSLFLFSEDNVVRKYAKKITEWPPFEYMILATIIANCIVLALEQHLPDDDKTPMSERLDDTEPYFIGIFCFEAGIKIIALGFAFHKGSYLRNGWNVMDFVVVLTGILATVGTEFDLRTLRAVRVLRPLKLVSGIPSLQVVLKSIMKAMIPLLQIGLLLFFAILIFAIIGLEFYMGKFHTTCFEEGTDDIQGESPAPCGTEEPARTCPNGTKCQPYWEGPNNGITQFDNILFAVLTVFQCITMEGWTDLLYNSNDASGNTWNWLYFIPLIIIGSFFMLNLVLGVLSGEFAKERERVENRRAFLKLRRQQQIERELNGYMEWISKAEEVILAEDETDGEQRHPFDGALRRTTIKKSKTDLLNPEEAEDQLADIASVGSPFARASIKSAKLENSTFFHKKERRMRFYIRRMVKTQAFYWTVLSLVALNTLCVAIVHYNQPEWLSDFLYYAEFIFLGLFMSEMFIKMYGLGTRPYFHSSFNCFDCGVIIGSIFEVIWAVIKPGTSFGISVLRALRLLRIFKVTKYWASLRNLVVSLLNSMKSIISLLFLLFLFIVVFALLGMQLFGGQFNFDEGTPPTNFDTFPAAIMTVFQILTGEDWNEVMYDGIKSQGGVQGGMVFSIYFIVLTLFGNYTLLNVFLAIAVDNLANAQELTKVEADEQEEEEAANQKLALQKAKEVAEVSPLSAANMSIAVKEQQKNQKPAKSVWEQRTSEMRKQNLLASREALYNEMDPDERWKAAYTRHLRPDMKTHLDRPLVVDPQENRNNNTNKSRAAEPTVDQRLGQQRAEDFLRKQARYHDRARDPSGSAGLDARRPWAGSQEAELSREGPYGRESDHHAREGSLEQPGFWEGEAERGKAGDPHRRHVHRQGGSRESRSGSPRTGADGEHRRHRAHRRPGEEGPEDKAERRARHREGSRPARGGEGEGEGPDGGERRRRHRHGAPATYEGDARREDKERRHRRRKENQGSGVPVSGPNLSTTRPIQQDLGRQDPPLAEDIDNMKNNKLATAESAAPHGSLGHAGLPQSPAKMGNSTDPGPMLAIPAMATNPQNAASRRTPNNPGNPSNPGPPKTPENSLIVTNPSGTQTNSAKTARKPDHTTVDIPPACPPPLNHTVVQVNKNANPDPLPKKEEEKKEEEEDDRGEDGPKPMPPYSSMFILSTTNPLRRLCHYILNLRYFEMCILMVIAMSSIALAAEDPVQPNAPRNNVLRYFDYVFTGVFTFEMVIKMIDLGLVLHQGAYFRDLWNILDFIVVSGALVAFAFTGNSKGKDINTIKSLRVLRVLRPLKTIKRLPKLKAVFDCVVNSLKNVFNILIVYMLFMFIFAVVAVQLFKGKFFHCTDESKEFEKDCRGKYLLYEKNEVKARDREWKKYEFHYDNVLWALLTLFTVSTGEGWPQVLKHSVDATFENQGPSPGYRMEMSIFYVVYFVVFPFFFVNIFVALIIITFQEQGDKMMEEYSLEKNERACIDFAISAKPLTRHMPQNKQSFQYRMWQFVVSPPFEYTIMAMIALNTIVLMMKFYGASVAYENALRVFNIVFTSLFSLECVLKVMAFGILNYFRDAWNIFDFVTVLGSITDILVTEFGNPNNFINLSFLRLFRAARLIKLLRQGYTIRILLWTFVQSFKALPYVCLLIAMLFFIYAIIGMQVFGNIGIDVEDEDSDEDEFQITEHNNFRTFFQALMLLFRSATGEAWHNIMLSCLSGKPCDKNSGILTRECGNEFAYFYFVSFIFLCSFLMLNLFVAVIMDNFEYLTRDSSILGPHHLDEYVRVWAEYDPAAWGRMPYLDMYQMLRHMSPPLGLGKKCPARVAYKRLLRMDLPVADDNTVHFNSTLMALIRTALDIKIAKGGADKQQMDAELRKEMMAIWPNLSQKTLDLLVTPHKSTDLTVGKIYAAMMIMEYYRQSKAKKLQAMREEQDRTPLMFQRMEPPSPTQEGGPGQNALPSTQLDPGGALMAHESGLKESPSWVTQRAQEMFQKTGTWSPEQGPPTDMPNSQPNSQSVEMREMGRDGYSDSEHYLPMEGQGRAASMPRLPAENQRRRGRPRGNNLSTISDTSPMKRSASVLGPKARRLDDYSLERVPPEENQRHHQRRRDRSHRASERSLGRYTDVDTGLGTDLSMTTQSGDLPSKERDQERGRPKDRKHRQHHHHHHHHHHPPPPDKDRYAQERPDHGRARARDQRWSRSPSEGREHMAHRQGSSSVSGSPAPSTSGTSTPRRGRRQLPQTPSTPRPHVSYSPVIRKAGGSGPPQQQQQQQQQQQQQAVARPGRAATSGPRRYPGPTAEPLAGDRPPTGGHSSGRSPRMERRVPGPARSESPRACRHGGARWPASGPHVSEGPPGPRHHGYYRGSDYDEADGPGSGGGEEAMAGAYDAPPPVRHASSGATGRSPRTPRASGPACASPSRHGRRLPNGYYPAHGLARPRGPGSRKGLHEPYSESDDDWC

SEQ ID NO: 10775 - protein, 2312 aa, Homo sapiens [sequence omitted]

SEQ ID NO: 10776 - protein, 2251 aa, Homo sapiens
  Payload ID: 2144;
  Gene Symbol: CACNA1E;
  Gene Name: calcium channel, voltage-dependent, R type, alpha 1E subunit;
  Uniprot ID:  Q15878;
  ENSP ID: ENSP00000351101
MARFGEAVVARPGSGDGDSDQSRNRQGTPVPASGQAAAYKQTKAQRARTMALYNPIPVRQNCFTVNRSLFIFGEDNIVRKYAKKLIDWPPFEYMILATIIANCIVLALEQHLPEDDKTPMSRRLEKTEPYFIGIFCFEAGIKIVALGFIFHKGSYLRNGWNVMDFIVVLSGILATAGTHFNTHVDLRTLRAVRVLRPLKLVSGIPSLQIVLKSIMKAMVPLLQIGLLLFFAILMFAIIGLEFYSGKLHRACFMNNSGILEGFDPPHPCGVQGCPAGYECKDWIGPNDGITQFDNILFAVLTVFQCITMEGWTTVLYNTNDALGATWNWLYFIPLIIIGSFFVLNLVLGVLSGEFAKERERVENRRAFMKLRRQQQIERELNGYRAWIDKAEEVMLAEENKNAGTSALEVLRRATIKRSRTEAMTRDSSDEHCVDISSVGTPLARASIKSAKVDGVSYFRHKERLLRISIRHMVKSQVFYWIVLSLVALNTACVAIVHHNQPQWLTHLLYYAEFLFLGLFLLEMSLKMYGMGPRLYFHSSFNCFDFGVTVGSIFEVVWAIFRPGTSFGISVLRALRLLRIFKITKYWASLRNLVVSLMSSMKSIISLLFLLFLFIVVFALLGMQLFGGRFNFNDGTPSANFDTFPAAIMTVFQILTGEDWNEVMYNGIRSQGGVSSGMWSAIYFIVLTLFGNYTLLNVFLAIAVDNLANAQELTKDEQEEEEAFNQKHALQKAKEVSPMSAPNMPSIERERRRRHHMSVWEQRTSQLRKHMQMSSQEALNREEAPTMNPLNPLNPLSSLNPLNAHPSLYRRPRAIEGLALGLALEKFEEERISRGGSLKGDGGDRSSALDNQRTPLSLGQREPPWLARPCHGNCDPTQQEAGGGEAVVTFEDRARHRQSQRRSRHRRVRTEGKESSSASRSRSASQERSLDEAMPTEGEKDHELRGNHGAKEPTIQEERAQDLRRTNSLMVSRGSGLAGGLDEADTPLVLPHPELEVGKHVVLTEQEPEGSSEQALLGNVQLDMGRVISQSEPDLSCITANTDKATTESTSVTVAIPDVDPLVDSTVVHISNKTDGEASPLKEAEIREDEEEVEKKKQKKEKRETGKAMVPHSSMFIFSTTNPIRRACHYIVNLRYFEMCILLVIAASSIALAAEDPVLTNSERNKVLRYFDYVFTGVFTFEMVIKMIDQGLILQDGSYFRDLWNILDFVVVVGALVAFALANALGTNKGRDIKTIKSLRVLRVLRPLKTIKRLPKLKAVFDCVVTSLKNVFNILIVYKLFMFIFAVIAVQLFKGKFFYCTDSSKDTEKECIGNYVDHEKNKMEVKGREWKRHEFHYDNIIWALLTLFTVSTGEGWPQVLQHSVDVTEEDRGPSRSNRMEMSIFYVVYFVVFPFFFVNIFVALIIITFQEQGDKMMEECSLEKNERACIDFAISAKPLTRYMPQNRHTFQYRVWHFVVSPSFEYTIMAMIALNTVVLMMKYYSAPCTYELALKYLNIAFTMVFSLECVLKVIAFGFLNYFRDTWNIFDFITVIGSITEIILTDSKLVNTSGFNMSFLKLFRAARLIKLLRQGYTIRILLWTFVQSFKALPYVCLLIAMLFFIYAIIGMQVFGNIKLDEESHINRHNNFRSFFGSLMLLFRSATGEAWQEIMLSCLGEKGCEPDTTAPSGQNENERCGTDLAYVYFVSFIFFCSFLMLNLFVAVIMDNFEYLTRDSSILGPHHLDEFVRVWAEYDRAACGRIHYTEMYEMLTLMSPPLGLGKRCPSKVAYKRLVLMNMPVAEDMTVHFTSTLMALIRTALDIKIAKGGADRQQLDSELQKETLAIWPHLSQKMLDLLVPMPKASDLTVGKIYAAMMIMDYYKQSKVKKQRQQLEEQKNAPMFQRMEPSSLPQEIIANAKALPYLQQDPVSGLSGRSGYPSMSPLSPQDIFQLACMDPADDGQFQERQSLVVTDPSSMRRSFSTIRDKRSNSSWLEEFSMERSSENTYKSRRRSYHSSLRLSAHRLNSDSGHKSDTHRSGGRERGRSKERKHLLSPDVSRCNSEERGTQADWESPERRQSRSPSEGRSQTPNRQGTGSLSESSIPSVSDTSTPRRSRRQLPPVPPKPRPLLSYSSLIRHAGSISPPADGSEEGSPLTSQALESNNACLTESSNSPHPQQSQHASPQRYISEPYLALHEDSHASDCGEEETLTFEAAVATSLGRSNTIGSAPPLRHSWQMPNGHYRRRRRGGPGPGMMCGAVNNLLSDTEEDDKC

SEQ ID NO: 10777 - protein, 2294 aa, Homo sapiens
  Payload ID: 2144;
  Gene Symbol: CACNA1E;
  Gene Name: calcium channel, voltage-dependent, R type, alpha 1E subunit;
  ENSP ID: ENSP00000353222
MARFGEAVVARPGSGDGDSDQSRNRQGTPVPASGQAAAYKQTKAQRARTMALYNPIPVRQNCFTVNRSLFIFGEDNIVRKYAKKLIDWPPFEYMILATIIANCIVLALEQHLPEDDKTPMSRRLEKTEPYFIGIFCFEAGIKIVALGFIFHKGSYLRNGWNVMDFIVVLSGILATAGTHFNTHVDLRTLRAVRVLRPLKLVSGIPSLQIVLKSIMKAMVPLLQIGLLLFFAILMFAIIGLEFYSGKLHRACFMNNSGILEGFDPPHPCGVQGCPAGYECKDWIGPNDGITQFDNILFAVLTVFQCITMEGWTTVLYNTNDALGATWNWLYFIPLIIIGSFFVLNLVLGVLSGEFAKERERVENRRAFMKLRRQQQIERELNGYRAWIDKAEEVMLAEENKNAGTSALEVLRRATIKRSRTEAMTRDSSDEHCVDISSVGTPLARASIKSAKVDGVSYFRHKERLLRISIRHMVKSQVFYWIVLSLVALNTACVAIVHHNQPQWLTHLLYYAEFLFLGLFLLEMSLKMYGMGPRLYFHSSFNCFDFGVTVGSIFEVVWAIFRPGTSFGISVLRALRLLRIFKITKYWASLRNLVVSLMSSMKSIISLLFLLFLFIVVFALLGMQLFGGRFNFNDGTPSANFDTFPAAIMTVFQILTGEDWNEVMYNGIRSQGGVSSGMWSAIYFIVLTLFGNYTLLNVFLAIAVDNLANAQELTKDEQEEEEAFNQKHALQKAKEVSPMSAPNMPSIERERRRRHHMSVWEQRTSQLRKHMQMSSQEALNREEAPTMNPLNPLNPLSSLNPLNAHPSLYRRPRAIEGLALGLALEKFEEERISRGGSLKGDGGDRSSALDNQRTPLSLGQREPPWLARPCHGNCDPTQQEAGGGEAVVTFEDRARHRQSQRRSRHRRVRTEGKESSSASRSRSASQERSLDEAMPTEGEKDHELRGNHGAKEPTIQEERAQDLRRTNSLMVSRGSGLAGGLDEADTPLVLPHPELEVGKHVVLTEQEPEGSSEQALLGNVQLDMGRVISQSEPDLSCITANTDKATTESTSVTVAIPDVDPLVDSTVVHISNKTDGEASPLKEAEIREDEEEVEKKKQKKEKRETGKAMVPHSSMFIFSTTNPIRRACHYIVNLRYFEMCILLVIAASSIALAAEDPVLTNSERNKVLRYFDYVFTGVFTFEMVIKMIDQGLILQDGSYFRDLWNILDFVVVVGALVAFALANALGTNKGRDIKTIKSLRVLRVLRPLKTIKRLPKLKAVFDCVVTSLKNVFNILIVYKLFMFIFAVIAVQLFKGKFFYCTDSSKDTEKECIGNYVDHEKNKMEVKGREWKRHEFHYDNIIWALLTLFTVSTGEGWPQVLQHSVDVTEEDRGPSRSNRMEMSIFYVVYFVVFPFFFVNIFVALIIITFQEQGDKMMEECSLEKNERACIDFAISAKPLTRYMPQNRHTFQYRVWHFVVSPSFEYTIMAMIALNTVVLMMKYYSAPCTYELALKYLNIAFTMVFSLECVLKVIAFGFLNYFRDTWNIFDFITVIGSITEIILTDSKLVNTSGFNMSFLKLFRAARLIKLLRQGYTIRILLWTFVQSFKALPYVCLLIAMLFFIYAIIGMQVFGNIKLDEESHINRHNNFRSFFGSLMLLFRSATGEAWQEIMLSCLGEKGCEPDTTAPSGQNENERCGTDLAYVYFVSFIFFCSFLMLNLFVAVIMDNFEYLTRDSSILGPHHLDEFVRVWAEYDRAACGRIHYTEMYEMLTLMSPPLGLGKRCPSKVAYKRLVLMNMPVAEDMTVHFTSTLMALIRTALDIKIAKGGADRQQLDSELQKETLAIWPHLSQKMLDLLVPMPKASDLTVGKIYAAMMIMDYYKQSKVKKQRQQLEEQKNAPMFQRMEPSSLPQEIIANAKALPYLQQDPVSGLSGRSGYPSMSPLSPQDIFQLACMDPADDGQFQERQSLEPEVSELKSVQPSNHGIYLPSDTQEHAGSGRASSMPRLTVDPQVVTDPSSMRRSFSTIRDKRSNSSWLEEFSMERSSENTYKSRRRSYHSSLRLSAHRLNSDSGHKSDTHRSGGRERGRSKERKHLLSPDVSRCNSEERGTQADWESPERRQSRSPSEGRSQTPNRQGTGSLSESSIPSVSDTSTPRRSRRQLPPVPPKPRPLLSYSSLIRHAGSISPPADGSEEGSPLTSQALESNNACLTESSNSPHPQQSQHASPQRYISEPYLALHEDSHASDCGEEETLTFEAAVATSLGRSNTIGSAPPLRHSWQMPNGHYRRRRRGGPGPGMMCGAVNNLLSDTEEDDKC

SEQ ID NO: 10778 - protein, 2270 aa, Homo sapiens
  Payload ID: 2144;
  Gene Symbol: CACNA1E;
  Gene Name: calcium channel, voltage-dependent, R type, alpha 1E subunit;
  Uniprot ID:  Q15878;
  ENSP ID: ENSP00000356539
MARFGEAVVARPGSGDGDSDQSRNRQGTPVPASGQAAAYKQTKAQRARTMALYNPIPVRQNCFTVNRSLFIFGEDNIVRKYAKKLIDWPPFEYMILATIIANCIVLALEQHLPEDDKTPMSRRLEKTEPYFIGIFCFEAGIKIVALGFIFHKGSYLRNGWNVMDFIVVLSGILATAGTHFNTHVDLRTLRAVRVLRPLKLVSGIPSLQIVLKSIMKAMVPLLQIGLLLFFAILMFAIIGLEFYSGKLHRACFMNNSGILEGFDPPHPCGVQGCPAGYECKDWIGPNDGITQFDNILFAVLTVFQCITMEGWTTVLYNTNDALGATWNWLYFIPLIIIGSFFVLNLVLGVLSGEFAKERERVENRRAFMKLRRQQQIERELNGYRAWIDKAEEVMLAEENKNAGTSALEVLRRATIKRSRTEAMTRDSSDEHCVDISSVGTPLARASIKSAKVDGVSYFRHKERLLRISIRHMVKSQVFYWIVLSLVALNTACVAIVHHNQPQWLTHLLYYAEFLFLGLFLLEMSLKMYGMGPRLYFHSSFNCFDFGVTVGSIFEVVWAIFRPGTSFGISVLRALRLLRIFKITKYWASLRNLVVSLMSSMKSIISLLFLLFLFIVVFALLGMQLFGGRFNFNDGTPSANFDTFPAAIMTVFQILTGEDWNEVMYNGIRSQGGVSSGMWSAIYFIVLTLFGNYTLLNVFLAIAVDNLANAQELTKDEQEEEEAFNQKHALQKAKEVSPMSAPNMPSIERDRRRRHHMSMWEPRSSHLRERRRRHHMSVWEQRTSQLRKHMQMSSQEALNREEAPTMNPLNPLNPLSSLNPLNAHPSLYRRPRAIEGLALGLALEKFEEERISRGGSLKGDGGDRSSALDNQRTPLSLGQREPPWLARPCHGNCDPTQQEAGGGEAVVTFEDRARHRQSQRRSRHRRVRTEGKESSSASRSRSASQERSLDEAMPTEGEKDHELRGNHGAKEPTIQEERAQDLRRTNSLMVSRGSGLAGGLDEADTPLVLPHPELEVGKHVVLTEQEPEGSSEQALLGNVQLDMGRVISQSEPDLSCITANTDKATTESTSVTVAIPDVDPLVDSTVVHISNKTDGEASPLKEAEIREDEEEVEKKKQKKEKRETGKAMVPHSSMFIFSTTNPIRRACHYIVNLRYFEMCILLVIAASSIALAAEDPVLTNSERNKVLRYFDYVFTGVFTFEMVIKMIDQGLILQDGSYFRDLWNILDFVVVVGALVAFALANALGTNKGRDIKTIKSLRVLRVLRPLKTIKRLPKLKAVFDCVVTSLKNVFNILIVYKLFMFIFAVIAVQLFKGKFFYCTDSSKDTEKECIGNYVDHEKNKMEVKGREWKRHEFHYDNIIWALLTLFTVSTGEGWPQVLQHSVDVTEEDRGPSRSNRMEMSIFYVVYFVVFPFFFVNIFVALIIITFQEQGDKMMEECSLEKNERACIDFAISAKPLTRYMPQNRHTFQYRVWHFVVSPSFEYTIMAMIALNTVVLMMKYYSAPCTYELALKYLNIAFTMVFSLECVLKVIAFGFLNYFRDTWNIFDFITVIGSITEIILTDSKLVNTSGFNMSFLKLFRAARLIKLLRQGYTIRILLWTFVQSFKALPYVCLLIAMLFFIYAIIGMQVFGNIKLDEESHINRHNNFRSFFGSLMLLFRSATGEAWQEIMLSCLGEKGCEPDTTAPSGQNENERCGTDLAYVYFVSFIFFCSFLMLNLFVAVIMDNFEYLTRDSSILGPHHLDEFVRVWAEYDRAACGRIHYTEMYEMLTLMSPPLGLGKRCPSKVAYKRLVLMNMPVAEDMTVHFTSTLMALIRTALDIKIAKGGADRQQLDSELQKETLAIWPHLSQKMLDLLVPMPKASDLTVGKIYAAMMIMDYYKQSKVKKQRQQLEEQKNAPMFQRMEPSSLPQEIIANAKALPYLQQDPVSGLSGRSGYPSMSPLSPQDIFQLACMDPADDGQFQERQSLVVTDPSSMRRSFSTIRDKRSNSSWLEEFSMERSSENTYKSRRRSYHSSLRLSAHRLNSDSGHKSDTHRSGGRERGRSKERKHLLSPDVSRCNSEERGTQADWESPERRQSRSPSEGRSQTPNRQGTGSLSESSIPSVSDTSTPRRSRRQLPPVPPKPRPLLSYSSLIRHAGSISPPADGSEEGSPLTSQALESNNACLTESSNSPHPQQSQHASPQRYISEPYLALHEDSHASDCGEEETLTFEAAVATSLGRSNTIGSAPPLRHSWQMPNGHYRRRRRGGPGPGMMCGAVNNLLSDTEEDDKC

SEQ ID NO: 10779 - protein, 2270 aa, Homo sapiens; identical to SEQ ID NO: 10778
  Payload ID: 2144;
  Gene Symbol: CACNA1E;
  Gene Name: calcium channel, voltage-dependent, R type, alpha 1E subunit;
  Uniprot ID:  Q15878;
  ENSP ID: ENSP00000356542

SEQ ID NO: 10780 - protein, 2313 aa, Homo sapiens
  Payload ID: 2144;
  Gene Symbol: CACNA1E;
  Gene Name: calcium channel, voltage-dependent, R type, alpha 1E subunit;
  Uniprot ID:  Q15878;
  ENSP ID: ENSP00000356545
MARFGEAVVARPGSGDGDSDQSRNRQGTPVPASGQAAAYKQTKAQRARTMALYNPIPVRQNCFTVNRSLFIFGEDNIVRKYAKKLIDWPPFEYMILATIIANCIVLALEQHLPEDDKTPMSRRLEKTEPYFIGIFCFEAGIKIVALGFIFHKGSYLRNGWNVMDFIVVLSGILATAGTHFNTHVDLRTLRAVRVLRPLKLVSGIPSLQIVLKSIMKAMVPLLQIGLLLFFAILMFAIIGLEFYSGKLHRACFMNNSGILEGFDPPHPCGVQGCPAGYECKDWIGPNDGITQFDNILFAVLTVFQCITMEGWTTVLYNTNDALGATWNWLYFIPLIIIGSFFVLNLVLGVLSGEFAKERERVENRRAFMKLRRQQQIERELNGYRAWIDKAEEVMLAEENKNAGTSALEVLRRATIKRSRTEAMTRDSSDEHCVDISSVGTPLARASIKSAKVDGVSYFRHKERLLRISIRHMVKSQVFYWIVLSLVALNTACVAIVHHNQPQWLTHLLYYAEFLFLGLFLLEMSLKMYGMGPRLYFHSSFNCFDFGVTVGSIFEVVWAIFRPGTSFGISVLRALRLLRIFKITKYWASLRNLVVSLMSSMKSIISLLFLLFLFIVVFALLGMQLFGGRFNFNDGTPSANFDTFPAAIMTVFQILTGEDWNEVMYNGIRSQGGVSSGMWSAIYFIVLTLFGNYTLLNVFLAIAVDNLANAQELTKDEQEEEEAFNQKHALQKAKEVSPMSAPNMPSIERDRRRRHHMSMWEPRSSHLRERRRRHHMSVWEQRTSQLRKHMQMSSQEALNREEAPTMNPLNPLNPLSSLNPLNAHPSLYRRPRAIEGLALGLALEKFEEERISRGGSLKGDGGDRSSALDNQRTPLSLGQREPPWLARPCHGNCDPTQQEAGGGEAVVTFEDRARHRQSQRRSRHRRVRTEGKESSSASRSRSASQERSLDEAMPTEGEKDHELRGNHGAKEPTIQEERAQDLRRTNSLMVSRGSGLAGGLDEADTPLVLPHPELEVGKHVVLTEQEPEGSSEQALLGNVQLDMGRVISQSEPDLSCITANTDKATTESTSVTVAIPDVDPLVDSTVVHISNKTDGEASPLKEAEIREDEEEVEKKKQKKEKRETGKAMVPHSSMFIFSTTNPIRRACHYIVNLRYFEMCILLVIAASSIALAAEDPVLTNSERNKVLRYFDYVFTGVFTFEMVIKMIDQGLILQDGSYFRDLWNILDFVVVVGALVAFALANALGTNKGRDIKTIKSLRVLRVLRPLKTIKRLPKLKAVFDCVVTSLKNVFNILIVYKLFMFIFAVIAVQLFKGKFFYCTDSSKDTEKECIGNYVDHEKNKMEVKGREWKRHEFHYDNIIWALLTLFTVSTGEGWPQVLQHSVDVTEEDRGPSRSNRMEMSIFYVVYFVVFPFFFVNIFVALIIITFQEQGDKMMEECSLEKNERACIDFAISAKPLTRYMPQNRHTFQYRVWHFVVSPSFEYTIMAMIALNTVVLMMKYYSAPCTYELALKYLNIAFTMVFSLECVLKVIAFGFLNYFRDTWNIFDFITVIGSITEIILTDSKLVNTSGFNMSFLKLFRAARLIKLLRQGYTIRILLWTFVQSFKALPYVCLLIAMLFFIYAIIGMQVFGNIKLDEESHINRHNNFRSFFGSLMLLFRSATGEAWQEIMLSCLGEKGCEPDTTAPSGQNENERCGTDLAYVYFVSFIFFCSFLMLNLFVAVIMDNFEYLTRDSSILGPHHLDEFVRVWAEYDRAACGRIHYTEMYEMLTLMSPPLGLGKRCPSKVAYKRLVLMNMPVAEDMTVHFTSTLMALIRTALDIKIAKGGADRQQLDSELQKETLAIWPHLSQKMLDLLVPMPKASDLTVGKIYAAMMIMDYYKQSKVKKQRQQLEEQKNAPMFQRMEPSSLPQEIIANAKALPYLQQDPVSGLSGRSGYPSMSPLSPQDIFQLACMDPADDGQFQERQSLEPEVSELKSVQPSNHGIYLPSDTQEHAGSGRASSMPRLTVDPQVVTDPSSMRRSFSTIRDKRSNSSWLEEFSMERSSENTYKSRRRSYHSSLRLSAHRLNSDSGHKSDTHRSGGRERGRSKERKHLLSPDVSRCNSEERGTQADWESPERRQSRSPSEGRSQTPNRQGTGSLSESSIPSVSDTSTPRRSRRQLPPVPPKPRPLLSYSSLIRHAGSISPPADGSEEGSPLTSQALESNNACLTESSNSPHPQQSQHASPQRYISEPYLALHEDSHASDCGEEETLTFEAAVATSLGRSNTIGSAPPLRHSWQMPNGHYRRRRRGGPGPGMMCGAVNNLLSDTEEDDKC

SEQ ID NO: 10781 - protein, 438 aa, Homo sapiens
  Payload ID: 2144;
  Gene Symbol: CACNA1E;
  Gene Name: calcium channel, voltage-dependent, R type, alpha 1E subunit;
  ENSP ID: ENSP00000432038
MARFGEAVVARPGSGDGDSDQSRNRQGTPVPASGQAAAYKQTKAQRARTMALYNPIPVRQNCFTVNRSLFIFGEDNIVRKYAKKLIDWPPFEYMILATIIANCIVLALEQHLPEDDKTPMSRRLEKTEPYFIGIFCFEAGIKIVALGFIFHKGSYLRNGWNVMDFIVVLSGILATAGTHFNTHVDLRTLRAVRVLRPLKLVSGIPSLQIVLKSIMKAMVPLLQIGLLLFFAILMFAIIGLEFYSGKLHRACFMNNSGILEGFDPPHPCGVQGCPAGYECKDWIGPNDGITQFDNILFAVLTVFQCITMEGWTTVLYNTNDALGATWNWLYFIPLIIIGSFFVLNLVLGVLSGEFAKERERVENRRAFMKLRRQQQIERELNGYRAWIDKAEEVMLAEENKNAGTSALEVLRRATIKRSRTEAMTRDSSDEHCVDISSV

SEQ ID NO: 10782 - protein, 2251 aa, Homo sapiens; identical to SEQ ID NO: 10776
  Payload ID: 2144;
  Gene Symbol: CACNA1E;
  Gene Name: calcium channel, voltage-dependent, R type, alpha 1E subunit;
  Uniprot ID:  Q15878;
  ENSP ID: ENSP00000481619

SEQ ID NO: 10783 - protein, 2313 aa, Homo sapiens; identical to SEQ ID NO: 10780
  Payload ID: 2144;
  Gene Symbol: CACNA1E;
  Gene Name: calcium channel, voltage-dependent, R type, alpha 1E subunit;
  Uniprot ID:  Q15878;
  ENSP ID: ENSP00000483914

SEQ ID NO: 10784 - protein, 2250 aa, Homo sapiens
  Payload ID: 2145;
  Gene Symbol: CACNA1G;
  Gene Name: calcium channel, voltage-dependent, T type, alpha 1G subunit;
  Uniprot ID:  O43497;
  ENSP ID: ENSP00000339302
MDEEEDGAGAEESGQPRSFMRLNDLSGAGGRPGPGSAEKDPGSADSEAEGLPYPALAPVVFFYLSQDSRPRSWCLRTVCNPWFERISMLVILLNCVTLGMFRPCEDIACDSQRCRILQAFDDFIFAFFAVEMVVKMVALGIFGKKCYLGDTWNRLDFFIVIAGMLEYSLDLQNVSFSAVRTVRVLRPLRAINRVPSMRILVTLLLDTLPMLGNVLLLCFFVFFIFGIVGVQLWAGLLRNRCFLPENFSLPLSVDLERYYQTENEDESPFICSQPRENGMRSCRSVPTLRGDGGGGPPCGLDYEAYNSSSNTTCVNWNQYYTNCSAGEHNPFKGAINFDNIGYAWIAIFQVITLEGWVDIMYFVMDAHSFYNFIYFILLIIVGSFFMINLCLVVIATQFSETKQRESQLMREQRVRFLSNASTLASFSEPGSCYEELLKYLVYILRKAARRLAQVSRAAGVRVGLLSSPAPLGGQETQPSSSCSRSHRRLSVHHLVHHHHHHHHHYHLGNGTLRAPRASPEIQDRDANGSRRLMLPPPSTPALSGAPPGGAESVHSFYHADCHLEPVRCQAPPPRSPSEASGRTVGSGKVYPTVHTSPPPETLKEKALVEVAASSGPPTLTSLNIPPGPYSSMHKLLETQSTGACQSSCKISSPCLKADSGACGPDSCPYCARAGAGEVELADREMPDSDSEAVYEFTQDAQHSDLRDPHSRRQRSLGPDAEPSSVLAFWRLICDTFRKIVDSKYFGRGIMIAILVNTLSMGIEYHEQPEELTNALEISNIVFTSLFALEMLLKLLVYGPFGYIKNPYNIFDGVIVVISVWEIVGQQGGGLSVLRTFRLMRVLKLVRFLPALQRQLVVLMKTMDNVATFCMLLMLFIFIFSILGMHLFGCKFASERDGDTLPDRKNFDSLLWAIVTVFQILTQEDWNKVLYNGMASTSSWAALYFIALMTFGNYVLFNLLVAILVEGFQAEGDANKSESEPDFFSPSLDGDGDRKKCLALVSLGEHPELRKSLLPPLIIHTAATPMSLPKSTSTGLGEALGPASRRTSSSGSAEPGAAHEMKSPPSARSSPHSPWSAASSWTSRRSSRNSLGRAPSLKRRSPSGERRSLLSGEGQESQDEEESSEEERASPAGSDHRHRGSLEREAKSSFDLPDTLQVPGLHRTASGRGSASEHQDCNGKSASGRLARALRPDDPPLDGDDADDEGNLSKGERVRAWIRARLPACCLERDSWSAYIFPPQSRFRLLCHRIITHKMFDHVVLVIIFLNCITIAMERPKIDPHSAERIFLTLSNYIFTAVFLAEMTVKVVALGWCFGEQAYLRSSWNVLDGLLVLISVIDILVSMVSDSGTKILGMLRVLRLLRTLRPLRVISRAQGLKLVVETLMSSLKPIGNIVVICCAFFIIFGILGVQLFKGKFFVCQGEDTRNITNKSDCAEASYRWVRHKYNFDNLGQALMSLFVLASKDGWVDIMYDGLDAVGVDQQPIMNHNPWMLLYFISFLLIVAFFVLNMFVGVVVENFHKCRQHQEEEEARRREEKRLRRLEKKRRSKEKQMAEAQCKPYYSDYSRFRLLVHHLCTSHYLDLFITGVIGLNVVTMAMEHYQQPQILDEALKICNYIFTVIFVLESVFKLVAFGFRRFFQDRWNQLDLAIVLLSIMGITLEEIEVNASLPINPTIIRIMRVLRIARVLKLLKMAVGMRALLDTVMQALPQVGNLGLLFMLLFFIFAALGVELFGDLECDETHPCEGLGRHATFRNFGMAFLTLFRVSTGDNWNGIMKDTLRDCDQESTCYNTVISPIYFVSFVLTAQFVLVNVVIAVLMKHLEESNKEAKEEAELEAELELEMKTLSPQPHSPLGSPFLWPGVEGPDSPDSPKPGALHPAAHARSASHFSLEHPTMQPHPTELPGPDLLTVRKSGVSRTHSLPNDSYMCRHGSTAEGPLGHRGWGLPKAQSGSVLSVHSQPADTSYILQLPKDAPHLLQPHSAPTWGTIPKLPPPGRSPLAQRPLRRQAAIRTDSLDVQGLGSREDLLAEVSGPSPPLARAYSFWGQSSTQAQQHSRSHSKISKHMTPPAPCPGPEPNWGKGPPETRSSLELDTELSWISGDLLPPGGQEEPPSPRDLKKCYSVEAQSCQRRPTSWLDEQRRHSIAVSCLDSGSQPHLGTDPSNLGGQPLGGPGSRPKKKLSPPSITIDPPESQGPRTPPSPGICLRRRAPSSDSKDPLASGPPDSMAASPSPKKDVLSLSGLSSDPADLDP

SEQ ID NO: 10785 - protein, 2343 aa, Homo sapiens
  Payload ID: 2145;
  Gene Symbol: CACNA1G;
  Gene Name: calcium channel, voltage-dependent, T type, alpha 1G subunit;
  Uniprot ID:  O43497;
  ENSP ID: ENSP00000347078
MDEEEDGAGAEESGQPRSFMRLNDLSGAGGRPGPGSAEKDPGSADSEAEGLPYPALAPVVFFYLSQDSRPRSWCLRTVCNPWFERISMLVILLNCVTLGMFRPCEDIACDSQRCRILQAFDDFIFAFFAVEMVVKMVALGIFGKKCYLGDTWNRLDFFIVIAGMLEYSLDLQNVSFSAVRTVRVLRPLRAINRVPSMRILVTLLLDTLPMLGNVLLLCFFVFFIFGIVGVQLWAGLLRNRCFLPENFSLPLSVDLERYYQTENEDESPFICSQPRENGMRSCRSVPTLRGDGGGGPPCGLDYEAYNSSSNTTCVNWNQYYTNCSAGEHNPFKGAINFDNIGYAWIAIFQVITLEGWVDIMYFVMDAHSFYNFIYFILLIIVGSFFMINLCLVVIATQFSETKQRESQLMREQRVRFLSNASTLASFSEPGSCYEELLKYLVYILRKAARRLAQVSRAAGVRVGLLSSPAPLGGQETQPSSSCSRSHRRLSVHHLVHHHHHHHHHYHLGNGTLRAPRASPEIQDRDANGSRRLMLPPPSTPALSGAPPGGAESVHSFYHADCHLEPVRCQAPPPRSPSEASGRTVGSGKVYPTVHTSPPPETLKEKALVEVAASSGPPTLTSLNIPPGPYSSMHKLLETQSTGACQSSCKISSPCLKADSGACGPDSCPYCARAGAGEVELADREMPDSDSEAVYEFTQDAQHSDLRDPHSRRQRSLGPDAEPSSVLAFWRLICDTFRKIVDSKYFGRGIMIAILVNTLSMGIEYHEQPEELTNALEISNIVFTSLFALEMLLKLLVYGPFGYIKNPYNIFDGVIVVISVWEIVGQQGGGLSVLRTFRLMRVLKLVRFLPALQRQLVVLMKTMDNVATFCMLLMLFIFIFSILGMHLFGCKFASERDGDTLPDRKNFDSLLWAIVTVFQILTQEDWNKVLYNGMASTSSWAALYFIALMTFGNYVLFNLLVAILVEGFQAEGDANKSESEPDFFSPSLDGDGDRKKCLALVSLGEHPELRKSLLPPLIIHTAATPMSLPKSTSTGLGEALGPASRRTSSSGSAEPGAAHEMKSPPSARSSPHSPWSAASSWTSRRSSRNSLGRAPSLKRRSPSGERRSLLSGEGQESQDEEESSEEERASPAGSDHRHRGSLEREAKSSFDLPDTLQVPGLHRTASGRGSASEHQDCNGKSASGRLARALRPDDPPLDGDDADDEGNLSKGERVRAWIRARLPACCLERDSWSAYIFPPQSRFRLLCHRIITHKMFDHVVLVIIFLNCITIAMERPKIDPHSAERIFLTLSNYIFTAVFLAEMTVKVVALGWCFGEQAYLRSSWNVLDGLLVLISVIDILVSMVSDSGTKILGMLRVLRLLRTLRPLRVISRAQGLKLVVETLMSSLKPIGNIVVICCAFFIIFGILGVQLFKGKFFVCQGEDTRNITNKSDCAEASYRWVRHKYNFDNLGQALMSLFVLASKDGWVDIMYDGLDAVGVDQQPIMNHNPWMLLYFISFLLIVAFFVLNMFVGVVVENFHKCRQHQEEEEARRREEKRLRRLEKKRRSKEKQMAEAQCKPYYSDYSRFRLLVHHLCTSHYLDLFITGVIGLNVVTMAMEHYQQPQILDEALKICNYIFTVIFVLESVFKLVAFGFRRFFQDRWNQLDLAIVLLSIMGITLEEIEVNASLPINPTIIRIMRVLRIARVLKLLKMAVGMRALLDTVMQALPQVGNLGLLFMLLFFIFAALGVELFGDLECDETHPCEGLGRHATFRNFGMAFLTLFRVSTGDNWNGIMKDTLRDCDQESTCYNTVISPIYFVSFVLTAQFVLVNVVIAVLMKHLEESNKEAKEEAELEAELELEMKTLSPQPHSPLGSPFLWPGVEGPDSPDSPKPGALHPAAHARSASHFSLEHPTDRQLFDTISLLIQGSLEWELKLMDELAGPGGQPSAFPSAPSLGGSDPQIPLAEMEALSLTSEIVSEPSCSLALTDDSLPDDMHTLLLSALESNMQPHPTELPGPDLLTVRKSGVSRTHSLPNDSYMCRHGSTAEGPLGHRGWGLPKAQSGSVLSVHSQPADTSYILQLPKDAPHLLQPHSAPTWGTIPKLPPPGRSPLAQRPLRRQAAIRTDSLDVQGLGSREDLLAEVSGPSPPLARAYSFWGQSSTQAQQHSRSHSKISKHMTPPAPCPGPEPNWGKGPPETRSSLELDTELSWISGDLLPPGGQEEPPSPRDLKKCYSVEAQSCQRRPTSWLDEQRRHSIAVSCLDSGSQPHLGTDPSNLGGQPLGGPGSRPKKKLSPPSITIDPPESQGPRTPPSPGICLRRRAPSSDSKDPLASGPPDSMAASPSPKKDVLSLSGLSSDPADLDP

SEQ ID NO: 10786 - protein, 2171 aa, Homo sapiens
  Payload ID: 2145;
  Gene Symbol: CACNA1G;
  Gene Name: calcium channel, voltage-dependent, T type, alpha 1G subunit;
  Uniprot ID:  O43497;
  ENSP ID: ENSP00000350979
MDEEEDGAGAEESGQPRSFMRLNDLSGAGGRPGPGSAEKDPGSADSEAEGLPYPALAPVVFFYLSQDSRPRSWCLRTVCNPWFERISMLVILLNCVTLGMFRPCEDIACDSQRCRILQAFDDFIFAFFAVEMVVKMVALGIFGKKCYLGDTWNRLDFFIVIAGMLEYSLDLQNVSFSAVRTVRVLRPLRAINRVPSMRILVTLLLDTLPMLGNVLLLCFFVFFIFGIVGVQLWAGLLRNRCFLPENFSLPLSVDLERYYQTENEDESPFICSQPRENGMRSCRSVPTLRGDGGGGPPCGLDYEAYNSSSNTTCVNWNQYYTNCSAGEHNPFKGAINFDNIGYAWIAIFQVITLEGWVDIMYFVMDAHSFYNFIYFILLIIVGSFFMINLCLVVIATQFSETKQRESQLMREQRVRFLSNASTLASFSEPGSCYEELLKYLVYILRKAARRLAQVSRAAGVRVGLLSSPAPLGGQETQPSSSCSRSHRRLSVHHLVHHHHHHHHHYHLGNGTLRAPRASPEIQDRDANGSRRLMLPPPSTPALSGAPPGGAESVHSFYHADCHLEPVRCQAPPPRSPSEASGRTVGSGKVYPTVHTSPPPETLKEKALVEVAASSGPPTLTSLNIPPGPYSSMHKLLETQSTGACQSSCKISSPCLKADSGACGPDSCPYCARAGAGEVELADREMPDSDSEAVYEFTQDAQHSDLRDPHSRRQRSLGPDAEPSSVLAFWRLICDTFRKIVDSKYFGRGIMIAILVNTLSMGIEYHEQPEELTNALEISNIVFTSLFALEMLLKLLVYGPFGYIKNPYNIFDGVIVVISVWEIVGQQGGGLSVLRTFRLMRVLKLVRFLPALQRQLVVLMKTMDNVATFCMLLMLFIFIFSILGMHLFGCKFASERDGDTLPDRKNFDSLLWAIVTVFQILTQEDWNKVLYNGMASTSSWAALYFIALMTFGNYVLFNLLVAILVEGFQAEGDANKSESEPDFFSPSLDGDGDRKKCLALVSLGEHPELRKSLLPPLIIHTAATPMSLPKSTSTGLGEALGPASRRTSSSGSAEPGAAHEMKSPPSARSSPHSPWSAASSWTSRRSSRNSLGRAPSLKRRSPSGERRSLLSGEGQESQDEEESSEEERASPAGSDHRHRGSLEREAKSSFDLPDTLQVPGLHRTASGRGSASEHQDCNGKSASGRLARALRPDDPPLDGDDADDEGNLSKGERVRAWIRARLPACCLERDSWSAYIFPPQSRFRLLCHRIITHKMFDHVVLVIIFLNCITIAMERPKIDPHSAERIFLTLSNYIFTAVFLAEMTVKVVALGWCFGEQAYLRSSWNVLDGLLVLISVIDILVSMVSDSGTKILGMLRVLRLLRTLRPLRVISRAQGLKLVVETLMSSLKPIGNIVVICCAFFIIFGILGVQLFKGKFFVCQGEDTRNITNKSDCAEASYRWVRHKYNFDNLGQALMSLFVLASKDGWVDIMYDGLDAVGVDQQPIMNHNPWMLLYFISFLLIVAFFVLNMFVGVVVENFHKCRQHQEEEEARRREEKRLRRLEKKRRSKEKQMAEAQCKPYYSDYSRFRLLVHHLCTSHYLDLFITGVIGLNVVTMAMEHYQQPQILDEALKICNYIFTVIFVLESVFKLVAFGFRRFFQDRWNQLDLAIVLLSIMGITLEEIEVNASLPINPTIIRIMRVLRIARVLKLLKMAVGMRALLDTVMQALPQVGNLGLLFMLLFFIFAALGVELFGDLECDETHPCEGLGRHATFRNFGMAFLTLFRVSTGDNWNGIMKDTLRDCDQESTCYNTVISPIYFVSFVLTAQFVLVNVVIAVLMKHLEESNKEAKEEAELEAELELEMKTLSPQPHSPLGSPFLWPGVEGPDSPDSPKPGALHPAAHARSASHFSLEHPTMQPHPTELPGPDLLTVRKSGVSRTHSLPNDSYMCRHGSTAEGPLGHRGWGLPKAQSGSVLSVHSQPADTSYILQLPKDAPHLLQPHSAPTWGTIPKLPPPGRSPLAQRPLRRQAAIRTDSLDVQGLGSREDLLAEEEPPSPRDLKKCYSVEAQSCQRRPTSWLDEQRRHSIAVSCLDSGSQPHLGTDPSNLGGQPLGGPGSRPKKKLSPPSITIDPPESQGPRTPPSPGICLRRRAPSSDSKDPLASGPPDSMAASPSPKKDVLSLSGLSSDPADLDP

SEQ ID NO: 10787 - protein, 2377 aa, Homo sapiens
  Payload ID: 2145;
  Gene Symbol: CACNA1G;
  Gene Name: calcium channel, voltage-dependent, T type, alpha 1G subunit;
  Uniprot ID:  O43497;
  ENSP ID: ENSP00000352011
MDEEEDGAGAEESGQPRSFMRLNDLSGAGGRPGPGSAEKDPGSADSEAEGLPYPALAPVVFFYLSQDSRPRSWCLRTVCNPWFERISMLVILLNCVTLGMFRPCEDIACDSQRCRILQAFDDFIFAFFAVEMVVKMVALGIFGKKCYLGDTWNRLDFFIVIAGMLEYSLDLQNVSFSAVRTVRVLRPLRAINRVPSMRILVTLLLDTLPMLGNVLLLCFFVFFIFGIVGVQLWAGLLRNRCFLPENFSLPLSVDLERYYQTENEDESPFICSQPRENGMRSCRSVPTLRGDGGGGPPCGLDYEAYNSSSNTTCVNWNQYYTNCSAGEHNPFKGAINFDNIGYAWIAIFQVITLEGWVDIMYFVMDAHSFYNFIYFILLIIVGSFFMINLCLVVIATQFSETKQRESQLMREQRVRFLSNASTLASFSEPGSCYEELLKYLVYILRKAARRLAQVSRAAGVRVGLLSSPAPLGGQETQPSSSCSRSHRRLSVHHLVHHHHHHHHHYHLGNGTLRAPRASPEIQDRDANGSRRLMLPPPSTPALSGAPPGGAESVHSFYHADCHLEPVRCQAPPPRSPSEASGRTVGSGKVYPTVHTSPPPETLKEKALVEVAASSGPPTLTSLNIPPGPYSSMHKLLETQSTGACQSSCKISSPCLKADSGACGPDSCPYCARAGAGEVELADREMPDSDSEAVYEFTQDAQHSDLRDPHSRRQRSLGPDAEPSSVLAFWRLICDTFRKIVDSKYFGRGIMIAILVNTLSMGIEYHEQPEELTNALEISNIVFTSLFALEMLLKLLVYGPFGYIKNPYNIFDGVIVVISVWEIVGQQGGGLSVLRTFRLMRVLKLVRFLPALQRQLVVLMKTMDNVATFCMLLMLFIFIFSILGMHLFGCKFASERDGDTLPDRKNFDSLLWAIVTVFQILTQEDWNKVLYNGMASTSSWAALYFIALMTFGNYVLFNLLVAILVEGFQAEEISKREDASGQLSCIQLPVDSQGGDANKSESEPDFFSPSLDGDGDRKKCLALVSLGEHPELRKSLLPPLIIHTAATPMSLPKSTSTGLGEALGPASRRTSSSGSAEPGAAHEMKSPPSARSSPHSPWSAASSWTSRRSSRNSLGRAPSLKRRSPSGERRSLLSGEGQESQDEEESSEEERASPAGSDHRHRGSLEREAKSSFDLPDTLQVPGLHRTASGRGSASEHQDCNGKSASGRLARALRPDDPPLDGDDADDEGNLSKGERVRAWIRARLPACCLERDSWSAYIFPPQSRFRLLCHRIITHKMFDHVVLVIIFLNCITIAMERPKIDPHSAERIFLTLSNYIFTAVFLAEMTVKVVALGWCFGEQAYLRSSWNVLDGLLVLISVIDILVSMVSDSGTKILGMLRVLRLLRTLRPLRVISRAQGLKLVVETLMSSLKPIGNIVVICCAFFIIFGILGVQLFKGKFFVCQGEDTRNITNKSDCAEASYRWVRHKYNFDNLGQALMSLFVLASKDGWVDIMYDGLDAVGVDQQPIMNHNPWMLLYFISFLLIVAFFVLNMFVGVVVENFHKCRQHQEEEEARRREEKRLRRLEKKRRNLMLDDVIASGSSASAASEAQCKPYYSDYSRFRLLVHHLCTSHYLDLFITGVIGLNVVTMAMEHYQQPQILDEALKICNYIFTVIFVLESVFKLVAFGFRRFFQDRWNQLDLAIVLLSIMGITLEEIEVNASLPINPTIIRIMRVLRIARVLKLLKMAVGMRALLDTVMQALPQVGNLGLLFMLLFFIFAALGVELFGDLECDETHPCEGLGRHATFRNFGMAFLTLFRVSTGDNWNGIMKDTLRDCDQESTCYNTVISPIYFVSFVLTAQFVLVNVVIAVLMKHLEESNKEAKEEAELEAELELEMKTLSPQPHSPLGSPFLWPGVEGPDSPDSPKPGALHPAAHARSASHFSLEHPTDRQLFDTISLLIQGSLEWELKLMDELAGPGGQPSAFPSAPSLGGSDPQIPLAEMEALSLTSEIVSEPSCSLALTDDSLPDDMHTLLLSALESNMQPHPTELPGPDLLTVRKSGVSRTHSLPNDSYMCRHGSTAEGPLGHRGWGLPKAQSGSVLSVHSQPADTSYILQLPKDAPHLLQPHSAPTWGTIPKLPPPGRSPLAQRPLRRQAAIRTDSLDVQGLGSREDLLAEVSGPSPPLARAYSFWGQSSTQAQQHSRSHSKISKHMTPPAPCPGPEPNWGKGPPETRSSLELDTELSWISGDLLPPGGQEEPPSPRDLKKCYSVEAQSCQRRPTSWLDEQRRHSIAVSCLDSGSQPHLGTDPSNLGGQPLGGPGSRPKKKLSPPSITIDPPESQGPRTPPSPGICLRRRAPSSDSKDPLASGPPDSMAASPSPKKDVLSLSGLSSDPADLDP

SEQ ID NO: 10788 - protein, 2261 aa, Homo sapiens
  Payload ID: 2145;
  Gene Symbol: CACNA1G;
  Gene Name: calcium channel, voltage-dependent, T type, alpha 1G subunit;
  Uniprot ID:  O43497;
  ENSP ID: ENSP00000353990
MDEEEDGAGAEESGQPRSFMRLNDLSGAGGRPGPGSAEKDPGSADSEAEGLPYPALAPVVFFYLSQDSRPRSWCLRTVCNPWFERISMLVILLNCVTLGMFRPCEDIACDSQRCRILQAFDDFIFAFFAVEMVVKMVALGIFGKKCYLGDTWNRLDFFIVIAGMLEYSLDLQNVSFSAVRTVRVLRPLRAINRVPSMRILVTLLLDTLPMLGNVLLLCFFVFFIFGIVGVQLWAGLLRNRCFLPENFSLPLSVDLERYYQTENEDESPFICSQPRENGMRSCRSVPTLRGDGGGGPPCGLDYEAYNSSSNTTCVNWNQYYTNCSAGEHNPFKGAINFDNIGYAWIAIFQVITLEGWVDIMYFVMDAHSFYNFIYFILLIIVGSFFMINLCLVVIATQFSETKQRESQLMREQRVRFLSNASTLASFSEPGSCYEELLKYLVYILRKAARRLAQVSRAAGVRVGLLSSPAPLGGQETQPSSSCSRSHRRLSVHHLVHHHHHHHHHYHLGNGTLRAPRASPEIQDRDANGSRRLMLPPPSTPALSGAPPGGAESVHSFYHADCHLEPVRCQAPPPRSPSEASGRTVGSGKVYPTVHTSPPPETLKEKALVEVAASSGPPTLTSLNIPPGPYSSMHKLLETQSTGACQSSCKISSPCLKADSGACGPDSCPYCARAGAGEVELADREMPDSDSEAVYEFTQDAQHSDLRDPHSRRQRSLGPDAEPSSVLAFWRLICDTFRKIVDSKYFGRGIMIAILVNTLSMGIEYHEQPEELTNALEISNIVFTSLFALEMLLKLLVYGPFGYIKNPYNIFDGVIVVISVWEIVGQQGGGLSVLRTFRLMRVLKLVRFLPALQRQLVVLMKTMDNVATFCMLLMLFIFIFSILGMHLFGCKFASERDGDTLPDRKNFDSLLWAIVTVFQILTQEDWNKVLYNGMASTSSWAALYFIALMTFGNYVLFNLLVAILVEGFQAEGDANKSESEPDFFSPSLDGDGDRKKCLALVSLGEHPELRKSLLPPLIIHTAATPMSLPKSTSTGLGEALGPASRRTSSSGSAEPGAAHEMKSPPSARSSPHSPWSAASSWTSRRSSRNSLGRAPSLKRRSPSGERRSLLSGEGQESQDEEESSEEERASPAGSDHRHRGSLEREAKSSFDLPDTLQVPGLHRTASGRGSASEHQDCNGKSASGRLARALRPDDPPLDGDDADDEGNLSKGERVRAWIRARLPACCLERDSWSAYIFPPQSRFRLLCHRIITHKMFDHVVLVIIFLNCITIAMERPKIDPHSAERIFLTLSNYIFTAVFLAEMTVKVVALGWCFGEQAYLRSSWNVLDGLLVLISVIDILVSMVSDSGTKILGMLRVLRLLRTLRPLRVISRAQGLKLVVETLMSSLKPIGNIVVICCAFFIIFGILGVQLFKGKFFVCQGEDTRNITNKSDCAEASYRWVRHKYNFDNLGQALMSLFVLASKDGWVDIMYDGLDAVGVDQQPIMNHNPWMLLYFISFLLIVAFFVLNMFVGVVVENFHKCRQHQEEEEARRREEKRLRRLEKKRRNLMLDDVIASGSSASAASEAQCKPYYSDYSRFRLLVHHLCTSHYLDLFITGVIGLNVVTMAMEHYQQPQILDEALKICNYIFTVIFVLESVFKLVAFGFRRFFQDRWNQLDLAIVLLSIMGITLEEIEVNASLPINPTIIRIMRVLRIARVLKLLKMAVGMRALLDTVMQALPQVGNLGLLFMLLFFIFAALGVELFGDLECDETHPCEGLGRHATFRNFGMAFLTLFRVSTGDNWNGIMKDTLRDCDQESTCYNTVISPIYFVSFVLTAQFVLVNVVIAVLMKHLEESNKEAKEEAELEAELELEMKTLSPQPHSPLGSPFLWPGVEGPDSPDSPKPGALHPAAHARSASHFSLEHPTMQPHPTELPGPDLLTVRKSGVSRTHSLPNDSYMCRHGSTAEGPLGHRGWGLPKAQSGSVLSVHSQPADTSYILQLPKDAPHLLQPHSAPTWGTIPKLPPPGRSPLAQRPLRRQAAIRTDSLDVQGLGSREDLLAEVSGPSPPLARAYSFWGQSSTQAQQHSRSHSKISKHMTPPAPCPGPEPNWGKGPPETRSSLELDTELSWISGDLLPPGGQEEPPSPRDLKKCYSVEAQSCQRRPTSWLDEQRRHSIAVSCLDSGSQPHLGTDPSNLGGQPLGGPGSRPKKKLSPPSITIDPPESQGPRTPPSPGICLRRRAPSSDSKDPLASGPPDSMAASPSPKKDVLSLSGLSSDPADLDP

SEQ ID NO: 10789 - protein, 1555 aa, Homo sapiens
  Payload ID: 2145;
  Gene Symbol: CACNA1G;
  Gene Name: calcium channel, voltage-dependent, T type, alpha 1G subunit;
  ENSP ID: ENSP00000392390
MDEEEDGAGAEESGQPRSFMRLNDLSGAGGRPGPGSAEKDPGSADSEAEGLPYPALAPVVFFYLSQDSRPRSWCLRTVCNPWFERISMLVILLNCVTLGMFRPCEDIACDSQRCRILQAFDDFIFAFFAVEMVVKMVALGIFGKKCYLGDTWNRLDFFIVIAGMLEYSLDLQNVSFSAVRTVRVLRPLRAINRVPSMRILVTLLLDTLPMLGNVLLLCFFVFFIFGIVGVQLWAGLLRNRCFLPENFSLPLSVDLERYYQTENEDESPFICSQPRENGMRSCRSVPTLRGDGGGGPPCGLDYEAYNSSSNTTCVNWNQYYTNCSAGEHNPFKGAINFDNIGYAWIAIFQVITLEGWVDIMYFVMDAHSFYNFIYFILLIIVGSFFMINLCLVVIATQFSETKQRESQLMREQRVRFLSNASTLASFSEPGSCYEELLKYLVYILRKAARRLAQVSRAAGVRVGLLSSPAPLGGQETQPSSSCSRSHRRLSVHHLVHHHHHHHHHYHLGNGTLRAPRASPEIQDRDANGSRRLMLPPPSTPALSGAPPGGAESVHSFYHADCHLEPVRCQAPPPRSPSEASGRTVGSGKVYPTVHTSPPPETLKEKALVEVAASSGPPTLTSLNIPPGPYSSMHKLLETQSTGACQSSCKISSPCLKADSGACGPDSCPYCARAGAGEVELADREMPDSDSEAVYEFTQDAQHSDLRDPHSRRQRSLGPDAEPSSVLAFWRLICDTFRKIVDSKYFGRGIMIAILVNTLSMGIEYHEQPEELTNALEISNIVFTSLFALEMLLKLLVYGPFGYIKNPYNIFDGVIVVISVWEIVGQQGGGLSVLRTFRLMRVLKLVRFLPALQRQLVVLMKTMDNVATFCMLLMLFIFIFSILGMHLFGCKFASERDGDTLPDRKNFDSLLWAIVTVFQILTQEDWNKVLYNGMASTSSWAALYFIALMTFGNYVLFNLLVAILVEGFQAEEISKREDASGQLSCIQLPVDSQGGDANKSESEPDFFSPSLDGDGDRKKCLALVSLGEHPELRKSLLPPLIIHTAATPMSLPKSTSTGLGEALGPASRRTSSSGSAEPGAAHEMKSPPSARSSPHSPWSAASSWTSRRSSRNSLGRAPSLKRRSPSGERRSLLSGEGQESQDEEESSEEERASPAGSDHRHRGSLEREAKSSFDLPDTLQVPGLHRTASGRGSASEHQDCNGKSASGRLARALRPDDPPLDGDDADDEGNLSKGERVRAWIRARLPACCLERDSWSAYIFPPQSRFRLLCHRIITHKMFDHVVLVIIFLNCITIAMERPKIDPHSAERIFLTLSNYIFTAVFLAEMTVKVVALGWCFGEQAYLRSSWNVLDGLLVLISVIDILVSMVSDSGTKILGMLRVLRLLRTLRPLRVISRAQGLKLVVETLMSSLKPIGNIVVICCAFFIIFGILGVQLFKGKFFVCQGEDTRNITNKSDCAEASYRWVRHKYNFDNLGQVSPRLRGGAVVKEAGGGTGPCLVIPADSGGGGLHEEISPSHPLLSNHQHVAKPSPSHSAPKSGPMGSLAVLKDEETEAQRG

SEQ ID NO: 10790 - protein, 2243 aa, Homo sapiens
  Payload ID: 2145;
  Gene Symbol: CACNA1G;
  Gene Name: calcium channel, voltage-dependent, T type, alpha 1G subunit;
  Uniprot ID:  O43497;
  ENSP ID: ENSP00000409759
MDEEEDGAGAEESGQPRSFMRLNDLSGAGGRPGPGSAEKDPGSADSEAEGLPYPALAPVVFFYLSQDSRPRSWCLRTVCNPWFERISMLVILLNCVTLGMFRPCEDIACDSQRCRILQAFDDFIFAFFAVEMVVKMVALGIFGKKCYLGDTWNRLDFFIVIAGMLEYSLDLQNVSFSAVRTVRVLRPLRAINRVPSMRILVTLLLDTLPMLGNVLLLCFFVFFIFGIVGVQLWAGLLRNRCFLPENFSLPLSVDLERYYQTENEDESPFICSQPRENGMRSCRSVPTLRGDGGGGPPCGLDYEAYNSSSNTTCVNWNQYYTNCSAGEHNPFKGAINFDNIGYAWIAIFQVITLEGWVDIMYFVMDAHSFYNFIYFILLIIVGSFFMINLCLVVIATQFSETKQRESQLMREQRVRFLSNASTLASFSEPGSCYEELLKYLVYILRKAARRLAQVSRAAGVRVGLLSSPAPLGGQETQPSSSCSRSHRRLSVHHLVHHHHHHHHHYHLGNGTLRAPRASPEIQDRDANGSRRLMLPPPSTPALSGAPPGGAESVHSFYHADCHLEPVRCQAPPPRSPSEASGRTVGSGKVYPTVHTSPPPETLKEKALVEVAASSGPPTLTSLNIPPGPYSSMHKLLETQSTGACQSSCKISSPCLKADSGACGPDSCPYCARAGAGEVELADREMPDSDSEAVYEFTQDAQHSDLRDPHSRRQRSLGPDAEPSSVLAFWRLICDTFRKIVDSKYFGRGIMIAILVNTLSMGIEYHEQPEELTNALEISNIVFTSLFALEMLLKLLVYGPFGYIKNPYNIFDGVIVVISVWEIVGQQGGGLSVLRTFRLMRVLKLVRFLPALQRQLVVLMKTMDNVATFCMLLMLFIFIFSILGMHLFGCKFASERDGDTLPDRKNFDSLLWAIVTVFQILTQEDWNKVLYNGMASTSSWAALYFIALMTFGNYVLFNLLVAILVEGFQAEGDANKSESEPDFFSPSLDGDGDRKKCLALVSLGEHPELRKSLLPPLIIHTAATPMSLPKSTSTGLGEALGPASRRTSSSGSAEPGAAHEMKSPPSARSSPHSPWSAASSWTSRRSSRNSLGRAPSLKRRSPSGERRSLLSGEGQESQDEEESSEEERASPAGSDHRHRGSLEREAKSSFDLPDTLQVPGLHRTASGRGSASEHQDCNGKSASGRLARALRPDDPPLDGDDADDEGNLSKGERVRAWIRARLPACCLERDSWSAYIFPPQSRFRLLCHRIITHKMFDHVVLVIIFLNCITIAMERPKIDPHSAERIFLTLSNYIFTAVFLAEMTVKVVALGWCFGEQAYLRSSWNVLDGLLVLISVIDILVSMVSDSGTKILGMLRVLRLLRTLRPLRVISRAQGLKLVVETLMSSLKPIGNIVVICCAFFIIFGILGVQLFKGKFFVCQGEDTRNITNKSDCAEASYRWVRHKYNFDNLGQALMSLFVLASKDGWVDIMYDGLDAVGVDQQPIMNHNPWMLLYFISFLLIVAFFVLNMFVGVVVENFHKCRQHQEEEEARRREEKRLRRLEKKRRKAQCKPYYSDYSRFRLLVHHLCTSHYLDLFITGVIGLNVVTMAMEHYQQPQILDEALKICNYIFTVIFVLESVFKLVAFGFRRFFQDRWNQLDLAIVLLSIMGITLEEIEVNASLPINPTIIRIMRVLRIARVLKLLKMAVGMRALLDTVMQALPQVGNLGLLFMLLFFIFAALGVELFGDLECDETHPCEGLGRHATFRNFGMAFLTLFRVSTGDNWNGIMKDTLRDCDQESTCYNTVISPIYFVSFVLTAQFVLVNVVIAVLMKHLEESNKEAKEEAELEAELELEMKTLSPQPHSPLGSPFLWPGVEGPDSPDSPKPGALHPAAHARSASHFSLEHPTMQPHPTELPGPDLLTVRKSGVSRTHSLPNDSYMCRHGSTAEGPLGHRGWGLPKAQSGSVLSVHSQPADTSYILQLPKDAPHLLQPHSAPTWGTIPKLPPPGRSPLAQRPLRRQAAIRTDSLDVQGLGSREDLLAEVSGPSPPLARAYSFWGQSSTQAQQHSRSHSKISKHMTPPAPCPGPEPNWGKGPPETRSSLELDTELSWISGDLLPPGGQEEPPSPRDLKKCYSVEAQSCQRRPTSWLDEQRRHSIAVSCLDSGSQPHLGTDPSNLGGQPLGGPGSRPKKKLSPPSITIDPPESQGPRTPPSPGICLRRRAPSSDSKDPLASGPPDSMAASPSPKKDVLSLSGLSSDPADLDP

SEQ ID NO: 10791 - protein, 2266 aa, Homo sapiens
  Payload ID: 2145;
  Gene Symbol: CACNA1G;
  Gene Name: calcium channel, voltage-dependent, T type, alpha 1G subunit;
  Uniprot ID:  O43497;
  ENSP ID: ENSP00000414388
MDEEEDGAGAEESGQPRSFMRLNDLSGAGGRPGPGSAEKDPGSADSEAEGLPYPALAPVVFFYLSQDSRPRSWCLRTVCNPWFERISMLVILLNCVTLGMFRPCEDIACDSQRCRILQAFDDFIFAFFAVEMVVKMVALGIFGKKCYLGDTWNRLDFFIVIAGMLEYSLDLQNVSFSAVRTVRVLRPLRAINRVPSMRILVTLLLDTLPMLGNVLLLCFFVFFIFGIVGVQLWAGLLRNRCFLPENFSLPLSVDLERYYQTENEDESPFICSQPRENGMRSCRSVPTLRGDGGGGPPCGLDYEAYNSSSNTTCVNWNQYYTNCSAGEHNPFKGAINFDNIGYAWIAIFQVITLEGWVDIMYFVMDAHSFYNFIYFILLIIVGSFFMINLCLVVIATQFSETKQRESQLMREQRVRFLSNASTLASFSEPGSCYEELLKYLVYILRKAARRLAQVSRAAGVRVGLLSSPAPLGGQETQPSSSCSRSHRRLSVHHLVHHHHHHHHHYHLGNGTLRAPRASPEIQDRDANGSRRLMLPPPSTPALSGAPPGGAESVHSFYHADCHLEPVRCQAPPPRSPSEASGRTVGSGKVYPTVHTSPPPETLKEKALVEVAASSGPPTLTSLNIPPGPYSSMHKLLETQSTGACQSSCKISSPCLKADSGACGPDSCPYCARAGAGEVELADREMPDSDSEAVYEFTQDAQHSDLRDPHSRRQRSLGPDAEPSSVLAFWRLICDTFRKIVDSKYFGRGIMIAILVNTLSMGIEYHEQPEELTNALEISNIVFTSLFALEMLLKLLVYGPFGYIKNPYNIFDGVIVVISVWEIVGQQGGGLSVLRTFRLMRVLKLVRFLPALQRQLVVLMKTMDNVATFCMLLMLFIFIFSILGMHLFGCKFASERDGDTLPDRKNFDSLLWAIVTVFQILTQEDWNKVLYNGMASTSSWAALYFIALMTFGNYVLFNLLVAILVEGFQAEEISKREDASGQLSCIQLPVDSQGGDANKSESEPDFFSPSLDGDGDRKKCLALVSLGEHPELRKSLLPPLIIHTAATPMSLPKSTSTGLGEALGPASRRTSSSGSAEPGAAHEMKSPPSARSSPHSPWSAASSWTSRRSSRNSLGRAPSLKRRSPSGERRSLLSGEGQESQDEEESSEEERASPAGSDHRHRGSLEREAKSSFDLPDTLQVPGLHRTASGRGSASEHQDCNGKSASGRLARALRPDDPPLDGDDADDEGNLSKGERVRAWIRARLPACCLERDSWSAYIFPPQSRFRLLCHRIITHKMFDHVVLVIIFLNCITIAMERPKIDPHSAERIFLTLSNYIFTAVFLAEMTVKVVALGWCFGEQAYLRSSWNVLDGLLVLISVIDILVSMVSDSGTKILGMLRVLRLLRTLRPLRVISRAQGLKLVVETLMSSLKPIGNIVVICCAFFIIFGILGVQLFKGKFFVCQGEDTRNITNKSDCAEASYRWVRHKYNFDNLGQALMSLFVLASKDGWVDIMYDGLDAVGVDQQPIMNHNPWMLLYFISFLLIVAFFVLNMFVGVVVENFHKCRQHQEEEEARRREEKRLRRLEKKRRKAQCKPYYSDYSRFRLLVHHLCTSHYLDLFITGVIGLNVVTMAMEHYQQPQILDEALKICNYIFTVIFVLESVFKLVAFGFRRFFQDRWNQLDLAIVLLSIMGITLEEIEVNASLPINPTIIRIMRVLRIARVLKLLKMAVGMRALLDTVMQALPQVGNLGLLFMLLFFIFAALGVELFGDLECDETHPCEGLGRHATFRNFGMAFLTLFRVSTGDNWNGIMKDTLRDCDQESTCYNTVISPIYFVSFVLTAQFVLVNVVIAVLMKHLEESNKEAKEEAELEAELELEMKTLSPQPHSPLGSPFLWPGVEGPDSPDSPKPGALHPAAHARSASHFSLEHPTMQPHPTELPGPDLLTVRKSGVSRTHSLPNDSYMCRHGSTAEGPLGHRGWGLPKAQSGSVLSVHSQPADTSYILQLPKDAPHLLQPHSAPTWGTIPKLPPPGRSPLAQRPLRRQAAIRTDSLDVQGLGSREDLLAEVSGPSPPLARAYSFWGQSSTQAQQHSRSHSKISKHMTPPAPCPGPEPNWGKGPPETRSSLELDTELSWISGDLLPPGGQEEPPSPRDLKKCYSVEAQSCQRRPTSWLDEQRRHSIAVSCLDSGSQPHLGTDPSNLGGQPLGGPGSRPKKKLSPPSITIDPPESQGPRTPPSPGICLRRRAPSSDSKDPLASGPPDSMAASPSPKKDVLSLSGLSSDPADLDP

SEQ ID NO: 10792 - protein, 2366 aa, Homo sapiens
  Payload ID: 2145;
  Gene Symbol: CACNA1G;
  Gene Name: calcium channel, voltage-dependent, T type, alpha 1G subunit;
  Uniprot ID:  O43497;
  ENSP ID: ENSP00000420918
MDEEEDGAGAEESGQPRSFMRLNDLSGAGGRPGPGSAEKDPGSADSEAEGLPYPALAPVVFFYLSQDSRPRSWCLRTVCNPWFERISMLVILLNCVTLGMFRPCEDIACDSQRCRILQAFDDFIFAFFAVEMVVKMVALGIFGKKCYLGDTWNRLDFFIVIAGMLEYSLDLQNVSFSAVRTVRVLRPLRAINRVPSMRILVTLLLDTLPMLGNVLLLCFFVFFIFGIVGVQLWAGLLRNRCFLPENFSLPLSVDLERYYQTENEDESPFICSQPRENGMRSCRSVPTLRGDGGGGPPCGLDYEAYNSSSNTTCVNWNQYYTNCSAGEHNPFKGAINFDNIGYAWIAIFQVITLEGWVDIMYFVMDAHSFYNFIYFILLIIVGSFFMINLCLVVIATQFSETKQRESQLMREQRVRFLSNASTLASFSEPGSCYEELLKYLVYILRKAARRLAQVSRAAGVRVGLLSSPAPLGGQETQPSSSCSRSHRRLSVHHLVHHHHHHHHHYHLGNGTLRAPRASPEIQDRDANGSRRLMLPPPSTPALSGAPPGGAESVHSFYHADCHLEPVRCQAPPPRSPSEASGRTVGSGKVYPTVHTSPPPETLKEKALVEVAASSGPPTLTSLNIPPGPYSSMHKLLETQSTGACQSSCKISSPCLKADSGACGPDSCPYCARAGAGEVELADREMPDSDSEAVYEFTQDAQHSDLRDPHSRRQRSLGPDAEPSSVLAFWRLICDTFRKIVDSKYFGRGIMIAILVNTLSMGIEYHEQPEELTNALEISNIVFTSLFALEMLLKLLVYGPFGYIKNPYNIFDGVIVVISVWEIVGQQGGGLSVLRTFRLMRVLKLVRFLPALQRQLVVLMKTMDNVATFCMLLMLFIFIFSILGMHLFGCKFASERDGDTLPDRKNFDSLLWAIVTVFQILTQEDWNKVLYNGMASTSSWAALYFIALMTFGNYVLFNLLVAILVEGFQAEEISKREDASGQLSCIQLPVDSQGGDANKSESEPDFFSPSLDGDGDRKKCLALVSLGEHPELRKSLLPPLIIHTAATPMSLPKSTSTGLGEALGPASRRTSSSGSAEPGAAHEMKSPPSARSSPHSPWSAASSWTSRRSSRNSLGRAPSLKRRSPSGERRSLLSGEGQESQDEEESSEEERASPAGSDHRHRGSLEREAKSSFDLPDTLQVPGLHRTASGRGSASEHQDCNGKSASGRLARALRPDDPPLDGDDADDEGNLSKGERVRAWIRARLPACCLERDSWSAYIFPPQSRFRLLCHRIITHKMFDHVVLVIIFLNCITIAMERPKIDPHSAERIFLTLSNYIFTAVFLAEMTVKVVALGWCFGEQAYLRSSWNVLDGLLVLISVIDILVSMVSDSGTKILGMLRVLRLLRTLRPLRVISRAQGLKLVVETLMSSLKPIGNIVVICCAFFIIFGILGVQLFKGKFFVCQGEDTRNITNKSDCAEASYRWVRHKYNFDNLGQALMSLFVLASKDGWVDIMYDGLDAVGVDQQPIMNHNPWMLLYFISFLLIVAFFVLNMFVGVVVENFHKCRQHQEEEEARRREEKRLRRLEKKRRSKEKQMAEAQCKPYYSDYSRFRLLVHHLCTSHYLDLFITGVIGLNVVTMAMEHYQQPQILDEALKICNYIFTVIFVLESVFKLVAFGFRRFFQDRWNQLDLAIVLLSIMGITLEEIEVNASLPINPTIIRIMRVLRIARVLKLLKMAVGMRALLDTVMQALPQVGNLGLLFMLLFFIFAALGVELFGDLECDETHPCEGLGRHATFRNFGMAFLTLFRVSTGDNWNGIMKDTLRDCDQESTCYNTVISPIYFVSFVLTAQFVLVNVVIAVLMKHLEESNKEAKEEAELEAELELEMKTLSPQPHSPLGSPFLWPGVEGPDSPDSPKPGALHPAAHARSASHFSLEHPTDRQLFDTISLLIQGSLEWELKLMDELAGPGGQPSAFPSAPSLGGSDPQIPLAEMEALSLTSEIVSEPSCSLALTDDSLPDDMHTLLLSALESNMQPHPTELPGPDLLTVRKSGVSRTHSLPNDSYMCRHGSTAEGPLGHRGWGLPKAQSGSVLSVHSQPADTSYILQLPKDAPHLLQPHSAPTWGTIPKLPPPGRSPLAQRPLRRQAAIRTDSLDVQGLGSREDLLAEVSGPSPPLARAYSFWGQSSTQAQQHSRSHSKISKHMTPPAPCPGPEPNWGKGPPETRSSLELDTELSWISGDLLPPGGQEEPPSPRDLKKCYSVEAQSCQRRPTSWLDEQRRHSIAVSCLDSGSQPHLGTDPSNLGGQPLGGPGSRPKKKLSPPSITIDPPESQGPRTPPSPGICLRRRAPSSDSKDPLASGPPDSMAASPSPKKDVLSLSGLSSDPADLDP

SEQ ID NO: 10793 - protein, 2194 aa, Homo sapiens
  Payload ID: 2145;
  Gene Symbol: CACNA1G;
  Gene Name: calcium channel, voltage-dependent, T type, alpha 1G subunit;
  Uniprot ID:  O43497;
  ENSP ID: ENSP00000421518
MDEEEDGAGAEESGQPRSFMRLNDLSGAGGRPGPGSAEKDPGSADSEAEGLPYPALAPVVFFYLSQDSRPRSWCLRTVCNPWFERISMLVILLNCVTLGMFRPCEDIACDSQRCRILQAFDDFIFAFFAVEMVVKMVALGIFGKKCYLGDTWNRLDFFIVIAGMLEYSLDLQNVSFSAVRTVRVLRPLRAINRVPSMRILVTLLLDTLPMLGNVLLLCFFVFFIFGIVGVQLWAGLLRNRCFLPENFSLPLSVDLERYYQTENEDESPFICSQPRENGMRSCRSVPTLRGDGGGGPPCGLDYEAYNSSSNTTCVNWNQYYTNCSAGEHNPFKGAINFDNIGYAWIAIFQVITLEGWVDIMYFVMDAHSFYNFIYFILLIIVGSFFMINLCLVVIATQFSETKQRESQLMREQRVRFLSNASTLASFSEPGSCYEELLKYLVYILRKAARRLAQVSRAAGVRVGLLSSPAPLGGQETQPSSSCSRSHRRLSVHHLVHHHHHHHHHYHLGNGTLRAPRASPEIQDRDANGSRRLMLPPPSTPALSGAPPGGAESVHSFYHADCHLEPVRCQAPPPRSPSEASGRTVGSGKVYPTVHTSPPPETLKEKALVEVAASSGPPTLTSLNIPPGPYSSMHKLLETQSTGACQSSCKISSPCLKADSGACGPDSCPYCARAGAGEVELADREMPDSDSEAVYEFTQDAQHSDLRDPHSRRQRSLGPDAEPSSVLAFWRLICDTFRKIVDSKYFGRGIMIAILVNTLSMGIEYHEQPEELTNALEISNIVFTSLFALEMLLKLLVYGPFGYIKNPYNIFDGVIVVISVWEIVGQQGGGLSVLRTFRLMRVLKLVRFLPALQRQLVVLMKTMDNVATFCMLLMLFIFIFSILGMHLFGCKFASERDGDTLPDRKNFDSLLWAIVTVFQILTQEDWNKVLYNGMASTSSWAALYFIALMTFGNYVLFNLLVAILVEGFQAEEISKREDASGQLSCIQLPVDSQGGDANKSESEPDFFSPSLDGDGDRKKCLALVSLGEHPELRKSLLPPLIIHTAATPMSLPKSTSTGLGEALGPASRRTSSSGSAEPGAAHEMKSPPSARSSPHSPWSAASSWTSRRSSRNSLGRAPSLKRRSPSGERRSLLSGEGQESQDEEESSEEERASPAGSDHRHRGSLEREAKSSFDLPDTLQVPGLHRTASGRGSASEHQDCNGKSASGRLARALRPDDPPLDGDDADDEGNLSKGERVRAWIRARLPACCLERDSWSAYIFPPQSRFRLLCHRIITHKMFDHVVLVIIFLNCITIAMERPKIDPHSAERIFLTLSNYIFTAVFLAEMTVKVVALGWCFGEQAYLRSSWNVLDGLLVLISVIDILVSMVSDSGTKILGMLRVLRLLRTLRPLRVISRAQGLKLVVETLMSSLKPIGNIVVICCAFFIIFGILGVQLFKGKFFVCQGEDTRNITNKSDCAEASYRWVRHKYNFDNLGQALMSLFVLASKDGWVDIMYDGLDAVGVDQQPIMNHNPWMLLYFISFLLIVAFFVLNMFVGVVVENFHKCRQHQEEEEARRREEKRLRRLEKKRRSKEKQMAEAQCKPYYSDYSRFRLLVHHLCTSHYLDLFITGVIGLNVVTMAMEHYQQPQILDEALKICNYIFTVIFVLESVFKLVAFGFRRFFQDRWNQLDLAIVLLSIMGITLEEIEVNASLPINPTIIRIMRVLRIARVLKLLKMAVGMRALLDTVMQALPQVGNLGLLFMLLFFIFAALGVELFGDLECDETHPCEGLGRHATFRNFGMAFLTLFRVSTGDNWNGIMKDTLRDCDQESTCYNTVISPIYFVSFVLTAQFVLVNVVIAVLMKHLEESNKEAKEEAELEAELELEMKTLSPQPHSPLGSPFLWPGVEGPDSPDSPKPGALHPAAHARSASHFSLEHPTMQPHPTELPGPDLLTVRKSGVSRTHSLPNDSYMCRHGSTAEGPLGHRGWGLPKAQSGSVLSVHSQPADTSYILQLPKDAPHLLQPHSAPTWGTIPKLPPPGRSPLAQRPLRRQAAIRTDSLDVQGLGSREDLLAEEEPPSPRDLKKCYSVEAQSCQRRPTSWLDEQRRHSIAVSCLDSGSQPHLGTDPSNLGGQPLGGPGSRPKKKLSPPSITIDPPESQGPRTPPSPGICLRRRAPSSDSKDPLASGPPDSMAASPSPKKDVLSLSGLSSDPADLDP

SEQ ID NO: 10794 - protein, 2205 aa, Homo sapiens
  Payload ID: 2145;
  Gene Symbol: CACNA1G;
  Gene Name: calcium channel, voltage-dependent, T type, alpha 1G subunit;
  Uniprot ID:  O43497;
  ENSP ID: ENSP00000422268
MDEEEDGAGAEESGQPRSFMRLNDLSGAGGRPGPGSAEKDPGSADSEAEGLPYPALAPVVFFYLSQDSRPRSWCLRTVCNPWFERISMLVILLNCVTLGMFRPCEDIACDSQRCRILQAFDDFIFAFFAVEMVVKMVALGIFGKKCYLGDTWNRLDFFIVIAGMLEYSLDLQNVSFSAVRTVRVLRPLRAINRVPSMRILVTLLLDTLPMLGNVLLLCFFVFFIFGIVGVQLWAGLLRNRCFLPENFSLPLSVDLERYYQTENEDESPFICSQPRENGMRSCRSVPTLRGDGGGGPPCGLDYEAYNSSSNTTCVNWNQYYTNCSAGEHNPFKGAINFDNIGYAWIAIFQVITLEGWVDIMYFVMDAHSFYNFIYFILLIIVGSFFMINLCLVVIATQFSETKQRESQLMREQRVRFLSNASTLASFSEPGSCYEELLKYLVYILRKAARRLAQVSRAAGVRVGLLSSPAPLGGQETQPSSSCSRSHRRLSVHHLVHHHHHHHHHYHLGNGTLRAPRASPEIQDRDANGSRRLMLPPPSTPALSGAPPGGAESVHSFYHADCHLEPVRCQAPPPRSPSEASGRTVGSGKVYPTVHTSPPPETLKEKALVEVAASSGPPTLTSLNIPPGPYSSMHKLLETQSTGACQSSCKISSPCLKADSGACGPDSCPYCARAGAGEVELADREMPDSDSEAVYEFTQDAQHSDLRDPHSRRQRSLGPDAEPSSVLAFWRLICDTFRKIVDSKYFGRGIMIAILVNTLSMGIEYHEQPEELTNALEISNIVFTSLFALEMLLKLLVYGPFGYIKNPYNIFDGVIVVISVWEIVGQQGGGLSVLRTFRLMRVLKLVRFLPALQRQLVVLMKTMDNVATFCMLLMLFIFIFSILGMHLFGCKFASERDGDTLPDRKNFDSLLWAIVTVFQILTQEDWNKVLYNGMASTSSWAALYFIALMTFGNYVLFNLLVAILVEGFQAEEISKREDASGQLSCIQLPVDSQGGDANKSESEPDFFSPSLDGDGDRKKCLALVSLGEHPELRKSLLPPLIIHTAATPMSLPKSTSTGLGEALGPASRRTSSSGSAEPGAAHEMKSPPSARSSPHSPWSAASSWTSRRSSRNSLGRAPSLKRRSPSGERRSLLSGEGQESQDEEESSEEERASPAGSDHRHRGSLEREAKSSFDLPDTLQVPGLHRTASGRGSASEHQDCNGKSASGRLARALRPDDPPLDGDDADDEGNLSKGERVRAWIRARLPACCLERDSWSAYIFPPQSRFRLLCHRIITHKMFDHVVLVIIFLNCITIAMERPKIDPHSAERIFLTLSNYIFTAVFLAEMTVKVVALGWCFGEQAYLRSSWNVLDGLLVLISVIDILVSMVSDSGTKILGMLRVLRLLRTLRPLRVISRAQGLKLVVETLMSSLKPIGNIVVICCAFFIIFGILGVQLFKGKFFVCQGEDTRNITNKSDCAEASYRWVRHKYNFDNLGQALMSLFVLASKDGWVDIMYDGLDAVGVDQQPIMNHNPWMLLYFISFLLIVAFFVLNMFVGVVVENFHKCRQHQEEEEARRREEKRLRRLEKKRRNLMLDDVIASGSSASAASEAQCKPYYSDYSRFRLLVHHLCTSHYLDLFITGVIGLNVVTMAMEHYQQPQILDEALKICNYIFTVIFVLESVFKLVAFGFRRFFQDRWNQLDLAIVLLSIMGITLEEIEVNASLPINPTIIRIMRVLRIARVLKLLKMAVGMRALLDTVMQALPQVGNLGLLFMLLFFIFAALGVELFGDLECDETHPCEGLGRHATFRNFGMAFLTLFRVSTGDNWNGIMKDTLRDCDQESTCYNTVISPIYFVSFVLTAQFVLVNVVIAVLMKHLEESNKEAKEEAELEAELELEMKTLSPQPHSPLGSPFLWPGVEGPDSPDSPKPGALHPAAHARSASHFSLEHPTMQPHPTELPGPDLLTVRKSGVSRTHSLPNDSYMCRHGSTAEGPLGHRGWGLPKAQSGSVLSVHSQPADTSYILQLPKDAPHLLQPHSAPTWGTIPKLPPPGRSPLAQRPLRRQAAIRTDSLDVQGLGSREDLLAEEEPPSPRDLKKCYSVEAQSCQRRPTSWLDEQRRHSIAVSCLDSGSQPHLGTDPSNLGGQPLGGPGSRPKKKLSPPSITIDPPESQGPRTPPSPGICLRRRAPSSDSKDPLASGPPDSMAASPSPKKDVLSLSGLSSDPADLDP

SEQ ID NO: 10795 - protein, 2227 aa, Homo sapiens
  Payload ID: 2145;
  Gene Symbol: CACNA1G;
  Gene Name: calcium channel, voltage-dependent, T type, alpha 1G subunit;
  Uniprot ID:  O43497;
  ENSP ID: ENSP00000422407
MDEEEDGAGAEESGQPRSFMRLNDLSGAGGRPGPGSAEKDPGSADSEAEGLPYPALAPVVFFYLSQDSRPRSWCLRTVCNPWFERISMLVILLNCVTLGMFRPCEDIACDSQRCRILQAFDDFIFAFFAVEMVVKMVALGIFGKKCYLGDTWNRLDFFIVIAGMLEYSLDLQNVSFSAVRTVRVLRPLRAINRVPSMRILVTLLLDTLPMLGNVLLLCFFVFFIFGIVGVQLWAGLLRNRCFLPENFSLPLSVDLERYYQTENEDESPFICSQPRENGMRSCRSVPTLRGDGGGGPPCGLDYEAYNSSSNTTCVNWNQYYTNCSAGEHNPFKGAINFDNIGYAWIAIFQVITLEGWVDIMYFVMDAHSFYNFIYFILLIIVGSFFMINLCLVVIATQFSETKQRESQLMREQRVRFLSNASTLASFSEPGSCYEELLKYLVYILRKAARRLAQVSRAAGVRVGLLSSPAPLGGQETQPSSSCSRSHRRLSVHHLVHHHHHHHHHYHLGNGTLRAPRASPEIQDRDANGSRRLMLPPPSTPALSGAPPGGAESVHSFYHADCHLEPVRCQAPPPRSPSEASGRTVGSGKVYPTVHTSPPPETLKEKALVEVAASSGPPTLTSLNIPPGPYSSMHKLLETQSTGACQSSCKISSPCLKADSGACGPDSCPYCARAGAGEVELADREMPDSDSEAVYEFTQDAQHSDLRDPHSRRQRSLGPDAEPSSVLAFWRLICDTFRKIVDSKYFGRGIMIAILVNTLSMGIEYHEQPEELTNALEISNIVFTSLFALEMLLKLLVYGPFGYIKNPYNIFDGVIVVISVWEIVGQQGGGLSVLRTFRLMRVLKLVRFLPALQRQLVVLMKTMDNVATFCMLLMLFIFIFSILGMHLFGCKFASERDGDTLPDRKNFDSLLWAIVTVFQILTQEDWNKVLYNGMASTSSWAALYFIALMTFGNYVLFNLLVAILVEGFQAEGDANKSESEPDFFSPSLDGDGDRKKCLALVSLGEHPELRKSLLPPLIIHTAATPMSLPKSTSTGLGEALGPASRRTSSSGSAEPGAAHEMKSPPSARSSPHSPWSAASSWTSRRSSRNSLGRAPSLKRRSPSGERRSLLSGEGQESQDEEESSEEERASPAGSDHRHRGSLEREAKSSFDLPDTLQVPGLHRTASGRGSASEHQDCNGKSASGRLARALRPDDPPLDGDDADDEGNLSKGERVRAWIRARLPACCLERDSWSAYIFPPQSRFRLLCHRIITHKMFDHVVLVIIFLNCITIAMERPKIDPHSAERIFLTLSNYIFTAVFLAEMTVKVVALGWCFGEQAYLRSSWNVLDGLLVLISVIDILVSMVSDSGTKILGMLRVLRLLRTLRPLRVISRAQGLKLVVETLMSSLKPIGNIVVICCAFFIIFGILGVQLFKGKFFVCQGEDTRNITNKSDCAEASYRWVRHKYNFDNLGQALMSLFVLASKDGWVDIMYDGLDAVGVDQQNFHKCRQHQEEEEARRREEKRLRRLEKKRRNLMLDDVIASGSSASAASEAQCKPYYSDYSRFRLLVHHLCTSHYLDLFITGVIGLNVVTMAMEHYQQPQILDEALKICNYIFTVIFVLESVFKLVAFGFRRFFQDRWNQLDLAIVLLSIMGITLEEIEVNASLPINPTIIRIMRVLRIARVLKLLKMAVGMRALLDTVMQALPQVGNLGLLFMLLFFIFAALGVELFGDLECDETHPCEGLGRHATFRNFGMAFLTLFRVSTGDNWNGIMKDTLRDCDQESTCYNTVISPIYFVSFVLTAQFVLVNVVIAVLMKHLEESNKEAKEEAELEAELELEMKTLSPQPHSPLGSPFLWPGVEGPDSPDSPKPGALHPAAHARSASHFSLEHPTMQPHPTELPGPDLLTVRKSGVSRTHSLPNDSYMCRHGSTAEGPLGHRGWGLPKAQSGSVLSVHSQPADTSYILQLPKDAPHLLQPHSAPTWGTIPKLPPPGRSPLAQRPLRRQAAIRTDSLDVQGLGSREDLLAEVSGPSPPLARAYSFWGQSSTQAQQHSRSHSKISKHMTPPAPCPGPEPNWGKGPPETRSSLELDTELSWISGDLLPPGGQEEPPSPRDLKKCYSVEAQSCQRRPTSWLDEQRRHSIAVSCLDSGSQPHLGTDPSNLGGQPLGGPGSRPKKKLSPPSITIDPPESQGPRTPPSPGICLRRRAPSSDSKDPLASGPPDSMAASPSPKKDVLSLSGLSSDPADLDP

SEQ ID NO: 10796 - protein, 2277 aa, Homo sapiens
  Payload ID: 2145;
  Gene Symbol: CACNA1G;
  Gene Name: calcium channel, voltage-dependent, T type, alpha 1G subunit;
  Uniprot ID:  O43497;
  ENSP ID: ENSP00000423045
MDEEEDGAGAEESGQPRSFMRLNDLSGAGGRPGPGSAEKDPGSADSEAEGLPYPALAPVVFFYLSQDSRPRSWCLRTVCNPWFERISMLVILLNCVTLGMFRPCEDIACDSQRCRILQAFDDFIFAFFAVEMVVKMVALGIFGKKCYLGDTWNRLDFFIVIAGMLEYSLDLQNVSFSAVRTVRVLRPLRAINRVPSMRILVTLLLDTLPMLGNVLLLCFFVFFIFGIVGVQLWAGLLRNRCFLPENFSLPLSVDLERYYQTENEDESPFICSQPRENGMRSCRSVPTLRGDGGGGPPCGLDYEAYNSSSNTTCVNWNQYYTNCSAGEHNPFKGAINFDNIGYAWIAIFQVITLEGWVDIMYFVMDAHSFYNFIYFILLIIVGSFFMINLCLVVIATQFSETKQRESQLMREQRVRFLSNASTLASFSEPGSCYEELLKYLVYILRKAARRLAQVSRAAGVRVGLLSSPAPLGGQETQPSSSCSRSHRRLSVHHLVHHHHHHHHHYHLGNGTLRAPRASPEIQDRDANGSRRLMLPPPSTPALSGAPPGGAESVHSFYHADCHLEPVRCQAPPPRSPSEASGRTVGSGKVYPTVHTSPPPETLKEKALVEVAASSGPPTLTSLNIPPGPYSSMHKLLETQSTGACQSSCKISSPCLKADSGACGPDSCPYCARAGAGEVELADREMPDSDSEAVYEFTQDAQHSDLRDPHSRRQRSLGPDAEPSSVLAFWRLICDTFRKIVDSKYFGRGIMIAILVNTLSMGIEYHEQPEELTNALEISNIVFTSLFALEMLLKLLVYGPFGYIKNPYNIFDGVIVVISVWEIVGQQGGGLSVLRTFRLMRVLKLVRFLPALQRQLVVLMKTMDNVATFCMLLMLFIFIFSILGMHLFGCKFASERDGDTLPDRKNFDSLLWAIVTVFQILTQEDWNKVLYNGMASTSSWAALYFIALMTFGNYVLFNLLVAILVEGFQAEEISKREDASGQLSCIQLPVDSQGGDANKSESEPDFFSPSLDGDGDRKKCLALVSLGEHPELRKSLLPPLIIHTAATPMSLPKSTSTGLGEALGPASRRTSSSGSAEPGAAHEMKSPPSARSSPHSPWSAASSWTSRRSSRNSLGRAPSLKRRSPSGERRSLLSGEGQESQDEEESSEEERASPAGSDHRHRGSLEREAKSSFDLPDTLQVPGLHRTASGRGSASEHQDCNGKSASGRLARALRPDDPPLDGDDADDEGNLSKGERVRAWIRARLPACCLERDSWSAYIFPPQSRFRLLCHRIITHKMFDHVVLVIIFLNCITIAMERPKIDPHSAERIFLTLSNYIFTAVFLAEMTVKVVALGWCFGEQAYLRSSWNVLDGLLVLISVIDILVSMVSDSGTKILGMLRVLRLLRTLRPLRVISRAQGLKLVVETLMSSLKPIGNIVVICCAFFIIFGILGVQLFKGKFFVCQGEDTRNITNKSDCAEASYRWVRHKYNFDNLGQALMSLFVLASKDGWVDIMYDGLDAVGVDQQPIMNHNPWMLLYFISFLLIVAFFVLNMFVGVVVENFHKCRQHQEEEEARRREEKRLRRLEKKRRNLMLDDVIASGSSASAASEAQCKPYYSDYSRFRLLVHHLCTSHYLDLFITGVIGLNVVTMAMEHYQQPQILDEALKICNYIFTVIFVLESVFKLVAFGFRRFFQDRWNQLDLAIVLLSIMGITLEEIEVNASLPINPTIIRIMRVLRIARVLKLLKMAVGMRALLDTVGNLGLLFMLLFFIFAALGVELFGDLECDETHPCEGLGRHATFRNFGMAFLTLFRVSTGDNWNGIMKDTLRDCDQESTCYNTVISPIYFVSFVLTAQFVLVNVVIAVLMKHLEESNKEAKEEAELEAELELEMKTLSPQPHSPLGSPFLWPGVEGPDSPDSPKPGALHPAAHARSASHFSLEHPTMQPHPTELPGPDLLTVRKSGVSRTHSLPNDSYMCRHGSTAEGPLGHRGWGLPKAQSGSVLSVHSQPADTSYILQLPKDAPHLLQPHSAPTWGTIPKLPPPGRSPLAQRPLRRQAAIRTDSLDVQGLGSREDLLAEVSGPSPPLARAYSFWGQSSTQAQQHSRSHSKISKHMTPPAPCPGPEPNWGKGPPETRSSLELDTELSWISGDLLPPGGQEEPPSPRDLKKCYSVEAQSCQRRPTSWLDEQRRHSIAVSCLDSGSQPHLGTDPSNLGGQPLGGPGSRPKKKLSPPSITIDPPESQGPRTPPSPGICLRRRAPSSDSKDPLASGPPDSMAASPSPKKDVLSLSGLSSDPADLDP

SEQ ID NO: 10797 - protein, 2332 aa, Homo sapiens
  Payload ID: 2145;
  Gene Symbol: CACNA1G;
  Gene Name: calcium channel, voltage-dependent, T type, alpha 1G subunit;
  Uniprot ID:  O43497;
  ENSP ID: ENSP00000423112
MDEEEDGAGAEESGQPRSFMRLNDLSGAGGRPGPGSAEKDPGSADSEAEGLPYPALAPVVFFYLSQDSRPRSWCLRTVCNPWFERISMLVILLNCVTLGMFRPCEDIACDSQRCRILQAFDDFIFAFFAVEMVVKMVALGIFGKKCYLGDTWNRLDFFIVIAGMLEYSLDLQNVSFSAVRTVRVLRPLRAINRVPSMRILVTLLLDTLPMLGNVLLLCFFVFFIFGIVGVQLWAGLLRNRCFLPENFSLPLSVDLERYYQTENEDESPFICSQPRENGMRSCRSVPTLRGDGGGGPPCGLDYEAYNSSSNTTCVNWNQYYTNCSAGEHNPFKGAINFDNIGYAWIAIFQVITLEGWVDIMYFVMDAHSFYNFIYFILLIIVGSFFMINLCLVVIATQFSETKQRESQLMREQRVRFLSNASTLASFSEPGSCYEELLKYLVYILRKAARRLAQVSRAAGVRVGLLSSPAPLGGQETQPSSSCSRSHRRLSVHHLVHHHHHHHHHYHLGNGTLRAPRASPEIQDRDANGSRRLMLPPPSTPALSGAPPGGAESVHSFYHADCHLEPVRCQAPPPRSPSEASGRTVGSGKVYPTVHTSPPPETLKEKALVEVAASSGPPTLTSLNIPPGPYSSMHKLLETQSTGACQSSCKISSPCLKADSGACGPDSCPYCARAGAGEVELADREMPDSDSEAVYEFTQDAQHSDLRDPHSRRQRSLGPDAEPSSVLAFWRLICDTFRKIVDSKYFGRGIMIAILVNTLSMGIEYHEQPEELTNALEISNIVFTSLFALEMLLKLLVYGPFGYIKNPYNIFDGVIVVISVWEIVGQQGGGLSVLRTFRLMRVLKLVRFLPALQRQLVVLMKTMDNVATFCMLLMLFIFIFSILGMHLFGCKFASERDGDTLPDRKNFDSLLWAIVTVFQILTQEDWNKVLYNGMASTSSWAALYFIALMTFGNYVLFNLLVAILVEGFQAEEISKREDASGQLSCIQLPVDSQGGDANKSESEPDFFSPSLDGDGDRKKCLALVSLGEHPELRKSLLPPLIIHTAATPMSLPKSTSTGLGEALGPASRRTSSSGSAEPGAAHEMKSPPSARSSPHSPWSAASSWTSRRSSRNSLGRAPSLKRRSPSGERRSLLSGEGQESQDEEESSEEERASPAGSDHRHRGSLEREAKSSFDLPDTLQVPGLHRTASGRGSASEHQDCNGKSASGRLARALRPDDPPLDGDDADDEGNLSKGERVRAWIRARLPACCLERDSWSAYIFPPQSRFRLLCHRIITHKMFDHVVLVIIFLNCITIAMERPKIDPHSAERIFLTLSNYIFTAVFLAEMTVKVVALGWCFGEQAYLRSSWNVLDGLLVLISVIDILVSMVSDSGTKILGMLRVLRLLRTLRPLRVISRAQGLKLVVETLMSSLKPIGNIVVICCAFFIIFGILGVQLFKGKFFVCQGEDTRNITNKSDCAEASYRWVRHKYNFDNLGQALMSLFVLASKDGWVDIMYDGLDAVGVDQQPIMNHNPWMLLYFISFLLIVAFFVLNMFVGVVVENFHKCRQHQEEEEARRREEKRLRRLEKKRRNLMLDDVIASGSSASAASEAQCKPYYSDYSRFRLLVHHLCTSHYLDLFITGVIGLNVVTMAMEHYQQPQILDEALKICNYIFTVIFVLESVFKLVAFGFRRFFQDRWNQLDLAIVLLSIMGITLEEIEVNASLPINPTIIRIMRVLRIARVLKLLKMAVGMRALLDTVMQALPQVGNLGLLFMLLFFIFAALGVELFGDLECDETHPCEGLGRHATFRNFGMAFLTLFRVSTGDNWNGIMKDTLRDCDQESTCYNTVISPIYFVSFVLTAQFVLVNVVIAVLMKHLEESNKEAKEEAELEAELELEMKTLSPQPHSPLGSPFLWPGVEGPDSPDSPKPGALHPAAHARSASHFSLEHPTDRQLFDTISLLIQGSLEWELKLMDELAGPGGQPSAFPSAPSLGGSDPQMQPHPTELPGPDLLTVRKSGVSRTHSLPNDSYMCRHGSTAEGPLGHRGWGLPKAQSGSVLSVHSQPADTSYILQLPKDAPHLLQPHSAPTWGTIPKLPPPGRSPLAQRPLRRQAAIRTDSLDVQGLGSREDLLAEVSGPSPPLARAYSFWGQSSTQAQQHSRSHSKISKHMTPPAPCPGPEPNWGKGPPETRSSLELDTELSWISGDLLPPGGQEEPPSPRDLKKCYSVEAQSCQRRPTSWLDEQRRHSIAVSCLDSGSQPHLGTDPSNLGGQPLGGPGSRPKKKLSPPSITIDPPESQGPRTPPSPGICLRRRAPSSDSKDPLASGPPDSMAASPSPKKDVLSLSGLSSDPADLDP

SEQ ID NO: 10798 - protein, 2314 aa, Homo sapiens
  Payload ID: 2145;
  Gene Symbol: CACNA1G;
  Gene Name: calcium channel, voltage-dependent, T type, alpha 1G subunit;
  Uniprot ID:  O43497;
  ENSP ID: ENSP00000423155
MDEEEDGAGAEESGQPRSFMRLNDLSGAGGRPGPGSAEKDPGSADSEAEGLPYPALAPVVFFYLSQDSRPRSWCLRTVCNPWFERISMLVILLNCVTLGMFRPCEDIACDSQRCRILQAFDDFIFAFFAVEMVVKMVALGIFGKKCYLGDTWNRLDFFIVIAGMLEYSLDLQNVSFSAVRTVRVLRPLRAINRVPSMRILVTLLLDTLPMLGNVLLLCFFVFFIFGIVGVQLWAGLLRNRCFLPENFSLPLSVDLERYYQTENEDESPFICSQPRENGMRSCRSVPTLRGDGGGGPPCGLDYEAYNSSSNTTCVNWNQYYTNCSAGEHNPFKGAINFDNIGYAWIAIFQVITLEGWVDIMYFVMDAHSFYNFIYFILLIIVGSFFMINLCLVVIATQFSETKQRESQLMREQRVRFLSNASTLASFSEPGSCYEELLKYLVYILRKAARRLAQVSRAAGVRVGLLSSPAPLGGQETQPSSSCSRSHRRLSVHHLVHHHHHHHHHYHLGNGTLRAPRASPEIQDRDANGSRRLMLPPPSTPALSGAPPGGAESVHSFYHADCHLEPVRCQAPPPRSPSEASGRTVGSGKVYPTVHTSPPPETLKEKALVEVAASSGPPTLTSLNIPPGPYSSMHKLLETQSTGACQSSCKISSPCLKADSGACGPDSCPYCARAGAGEVELADREMPDSDSEAVYEFTQDAQHSDLRDPHSRRQRSLGPDAEPSSVLAFWRLICDTFRKIVDSKYFGRGIMIAILVNTLSMGIEYHEQPEELTNALEISNIVFTSLFALEMLLKLLVYGPFGYIKNPYNIFDGVIVVISVWEIVGQQGGGLSVLRTFRLMRVLKLVRFLPALQRQLVVLMKTMDNVATFCMLLMLFIFIFSILGMHLFGCKFASERDGDTLPDRKNFDSLLWAIVTVFQILTQEDWNKVLYNGMASTSSWAALYFIALMTFGNYVLFNLLVAILVEGFQAEEISKREDASGQLSCIQLPVDSQGGDANKSESEPDFFSPSLDGDGDRKKCLALVSLGEHPELRKSLLPPLIIHTAATPMSLPKSTSTGLGEALGPASRRTSSSGSAEPGAAHEMKSPPSARSSPHSPWSAASSWTSRRSSRNSLGRAPSLKRRSPSGERRSLLSGEGQESQDEEESSEEERASPAGSDHRHRGSLEREAKSSFDLPDTLQVPGLHRTASGRGSASEHQDCNGKSASGRLARALRPDDPPLDGDDADDEGNLSKGERVRAWIRARLPACCLERDSWSAYIFPPQSRFRLLCHRIITHKMFDHVVLVIIFLNCITIAMERPKIDPHSAERIFLTLSNYIFTAVFLAEMTVKVVALGWCFGEQAYLRSSWNVLDGLLVLISVIDILVSMVSDSGTKILGMLRVLRLLRTLRPLRVISRAQGLKLVVETLMSSLKPIGNIVVICCAFFIIFGILGVQLFKGKFFVCQGEDTRNITNKSDCAEASYRWVRHKYNFDNLGQALMSLFVLASKDGWVDIMYDGLDAVGVDQQPIMNHNPWMLLYFISFLLIVAFFVLNMFVGVVVENFHKCRQHQEEEEARRREEKRLRRLEKKRRKAQCKPYYSDYSRFRLLVHHLCTSHYLDLFITGVIGLNVVTMAMEHYQQPQILDEALKICNYIFTVIFVLESVFKLVAFGFRRFFQDRWNQLDLAIVLLSIMGITLEEIEVNASLPINPTIIRIMRVLRIARVLKLLKMAVGMRALLDTVMQALPQVGNLGLLFMLLFFIFAALGVELFGDLECDETHPCEGLGRHATFRNFGMAFLTLFRVSTGDNWNGIMKDTLRDCDQESTCYNTVISPIYFVSFVLTAQFVLVNVVIAVLMKHLEESNKEAKEEAELEAELELEMKTLSPQPHSPLGSPFLWPGVEGPDSPDSPKPGALHPAAHARSASHFSLEHPTDRQLFDTISLLIQGSLEWELKLMDELAGPGGQPSAFPSAPSLGGSDPQMQPHPTELPGPDLLTVRKSGVSRTHSLPNDSYMCRHGSTAEGPLGHRGWGLPKAQSGSVLSVHSQPADTSYILQLPKDAPHLLQPHSAPTWGTIPKLPPPGRSPLAQRPLRRQAAIRTDSLDVQGLGSREDLLAEVSGPSPPLARAYSFWGQSSTQAQQHSRSHSKISKHMTPPAPCPGPEPNWGKGPPETRSSLELDTELSWISGDLLPPGGQEEPPSPRDLKKCYSVEAQSCQRRPTSWLDEQRRHSIAVSCLDSGSQPHLGTDPSNLGGQPLGGPGSRPKKKLSPPSITIDPPESQGPRTPPSPGICLRRRAPSSDSKDPLASGPPDSMAASPSPKKDVLSLSGLSSDPADLDP

SEQ ID NO: 10799 - protein, 2291 aa, Homo sapiens
  Payload ID: 2145;
  Gene Symbol: CACNA1G;
  Gene Name: calcium channel, voltage-dependent, T type, alpha 1G subunit;
  Uniprot ID:  O43497;
  ENSP ID: ENSP00000423317
MDEEEDGAGAEESGQPRSFMRLNDLSGAGGRPGPGSAEKDPGSADSEAEGLPYPALAPVVFFYLSQDSRPRSWCLRTVCNPWFERISMLVILLNCVTLGMFRPCEDIACDSQRCRILQAFDDFIFAFFAVEMVVKMVALGIFGKKCYLGDTWNRLDFFIVIAGMLEYSLDLQNVSFSAVRTVRVLRPLRAINRVPSMRILVTLLLDTLPMLGNVLLLCFFVFFIFGIVGVQLWAGLLRNRCFLPENFSLPLSVDLERYYQTENEDESPFICSQPRENGMRSCRSVPTLRGDGGGGPPCGLDYEAYNSSSNTTCVNWNQYYTNCSAGEHNPFKGAINFDNIGYAWIAIFQVITLEGWVDIMYFVMDAHSFYNFIYFILLIIVGSFFMINLCLVVIATQFSETKQRESQLMREQRVRFLSNASTLASFSEPGSCYEELLKYLVYILRKAARRLAQVSRAAGVRVGLLSSPAPLGGQETQPSSSCSRSHRRLSVHHLVHHHHHHHHHYHLGNGTLRAPRASPEIQDRDANGSRRLMLPPPSTPALSGAPPGGAESVHSFYHADCHLEPVRCQAPPPRSPSEASGRTVGSGKVYPTVHTSPPPETLKEKALVEVAASSGPPTLTSLNIPPGPYSSMHKLLETQSTGACQSSCKISSPCLKADSGACGPDSCPYCARAGAGEVELADREMPDSDSEAVYEFTQDAQHSDLRDPHSRRQRSLGPDAEPSSVLAFWRLICDTFRKIVDSKYFGRGIMIAILVNTLSMGIEYHEQPEELTNALEISNIVFTSLFALEMLLKLLVYGPFGYIKNPYNIFDGVIVVISVWEIVGQQGGGLSVLRTFRLMRVLKLVRFLPALQRQLVVLMKTMDNVATFCMLLMLFIFIFSILGMHLFGCKFASERDGDTLPDRKNFDSLLWAIVTVFQILTQEDWNKVLYNGMASTSSWAALYFIALMTFGNYVLFNLLVAILVEGFQAEEISKREDASGQLSCIQLPVDSQGGDANKSESEPDFFSPSLDGDGDRKKCLALVSLGEHPELRKSLLPPLIIHTAATPMSLPKSTSTGLGEALGPASRRTSSSGSAEPGAAHEMKSPPSARSSPHSPWSAASSWTSRRSSRNSLGRAPSLKRRSPSGERRSLLSGEGQESQDEEESSEEERASPAGSDHRHRGSLEREAKSSFDLPDTLQVPGLHRTASGRGSASEHQDCNGKSASGRLARALRPDDPPLDGDDADDEGNLSKGERVRAWIRARLPACCLERDSWSAYIFPPQSRFRLLCHRIITHKMFDHVVLVIIFLNCITIAMERPKIDPHSAERIFLTLSNYIFTAVFLAEMTVKVVALGWCFGEQAYLRSSWNVLDGLLVLISVIDILVSMVSDSGTKILGMLRVLRLLRTLRPLRVISRAQGLKLVVETLMSSLKPIGNIVVICCAFFIIFGILGVQLFKGKFFVCQGEDTRNITNKSDCAEASYRWVRHKYNFDNLGQALMSLFVLASKDGWVDIMYDGLDAVGVDQQPIMNHNPWMLLYFISFLLIVAFFVLNMFVGVVVENFHKCRQHQEEEEARRREEKRLRRLEKKRRSKEKQMADLMLDDVIASGSSASAASEAQCKPYYSDYSRFRLLVHHLCTSHYLDLFITGVIGLNVVTMAMEHYQQPQILDEALKICNYIFTVIFVLESVFKLVAFGFRRFFQDRWNQLDLAIVLLSIMGITLEEIEVNASLPINPTIIRIMRVLRIARVLKLLKMAVGMRALLDTVMQALPQVGNLGLLFMLLFFIFAALGVELFGDLECDETHPCEGLGRHATFRNFGMAFLTLFRVSTGDNWNGIMKDTLRDCDQESTCYNTVISPIYFVSFVLTAQFVLVNVVIAVLMKHLEESNKEAKEEAELEAELELEMKTLSPQPHSPLGSPFLWPGVEGPDSPDSPKPGALHPAAHARSASHFSLEHPTMQPHPTELPGPDLLTVRKSGVSRTHSLPNDSYMCRHGSTAEGPLGHRGWGLPKAQSGSVLSVHSQPADTSYILQLPKDAPHLLQPHSAPTWGTIPKLPPPGRSPLAQRPLRRQAAIRTDSLDVQGLGSREDLLAEVSGPSPPLARAYSFWGQSSTQAQQHSRSHSKISKHMTPPAPCPGPEPNWGKGPPETRSSLELDTELSWISGDLLPPGGQEEPPSPRDLKKCYSVEAQSCQRRPTSWLDEQRRHSIAVSCLDSGSQPHLGTDPSNLGGQPLGGPGSRPKKKLSPPSITIDPPESQGPRTPPSPGICLRRRAPSSDSKDPLASGPPDSMAASPSPKKDVLSLSGLSSDPADLDP

SEQ ID NO: 10800 - protein, 1746 aa, Homo sapiens
  Payload ID: 2145;
  Gene Symbol: CACNA1G;
  Gene Name: calcium channel, voltage-dependent, T type, alpha 1G subunit;
  Uniprot ID:  O43497;
  ENSP ID: ENSP00000424664
MDEEEDGAGAEESGQPRSFMRLNDLSGAGGRPGPGSAEKDPGSADSEAEGLPYPALAPVVFFYLSQDSRPRSWCLRTVCNPWFERISMLVILLNCVTLGMFRPCEDIACDSQRCRILQAFDDFIFAFFAVEMVVKMVALGIFGKKCYLGDTWNRLDFFIVIAGMLEYSLDLQNVSFSAVRTVRVLRPLRAINRVPSMRILVTLLLDTLPMLGNVLLLCFFVFFIFGIVGVQLWAGLLRNRCFLPENFSLPLSVDLERYYQTENEDESPFICSQPRENGMRSCRSVPTLRGDGGGGPPCGLDYEAYNSSSNTTCVNWNQYYTNCSAGEHNPFKGAINFDNIGYAWIAIFQVITLEGWVDIMYFVMDAHSFYNFIYFILLIIVGSFFMINLCLVVIATQFSETKQRESQLMREQRVRFLSNASTLASFSEPGSCYEELLKYLVYILRKAARRLAQVSRAAGVRVGLLSSPAPLGGQETQPSSSCSRSHRRLSVHHLVHHHHHHHHHYHLGNGTLRAPRASPEIQDRDANGSRRLMLPPPSTPALSGAPPGGAESVHSFYHADCHLEPVRCQAPPPRSPSEASGRTVGSGKVYPTVHTSPPPETLKEKALVEVAASSGPPTLTSLNIPPGPYSSMHKLLETQSTGACQSSCKISSPCLKADSGACGPDSCPYCARAGAGEVELADREMPDSDSEAVYEFTQDAQHSDLRDPHSRRQRSLGPDAEPSSVLAFWRLICDTFRKIVDSKYFGRGIMIAILVNTLSMGIEYHEQPEELTNALEISNIVFTSLFALEMLLKLLVYGPFGYIKNPYNIFDGVIVVISVWEIVGQQGGGLSVLRTFRLMRVLKLVRFLPALQRQLVVLMKTMDNVATFCMLLMLFIFIFSILGMHLFGCKFASERDGDTLPDRKNFDSLLWAIVTVFQILTQEDWNKVLYNGMASTSSWAALYFIALMTFGNYVLFNLLVAILVEGFQAEGDANKSESEPDFFSPSLDGDGDRKKCLALVSLGEHPELRKSLLPPLIIHTAATPMSLPKSTSTGLGEALGPASRRTSSSGSAEPGAAHEMKSPPSARSSPHSPWSAASSWTSRRSSRNSLGRAPSLKRRSPSGERRSLLSGEGQESQDEEESSEEERASPAGSDHRHRGSLEREAKSSFDLPDTLQVPGLHRTASGRGSASEHQDCNGKSASGRLARALRPDDPPLDGDDADDEGNLSKGERVRAWIRARLPACCLERDSWSAYIFPPQSRFRLLCHRIITHKMFDHVVLVIIFLNCITIAMERPKIDPHSAERIFLTLSNYIFTAVFLAEMTVKVVALGWCFGEQAYLRSSWNVLDGLLVLISVIDILVSMVSDSGTKILGMLRVLRLLRTLRPLRVISRAQGLKLVVETLMSSLKPIGNIVVICCAFFIIFGILGVQLFKGKFFVCQGEDTRNITNKSDCAEASYRWVRHKYNFDNLGQALMSLFVLASKDGWVDIMYDGLDAVGVDQQPIMNHNPWMLLYFISFLLIVAFFVLNMFVGVVVENFHKCRQHQEEEEARRREEKRLRRLEKKRRNLMLDDVIASGSSASAASEAQCKPYYSDYSRFRLLVHHLCTSHYLDLFITGVIGLNVVTMAMEHYQQPQILDEALKICNYIFTVIFVLESVFKLVAFGFRRFFQDRWNQLDLAIVLLSIMGITLEEIEVNASLPINPTIIRIMRVLRIARVLKLLKMAVGMRALLDTLWAWSSLETWSVTRHTPVRAWAVMPPFGTLAWPS

SEQ ID NO: 10801 - protein, 1765 aa, Homo sapiens
  Payload ID: 2145;
  Gene Symbol: CACNA1G;
  Gene Name: calcium channel, voltage-dependent, T type, alpha 1G subunit;
  Uniprot ID:  O43497;
  ENSP ID: ENSP00000425153
MDEEEDGAGAEESGQPRSFMRLNDLSGAGGRPGPGSAEKDPGSADSEAEGLPYPALAPVVFFYLSQDSRPRSWCLRTVCNPWFERISMLVILLNCVTLGMFRPCEDIACDSQRCRILQAFDDFIFAFFAVEMVVKMVALGIFGKKCYLGDTWNRLDFFIVIAGMLEYSLDLQNVSFSAVRTVRVLRPLRAINRVPSMRILVTLLLDTLPMLGNVLLLCFFVFFIFGIVGVQLWAGLLRNRCFLPENFSLPLSVDLERYYQTENEDESPFICSQPRENGMRSCRSVPTLRGDGGGGPPCGLDYEAYNSSSNTTCVNWNQYYTNCSAGEHNPFKGAINFDNIGYAWIAIFQVITLEGWVDIMYFVMDAHSFYNFIYFILLIIVGSFFMINLCLVVIATQFSETKQRESQLMREQRVRFLSNASTLASFSEPGSCYEELLKYLVYILRKAARRLAQVSRAAGVRVGLLSSPAPLGGQETQPSSSCSRSHRRLSVHHLVHHHHHHHHHYHLGNGTLRAPRASPEIQDRDANGSRRLMLPPPSTPALSGAPPGGAESVHSFYHADCHLEPVRCQAPPPRSPSEASGRTVGSGKVYPTVHTSPPPETLKEKALVEVAASSGPPTLTSLNIPPGPYSSMHKLLETQSTGACQSSCKISSPCLKADSGACGPDSCPYCARAGAGEVELADREMPDSDSEAVYEFTQDAQHSDLRDPHSRRQRSLGPDAEPSSVLAFWRLICDTFRKIVDSKYFGRGIMIAILVNTLSMGIEYHEQPEELTNALEISNIVFTSLFALEMLLKLLVYGPFGYIKNPYNIFDGVIVVISVWEIVGQQGGGLSVLRTFRLMRVLKLVRFLPALQRQLVVLMKTMDNVATFCMLLMLFIFIFSILGMHLFGCKFASERDGDTLPDRKNFDSLLWAIVTVFQILTQEDWNKVLYNGMASTSSWAALYFIALMTFGNYVLFNLLVAILVEGFQAEEISKREDASGQLSCIQLPVDSQGGDANKSESEPDFFSPSLDGDGDRKKCLALVSLGEHPELRKSLLPPLIIHTAATPMSLPKSTSTGLGEALGPASRRTSSSGSAEPGAAHEMKSPPSARSSPHSPWSAASSWTSRRSSRNSLGRAPSLKRRSPSGERRSLLSGEGQESQDEEESSEEERASPAGSDHRHRGSLEREAKSSFDLPDTLQVPGLHRTASGRGSASEHQDCNGKSASGRLARALRPDDPPLDGDDADDEGNLSKGERVRAWIRARLPACCLERDSWSAYIFPPQSRFRLLCHRIITHKMFDHVVLVIIFLNCITIAMERPKIDPHSAERIFLTLSNYIFTAVFLAEMTVKVVALGWCFGEQAYLRSSWNVLDGLLVLISVIDILVSMVSDSGTKILGMLRVLRLLRTLRPLRVISRAQGLKLVVETLMSSLKPIGNIVVICCAFFIIFGILGVQLFKGKFFVCQGEDTRNITNKSDCAEASYRWVRHKYNFDNLGQALMSLFVLASKDGWVDIMYDGLDAVGVDQQPIMNHNPWMLLYFISFLLIVAFFVLNMFVGVVVENFHKCRQHQEEEEARRREEKRLRRLEKKRRSKEKQMAEAQCKPYYSDYSRFRLLVHHLCTSHYLDLFITGVIGLNVVTMAMEHYQQPQILDEALKICNYIFTVIFVLESVFKLVAFGFRRFFQDRWNQLDLAIVLLSIMGITLEEIEVNASLPINPTIIRIMRVLRIARVLKLLKMAVGMRALLDTVMQALPQLWAWSSLETWSVTRHTPVRAWAVMPPFGTLAWPS

SEQ ID NO: 10802 - protein, 2239 aa, Homo sapiens
  Payload ID: 2145;
  Gene Symbol: CACNA1G;
  Gene Name: calcium channel, voltage-dependent, T type, alpha 1G subunit;
  Uniprot ID:  O43497;
  ENSP ID: ENSP00000425451
MDEEEDGAGAEESGQPRSFMRLNDLSGAGGRPGPGSAEKDPGSADSEAEGLPYPALAPVVFFYLSQDSRPRSWCLRTVCNPWFERISMLVILLNCVTLGMFRPCEDIACDSQRCRILQAFDDFIFAFFAVEMVVKMVALGIFGKKCYLGDTWNRLDFFIVIAGMLEYSLDLQNVSFSAVRTVRVLRPLRAINRVPSMRILVTLLLDTLPMLGNVLLLCFFVFFIFGIVGVQLWAGLLRNRCFLPENFSLPLSVDLERYYQTENEDESPFICSQPRENGMRSCRSVPTLRGDGGGGPPCGLDYEAYNSSSNTTCVNWNQYYTNCSAGEHNPFKGAINFDNIGYAWIAIFQVITLEGWVDIMYFVMDAHSFYNFIYFILLIIVGSFFMINLCLVVIATQFSETKQRESQLMREQRVRFLSNASTLASFSEPGSCYEELLKYLVYILRKAARRLAQVSRAAGVRVGLLSSPAPLGGQETQPSSSCSRSHRRLSVHHLVHHHHHHHHHYHLGNGTLRAPRASPEIQDRDANGSRRLMLPPPSTPALSGAPPGGAESVHSFYHADCHLEPVRCQAPPPRSPSEASGRTVGSGKVYPTVHTSPPPETLKEKALVEVAASSGPPTLTSLNIPPGPYSSMHKLLETQSTGACQSSCKISSPCLKADSGACGPDSCPYCARAGAGEVELADREMPDSDSEAVYEFTQDAQHSDLRDPHSRRQRSLGPDAEPSSVLAFWRLICDTFRKIVDSKYFGRGIMIAILVNTLSMGIEYHEQPEELTNALEISNIVFTSLFALEMLLKLLVYGPFGYIKNPYNIFDGVIVVISVWEIVGQQGGGLSVLRTFRLMRVLKLVRFLPALQRQLVVLMKTMDNVATFCMLLMLFIFIFSILGMHLFGCKFASERDGDTLPDRKNFDSLLWAIVTVFQILTQEDWNKVLYNGMASTSSWAALYFIALMTFGNYVLFNLLVAILVEGFQAEEISKREDASGQLSCIQLPVDSQGGDANKSESEPDFFSPSLDGDGDRKKCLALVSLGEHPELRKSLLPPLIIHTAATPMSLPKSTSTGLGEALGPASRRTSSSGSAEPGAAHEMKSPPSARSSPHSPWSAASSWTSRRSSRNSLGRAPSLKRRSPSGERRSLLSGEGQESQDEEESSEEERASPAGSDHRHRGSLEREAKSSFDLPDTLQVPGLHRTASGRGSASEHQDCNGKSASGRLARALRPDDPPLDGDDADDEGNLSKGERVRAWIRARLPACCLERDSWSAYIFPPQSRFRLLCHRIITHKMFDHVVLVIIFLNCITIAMERPKIDPHSAERIFLTLSNYIFTAVFLAEMTVKVVALGWCFGEQAYLRSSWNVLDGLLVLISVIDILVSMVSDSGTKILGMLRVLRLLRTLRPLRVISRAQGLKLVVETLMSSLKPIGNIVVICCAFFIIFGILGVQLFKGKFFVCQGEDTRNITNKSDCAEASYRWVRHKYNFDNLGQALMSLFVLASKDGWVDIMYDGLDAVGVDQQNFHKCRQHQEEEEARRREEKRLRRLEKKRRSKEKQMAEAQCKPYYSDYSRFRLLVHHLCTSHYLDLFITGVIGLNVVTMAMEHYQQPQILDEALKICNYIFTVIFVLESVFKLVAFGFRRFFQDRWNQLDLAIVLLSIMGITLEEIEVNASLPINPTIIRIMRVLRIARVLKLLKMAVGMRALLDTVMQALPQVGNLGLLFMLLFFIFAALGVELFGDLECDETHPCEGLGRHATFRNFGMAFLTLFRVSTGDNWNGIMKDTLRDCDQESTCYNTVISPIYFVSFVLTAQFVLVNVVIAVLMKHLEESNKEAKEEAELEAELELEMKTLSPQPHSPLGSPFLWPGVEGPDSPDSPKPGALHPAAHARSASHFSLEHPTMQPHPTELPGPDLLTVRKSGVSRTHSLPNDSYMCRHGSTAEGPLGHRGWGLPKAQSGSVLSVHSQPADTSYILQLPKDAPHLLQPHSAPTWGTIPKLPPPGRSPLAQRPLRRQAAIRTDSLDVQGLGSREDLLAEVSGPSPPLARAYSFWGQSSTQAQQHSRSHSKISKHMTPPAPCPGPEPNWGKGPPETRSSLELDTELSWISGDLLPPGGQEEPPSPRDLKKCYSVEAQSCQRRPTSWLDEQRRHSIAVSCLDSGSQPHLGTDPSNLGGQPLGGPGSRPKKKLSPPSITIDPPESQGPRTPPSPGICLRRRAPSSDSKDPLASGPPDSMAASPSPKKDVLSLSGLSSDPADLDP

SEQ ID NO: 10803 - protein, 2306 aa, Homo sapiens
  Payload ID: 2145;
  Gene Symbol: CACNA1G;
  Gene Name: calcium channel, voltage-dependent, T type, alpha 1G subunit;
  Uniprot ID:  O43497;
  ENSP ID: ENSP00000425522
MDEEEDGAGAEESGQPRSFMRLNDLSGAGGRPGPGSAEKDPGSADSEAEGLPYPALAPVVFFYLSQDSRPRSWCLRTVCNPWFERISMLVILLNCVTLGMFRPCEDIACDSQRCRILQAFDDFIFAFFAVEMVVKMVALGIFGKKCYLGDTWNRLDFFIVIAGMLEYSLDLQNVSFSAVRTVRVLRPLRAINRVPSMRILVTLLLDTLPMLGNVLLLCFFVFFIFGIVGVQLWAGLLRNRCFLPENFSLPLSVDLERYYQTENEDESPFICSQPRENGMRSCRSVPTLRGDGGGGPPCGLDYEAYNSSSNTTCVNWNQYYTNCSAGEHNPFKGAINFDNIGYAWIAIFQVITLEGWVDIMYFVMDAHSFYNFIYFILLIIVGSFFMINLCLVVIATQFSETKQRESQLMREQRVRFLSNASTLASFSEPGSCYEELLKYLVYILRKAARRLAQVSRAAGVRVGLLSSPAPLGGQETQPSSSCSRSHRRLSVHHLVHHHHHHHHHYHLGNGTLRAPRASPEIQDRDANGSRRLMLPPPSTPALSGAPPGGAESVHSFYHADCHLEPVRCQAPPPRSPSEASGRTVGSGKVYPTVHTSPPPETLKEKALVEVAASSGPPTLTSLNIPPGPYSSMHKLLETQSTGACQSSCKISSPCLKADSGACGPDSCPYCARAGAGEVELADREMPDSDSEAVYEFTQDAQHSDLRDPHSRRQRSLGPDAEPSSVLAFWRLICDTFRKIVDSKYFGRGIMIAILVNTLSMGIEYHEQPEELTNALEISNIVFTSLFALEMLLKLLVYGPFGYIKNPYNIFDGVIVVISVWEIVGQQGGGLSVLRTFRLMRVLKLVRFLPALQRQLVVLMKTMDNVATFCMLLMLFIFIFSILGMHLFGCKFASERDGDTLPDRKNFDSLLWAIVTVFQILTQEDWNKVLYNGMASTSSWAALYFIALMTFGNYVLFNLLVAILVEGFQAEGDANKSESEPDFFSPSLDGDGDRKKCLALVSLGEHPELRKSLLPPLIIHTAATPMSLPKSTSTGLGEALGPASRRTSSSGSAEPGAAHEMKSPPSARSSPHSPWSAASSWTSRRSSRNSLGRAPSLKRRSPSGERRSLLSGEGQESQDEEESSEEERASPAGSDHRHRGSLEREAKSSFDLPDTLQVPGLHRTASGRGSASEHQDCNGKSASGRLARALRPDDPPLDGDDADDEGNLSKGERVRAWIRARLPACCLERDSWSAYIFPPQSRFRLLCHRIITHKMFDHVVLVIIFLNCITIAMERPKIDPHSAERIFLTLSNYIFTAVFLAEMTVKVVALGWCFGEQAYLRSSWNVLDGLLVLISVIDILVSMVSDSGTKILGMLRVLRLLRTLRPLRVISRAQGLKLVVETLMSSLKPIGNIVVICCAFFIIFGILGVQLFKGKFFVCQGEDTRNITNKSDCAEASYRWVRHKYNFDNLGQALMSLFVLASKDGWVDIMYDGLDAVGVDQQPIMNHNPWMLLYFISFLLIVAFFVLNMFVGVVVENFHKCRQHQEEEEARRREEKRLRRLEKKRRNLMLDDVIASGSSASAASEAQCKPYYSDYSRFRLLVHHLCTSHYLDLFITGVIGLNVVTMAMEHYQQPQILDEALKICNYIFTVIFVLESVFKLVAFGFRRFFQDRWNQLDLAIVLLSIMGITLEEIEVNASLPINPTIIRIMRVLRIARVLKLLKMAVGMRALLDTVMQALPQVGNLGLLFMLLFFIFAALGVELFGDLECDETHPCEGLGRHATFRNFGMAFLTLFRVSTGDNWNGIMKDTLRDCDQESTCYNTVISPIYFVSFVLTAQFVLVNVVIAVLMKHLEESNKEAKEEAELEAELELEMKTLSPQPHSPLGSPFLWPGVEGPDSPDSPKPGALHPAAHARSASHFSLEHPTIPLAEMEALSLTSEIVSEPSCSLALTDDSLPDDMHTLLLSALESNMQPHPTELPGPDLLTVRKSGVSRTHSLPNDSYMCRHGSTAEGPLGHRGWGLPKAQSGSVLSVHSQPADTSYILQLPKDAPHLLQPHSAPTWGTIPKLPPPGRSPLAQRPLRRQAAIRTDSLDVQGLGSREDLLAEVSGPSPPLARAYSFWGQSSTQAQQHSRSHSKISKHMTPPAPCPGPEPNWGKGPPETRSSLELDTELSWISGDLLPPGGQEEPPSPRDLKKCYSVEAQSCQRRPTSWLDEQRRHSIAVSCLDSGSQPHLGTDPSNLGGQPLGGPGSRPKKKLSPPSITIDPPESQGPRTPPSPGICLRRRAPSSDSKDPLASGPPDSMAASPSPKKDVLSLSGLSSDPADLDP

SEQ ID NO: 10804 - protein, 2259 aa, Homo sapiens
  Payload ID: 2145;
  Gene Symbol: CACNA1G;
  Gene Name: calcium channel, voltage-dependent, T type, alpha 1G subunit;
  Uniprot ID:  O43497;
  ENSP ID: ENSP00000425698
MDEEEDGAGAEESGQPRSFMRLNDLSGAGGRPGPGSAEKDPGSADSEAEGLPYPALAPVVFFYLSQDSRPRSWCLRTVCNPWFERISMLVILLNCVTLGMFRPCEDIACDSQRCRILQAFDDFIFAFFAVEMVVKMVALGIFGKKCYLGDTWNRLDFFIVIAGMLEYSLDLQNVSFSAVRTVRVLRPLRAINRVPSMRILVTLLLDTLPMLGNVLLLCFFVFFIFGIVGVQLWAGLLRNRCFLPENFSLPLSVDLERYYQTENEDESPFICSQPRENGMRSCRSVPTLRGDGGGGPPCGLDYEAYNSSSNTTCVNWNQYYTNCSAGEHNPFKGAINFDNIGYAWIAIFQVITLEGWVDIMYFVMDAHSFYNFIYFILLIIVGSFFMINLCLVVIATQFSETKQRESQLMREQRVRFLSNASTLASFSEPGSCYEELLKYLVYILRKAARRLAQVSRAAGVRVGLLSSPAPLGGQETQPSSSCSRSHRRLSVHHLVHHHHHHHHHYHLGNGTLRAPRASPEIQDRDANGSRRLMLPPPSTPALSGAPPGGAESVHSFYHADCHLEPVRCQAPPPRSPSEASGRTVGSGKVYPTVHTSPPPETLKEKALVEVAASSGPPTLTSLNIPPGPYSSMHKLLETQSTGACQSSCKISSPCLKADSGACGPDSCPYCARAGAGEVELADREMPDSDSEAVYEFTQDAQHSDLRDPHSRRQRSLGPDAEPSSVLAFWRLICDTFRKIVDSKYFGRGIMIAILVNTLSMGIEYHEQPEELTNALEISNIVFTSLFALEMLLKLLVYGPFGYIKNPYNIFDGVIVVISVWEIVGQQGGGLSVLRTFRLMRVLKLVRFLPALQRQLVVLMKTMDNVATFCMLLMLFIFIFSILGMHLFGCKFASERDGDTLPDRKNFDSLLWAIVTVFQILTQEDWNKVLYNGMASTSSWAALYFIALMTFGNYVLFNLLVAILVEGFQAEEISKREDASGQLSCIQLPVDSQGGDANKSESEPDFFSPSLDGDGDRKKCLALVSLGEHPELRKSLLPPLIIHTAATPMSLPKSTSTGLGEALGPASRRTSSSGSAEPGAAHEMKSPPSARSSPHSPWSAASSWTSRRSSRNSLGRAPSLKRRSPSGERRSLLSGEGQESQDEEESSEEERASPAGSDHRHRGSLEREAKSSFDLPDTLQVPGLHRTASGRGSASEHQDCNGKSASGRLARALRPDDPPLDGDDADDEGNLSKGERVRAWIRARLPACCLERDSWSAYIFPPQSRFRLLCHRIITHKMFDHVVLVIIFLNCITIAMERPKIDPHSAERIFLTLSNYIFTAVFLAEMTVKVVALGWCFGEQAYLRSSWNVLDGLLVLISVIDILVSMVSDSGTKILGMLRVLRLLRTLRPLRVISRAQGLKLVVETLMSSLKPIGNIVVICCAFFIIFGILGVQLFKGKFFVCQGEDTRNITNKSDCAEASYRWVRHKYNFDNLGQALMSLFVLASKDGWVDIMYDGLDAVGVDQQPIMNHNPWMLLYFISFLLIVAFFVLNMFVGVVVENFHKCRQHQEEEEARRREEKRLRRLEKKRRKAQCKPYYSDYSRFRLLVHHLCTSHYLDLFITGVIGLNVVTMAMEHYQQPQILDEALKICNYIFTVIFVLESVFKLVAFGFRRFFQDRWNQLDLAIVLLSIMGITLEEIEVNASLPINPTIIRIMRVLRIARVLKLLKMAVGMRALLDTVGNLGLLFMLLFFIFAALGVELFGDLECDETHPCEGLGRHATFRNFGMAFLTLFRVSTGDNWNGIMKDTLRDCDQESTCYNTVISPIYFVSFVLTAQFVLVNVVIAVLMKHLEESNKEAKEEAELEAELELEMKTLSPQPHSPLGSPFLWPGVEGPDSPDSPKPGALHPAAHARSASHFSLEHPTMQPHPTELPGPDLLTVRKSGVSRTHSLPNDSYMCRHGSTAEGPLGHRGWGLPKAQSGSVLSVHSQPADTSYILQLPKDAPHLLQPHSAPTWGTIPKLPPPGRSPLAQRPLRRQAAIRTDSLDVQGLGSREDLLAEVSGPSPPLARAYSFWGQSSTQAQQHSRSHSKISKHMTPPAPCPGPEPNWGKGPPETRSSLELDTELSWISGDLLPPGGQEEPPSPRDLKKCYSVEAQSCQRRPTSWLDEQRRHSIAVSCLDSGSQPHLGTDPSNLGGQPLGGPGSRPKKKLSPPSITIDPPESQGPRTPPSPGICLRRRAPSSDSKDPLASGPPDSMAASPSPKKDVLSLSGLSSDPADLDP

SEQ ID NO: 10805 - protein, 2284 aa, Homo sapiens
  Payload ID: 2145;
  Gene Symbol: CACNA1G;
  Gene Name: calcium channel, voltage-dependent, T type, alpha 1G subunit;
  Uniprot ID:  O43497;
  ENSP ID: ENSP00000426098
MDEEEDGAGAEESGQPRSFMRLNDLSGAGGRPGPGSAEKDPGSADSEAEGLPYPALAPVVFFYLSQDSRPRSWCLRTVCNPWFERISMLVILLNCVTLGMFRPCEDIACDSQRCRILQAFDDFIFAFFAVEMVVKMVALGIFGKKCYLGDTWNRLDFFIVIAGMLEYSLDLQNVSFSAVRTVRVLRPLRAINRVPSMRILVTLLLDTLPMLGNVLLLCFFVFFIFGIVGVQLWAGLLRNRCFLPENFSLPLSVDLERYYQTENEDESPFICSQPRENGMRSCRSVPTLRGDGGGGPPCGLDYEAYNSSSNTTCVNWNQYYTNCSAGEHNPFKGAINFDNIGYAWIAIFQVITLEGWVDIMYFVMDAHSFYNFIYFILLIIVGSFFMINLCLVVIATQFSETKQRESQLMREQRVRFLSNASTLASFSEPGSCYEELLKYLVYILRKAARRLAQVSRAAGVRVGLLSSPAPLGGQETQPSSSCSRSHRRLSVHHLVHHHHHHHHHYHLGNGTLRAPRASPEIQDRDANGSRRLMLPPPSTPALSGAPPGGAESVHSFYHADCHLEPVRCQAPPPRSPSEASGRTVGSGKVYPTVHTSPPPETLKEKALVEVAASSGPPTLTSLNIPPGPYSSMHKLLETQSTGACQSSCKISSPCLKADSGACGPDSCPYCARAGAGEVELADREMPDSDSEAVYEFTQDAQHSDLRDPHSRRQRSLGPDAEPSSVLAFWRLICDTFRKIVDSKYFGRGIMIAILVNTLSMGIEYHEQPEELTNALEISNIVFTSLFALEMLLKLLVYGPFGYIKNPYNIFDGVIVVISVWEIVGQQGGGLSVLRTFRLMRVLKLVRFLPALQRQLVVLMKTMDNVATFCMLLMLFIFIFSILGMHLFGCKFASERDGDTLPDRKNFDSLLWAIVTVFQILTQEDWNKVLYNGMASTSSWAALYFIALMTFGNYVLFNLLVAILVEGFQAEEISKREDASGQLSCIQLPVDSQGGDANKSESEPDFFSPSLDGDGDRKKCLALVSLGEHPELRKSLLPPLIIHTAATPMSLPKSTSTGLGEALGPASRRTSSSGSAEPGAAHEMKSPPSARSSPHSPWSAASSWTSRRSSRNSLGRAPSLKRRSPSGERRSLLSGEGQESQDEEESSEEERASPAGSDHRHRGSLEREAKSSFDLPDTLQVPGLHRTASGRGSASEHQDCNGKSASGRLARALRPDDPPLDGDDADDEGNLSKGERVRAWIRARLPACCLERDSWSAYIFPPQSRFRLLCHRIITHKMFDHVVLVIIFLNCITIAMERPKIDPHSAERIFLTLSNYIFTAVFLAEMTVKVVALGWCFGEQAYLRSSWNVLDGLLVLISVIDILVSMVSDSGTKILGMLRVLRLLRTLRPLRVISRAQGLKLVVETLMSSLKPIGNIVVICCAFFIIFGILGVQLFKGKFFVCQGEDTRNITNKSDCAEASYRWVRHKYNFDNLGQALMSLFVLASKDGWVDIMYDGLDAVGVDQQPIMNHNPWMLLYFISFLLIVAFFVLNMFVGVVVENFHKCRQHQEEEEARRREEKRLRRLEKKRRNLMLDDVIASGSSASAASEAQCKPYYSDYSRFRLLVHHLCTSHYLDLFITGVIGLNVVTMAMEHYQQPQILDEALKICNYIFTVIFVLESVFKLVAFGFRRFFQDRWNQLDLAIVLLSIMGITLEEIEVNASLPINPTIIRIMRVLRIARVLKLLKMAVGMRALLDTVMQALPQVGNLGLLFMLLFFIFAALGVELFGDLECDETHPCEGLGRHATFRNFGMAFLTLFRVSTGDNWNGIMKDTLRDCDQESTCYNTVISPIYFVSFVLTAQFVLVNVVIAVLMKHLEESNKEAKEEAELEAELELEMKTLSPQPHSPLGSPFLWPGVEGPDSPDSPKPGALHPAAHARSASHFSLEHPTMQPHPTELPGPDLLTVRKSGVSRTHSLPNDSYMCRHGSTAEGPLGHRGWGLPKAQSGSVLSVHSQPADTSYILQLPKDAPHLLQPHSAPTWGTIPKLPPPGRSPLAQRPLRRQAAIRTDSLDVQGLGSREDLLAEVSGPSPPLARAYSFWGQSSTQAQQHSRSHSKISKHMTPPAPCPGPEPNWGKGPPETRSSLELDTELSWISGDLLPPGGQEEPPSPRDLKKCYSVEAQSCQRRPTSWLDEQRRHSIAVSCLDSGSQPHLGTDPSNLGGQPLGGPGSRPKKKLSPPSITIDPPESQGPRTPPSPGICLRRRAPSSDSKDPLASGPPDSMAASPSPKKDVLSLSGLSSDPADLDP

SEQ ID NO: 10806 - protein, 2287 aa, Homo sapiens
  Payload ID: 2145;
  Gene Symbol: CACNA1G;
  Gene Name: calcium channel, voltage-dependent, T type, alpha 1G subunit;
  Uniprot ID:  O43497;
  ENSP ID: ENSP00000426172
MDEEEDGAGAEESGQPRSFMRLNDLSGAGGRPGPGSAEKDPGSADSEAEGLPYPALAPVVFFYLSQDSRPRSWCLRTVCNPWFERISMLVILLNCVTLGMFRPCEDIACDSQRCRILQAFDDFIFAFFAVEMVVKMVALGIFGKKCYLGDTWNRLDFFIVIAGMLEYSLDLQNVSFSAVRTVRVLRPLRAINRVPSMRILVTLLLDTLPMLGNVLLLCFFVFFIFGIVGVQLWAGLLRNRCFLPENFSLPLSVDLERYYQTENEDESPFICSQPRENGMRSCRSVPTLRGDGGGGPPCGLDYEAYNSSSNTTCVNWNQYYTNCSAGEHNPFKGAINFDNIGYAWIAIFQVITLEGWVDIMYFVMDAHSFYNFIYFILLIIVGSFFMINLCLVVIATQFSETKQRESQLMREQRVRFLSNASTLASFSEPGSCYEELLKYLVYILRKAARRLAQVSRAAGVRVGLLSSPAPLGGQETQPSSSCSRSHRRLSVHHLVHHHHHHHHHYHLGNGTLRAPRASPEIQDRDANGSRRLMLPPPSTPALSGAPPGGAESVHSFYHADCHLEPVRCQAPPPRSPSEASGRTVGSGKVYPTVHTSPPPETLKEKALVEVAASSGPPTLTSLNIPPGPYSSMHKLLETQSTGACQSSCKISSPCLKADSGACGPDSCPYCARAGAGEVELADREMPDSDSEAVYEFTQDAQHSDLRDPHSRRQRSLGPDAEPSSVLAFWRLICDTFRKIVDSKYFGRGIMIAILVNTLSMGIEYHEQPEELTNALEISNIVFTSLFALEMLLKLLVYGPFGYIKNPYNIFDGVIVVISVWEIVGQQGGGLSVLRTFRLMRVLKLVRFLPALQRQLVVLMKTMDNVATFCMLLMLFIFIFSILGMHLFGCKFASERDGDTLPDRKNFDSLLWAIVTVFQILTQEDWNKVLYNGMASTSSWAALYFIALMTFGNYVLFNLLVAILVEGFQAEEISKREDASGQLSCIQLPVDSQGGDANKSESEPDFFSPSLDGDGDRKKCLALVSLGEHPELRKSLLPPLIIHTAATPMSLPKSTSTGLGEALGPASRRTSSSGSAEPGAAHEMKSPPSARSSPHSPWSAASSWTSRRSSRNSLGRAPSLKRRSPSGERRSLLSGEGQESQDEEESSEEERASPAGSDHRHRGSLEREAKSSFDLPDTLQVPGLHRTASGRGSASEHQDCNGKSASGRLARALRPDDPPLDGDDADDEGNLSKGERVRAWIRARLPACCLERDSWSAYIFPPQSRFRLLCHRIITHKMFDHVVLVIIFLNCITIAMERPKIDPHSAERIFLTLSNYIFTAVFLAEMTVKVVALGWCFGEQAYLRSSWNVLDGLLVLISVIDILVSMVSDSGTKILGMLRVLRLLRTLRPLRVISRAQGLKLVVETLMSSLKPIGNIVVICCAFFIIFGILGVQLFKGKFFVCQGEDTRNITNKSDCAEASYRWVRHKYNFDNLGQALMSLFVLASKDGWVDIMYDGLDAVGVDQQNFHKCRQHQEEEEARRREEKRLRRLEKKRRSKEKQMAEAQCKPYYSDYSRFRLLVHHLCTSHYLDLFITGVIGLNVVTMAMEHYQQPQILDEALKICNYIFTVIFVLESVFKLVAFGFRRFFQDRWNQLDLAIVLLSIMGITLEEIEVNASLPINPTIIRIMRVLRIARVLKLLKMAVGMRALLDTVMQALPQVGNLGLLFMLLFFIFAALGVELFGDLECDETHPCEGLGRHATFRNFGMAFLTLFRVSTGDNWNGIMKDTLRDCDQESTCYNTVISPIYFVSFVLTAQFVLVNVVIAVLMKHLEESNKEAKEEAELEAELELEMKTLSPQPHSPLGSPFLWPGVEGPDSPDSPKPGALHPAAHARSASHFSLEHPTDRQLFDTISLLIQGSLEWELKLMDELAGPGGQPSAFPSAPSLGGSDPQMQPHPTELPGPDLLTVRKSGVSRTHSLPNDSYMCRHGSTAEGPLGHRGWGLPKAQSGSVLSVHSQPADTSYILQLPKDAPHLLQPHSAPTWGTIPKLPPPGRSPLAQRPLRRQAAIRTDSLDVQGLGSREDLLAEVSGPSPPLARAYSFWGQSSTQAQQHSRSHSKISKHMTPPAPCPGPEPNWGKGPPETRSSLELDTELSWISGDLLPPGGQEEPPSPRDLKKCYSVEAQSCQRRPTSWLDEQRRHSIAVSCLDSGSQPHLGTDPSNLGGQPLGGPGSRPKKKLSPPSITIDPPESQGPRTPPSPGICLRRRAPSSDSKDPLASGPPDSMAASPSPKKDVLSLSGLSSDPADLDP

SEQ ID NO: 10807 - protein, 2321 aa, Homo sapiens
  Payload ID: 2145;
  Gene Symbol: CACNA1G;
  Gene Name: calcium channel, voltage-dependent, T type, alpha 1G subunit;
  Uniprot ID:  O43497;
  ENSP ID: ENSP00000426232
MDEEEDGAGAEESGQPRSFMRLNDLSGAGGRPGPGSAEKDPGSADSEAEGLPYPALAPVVFFYLSQDSRPRSWCLRTVCNPWFERISMLVILLNCVTLGMFRPCEDIACDSQRCRILQAFDDFIFAFFAVEMVVKMVALGIFGKKCYLGDTWNRLDFFIVIAGMLEYSLDLQNVSFSAVRTVRVLRPLRAINRVPSMRILVTLLLDTLPMLGNVLLLCFFVFFIFGIVGVQLWAGLLRNRCFLPENFSLPLSVDLERYYQTENEDESPFICSQPRENGMRSCRSVPTLRGDGGGGPPCGLDYEAYNSSSNTTCVNWNQYYTNCSAGEHNPFKGAINFDNIGYAWIAIFQVITLEGWVDIMYFVMDAHSFYNFIYFILLIIVGSFFMINLCLVVIATQFSETKQRESQLMREQRVRFLSNASTLASFSEPGSCYEELLKYLVYILRKAARRLAQVSRAAGVRVGLLSSPAPLGGQETQPSSSCSRSHRRLSVHHLVHHHHHHHHHYHLGNGTLRAPRASPEIQDRDANGSRRLMLPPPSTPALSGAPPGGAESVHSFYHADCHLEPVRCQAPPPRSPSEASGRTVGSGKVYPTVHTSPPPETLKEKALVEVAASSGPPTLTSLNIPPGPYSSMHKLLETQSTGACQSSCKISSPCLKADSGACGPDSCPYCARAGAGEVELADREMPDSDSEAVYEFTQDAQHSDLRDPHSRRQRSLGPDAEPSSVLAFWRLICDTFRKIVDSKYFGRGIMIAILVNTLSMGIEYHEQPEELTNALEISNIVFTSLFALEMLLKLLVYGPFGYIKNPYNIFDGVIVVISVWEIVGQQGGGLSVLRTFRLMRVLKLVRFLPALQRQLVVLMKTMDNVATFCMLLMLFIFIFSILGMHLFGCKFASERDGDTLPDRKNFDSLLWAIVTVFQILTQEDWNKVLYNGMASTSSWAALYFIALMTFGNYVLFNLLVAILVEGFQAEEISKREDASGQLSCIQLPVDSQGGDANKSESEPDFFSPSLDGDGDRKKCLALVSLGEHPELRKSLLPPLIIHTAATPMSLPKSTSTGLGEALGPASRRTSSSGSAEPGAAHEMKSPPSARSSPHSPWSAASSWTSRRSSRNSLGRAPSLKRRSPSGERRSLLSGEGQESQDEEESSEEERASPAGSDHRHRGSLEREAKSSFDLPDTLQVPGLHRTASGRGSASEHQDCNGKSASGRLARALRPDDPPLDGDDADDEGNLSKGERVRAWIRARLPACCLERDSWSAYIFPPQSRFRLLCHRIITHKMFDHVVLVIIFLNCITIAMERPKIDPHSAERIFLTLSNYIFTAVFLAEMTVKVVALGWCFGEQAYLRSSWNVLDGLLVLISVIDILVSMVSDSGTKILGMLRVLRLLRTLRPLRVISRAQGLKLVVETLMSSLKPIGNIVVICCAFFIIFGILGVQLFKGKFFVCQGEDTRNITNKSDCAEASYRWVRHKYNFDNLGQALMSLFVLASKDGWVDIMYDGLDAVGVDQQPIMNHNPWMLLYFISFLLIVAFFVLNMFVGVVVENFHKCRQHQEEEEARRREEKRLRRLEKKRRSKEKQMAEAQCKPYYSDYSRFRLLVHHLCTSHYLDLFITGVIGLNVVTMAMEHYQQPQILDEALKICNYIFTVIFVLESVFKLVAFGFRRFFQDRWNQLDLAIVLLSIMGITLEEIEVNASLPINPTIIRIMRVLRIARVLKLLKMAVGMRALLDTVMQALPQVGNLGLLFMLLFFIFAALGVELFGDLECDETHPCEGLGRHATFRNFGMAFLTLFRVSTGDNWNGIMKDTLRDCDQESTCYNTVISPIYFVSFVLTAQFVLVNVVIAVLMKHLEESNKEAKEEAELEAELELEMKTLSPQPHSPLGSPFLWPGVEGPDSPDSPKPGALHPAAHARSASHFSLEHPTDRQLFDTISLLIQGSLEWELKLMDELAGPGGQPSAFPSAPSLGGSDPQMQPHPTELPGPDLLTVRKSGVSRTHSLPNDSYMCRHGSTAEGPLGHRGWGLPKAQSGSVLSVHSQPADTSYILQLPKDAPHLLQPHSAPTWGTIPKLPPPGRSPLAQRPLRRQAAIRTDSLDVQGLGSREDLLAEVSGPSPPLARAYSFWGQSSTQAQQHSRSHSKISKHMTPPAPCPGPEPNWGKGPPETRSSLELDTELSWISGDLLPPGGQEEPPSPRDLKKCYSVEAQSCQRRPTSWLDEQRRHSIAVSCLDSGSQPHLGTDPSNLGGQPLGGPGSRPKKKLSPPSITIDPPESQGPRTPPSPGICLRRRAPSSDSKDPLASGPPDSMAASPSPKKDVLSLSGLSSDPADLDP

SEQ ID NO: 10808 - protein, 2273 aa, Homo sapiens
  Payload ID: 2145;
  Gene Symbol: CACNA1G;
  Gene Name: calcium channel, voltage-dependent, T type, alpha 1G subunit;
  Uniprot ID:  O43497;
  ENSP ID: ENSP00000426261
MDEEEDGAGAEESGQPRSFMRLNDLSGAGGRPGPGSAEKDPGSADSEAEGLPYPALAPVVFFYLSQDSRPRSWCLRTVCNPWFERISMLVILLNCVTLGMFRPCEDIACDSQRCRILQAFDDFIFAFFAVEMVVKMVALGIFGKKCYLGDTWNRLDFFIVIAGMLEYSLDLQNVSFSAVRTVRVLRPLRAINRVPSMRILVTLLLDTLPMLGNVLLLCFFVFFIFGIVGVQLWAGLLRNRCFLPENFSLPLSVDLERYYQTENEDESPFICSQPRENGMRSCRSVPTLRGDGGGGPPCGLDYEAYNSSSNTTCVNWNQYYTNCSAGEHNPFKGAINFDNIGYAWIAIFQVITLEGWVDIMYFVMDAHSFYNFIYFILLIIVGSFFMINLCLVVIATQFSETKQRESQLMREQRVRFLSNASTLASFSEPGSCYEELLKYLVYILRKAARRLAQVSRAAGVRVGLLSSPAPLGGQETQPSSSCSRSHRRLSVHHLVHHHHHHHHHYHLGNGTLRAPRASPEIQDRDANGSRRLMLPPPSTPALSGAPPGGAESVHSFYHADCHLEPVRCQAPPPRSPSEASGRTVGSGKVYPTVHTSPPPETLKEKALVEVAASSGPPTLTSLNIPPGPYSSMHKLLETQSTGACQSSCKISSPCLKADSGACGPDSCPYCARAGAGEVELADREMPDSDSEAVYEFTQDAQHSDLRDPHSRRQRSLGPDAEPSSVLAFWRLICDTFRKIVDSKYFGRGIMIAILVNTLSMGIEYHEQPEELTNALEISNIVFTSLFALEMLLKLLVYGPFGYIKNPYNIFDGVIVVISVWEIVGQQGGGLSVLRTFRLMRVLKLVRFLPALQRQLVVLMKTMDNVATFCMLLMLFIFIFSILGMHLFGCKFASERDGDTLPDRKNFDSLLWAIVTVFQILTQEDWNKVLYNGMASTSSWAALYFIALMTFGNYVLFNLLVAILVEGFQAEEISKREDASGQLSCIQLPVDSQGGDANKSESEPDFFSPSLDGDGDRKKCLALVSLGEHPELRKSLLPPLIIHTAATPMSLPKSTSTGLGEALGPASRRTSSSGSAEPGAAHEMKSPPSARSSPHSPWSAASSWTSRRSSRNSLGRAPSLKRRSPSGERRSLLSGEGQESQDEEESSEEERASPAGSDHRHRGSLEREAKSSFDLPDTLQVPGLHRTASGRGSASEHQDCNGKSASGRLARALRPDDPPLDGDDADDEGNLSKGERVRAWIRARLPACCLERDSWSAYIFPPQSRFRLLCHRIITHKMFDHVVLVIIFLNCITIAMERPKIDPHSAERIFLTLSNYIFTAVFLAEMTVKVVALGWCFGEQAYLRSSWNVLDGLLVLISVIDILVSMVSDSGTKILGMLRVLRLLRTLRPLRVISRAQGLKLVVETLMSSLKPIGNIVVICCAFFIIFGILGVQLFKGKFFVCQGEDTRNITNKSDCAEASYRWVRHKYNFDNLGQALMSLFVLASKDGWVDIMYDGLDAVGVDQQPIMNHNPWMLLYFISFLLIVAFFVLNMFVGVVVENFHKCRQHQEEEEARRREEKRLRRLEKKRRSKEKQMAEAQCKPYYSDYSRFRLLVHHLCTSHYLDLFITGVIGLNVVTMAMEHYQQPQILDEALKICNYIFTVIFVLESVFKLVAFGFRRFFQDRWNQLDLAIVLLSIMGITLEEIEVNASLPINPTIIRIMRVLRIARVLKLLKMAVGMRALLDTVMQALPQVGNLGLLFMLLFFIFAALGVELFGDLECDETHPCEGLGRHATFRNFGMAFLTLFRVSTGDNWNGIMKDTLRDCDQESTCYNTVISPIYFVSFVLTAQFVLVNVVIAVLMKHLEESNKEAKEEAELEAELELEMKTLSPQPHSPLGSPFLWPGVEGPDSPDSPKPGALHPAAHARSASHFSLEHPTMQPHPTELPGPDLLTVRKSGVSRTHSLPNDSYMCRHGSTAEGPLGHRGWGLPKAQSGSVLSVHSQPADTSYILQLPKDAPHLLQPHSAPTWGTIPKLPPPGRSPLAQRPLRRQAAIRTDSLDVQGLGSREDLLAEVSGPSPPLARAYSFWGQSSTQAQQHSRSHSKISKHMTPPAPCPGPEPNWGKGPPETRSSLELDTELSWISGDLLPPGGQEEPPSPRDLKKCYSVEAQSCQRRPTSWLDEQRRHSIAVSCLDSGSQPHLGTDPSNLGGQPLGGPGSRPKKKLSPPSITIDPPESQGPRTPPSPGICLRRRAPSSDSKDPLASGPPDSMAASPSPKKDVLSLSGLSSDPADLDP

SEQ ID NO: 10809 - protein, 1776 aa, Homo sapiens
  Payload ID: 2145;
  Gene Symbol: CACNA1G;
  Gene Name: calcium channel, voltage-dependent, T type, alpha 1G subunit;
  Uniprot ID:  O43497;
  ENSP ID: ENSP00000426313
MDEEEDGAGAEESGQPRSFMRLNDLSGAGGRPGPGSAEKDPGSADSEAEGLPYPALAPVVFFYLSQDSRPRSWCLRTVCNPWFERISMLVILLNCVTLGMFRPCEDIACDSQRCRILQAFDDFIFAFFAVEMVVKMVALGIFGKKCYLGDTWNRLDFFIVIAGMLEYSLDLQNVSFSAVRTVRVLRPLRAINRVPSMRILVTLLLDTLPMLGNVLLLCFFVFFIFGIVGVQLWAGLLRNRCFLPENFSLPLSVDLERYYQTENEDESPFICSQPRENGMRSCRSVPTLRGDGGGGPPCGLDYEAYNSSSNTTCVNWNQYYTNCSAGEHNPFKGAINFDNIGYAWIAIFQVITLEGWVDIMYFVMDAHSFYNFIYFILLIIVGSFFMINLCLVVIATQFSETKQRESQLMREQRVRFLSNASTLASFSEPGSCYEELLKYLVYILRKAARRLAQVSRAAGVRVGLLSSPAPLGGQETQPSSSCSRSHRRLSVHHLVHHHHHHHHHYHLGNGTLRAPRASPEIQDRDANGSRRLMLPPPSTPALSGAPPGGAESVHSFYHADCHLEPVRCQAPPPRSPSEASGRTVGSGKVYPTVHTSPPPETLKEKALVEVAASSGPPTLTSLNIPPGPYSSMHKLLETQSTGACQSSCKISSPCLKADSGACGPDSCPYCARAGAGEVELADREMPDSDSEAVYEFTQDAQHSDLRDPHSRRQRSLGPDAEPSSVLAFWRLICDTFRKIVDSKYFGRGIMIAILVNTLSMGIEYHEQPEELTNALEISNIVFTSLFALEMLLKLLVYGPFGYIKNPYNIFDGVIVVISVWEIVGQQGGGLSVLRTFRLMRVLKLVRFLPALQRQLVVLMKTMDNVATFCMLLMLFIFIFSILGMHLFGCKFASERDGDTLPDRKNFDSLLWAIVTVFQILTQEDWNKVLYNGMASTSSWAALYFIALMTFGNYVLFNLLVAILVEGFQAEEISKREDASGQLSCIQLPVDSQGGDANKSESEPDFFSPSLDGDGDRKKCLALVSLGEHPELRKSLLPPLIIHTAATPMSLPKSTSTGLGEALGPASRRTSSSGSAEPGAAHEMKSPPSARSSPHSPWSAASSWTSRRSSRNSLGRAPSLKRRSPSGERRSLLSGEGQESQDEEESSEEERASPAGSDHRHRGSLEREAKSSFDLPDTLQVPGLHRTASGRGSASEHQDCNGKSASGRLARALRPDDPPLDGDDADDEGNLSKGERVRAWIRARLPACCLERDSWSAYIFPPQSRFRLLCHRIITHKMFDHVVLVIIFLNCITIAMERPKIDPHSAERIFLTLSNYIFTAVFLAEMTVKVVALGWCFGEQAYLRSSWNVLDGLLVLISVIDILVSMVSDSGTKILGMLRVLRLLRTLRPLRVISRAQGLKLVVETLMSSLKPIGNIVVICCAFFIIFGILGVQLFKGKFFVCQGEDTRNITNKSDCAEASYRWVRHKYNFDNLGQALMSLFVLASKDGWVDIMYDGLDAVGVDQQPIMNHNPWMLLYFISFLLIVAFFVLNMFVGVVVENFHKCRQHQEEEEARRREEKRLRRLEKKRRNLMLDDVIASGSSASAASEAQCKPYYSDYSRFRLLVHHLCTSHYLDLFITGVIGLNVVTMAMEHYQQPQILDEALKICNYIFTVIFVLESVFKLVAFGFRRFFQDRWNQLDLAIVLLSIMGITLEEIEVNASLPINPTIIRIMRVLRIARVLKLLKMAVGMRALLDTVMQALPQLWAWSSLETWSVTRHTPVRAWAVMPPFGTLAWPS

SEQ ID NO: 10810 - protein, 1735 aa, Homo sapiens
  Payload ID: 2145;
  Gene Symbol: CACNA1G;
  Gene Name: calcium channel, voltage-dependent, T type, alpha 1G subunit;
  Uniprot ID:  O43497;
  ENSP ID: ENSP00000426558
MDEEEDGAGAEESGQPRSFMRLNDLSGAGGRPGPGSAEKDPGSADSEAEGLPYPALAPVVFFYLSQDSRPRSWCLRTVCNPWFERISMLVILLNCVTLGMFRPCEDIACDSQRCRILQAFDDFIFAFFAVEMVVKMVALGIFGKKCYLGDTWNRLDFFIVIAGMLEYSLDLQNVSFSAVRTVRVLRPLRAINRVPSMRILVTLLLDTLPMLGNVLLLCFFVFFIFGIVGVQLWAGLLRNRCFLPENFSLPLSVDLERYYQTENEDESPFICSQPRENGMRSCRSVPTLRGDGGGGPPCGLDYEAYNSSSNTTCVNWNQYYTNCSAGEHNPFKGAINFDNIGYAWIAIFQVITLEGWVDIMYFVMDAHSFYNFIYFILLIIVGSFFMINLCLVVIATQFSETKQRESQLMREQRVRFLSNASTLASFSEPGSCYEELLKYLVYILRKAARRLAQVSRAAGVRVGLLSSPAPLGGQETQPSSSCSRSHRRLSVHHLVHHHHHHHHHYHLGNGTLRAPRASPEIQDRDANGSRRLMLPPPSTPALSGAPPGGAESVHSFYHADCHLEPVRCQAPPPRSPSEASGRTVGSGKVYPTVHTSPPPETLKEKALVEVAASSGPPTLTSLNIPPGPYSSMHKLLETQSTGACQSSCKISSPCLKADSGACGPDSCPYCARAGAGEVELADREMPDSDSEAVYEFTQDAQHSDLRDPHSRRQRSLGPDAEPSSVLAFWRLICDTFRKIVDSKYFGRGIMIAILVNTLSMGIEYHEQPEELTNALEISNIVFTSLFALEMLLKLLVYGPFGYIKNPYNIFDGVIVVISVWEIVGQQGGGLSVLRTFRLMRVLKLVRFLPALQRQLVVLMKTMDNVATFCMLLMLFIFIFSILGMHLFGCKFASERDGDTLPDRKNFDSLLWAIVTVFQILTQEDWNKVLYNGMASTSSWAALYFIALMTFGNYVLFNLLVAILVEGFQAEGDANKSESEPDFFSPSLDGDGDRKKCLALVSLGEHPELRKSLLPPLIIHTAATPMSLPKSTSTGLGEALGPASRRTSSSGSAEPGAAHEMKSPPSARSSPHSPWSAASSWTSRRSSRNSLGRAPSLKRRSPSGERRSLLSGEGQESQDEEESSEEERASPAGSDHRHRGSLEREAKSSFDLPDTLQVPGLHRTASGRGSASEHQDCNGKSASGRLARALRPDDPPLDGDDADDEGNLSKGERVRAWIRARLPACCLERDSWSAYIFPPQSRFRLLCHRIITHKMFDHVVLVIIFLNCITIAMERPKIDPHSAERIFLTLSNYIFTAVFLAEMTVKVVALGWCFGEQAYLRSSWNVLDGLLVLISVIDILVSMVSDSGTKILGMLRVLRLLRTLRPLRVISRAQGLKLVVETLMSSLKPIGNIVVICCAFFIIFGILGVQLFKGKFFVCQGEDTRNITNKSDCAEASYRWVRHKYNFDNLGQALMSLFVLASKDGWVDIMYDGLDAVGVDQQPIMNHNPWMLLYFISFLLIVAFFVLNMFVGVVVENFHKCRQHQEEEEARRREEKRLRRLEKKRRKAQCKPYYSDYSRFRLLVHHLCTSHYLDLFITGVIGLNVVTMAMEHYQQPQILDEALKICNYIFTVIFVLESVFKLVAFGFRRFFQDRWNQLDLAIVLLSIMGITLEEIEVNASLPINPTIIRIMRVLRIARVLKLLKMAVGMRALLDTVMQALPQLWAWSSLETWSVTRHTPVRAWAVMPPFGTLAWPS

SEQ ID NO: 10811 - protein, 2232 aa, Homo sapiens
  Payload ID: 2145;
  Gene Symbol: CACNA1G;
  Gene Name: calcium channel, voltage-dependent, T type, alpha 1G subunit;
  Uniprot ID:  O43497;
  ENSP ID: ENSP00000426814
MDEEEDGAGAEESGQPRSFMRLNDLSGAGGRPGPGSAEKDPGSADSEAEGLPYPALAPVVFFYLSQDSRPRSWCLRTVCNPWFERISMLVILLNCVTLGMFRPCEDIACDSQRCRILQAFDDFIFAFFAVEMVVKMVALGIFGKKCYLGDTWNRLDFFIVIAGMLEYSLDLQNVSFSAVRTVRVLRPLRAINRVPSMRILVTLLLDTLPMLGNVLLLCFFVFFIFGIVGVQLWAGLLRNRCFLPENFSLPLSVDLERYYQTENEDESPFICSQPRENGMRSCRSVPTLRGDGGGGPPCGLDYEAYNSSSNTTCVNWNQYYTNCSAGEHNPFKGAINFDNIGYAWIAIFQVITLEGWVDIMYFVMDAHSFYNFIYFILLIIVGSFFMINLCLVVIATQFSETKQRESQLMREQRVRFLSNASTLASFSEPGSCYEELLKYLVYILRKAARRLAQVSRAAGVRVGLLSSPAPLGGQETQPSSSCSRSHRRLSVHHLVHHHHHHHHHYHLGNGTLRAPRASPEIQDRDANGSRRLMLPPPSTPALSGAPPGGAESVHSFYHADCHLEPVRCQAPPPRSPSEASGRTVGSGKVYPTVHTSPPPETLKEKALVEVAASSGPPTLTSLNIPPGPYSSMHKLLETQSTGACQSSCKISSPCLKADSGACGPDSCPYCARAGAGEVELADREMPDSDSEAVYEFTQDAQHSDLRDPHSRRQRSLGPDAEPSSVLAFWRLICDTFRKIVDSKYFGRGIMIAILVNTLSMGIEYHEQPEELTNALEISNIVFTSLFALEMLLKLLVYGPFGYIKNPYNIFDGVIVVISVWEIVGQQGGGLSVLRTFRLMRVLKLVRFLPALQRQLVVLMKTMDNVATFCMLLMLFIFIFSILGMHLFGCKFASERDGDTLPDRKNFDSLLWAIVTVFQILTQEDWNKVLYNGMASTSSWAALYFIALMTFGNYVLFNLLVAILVEGFQAEEISKREDASGQLSCIQLPVDSQGGDANKSESEPDFFSPSLDGDGDRKKCLALVSLGEHPELRKSLLPPLIIHTAATPMSLPKSTSTGLGEALGPASRRTSSSGSAEPGAAHEMKSPPSARSSPHSPWSAASSWTSRRSSRNSLGRAPSLKRRSPSGERRSLLSGEGQESQDEEESSEEERASPAGSDHRHRGSLEREAKSSFDLPDTLQVPGLHRTASGRGSASEHQDCNGKSASGRLARALRPDDPPLDGDDADDEGNLSKGERVRAWIRARLPACCLERDSWSAYIFPPQSRFRLLCHRIITHKMFDHVVLVIIFLNCITIAMERPKIDPHSAERIFLTLSNYIFTAVFLAEMTVKVVALGWCFGEQAYLRSSWNVLDGLLVLISVIDILVSMVSDSGTKILGMLRVLRLLRTLRPLRVISRAQGLKLVVETLMSSLKPIGNIVVICCAFFIIFGILGVQLFKGKFFVCQGEDTRNITNKSDCAEASYRWVRHKYNFDNLGQALMSLFVLASKDGWVDIMYDGLDAVGVDQQNFHKCRQHQEEEEARRREEKRLRRLEKKRRKAQCKPYYSDYSRFRLLVHHLCTSHYLDLFITGVIGLNVVTMAMEHYQQPQILDEALKICNYIFTVIFVLESVFKLVAFGFRRFFQDRWNQLDLAIVLLSIMGITLEEIEVNASLPINPTIIRIMRVLRIARVLKLLKMAVGMRALLDTVMQALPQVGNLGLLFMLLFFIFAALGVELFGDLECDETHPCEGLGRHATFRNFGMAFLTLFRVSTGDNWNGIMKDTLRDCDQESTCYNTVISPIYFVSFVLTAQFVLVNVVIAVLMKHLEESNKEAKEEAELEAELELEMKTLSPQPHSPLGSPFLWPGVEGPDSPDSPKPGALHPAAHARSASHFSLEHPTMQPHPTELPGPDLLTVRKSGVSRTHSLPNDSYMCRHGSTAEGPLGHRGWGLPKAQSGSVLSVHSQPADTSYILQLPKDAPHLLQPHSAPTWGTIPKLPPPGRSPLAQRPLRRQAAIRTDSLDVQGLGSREDLLAEVSGPSPPLARAYSFWGQSSTQAQQHSRSHSKISKHMTPPAPCPGPEPNWGKGPPETRSSLELDTELSWISGDLLPPGGQEEPPSPRDLKKCYSVEAQSCQRRPTSWLDEQRRHSIAVSCLDSGSQPHLGTDPSNLGGQPLGGPGSRPKKKLSPPSITIDPPESQGPRTPPSPGICLRRRAPSSDSKDPLASGPPDSMAASPSPKKDVLSLSGLSSDPADLDP

SEQ ID NO: 10812 - protein, 2298 aa, Homo sapiens
  Payload ID: 2145;
  Gene Symbol: CACNA1G;
  Gene Name: calcium channel, voltage-dependent, T type, alpha 1G subunit;
  Uniprot ID:  O43497;
  ENSP ID: ENSP00000427173
MDEEEDGAGAEESGQPRSFMRLNDLSGAGGRPGPGSAEKDPGSADSEAEGLPYPALAPVVFFYLSQDSRPRSWCLRTVCNPWFERISMLVILLNCVTLGMFRPCEDIACDSQRCRILQAFDDFIFAFFAVEMVVKMVALGIFGKKCYLGDTWNRLDFFIVIAGMLEYSLDLQNVSFSAVRTVRVLRPLRAINRVPSMRILVTLLLDTLPMLGNVLLLCFFVFFIFGIVGVQLWAGLLRNRCFLPENFSLPLSVDLERYYQTENEDESPFICSQPRENGMRSCRSVPTLRGDGGGGPPCGLDYEAYNSSSNTTCVNWNQYYTNCSAGEHNPFKGAINFDNIGYAWIAIFQVITLEGWVDIMYFVMDAHSFYNFIYFILLIIVGSFFMINLCLVVIATQFSETKQRESQLMREQRVRFLSNASTLASFSEPGSCYEELLKYLVYILRKAARRLAQVSRAAGVRVGLLSSPAPLGGQETQPSSSCSRSHRRLSVHHLVHHHHHHHHHYHLGNGTLRAPRASPEIQDRDANGSRRLMLPPPSTPALSGAPPGGAESVHSFYHADCHLEPVRCQAPPPRSPSEASGRTVGSGKVYPTVHTSPPPETLKEKALVEVAASSGPPTLTSLNIPPGPYSSMHKLLETQSTGACQSSCKISSPCLKADSGACGPDSCPYCARAGAGEVELADREMPDSDSEAVYEFTQDAQHSDLRDPHSRRQRSLGPDAEPSSVLAFWRLICDTFRKIVDSKYFGRGIMIAILVNTLSMGIEYHEQPEELTNALEISNIVFTSLFALEMLLKLLVYGPFGYIKNPYNIFDGVIVVISVWEIVGQQGGGLSVLRTFRLMRVLKLVRFLPALQRQLVVLMKTMDNVATFCMLLMLFIFIFSILGMHLFGCKFASERDGDTLPDRKNFDSLLWAIVTVFQILTQEDWNKVLYNGMASTSSWAALYFIALMTFGNYVLFNLLVAILVEGFQAEGDANKSESEPDFFSPSLDGDGDRKKCLALVSLGEHPELRKSLLPPLIIHTAATPMSLPKSTSTGLGEALGPASRRTSSSGSAEPGAAHEMKSPPSARSSPHSPWSAASSWTSRRSSRNSLGRAPSLKRRSPSGERRSLLSGEGQESQDEEESSEEERASPAGSDHRHRGSLEREAKSSFDLPDTLQVPGLHRTASGRGSASEHQDCNGKSASGRLARALRPDDPPLDGDDADDEGNLSKGERVRAWIRARLPACCLERDSWSAYIFPPQSRFRLLCHRIITHKMFDHVVLVIIFLNCITIAMERPKIDPHSAERIFLTLSNYIFTAVFLAEMTVKVVALGWCFGEQAYLRSSWNVLDGLLVLISVIDILVSMVSDSGTKILGMLRVLRLLRTLRPLRVISRAQGLKLVVETLMSSLKPIGNIVVICCAFFIIFGILGVQLFKGKFFVCQGEDTRNITNKSDCAEASYRWVRHKYNFDNLGQALMSLFVLASKDGWVDIMYDGLDAVGVDQQPIMNHNPWMLLYFISFLLIVAFFVLNMFVGVVVENFHKCRQHQEEEEARRREEKRLRRLEKKRRSKEKQMAEAQCKPYYSDYSRFRLLVHHLCTSHYLDLFITGVIGLNVVTMAMEHYQQPQILDEALKICNYIFTVIFVLESVFKLVAFGFRRFFQDRWNQLDLAIVLLSIMGITLEEIEVNASLPINPTIIRIMRVLRIARVLKLLKMAVGMRALLDTVMQALPQVGNLGLLFMLLFFIFAALGVELFGDLECDETHPCEGLGRHATFRNFGMAFLTLFRVSTGDNWNGIMKDTLRDCDQESTCYNTVISPIYFVSFVLTAQFVLVNVVIAVLMKHLEESNKEAKEEAELEAELELEMKTLSPQPHSPLGSPFLWPGVEGPDSPDSPKPGALHPAAHARSASHFSLEHPTDRQLFDTISLLIQGSLEWELKLMDELAGPGGQPSAFPSAPSLGGSDPQMQPHPTELPGPDLLTVRKSGVSRTHSLPNDSYMCRHGSTAEGPLGHRGWGLPKAQSGSVLSVHSQPADTSYILQLPKDAPHLLQPHSAPTWGTIPKLPPPGRSPLAQRPLRRQAAIRTDSLDVQGLGSREDLLAEVSGPSPPLARAYSFWGQSSTQAQQHSRSHSKISKHMTPPAPCPGPEPNWGKGPPETRSSLELDTELSWISGDLLPPGGQEEPPSPRDLKKCYSVEAQSCQRRPTSWLDEQRRHSIAVSCLDSGSQPHLGTDPSNLGGQPLGGPGSRPKKKLSPPSITIDPPESQGPRTPPSPGICLRRRAPSSDSKDPLASGPPDSMAASPSPKKDVLSLSGLSSDPADLDP

SEQ ID NO: 10813 - protein, 1753 aa, Homo sapiens
  Payload ID: 2145;
  Gene Symbol: CACNA1G;
  Gene Name: calcium channel, voltage-dependent, T type, alpha 1G subunit;
  Uniprot ID:  O43497;
  ENSP ID: ENSP00000427231
MDEEEDGAGAEESGQPRSFMRLNDLSGAGGRPGPGSAEKDPGSADSEAEGLPYPALAPVVFFYLSQDSRPRSWCLRTVCNPWFERISMLVILLNCVTLGMFRPCEDIACDSQRCRILQAFDDFIFAFFAVEMVVKMVALGIFGKKCYLGDTWNRLDFFIVIAGMLEYSLDLQNVSFSAVRTVRVLRPLRAINRVPSMRILVTLLLDTLPMLGNVLLLCFFVFFIFGIVGVQLWAGLLRNRCFLPENFSLPLSVDLERYYQTENEDESPFICSQPRENGMRSCRSVPTLRGDGGGGPPCGLDYEAYNSSSNTTCVNWNQYYTNCSAGEHNPFKGAINFDNIGYAWIAIFQVITLEGWVDIMYFVMDAHSFYNFIYFILLIIVGSFFMINLCLVVIATQFSETKQRESQLMREQRVRFLSNASTLASFSEPGSCYEELLKYLVYILRKAARRLAQVSRAAGVRVGLLSSPAPLGGQETQPSSSCSRSHRRLSVHHLVHHHHHHHHHYHLGNGTLRAPRASPEIQDRDANGSRRLMLPPPSTPALSGAPPGGAESVHSFYHADCHLEPVRCQAPPPRSPSEASGRTVGSGKVYPTVHTSPPPETLKEKALVEVAASSGPPTLTSLNIPPGPYSSMHKLLETQSTGACQSSCKISSPCLKADSGACGPDSCPYCARAGAGEVELADREMPDSDSEAVYEFTQDAQHSDLRDPHSRRQRSLGPDAEPSSVLAFWRLICDTFRKIVDSKYFGRGIMIAILVNTLSMGIEYHEQPEELTNALEISNIVFTSLFALEMLLKLLVYGPFGYIKNPYNIFDGVIVVISVWEIVGQQGGGLSVLRTFRLMRVLKLVRFLPALQRQLVVLMKTMDNVATFCMLLMLFIFIFSILGMHLFGCKFASERDGDTLPDRKNFDSLLWAIVTVFQILTQEDWNKVLYNGMASTSSWAALYFIALMTFGNYVLFNLLVAILVEGFQAEGDANKSESEPDFFSPSLDGDGDRKKCLALVSLGEHPELRKSLLPPLIIHTAATPMSLPKSTSTGLGEALGPASRRTSSSGSAEPGAAHEMKSPPSARSSPHSPWSAASSWTSRRSSRNSLGRAPSLKRRSPSGERRSLLSGEGQESQDEEESSEEERASPAGSDHRHRGSLEREAKSSFDLPDTLQVPGLHRTASGRGSASEHQDCNGKSASGRLARALRPDDPPLDGDDADDEGNLSKGERVRAWIRARLPACCLERDSWSAYIFPPQSRFRLLCHRIITHKMFDHVVLVIIFLNCITIAMERPKIDPHSAERIFLTLSNYIFTAVFLAEMTVKVVALGWCFGEQAYLRSSWNVLDGLLVLISVIDILVSMVSDSGTKILGMLRVLRLLRTLRPLRVISRAQGLKLVVETLMSSLKPIGNIVVICCAFFIIFGILGVQLFKGKFFVCQGEDTRNITNKSDCAEASYRWVRHKYNFDNLGQALMSLFVLASKDGWVDIMYDGLDAVGVDQQPIMNHNPWMLLYFISFLLIVAFFVLNMFVGVVVENFHKCRQHQEEEEARRREEKRLRRLEKKRRNLMLDDVIASGSSASAASEAQCKPYYSDYSRFRLLVHHLCTSHYLDLFITGVIGLNVVTMAMEHYQQPQILDEALKICNYIFTVIFVLESVFKLVAFGFRRFFQDRWNQLDLAIVLLSIMGITLEEIEVNASLPINPTIIRIMRVLRIARVLKLLKMAVGMRALLDTVMQALPQLWAWSSLETWSVTRHTPVRAWAVMPPFGTLAWPS

SEQ ID NO: 10814 - protein, 2250 aa, Homo sapiens
  Payload ID: 2145;
  Gene Symbol: CACNA1G;
  Gene Name: calcium channel, voltage-dependent, T type, alpha 1G subunit;
  Uniprot ID:  O43497;
  ENSP ID: ENSP00000427238
MDEEEDGAGAEESGQPRSFMRLNDLSGAGGRPGPGSAEKDPGSADSEAEGLPYPALAPVVFFYLSQDSRPRSWCLRTVCNPWFERISMLVILLNCVTLGMFRPCEDIACDSQRCRILQAFDDFIFAFFAVEMVVKMVALGIFGKKCYLGDTWNRLDFFIVIAGMLEYSLDLQNVSFSAVRTVRVLRPLRAINRVPSMRILVTLLLDTLPMLGNVLLLCFFVFFIFGIVGVQLWAGLLRNRCFLPENFSLPLSVDLERYYQTENEDESPFICSQPRENGMRSCRSVPTLRGDGGGGPPCGLDYEAYNSSSNTTCVNWNQYYTNCSAGEHNPFKGAINFDNIGYAWIAIFQVITLEGWVDIMYFVMDAHSFYNFIYFILLIIVGSFFMINLCLVVIATQFSETKQRESQLMREQRVRFLSNASTLASFSEPGSCYEELLKYLVYILRKAARRLAQVSRAAGVRVGLLSSPAPLGGQETQPSSSCSRSHRRLSVHHLVHHHHHHHHHYHLGNGTLRAPRASPEIQDRDANGSRRLMLPPPSTPALSGAPPGGAESVHSFYHADCHLEPVRCQAPPPRSPSEASGRTVGSGKVYPTVHTSPPPETLKEKALVEVAASSGPPTLTSLNIPPGPYSSMHKLLETQSTGACQSSCKISSPCLKADSGACGPDSCPYCARAGAGEVELADREMPDSDSEAVYEFTQDAQHSDLRDPHSRRQRSLGPDAEPSSVLAFWRLICDTFRKIVDSKYFGRGIMIAILVNTLSMGIEYHEQPEELTNALEISNIVFTSLFALEMLLKLLVYGPFGYIKNPYNIFDGVIVVISVWEIVGQQGGGLSVLRTFRLMRVLKLVRFLPALQRQLVVLMKTMDNVATFCMLLMLFIFIFSILGMHLFGCKFASERDGDTLPDRKNFDSLLWAIVTVFQILTQEDWNKVLYNGMASTSSWAALYFIALMTFGNYVLFNLLVAILVEGFQAEEISKREDASGQLSCIQLPVDSQGGDANKSESEPDFFSPSLDGDGDRKKCLALVSLGEHPELRKSLLPPLIIHTAATPMSLPKSTSTGLGEALGPASRRTSSSGSAEPGAAHEMKSPPSARSSPHSPWSAASSWTSRRSSRNSLGRAPSLKRRSPSGERRSLLSGEGQESQDEEESSEEERASPAGSDHRHRGSLEREAKSSFDLPDTLQVPGLHRTASGRGSASEHQDCNGKSASGRLARALRPDDPPLDGDDADDEGNLSKGERVRAWIRARLPACCLERDSWSAYIFPPQSRFRLLCHRIITHKMFDHVVLVIIFLNCITIAMERPKIDPHSAERIFLTLSNYIFTAVFLAEMTVKVVALGWCFGEQAYLRSSWNVLDGLLVLISVIDILVSMVSDSGTKILGMLRVLRLLRTLRPLRVISRAQGLKLVVETLMSSLKPIGNIVVICCAFFIIFGILGVQLFKGKFFVCQGEDTRNITNKSDCAEASYRWVRHKYNFDNLGQALMSLFVLASKDGWVDIMYDGLDAVGVDQQNFHKCRQHQEEEEARRREEKRLRRLEKKRRNLMLDDVIASGSSASAASEAQCKPYYSDYSRFRLLVHHLCTSHYLDLFITGVIGLNVVTMAMEHYQQPQILDEALKICNYIFTVIFVLESVFKLVAFGFRRFFQDRWNQLDLAIVLLSIMGITLEEIEVNASLPINPTIIRIMRVLRIARVLKLLKMAVGMRALLDTVMQALPQVGNLGLLFMLLFFIFAALGVELFGDLECDETHPCEGLGRHATFRNFGMAFLTLFRVSTGDNWNGIMKDTLRDCDQESTCYNTVISPIYFVSFVLTAQFVLVNVVIAVLMKHLEESNKEAKEEAELEAELELEMKTLSPQPHSPLGSPFLWPGVEGPDSPDSPKPGALHPAAHARSASHFSLEHPTMQPHPTELPGPDLLTVRKSGVSRTHSLPNDSYMCRHGSTAEGPLGHRGWGLPKAQSGSVLSVHSQPADTSYILQLPKDAPHLLQPHSAPTWGTIPKLPPPGRSPLAQRPLRRQAAIRTDSLDVQGLGSREDLLAEVSGPSPPLARAYSFWGQSSTQAQQHSRSHSKISKHMTPPAPCPGPEPNWGKGPPETRSSLELDTELSWISGDLLPPGGQEEPPSPRDLKKCYSVEAQSCQRRPTSWLDEQRRHSIAVSCLDSGSQPHLGTDPSNLGGQPLGGPGSRPKKKLSPPSITIDPPESQGPRTPPSPGICLRRRAPSSDSKDPLASGPPDSMAASPSPKKDVLSLSGLSSDPADLDP

SEQ ID NO: 10815 - protein, 1758 aa, Homo sapiens
  Payload ID: 2145;
  Gene Symbol: CACNA1G;
  Gene Name: calcium channel, voltage-dependent, T type, alpha 1G subunit;
  Uniprot ID:  O43497;
  ENSP ID: ENSP00000427247
MDEEEDGAGAEESGQPRSFMRLNDLSGAGGRPGPGSAEKDPGSADSEAEGLPYPALAPVVFFYLSQDSRPRSWCLRTVCNPWFERISMLVILLNCVTLGMFRPCEDIACDSQRCRILQAFDDFIFAFFAVEMVVKMVALGIFGKKCYLGDTWNRLDFFIVIAGMLEYSLDLQNVSFSAVRTVRVLRPLRAINRVPSMRILVTLLLDTLPMLGNVLLLCFFVFFIFGIVGVQLWAGLLRNRCFLPENFSLPLSVDLERYYQTENEDESPFICSQPRENGMRSCRSVPTLRGDGGGGPPCGLDYEAYNSSSNTTCVNWNQYYTNCSAGEHNPFKGAINFDNIGYAWIAIFQVITLEGWVDIMYFVMDAHSFYNFIYFILLIIVGSFFMINLCLVVIATQFSETKQRESQLMREQRVRFLSNASTLASFSEPGSCYEELLKYLVYILRKAARRLAQVSRAAGVRVGLLSSPAPLGGQETQPSSSCSRSHRRLSVHHLVHHHHHHHHHYHLGNGTLRAPRASPEIQDRDANGSRRLMLPPPSTPALSGAPPGGAESVHSFYHADCHLEPVRCQAPPPRSPSEASGRTVGSGKVYPTVHTSPPPETLKEKALVEVAASSGPPTLTSLNIPPGPYSSMHKLLETQSTGACQSSCKISSPCLKADSGACGPDSCPYCARAGAGEVELADREMPDSDSEAVYEFTQDAQHSDLRDPHSRRQRSLGPDAEPSSVLAFWRLICDTFRKIVDSKYFGRGIMIAILVNTLSMGIEYHEQPEELTNALEISNIVFTSLFALEMLLKLLVYGPFGYIKNPYNIFDGVIVVISVWEIVGQQGGGLSVLRTFRLMRVLKLVRFLPALQRQLVVLMKTMDNVATFCMLLMLFIFIFSILGMHLFGCKFASERDGDTLPDRKNFDSLLWAIVTVFQILTQEDWNKVLYNGMASTSSWAALYFIALMTFGNYVLFNLLVAILVEGFQAEEISKREDASGQLSCIQLPVDSQGGDANKSESEPDFFSPSLDGDGDRKKCLALVSLGEHPELRKSLLPPLIIHTAATPMSLPKSTSTGLGEALGPASRRTSSSGSAEPGAAHEMKSPPSARSSPHSPWSAASSWTSRRSSRNSLGRAPSLKRRSPSGERRSLLSGEGQESQDEEESSEEERASPAGSDHRHRGSLEREAKSSFDLPDTLQVPGLHRTASGRGSASEHQDCNGKSASGRLARALRPDDPPLDGDDADDEGNLSKGERVRAWIRARLPACCLERDSWSAYIFPPQSRFRLLCHRIITHKMFDHVVLVIIFLNCITIAMERPKIDPHSAERIFLTLSNYIFTAVFLAEMTVKVVALGWCFGEQAYLRSSWNVLDGLLVLISVIDILVSMVSDSGTKILGMLRVLRLLRTLRPLRVISRAQGLKLVVETLMSSLKPIGNIVVICCAFFIIFGILGVQLFKGKFFVCQGEDTRNITNKSDCAEASYRWVRHKYNFDNLGQALMSLFVLASKDGWVDIMYDGLDAVGVDQQPIMNHNPWMLLYFISFLLIVAFFVLNMFVGVVVENFHKCRQHQEEEEARRREEKRLRRLEKKRRKAQCKPYYSDYSRFRLLVHHLCTSHYLDLFITGVIGLNVVTMAMEHYQQPQILDEALKICNYIFTVIFVLESVFKLVAFGFRRFFQDRWNQLDLAIVLLSIMGITLEEIEVNASLPINPTIIRIMRVLRIARVLKLLKMAVGMRALLDTVMQALPQLWAWSSLETWSVTRHTPVRAWAVMPPFGTLAWPS

SEQ ID NO: 10816 - protein, 337 aa, Homo sapiens
  Payload ID: 2145;
  Gene Symbol: CACNA1G;
  Gene Name: calcium channel, voltage-dependent, T type, alpha 1G subunit;
  ENSP ID: ENSP00000427697
TASGRGSASEHQDCNGKSASGRLARALRPDDPPLDGDDADDEGNLSKGERVRAWIRARLPACCLERDSWSAYIFPPQSRFRLLCHRIITHKMFDHVVLVIIFLNCITIAMERPKIDPHSAERIFLTLSNYIFTAVFLAEMTVKVVALGWCFGEQAYLRSSWNVLDGLLVLISVIDILVSMVSDSGTKILGMLRVLRLLRTLRPLRVISRAQGLKLVVETLMSSLKPIGNIVVICCAFFIIFGILGVQLFKGKFFVCQGEDTRNITNKSDCAEASYRWVRHKYNFDNLGQALMSLFVLASKDGWVDIMYDGLDAVGVDQQVGLRWAGSICGLRSLSMG

SEQ ID NO: 10817 - protein, 277 aa, Homo sapiens
  Payload ID: 2145;
  Gene Symbol: CACNA1G;
  Gene Name: calcium channel, voltage-dependent, T type, alpha 1G subunit;
  ENSP ID: ENSP00000459988
AFDDFIFAFFAVEMVVKMVALGIFGKKCYLGDTWNRLDFFIVIAGMLEYSLDLQNVSFSAVRTVRVLRPLRAINRVPSMRILVTLLLDTLPMLGNVLLLCFFVFFIFGIVGVQLWAGLLRNRCFLPENFSLPLSVDLERYYQTENEDESPFICSQPRENGMRSCRSVPTLRGDGGGGPPCGLDYEAYNSSSNTTCVNWNQYYTNCSAGEHNPFKGAINFDNIGYAWIAIFQVITLEGWVDIMYFVMDAHSFYNFIYFILLIIFLALRTSPVERASII

SEQ ID NO: 10818 - protein, 2353 aa, Homo sapiens
  Payload ID: 2146;
  Gene Symbol: CACNA1H;
  Gene Name: calcium channel, voltage-dependent, T type, alpha 1H subunit;
  Uniprot ID:  O95180;
  ENSP ID: ENSP00000334198
MTEGARAADEVRVPLGAPPPGPAALVGASPESPGAPGREAERGSELGVSPSESPAAERGAELGADEEQRVPYPALAATVFFCLGQTTRPRSWCLRLVCNPWFEHVSMLVIMLNCVTLGMFRPCEDVECGSERCNILEAFDAFIFAFFAVEMVIKMVALGLFGQKCYLGDTWNRLDFFIVVAGMMEYSLDGHNVSLSAIRTVRVLRPLRAINRVPSMRILVTLLLDTLPMLGNVLLLCFFVFFIFGIVGVQLWAGLLRNRCFLDSAFVRNNNLTFLRPYYQTEEGEENPFICSSRRDNGMQKCSHIPGRRELRMPCTLGWEAYTQPQAEGVGAARNACINWNQYYNVCRSGDSNPHNGAINFDNIGYAWIAIFQVITLEGWVDIMYYVMDAHSFYNFIYFILLIIVGSFFMINLCLVVIATQFSETKQRESQLMREQRARHLSNDSTLASFSEPGSCYEELLKYVGHIFRKVKRRSLRLYARWQSRWRKKVDPSAVQGQGPGHRQRRAGRHTASVHHLVYHHHHHHHHHYHFSHGSPRRPGPEPGACDTRLVRAGAPPSPPSPGRGPPDAESVHSIYHADCHIEGPQERARVAHAAATAAASLRLATGLGTMNYPTILPSGVGSGKGSTSPGPKGKWAGGPPGTGGHGPLSLNSPDPYEKIPHVVGEHGLGQAPGHLSGLSVPCPLPSPPAGTLTCELKSCPYCTRALEDPEGELSGSESGDSDGRGVYEFTQDVRHGDRWDPTRPPRATDTPGPGPGSPQRRAQQRAAPGEPGWMGRLWVTFSGKLRRIVDSKYFSRGIMMAILVNTLSMGVEYHEQPEELTNALEISNIVFTSMFALEMLLKLLACGPLGYIRNPYNIFDGIIVVISVWEIVGQADGGLSVLRTFRLLRVLKLVRFLPALRRQLVVLVKTMDNVATFCTLLMLFIFIFSILGMHLFGCKFSLKTDTGDTVPDRKNFDSLLWAIVTVFQILTQEDWNVVLYNGMASTSSWAALYFVALMTFGNYVLFNLLVAILVEGFQAEGDANRSDTDEDKTSVHFEEDFHKLRELQTTELKMCSLAVTPNGHLEGRGSLSPPLIMCTAATPMPTPKSSPFLDAAPSLPDSRRGSSSSGDPPLGDQKPPASLRSSPCAPWGPSGAWSSRRSSWSSLGRAPSLKRRGQCGERESLLSGEGKGSTDDEAEDGRAAPGPRATPLRRAESLDPRPLRPAALPPTKCRDRDGQVVALPSDFFLRIDSHREDAAELDDDSEDSCCLRLHKVLEPYKPQWCRSREAWALYLFSPQNRFRVSCQKVITHKMFDHVVLVFIFLNCVTIALERPDIDPGSTERVFLSVSNYIFTAIFVAEMMVKVVALGLLSGEHAYLQSSWNLLDGLLVLVSLVDIVVAMASAGGAKILGVLRVLRLLRTLRPLRVISRAPGLKLVVETLISSLRPIGNIVLICCAFFIIFGILGVQLFKGKFYYCEGPDTRNISTKAQCRAAHYRWVRRKYNFDNLGQALMSLFVLSSKDGWVNIMYDGLDAVGVDQQPVQNHNPWMLLYFISFLLIVSFFVLNMFVGVVVENFHKCRQHQEAEEARRREEKRLRRLERRRRSTFPSPEAQRRPYYADYSPTRRSIHSLCTSHYLDLFITFIICVNVITMSMEHYNQPKSLDEALKYCNYVFTIVFVFEAALKLVAFGFRRFFKDRWNQLDLAIVLLSLMGITLEEIEMSAALPINPTIIRIMRVLRIARVLKLLKMATGMRALLDTVVQALPQVGNLGLLFMLLFFIYAALGVELFGRLECSEDNPCEGLSRHATFSNFGMAFLTLFRVSTGDNWNGIMKDTLRECSREDKHCLSYLPALSPVYFVTFVLVAQFVLVNVVVAVLMKHLEESNKEAREDAELDAEIELEMAQGPGSARRVDADRPPLPQESPGARDAPNLVARKVSVSRMLSLPNDSYMFRPVVPASAPHPRPLQEVEMETYGAGTPLGSVASVHSPPAESCASLQIPLAVSSPARSGEPLHALSPRGTARSPSLSRLLCRQEAVHTDSLEGKIDSPRDTLDPAEPGEKTPVRPVTQGGSLQSPPRSPRPASVRTRKHTFGQRCVSSRPAAPGGEEAEASDPADEEVSHITSSACPWQPTAEPHGPEASPVAGGERDLRRLYSVDAQGFLDKPGRADEQWRPSAELGSGEPGEAKAWGPEAEPALGARRKKKMSPPCISVEPPAEDEGSARPSAAEGGSTTLRRRTPSCEATPHRDSLEPTEGSGAGGDPAAKGERWGQASCRAEHLTVPSFAFEPLDLGVPSGDPFLDGSHSVTPESRASSSGAIVPLEPPESEPPMPVGDPPEKRRGLYLTVPQCPLEKPGSPSATPAPGGGADDPV

SEQ ID NO: 10819 - protein, 2347 aa, Homo sapiens
  Payload ID: 2146;
  Gene Symbol: CACNA1H;
  Gene Name: calcium channel, voltage-dependent, T type, alpha 1H subunit;
  Uniprot ID:  O95180;
  ENSP ID: ENSP00000351401
MTEGARAADEVRVPLGAPPPGPAALVGASPESPGAPGREAERGSELGVSPSESPAAERGAELGADEEQRVPYPALAATVFFCLGQTTRPRSWCLRLVCNPWFEHVSMLVIMLNCVTLGMFRPCEDVECGSERCNILEAFDAFIFAFFAVEMVIKMVALGLFGQKCYLGDTWNRLDFFIVVAGMMEYSLDGHNVSLSAIRTVRVLRPLRAINRVPSMRILVTLLLDTLPMLGNVLLLCFFVFFIFGIVGVQLWAGLLRNRCFLDSAFVRNNNLTFLRPYYQTEEGEENPFICSSRRDNGMQKCSHIPGRRELRMPCTLGWEAYTQPQAEGVGAARNACINWNQYYNVCRSGDSNPHNGAINFDNIGYAWIAIFQVITLEGWVDIMYYVMDAHSFYNFIYFILLIIVGSFFMINLCLVVIATQFSETKQRESQLMREQRARHLSNDSTLASFSEPGSCYEELLKYVGHIFRKVKRRSLRLYARWQSRWRKKVDPSAVQGQGPGHRQRRAGRHTASVHHLVYHHHHHHHHHYHFSHGSPRRPGPEPGACDTRLVRAGAPPSPPSPGRGPPDAESVHSIYHADCHIEGPQERARVAHAAATAAASLRLATGLGTMNYPTILPSGVGSGKGSTSPGPKGKWAGGPPGTGGHGPLSLNSPDPYEKIPHVVGEHGLGQAPGHLSGLSVPCPLPSPPAGTLTCELKSCPYCTRALEDPEGELSGSESGDSDGRGVYEFTQDVRHGDRWDPTRPPRATDTPGPGPGSPQRRAQQRAAPGEPGWMGRLWVTFSGKLRRIVDSKYFSRGIMMAILVNTLSMGVEYHEQPEELTNALEISNIVFTSMFALEMLLKLLACGPLGYIRNPYNIFDGIIVVISVWEIVGQADGGLSVLRTFRLLRVLKLVRFLPALRRQLVVLVKTMDNVATFCTLLMLFIFIFSILGMHLFGCKFSLKTDTGDTVPDRKNFDSLLWAIVTVFQILTQEDWNVVLYNGMASTSSWAALYFVALMTFGNYVLFNLLVAILVEGFQAEGDANRSDTDEDKTSVHFEEDFHKLRELQTTELKMCSLAVTPNGHLEGRGSLSPPLIMCTAATPMPTPKSSPFLDAAPSLPDSRRGSSSSGDPPLGDQKPPASLRSSPCAPWGPSGAWSSRRSSWSSLGRAPSLKRRGQCGERESLLSGEGKGSTDDEAEDGRAAPGPRATPLRRAESLDPRPLRPAALPPTKCRDRDGQVVALPSDFFLRIDSHREDAAELDDDSEDSCCLRLHKVLEPYKPQWCRSREAWALYLFSPQNRFRVSCQKVITHKMFDHVVLVFIFLNCVTIALERPDIDPGSTERVFLSVSNYIFTAIFVAEMMVKVVALGLLSGEHAYLQSSWNLLDGLLVLVSLVDIVVAMASAGGAKILGVLRVLRLLRTLRPLRVISRAPGLKLVVETLISSLRPIGNIVLICCAFFIIFGILGVQLFKGKFYYCEGPDTRNISTKAQCRAAHYRWVRRKYNFDNLGQALMSLFVLSSKDGWVNIMYDGLDAVGVDQQPVQNHNPWMLLYFISFLLIVSFFVLNMFVGVVVENFHKCRQHQEAEEARRREEKRLRRLERRRRKAQRRPYYADYSPTRRSIHSLCTSHYLDLFITFIICVNVITMSMEHYNQPKSLDEALKYCNYVFTIVFVFEAALKLVAFGFRRFFKDRWNQLDLAIVLLSLMGITLEEIEMSAALPINPTIIRIMRVLRIARVLKLLKMATGMRALLDTVVQALPQVGNLGLLFMLLFFIYAALGVELFGRLECSEDNPCEGLSRHATFSNFGMAFLTLFRVSTGDNWNGIMKDTLRECSREDKHCLSYLPALSPVYFVTFVLVAQFVLVNVVVAVLMKHLEESNKEAREDAELDAEIELEMAQGPGSARRVDADRPPLPQESPGARDAPNLVARKVSVSRMLSLPNDSYMFRPVVPASAPHPRPLQEVEMETYGAGTPLGSVASVHSPPAESCASLQIPLAVSSPARSGEPLHALSPRGTARSPSLSRLLCRQEAVHTDSLEGKIDSPRDTLDPAEPGEKTPVRPVTQGGSLQSPPRSPRPASVRTRKHTFGQRCVSSRPAAPGGEEAEASDPADEEVSHITSSACPWQPTAEPHGPEASPVAGGERDLRRLYSVDAQGFLDKPGRADEQWRPSAELGSGEPGEAKAWGPEAEPALGARRKKKMSPPCISVEPPAEDEGSARPSAAEGGSTTLRRRTPSCEATPHRDSLEPTEGSGAGGDPAAKGERWGQASCRAEHLTVPSFAFEPLDLGVPSGDPFLDGSHSVTPESRASSSGAIVPLEPPESEPPMPVGDPPEKRRGLYLTVPQCPLEKPGSPSATPAPGGGADDPV

SEQ ID NO: 10820 - protein, 1078 aa, Homo sapiens
  Payload ID: 2146;
  Gene Symbol: CACNA1H;
  Gene Name: calcium channel, voltage-dependent, T type, alpha 1H subunit;
  ENSP ID: ENSP00000454581
  MOD_RES (1)..(1): Any amino acid
XPYKPQWCRSREAWALYLFSPQNRFRVSCQKVITHKMFDHVVLVFIFLNCVTIALERPDIDPGSTERVFLSVSNYIFTAIFVAEMMVKVVALGLLSGEHAYLQSSWNLLDGLLVLVSLVDIVVAMASAGGAKILGVLRVLRLLRTLRPLRVISRAPGLKLVVETLISSLRPIGNIVLICCAFFIIFGILGVQLFKGKFYYCEGPDTRNISTKAQCRAAHYRWVRRKYNFDNLGQALMSLFVLSSKDGWVNIMYDGLDAVGVDQQPVQNHNPWMLLYFISFLLIVSFFVLNMFVGVVVENFHKCRQHQEAEEARRREEKRLRRLERRRRKAQRRPYYADYSPTRRSIHSLCTSHYLDLFITFIICVNVITMSMEHYNQPKSLDEALKYCNYVFTIVFVFEAALKLVAFGFRRFFKDRWNQLDLAIVLLSLMGITLEEIEMSAALPINPTIIRIMRVLRIARVLKLLKMATGMRALLDTVVQALPQVGNLGLLFMLLFFIYAALGVELFGRLECSEDNPCEGLSRHATFSNFGMAFLTLFRVSTGDNWNGIMKDTLRECSREDKHCLSYLPALSPVYFVTFVLVAQFVLVNVVVAVLMKHLEESNKEAREDAELDAEIELEMAQGPGSARRVDADRPPLPQESPGARDAPNLVARKVSVSRMLSLPNDSYMFRPVVPASAPHPRPLQEVEMETYGAGTPLESCASLQIPLAVSSPARSGEPLHALSPRGTARSPSLSRLLCRQEAVHTDSLEGKIDSPRDTLDPAEPGEKTPVRPVTQGGSLQSPPRSPRPASVRTRKHTFGQRCVSSRPAAPGGEEAEASDPADEEVSHITSSACPWQPTAEPHGPEASPVAGGERDLRRLYSVDAQGFLDKPGRADEQWRPSAELGSGEPGEAKAWGPEAEPALGARRKKKMSPPCISVEPPAEDEGSARPSAAEGGSTTLRRRTPSCEATPHRDSLEPTEGSGAGGDPAAKGERWGQASCRAEHLTVPSFAFEPLDLGVPSGDPFLDGSHSVTPESRASSSGAIVPLEPPESEPPMPVGDPPEKRRGLYLTVPQCPLEKPGSPSATPAPGGGADDPV

SEQ ID NO: 10821 - protein, 1100 aa, Homo sapiens
  Payload ID: 2146;
  Gene Symbol: CACNA1H;
  Gene Name: calcium channel, voltage-dependent, T type, alpha 1H subunit;
  ENSP ID: ENSP00000454990
  MOD_RES (1)..(1): Any amino acid
XPYKPQWCRSREAWALYLFSPQNRFRVSCQKVITHKMFDHVVLVFIFLNCVTIALERPDIDPGSTERVFLSVSNYIFTAIFVAEMMVKVVALGLLSGEHAYLQSSWNLLDGLLVLVSLVDIVVAMASAGGAKILGVLRVLRLLRTLRPLRVISRAPGLKLVVETLISSLRPIGNIVLICCAFFIIFGILGVQLFKGKFYYCEGPDTRNISTKAQCRAAHYRWVRRKYNFDNLGQALMSLFVLSSKDGWVNIMYDGLDAVGVDQQPVQNHNPWMLLYFISFLLIVSFFVLNMFVGVVVENFHKCRQHQEAEEARRREEKRLRRLERRRRSKALPVAVAVAEAQRRPYYADYSPTRRSIHSLCTSHYLDLFITFIICVNVITMSMEHYNQPKSLDEALKYCNYVFTIVFVFEAALKLVAFGFRRFFKDRWNQLDLAIVLLSLMGITLEEIEMSAALPINPTIIRIMRVLRIARVLKLLKMATGMRALLDTVVQALPQVGNLGLLFMLLFFIYAALGVELFGRLECSEDNPCEGLSRHATFSNFGMAFLTLFRVSTGDNWNGIMKDTLRECSREDKHCLSYLPALSPVYFVTFVLVAQFVLVNVVVAVLMKHLEESNKEAREDAELDAEIELEMAQGPGSARRVDADRPPLPQESPGARDAPNLVARKVSVSRMLSLPNDSYMFRPVVPASAPHPRPLQEVEMETYGAGTPLGSVASVHSPPAESCASLQIPLAVSSPARSGEPLHALSPRGTARSPSLSRLLCRQEAVHTDSLEGKIDSPRDTLDPAEPGEKTPVRPVTQGGSLQSPPRSPRPASVRTRKHTFGQRCVSSRPAAPGGEEAEASDPADEEVSHITSSACPWQPTAEPHGPEASPVAGGERDLRRLYSVDAQGFLDKPGRADEQWRPSAELGSGEPGEAKAWGPEAEPALGARRKKKMSPPCISVEPPAEDEGSARPSAAEGGSTTLRRRTPSCEATPHRDSLEPTEGSGAGGDPAAKGERWGQASCRAEHLTVPSFAFEPLDLGVPSGDPFLDGSHSVTPESRASSSGAIVPLEPPESEPPMPVGDPPEKRRGLYLTVPQCPLEKPGSPSATPAPGGGADDPV

SEQ ID NO: 10822 - protein, 897 aa, Homo sapiens
  Payload ID: 2146;
  Gene Symbol: CACNA1H;
  Gene Name: calcium channel, voltage-dependent, T type, alpha 1H subunit;
  ENSP ID: ENSP00000455512
  MOD_RES (1)..(1): Any amino acid
XFKGKFYYCEGPDTRNISTKAQCRAAHYRWVRRKYNFDNLGQALMSLFVLSSKDGWVNIMYDGLDAVGVDQQPVQNHNPWMLLYFISFLLIVSFFVLNMFVGVVVENFHKCRQHQEAEEARRREEKRLRRLERRRRKAQRRPYYADYSPTRRSIHSLCTSHYLDLFITFIICVNVITMSMEHYNQPKSLDEALKYCNYVFTIVFVFEAALKLVAFGFRRFFKDRWNQLDLAIVLLSLMGITLEEIEMSAALPINPTIIRIMRVLRIARVLKLLKMATGMRALLDTVVQALPQVGNLGLLFMLLFFIYAALGVELFGRLECSEDNPCEGLSRHATFSNFGMAFLTLFRVSTGDNWNGIMKDTLRECSREDKHCLSYLPALSPVYFVTFVLVAQFVLVNVVVAVLMKHLEESNKEAREDAELDAEIELEMAQGPGSARRVDADRPPLPQESPGARDAPNLVARKVSVSRMLSLPNDSYMFRPVVPASAPHPRPLQEVEMETYGAGTPLGSVASVHSPPAESCASLQIPLAVSSPARSGEPLHALSPRGTARSPSLSRLLCRQEAVHTDSLEGKIDSPRDTLDPAEPGEKTPVRPVTQGGSLQSPPRSPRPASVRTRKHTFGQRCVSSRPAAPGGEEAEASDPADEEVSHITSSACPWQPTAEPHGPEASPVAGGERDLRRLYSVDAQGFLDKPGRADEQWRPSAELGSGEPGEAKAWGPEAEPALGARRKKKMSPPCISVEPPAEDEGSARPSAAEGGSTTLRRRTPSCEATPHRDSLEPTEGSGAGGDPAAKGERWGQASCRAEHLTVPSFAFEPLDLGVPSGDPFLDGSHSVTPESRASSSGAIVPLEPPESEPPMPVGDPPEKRRGLYLTVPQCPLEKPGSPSATPAPGGGADDPV

SEQ ID NO: 10823 - protein, 2347 aa, Homo sapiens; identical to SEQ ID NO: 10819
  Payload ID: 2146;
  Gene Symbol: CACNA1H;
  Gene Name: calcium channel, voltage-dependent, T type, alpha 1H subunit;
  Uniprot ID:  O95180;
  ENSP ID: ENSP00000455840

SEQ ID NO: 10824 - protein, 1084 aa, Homo sapiens
  Payload ID: 2146;
  Gene Symbol: CACNA1H;
  Gene Name: calcium channel, voltage-dependent, T type, alpha 1H subunit;
  ENSP ID: ENSP00000457555
  MOD_RES (1)..(1): Any amino acid
XPYKPQWCRSREAWALYLFSPQNRFRVSCQKVITHKMFDHVVLVFIFLNCVTIALERPDIDPGSTERVFLSVSNYIFTAIFVAEMMVKVVALGLLSGEHAYLQSSWNLLDGLLVLVSLVDIVVAMASAGGAKILGVLRVLRLLRTLRPLRVISRAPGLKLVVETLISSLRPIGNIVLICCAFFIIFGILGVQLFKGKFYYCEGPDTRNISTKAQCRAAHYRWVRRKYNFDNLGQALMSLFVLSSKDGWVNIMYDGLDAVGVDQQPVQNHNPWMLLYFISFLLIVSFFVLNMFVGVVVENFHKCRQHQEAEEARRREEKRLRRLERRRRSTFPSPEAQRRPYYADYSPTRRSIHSLCTSHYLDLFITFIICVNVITMSMEHYNQPKSLDEALKYCNYVFTIVFVFEAALKLVAFGFRRFFKDRWNQLDLAIVLLSLMGITLEEIEMSAALPINPTIIRIMRVLRIARVLKLLKMATGMRALLDTVVQALPQVGNLGLLFMLLFFIYAALGVELFGRLECSEDNPCEGLSRHATFSNFGMAFLTLFRVSTGDNWNGIMKDTLRECSREDKHCLSYLPALSPVYFVTFVLVAQFVLVNVVVAVLMKHLEESNKEAREDAELDAEIELEMAQGPGSARRVDADRPPLPQESPGARDAPNLVARKVSVSRMLSLPNDSYMFRPVVPASAPHPRPLQEVEMETYGAGTPLESCASLQIPLAVSSPARSGEPLHALSPRGTARSPSLSRLLCRQEAVHTDSLEGKIDSPRDTLDPAEPGEKTPVRPVTQGGSLQSPPRSPRPASVRTRKHTFGQRCVSSRPAAPGGEEAEASDPADEEVSHITSSACPWQPTAEPHGPEASPVAGGERDLRRLYSVDAQGFLDKPGRADEQWRPSAELGSGEPGEAKAWGPEAEPALGARRKKKMSPPCISVEPPAEDEGSARPSAAEGGSTTLRRRTPSCEATPHRDSLEPTEGSGAGGDPAAKGERWGQASCRAEHLTVPSFAFEPLDLGVPSGDPFLDGSHSVTPESRASSSGAIVPLEPPESEPPMPVGDPPEKRRGLYLTVPQCPLEKPGSPSATPAPGGGADDPV

SEQ ID NO: 10825 - protein, 2016 aa, Homo sapiens
  Payload ID: 2147;
  Gene Symbol: CACNA1I;
  Gene Name: calcium channel, voltage-dependent, T type, alpha 1I subunit;
  Uniprot ID:  Q9P0X4;
  ENSP ID: ENSP00000383887
MAESASPPSSSAAAPAAEPGVTTEQPGPRSPPSSPPGLEEPLDGADPHVPHPDLAPIAFFCLRQTTSPRNWCIKMVCNPWFECVSMLVILLNCVTLGMYQPCDDMDCLSDRCKILQVFDDFIFIFFAMEMVLKMVALGIFGKKCYLGDTWNRLDFFIVMAGMVEYSLDLQNINLSAIRTVRVLRPLKAINRVPSMRILVNLLLDTLPMLGNVLLLCFFVFFIFGIIGVQLWAGLLRNRCFLEENFTIQGDVALPPYYQPEEDDEMPFICSLSGDNGIMGCHEIPPLKEQGRECCLSKDDVYDFGAGRQDLNASGLCVNWNRYYNVCRTGSANPHKGAINFDNIGYAWIVIFQVITLEGWVEIMYYVMDAHSFYNFIYFILLIIVGSFFMINLCLVVIATQFSETKQREHRLMLEQRQRYLSSSTVASYAEPGDCYEEIFQYVCHILRKAKRRALGLYQALQSRRQALGPEAPAPAKPGPHAKEPRHYHGKTKGQGDEGRHLGSRHCQTLHGPASPGNDHSGRELCPQHSPLDATPHTLVQPIPATLASDPASCPCCQHEDGRRPSGLGSTDSGQEGSGSGSSAGGEDEADGDGARSSEDGASSELGKEEEEEEQADGAVWLCGDVWRETRAKLRGIVDSKYFNRGIMMAILVNTVSMGIEHHEQPEELTNILEICNVVFTSMFALEMILKLAAFGLFDYLRNPYNIFDSIIVIISIWEIVGQADGGLSVLRTFRLLRVLKLVRFMPALRRQLVVLMKTMDNVATFCMLLMLFIFIFSILGMHIFGCKFSLRTDTGDTVPDRKNFDSLLWAIVTVFQILTQEDWNVVLYNGMASTSPWASLYFVALMTFGNYVLFNLLVAILVEGFQAEGDANRSYSDEDQSSSNIEEFDKLQEGLDSSGDPKLCPIPMTPNGHLDPSLPLGGHLGPAGAAGPAPRLSLQPDPMLVALGSRKSSVMSLGRMSYDQRSLSSSRSSYYGPWGRSAAWASRRSSWNSLKHKPPSAEHESLLSAERGGGARVCEVAADEGPPRAAPLHTPHAHHIHHGPHLAHRHRHHRRTLSLDNRDSVDLAELVPAVGAHPRAAWRAAGPAPGHEDCNGRMPSIAKDVFTKMGDRGDRGEDEEEIDYTLCFRVRKMIDVYKPDWCEVREDWSVYLFSPENRFRVLCQTIIAHKLFDYVVLAFIFLNCITIALERPQIEAGSTERIFLTVSNYIFTAIFVGEMTLKVVSLGLYFGEQAYLRSSWNVLDGFLVFVSIIDIVVSLASAGGAKILGVLRVLRLLRTLRPLRVISRAPGLKLVVETLISSLKPIGNIVLICCAFFIIFGILGVQLFKGKFYHCLGVDTRNITNRSDCMAANYRWVHHKYNFDNLGQALMSLFVLASKDGWVNIMYNGLDAVAVDQQPVTNHNPWMLLYFISFLLIVSFFVLNMFVGVVVENFHKCRQHQEAEEARRREEKRLRRLEKKRRKAQRLPYYATYCHTRLLIHSMCTSHYLDIFITFIICLNVVTMSLEHYNQPTSLETALKYCNYMFTTVFVLEAVLKLVAFGLRRFFKDRWNQLDLAIVLLSVMGITLEEIEINAALPINPTIIRIMRVLRIARVLKLLKMATGMRALLDTVVQALPQVGNLGLLFMLLFFIYAALGVELFGKLVCNDENPCEGMSRHATFENFGMAFLTLFQVSTGDNWNGIMKDTLRDCTHDERSCLSSLQFVSPLYFVSFVLTAQFVLINVVVAVLMKHLDDSNKEAQEDAEMDAELELEMAHGLGPGPRLPTGSPGAPGRGPGGAGGGGDTEGGLCRRCYSPAQENLWLDSVSLIIKDSLEGELTIIDNLSGSIFHHYSSPAGCKKCHHDKQEVQLAETEAFSLNSDRSSSILLGDDLSLEDPTACPPGRKDSKGELDPPEPMRVGDLGECFFPLSSTAVSPDPENFLCEMEEIPFNPVRSWLKHDSSQAPPSPFSPDASSPLLPMPAEFFHPAVSASQKGPEKGTGTGTLPKIALQGSWASLRSPRVNCTLLRQVPTPPRP

SEQ ID NO: 10826 - protein, 2188 aa, Homo sapiens
  Payload ID: 2147;
  Gene Symbol: CACNA1I;
  Gene Name: calcium channel, voltage-dependent, T type, alpha 1I subunit;
  Uniprot ID:  Q9P0X4;
  ENSP ID: ENSP00000384093
MAESASPPSSSAAAPAAEPGVTTEQPGPRSPPSSPPGLEEPLDGADPHVPHPDLAPIAFFCLRQTTSPRNWCIKMVCNPWFECVSMLVILLNCVTLGMYQPCDDMDCLSDRCKILQVFDDFIFIFFAMEMVLKMVALGIFGKKCYLGDTWNRLDFFIVMAGMVEYSLDLQNINLSAIRTVRVLRPLKAINRVPSMRILVNLLLDTLPMLGNVLLLCFFVFFIFGIIGVQLWAGLLRNRCFLEENFTIQGDVALPPYYQPEEDDEMPFICSLSGDNGIMGCHEIPPLKEQGRECCLSKDDVYDFGAGRQDLNASGLCVNWNRYYNVCRTGSANPHKGAINFDNIGYAWIVIFQVITLEGWVEIMYYVMDAHSFYNFIYFILLIIVGSFFMINLCLVVIATQFSETKQREHRLMLEQRQRYLSSSTVASYAEPGDCYEEIFQYVCHILRKAKRRALGLYQALQSRRQALGPEAPAPAKPGPHAKEPRHYQLCPQHSPLDATPHTLVQPIPATLASDPASCPCCQHEDGRRPSGLGSTDSGQEGSGSGSSAGGEDEADGDGARSSEDGASSELGKEEEEEEQADGAVWLCGDVWRETRAKLRGIVDSKYFNRGIMMAILVNTVSMGIEHHEQPEELTNILEICNVVFTSMFALEMILKLAAFGLFDYLRNPYNIFDSIIVIISIWEIVGQADGGLSVLRTFRLLRVLKLVRFMPALRRQLVVLMKTMDNVATFCMLLMLFIFIFSILGMHIFGCKFSLRTDTGDTVPDRKNFDSLLWAIVTVFQILTQEDWNVVLYNGMASTSPWASLYFVALMTFGNYVLFNLLVAILVEGFQAEGDANRSYSDEDQSSSNIEEFDKLQEGLDSSGDPKLCPIPMTPNGHLDPSLPLGGHLGPAGAAGPAPRLSLQPDPMLVALGSRKSSVMSLGRMSYDQRSLSSSRSSYYGPWGRSAAWASRRSSWNSLKHKPPSAEHESLLSAERGGGARVCEVAADEGPPRAAPLHTPHAHHIHHGPHLAHRHRHHRRTLSLDNRDSVDLAELVPAVGAHPRAAWRAAGPAPGHEDCNGRMPSIAKDVFTKMGDRGDRGEDEEEIDYTLCFRVRKMIDVYKPDWCEVREDWSVYLFSPENRFRVLCQTIIAHKLFDYVVLAFIFLNCITIALERPQIEAGSTERIFLTVSNYIFTAIFVGEMTLKVVSLGLYFGEQAYLRSSWNVLDGFLVFVSIIDIVVSLASAGGAKILGVLRVLRLLRTLRPLRVISRAPGLKLVVETLISSLKPIGNIVLICCAFFIIFGILGVQLFKGKFYHCLGVDTRNITNRSDCMAANYRWVHHKYNFDNLGQALMSLFVLASKDGWVNIMYNGLDAVAVDQQPVTNHNPWMLLYFISFLLIVSFFVLNMFVGVVVENFHKCRQHQEAEEARRREEKRLRRLEKKRRKAQRLPYYATYCHTRLLIHSMCTSHYLDIFITFIICLNVVTMSLEHYNQPTSLETALKYCNYMFTTVFVLEAVLKLVAFGLRRFFKDRWNQLDLAIVLLSVMGITLEEIEINAALPINPTIIRIMRVLRIARVLKLLKMATGMRALLDTVVQALPQVGNLGLLFMLLFFIYAALGVELFGKLVCNDENPCEGMSRHATFENFGMAFLTLFQVSTGDNWNGIMKDTLRDCTHDERSCLSSLQFVSPLYFVSFVLTAQFVLINVVVAVLMKHLDDSNKEAQEDAEMDAELELEMAHGLGPGPRLPTGSPGAPGRGPGGAGGGGDTEGGLCRRCYSPAQENLWLDSVSLIIKDSLEGELTIIDNLSGSIFHHYSSPAGCKKCHHDKQEVQLAETEAFSLNSDRSSSILLGDDLSLEDPTACPPGRKDSKGELDPPEPMRVGDLGECFFPLSSTAVSPDPENFLCEMEEIPFNPVRSWLKHDSSQAPPSPFSPDASSPLLPMPAEFFHPAVSASQKGPEKGTGTGTLPKIALQGSWASLRSPRVNCTLLRQATGSDTSLDASPSSSAGSLQTTLEDSLTLSDSPRRALGPPAPAPGPRAGLSPAARRRLSLRGRGLFSLRGLRAHQRSHSSGGSTSPGCTHHDSMDPSDEEGRGGAGGGGAGSEHSETLSSLSLTSLFCPPPPPPAPGLTPARKFSSTSSLAAPGRPHAAALAHGLARSPSWAADRSKDPPGRAPLPMGLGPLAPPPQPLPGELEPGDAASKRKR

SEQ ID NO: 10827 - protein, 2223 aa, Homo sapiens
  Payload ID: 2147;
  Gene Symbol: CACNA1I;
  Gene Name: calcium channel, voltage-dependent, T type, alpha 1I subunit;
  Uniprot ID:  Q9P0X4;
  ENSP ID: ENSP00000385019
MAESASPPSSSAAAPAAEPGVTTEQPGPRSPPSSPPGLEEPLDGADPHVPHPDLAPIAFFCLRQTTSPRNWCIKMVCNPWFECVSMLVILLNCVTLGMYQPCDDMDCLSDRCKILQVFDDFIFIFFAMEMVLKMVALGIFGKKCYLGDTWNRLDFFIVMAGMVEYSLDLQNINLSAIRTVRVLRPLKAINRVPSMRILVNLLLDTLPMLGNVLLLCFFVFFIFGIIGVQLWAGLLRNRCFLEENFTIQGDVALPPYYQPEEDDEMPFICSLSGDNGIMGCHEIPPLKEQGRECCLSKDDVYDFGAGRQDLNASGLCVNWNRYYNVCRTGSANPHKGAINFDNIGYAWIVIFQVITLEGWVEIMYYVMDAHSFYNFIYFILLIIVGSFFMINLCLVVIATQFSETKQREHRLMLEQRQRYLSSSTVASYAEPGDCYEEIFQYVCHILRKAKRRALGLYQALQSRRQALGPEAPAPAKPGPHAKEPRHYHGKTKGQGDEGRHLGSRHCQTLHGPASPGNDHSGRELCPQHSPLDATPHTLVQPIPATLASDPASCPCCQHEDGRRPSGLGSTDSGQEGSGSGSSAGGEDEADGDGARSSEDGASSELGKEEEEEEQADGAVWLCGDVWRETRAKLRGIVDSKYFNRGIMMAILVNTVSMGIEHHEQPEELTNILEICNVVFTSMFALEMILKLAAFGLFDYLRNPYNIFDSIIVIISIWEIVGQADGGLSVLRTFRLLRVLKLVRFMPALRRQLVVLMKTMDNVATFCMLLMLFIFIFSILGMHIFGCKFSLRTDTGDTVPDRKNFDSLLWAIVTVFQILTQEDWNVVLYNGMASTSPWASLYFVALMTFGNYVLFNLLVAILVEGFQAEGDANRSYSDEDQSSSNIEEFDKLQEGLDSSGDPKLCPIPMTPNGHLDPSLPLGGHLGPAGAAGPAPRLSLQPDPMLVALGSRKSSVMSLGRMSYDQRSLSSSRSSYYGPWGRSAAWASRRSSWNSLKHKPPSAEHESLLSAERGGGARVCEVAADEGPPRAAPLHTPHAHHIHHGPHLAHRHRHHRRTLSLDNRDSVDLAELVPAVGAHPRAAWRAAGPAPGHEDCNGRMPSIAKDVFTKMGDRGDRGEDEEEIDYTLCFRVRKMIDVYKPDWCEVREDWSVYLFSPENRFRVLCQTIIAHKLFDYVVLAFIFLNCITIALERPQIEAGSTERIFLTVSNYIFTAIFVGEMTLKVVSLGLYFGEQAYLRSSWNVLDGFLVFVSIIDIVVSLASAGGAKILGVLRVLRLLRTLRPLRVISRAPGLKLVVETLISSLKPIGNIVLICCAFFIIFGILGVQLFKGKFYHCLGVDTRNITNRSDCMAANYRWVHHKYNFDNLGQALMSLFVLASKDGWVNIMYNGLDAVAVDQQPVTNHNPWMLLYFISFLLIVSFFVLNMFVGVVVENFHKCRQHQEAEEARRREEKRLRRLEKKRRKAQRLPYYATYCHTRLLIHSMCTSHYLDIFITFIICLNVVTMSLEHYNQPTSLETALKYCNYMFTTVFVLEAVLKLVAFGLRRFFKDRWNQLDLAIVLLSVMGITLEEIEINAALPINPTIIRIMRVLRIARVLKLLKMATGMRALLDTVVQALPQVGNLGLLFMLLFFIYAALGVELFGKLVCNDENPCEGMSRHATFENFGMAFLTLFQVSTGDNWNGIMKDTLRDCTHDERSCLSSLQFVSPLYFVSFVLTAQFVLINVVVAVLMKHLDDSNKEAQEDAEMDAELELEMAHGLGPGPRLPTGSPGAPGRGPGGAGGGGDTEGGLCRRCYSPAQENLWLDSVSLIIKDSLEGELTIIDNLSGSIFHHYSSPAGCKKCHHDKQEVQLAETEAFSLNSDRSSSILLGDDLSLEDPTACPPGRKDSKGELDPPEPMRVGDLGECFFPLSSTAVSPDPENFLCEMEEIPFNPVRSWLKHDSSQAPPSPFSPDASSPLLPMPAEFFHPAVSASQKGPEKGTGTGTLPKIALQGSWASLRSPRVNCTLLRQATGSDTSLDASPSSSAGSLQTTLEDSLTLSDSPRRALGPPAPAPGPRAGLSPAARRRLSLRGRGLFSLRGLRAHQRSHSSGGSTSPGCTHHDSMDPSDEEGRGGAGGGGAGSEHSETLSSLSLTSLFCPPPPPPAPGLTPARKFSSTSSLAAPGRPHAAALAHGLARSPSWAADRSKDPPGRAPLPMGLGPLAPPPQPLPGELEPGDAASKRKR

SEQ ID NO: 10828 - protein, 1981 aa, Homo sapiens
  Payload ID: 2147;
  Gene Symbol: CACNA1I;
  Gene Name: calcium channel, voltage-dependent, T type, alpha 1I subunit;
  Uniprot ID:  Q9P0X4;
  ENSP ID: ENSP00000385680
MAESASPPSSSAAAPAAEPGVTTEQPGPRSPPSSPPGLEEPLDGADPHVPHPDLAPIAFFCLRQTTSPRNWCIKMVCNPWFECVSMLVILLNCVTLGMYQPCDDMDCLSDRCKILQVFDDFIFIFFAMEMVLKMVALGIFGKKCYLGDTWNRLDFFIVMAGMVEYSLDLQNINLSAIRTVRVLRPLKAINRVPSMRILVNLLLDTLPMLGNVLLLCFFVFFIFGIIGVQLWAGLLRNRCFLEENFTIQGDVALPPYYQPEEDDEMPFICSLSGDNGIMGCHEIPPLKEQGRECCLSKDDVYDFGAGRQDLNASGLCVNWNRYYNVCRTGSANPHKGAINFDNIGYAWIVIFQVITLEGWVEIMYYVMDAHSFYNFIYFILLIIVGSFFMINLCLVVIATQFSETKQREHRLMLEQRQRYLSSSTVASYAEPGDCYEEIFQYVCHILRKAKRRALGLYQALQSRRQALGPEAPAPAKPGPHAKEPRHYQLCPQHSPLDATPHTLVQPIPATLASDPASCPCCQHEDGRRPSGLGSTDSGQEGSGSGSSAGGEDEADGDGARSSEDGASSELGKEEEEEEQADGAVWLCGDVWRETRAKLRGIVDSKYFNRGIMMAILVNTVSMGIEHHEQPEELTNILEICNVVFTSMFALEMILKLAAFGLFDYLRNPYNIFDSIIVIISIWEIVGQADGGLSVLRTFRLLRVLKLVRFMPALRRQLVVLMKTMDNVATFCMLLMLFIFIFSILGMHIFGCKFSLRTDTGDTVPDRKNFDSLLWAIVTVFQILTQEDWNVVLYNGMASTSPWASLYFVALMTFGNYVLFNLLVAILVEGFQAEGDANRSYSDEDQSSSNIEEFDKLQEGLDSSGDPKLCPIPMTPNGHLDPSLPLGGHLGPAGAAGPAPRLSLQPDPMLVALGSRKSSVMSLGRMSYDQRSLSSSRSSYYGPWGRSAAWASRRSSWNSLKHKPPSAEHESLLSAERGGGARVCEVAADEGPPRAAPLHTPHAHHIHHGPHLAHRHRHHRRTLSLDNRDSVDLAELVPAVGAHPRAAWRAAGPAPGHEDCNGRMPSIAKDVFTKMGDRGDRGEDEEEIDYTLCFRVRKMIDVYKPDWCEVREDWSVYLFSPENRFRVLCQTIIAHKLFDYVVLAFIFLNCITIALERPQIEAGSTERIFLTVSNYIFTAIFVGEMTLKVVSLGLYFGEQAYLRSSWNVLDGFLVFVSIIDIVVSLASAGGAKILGVLRVLRLLRTLRPLRVISRAPGLKLVVETLISSLKPIGNIVLICCAFFIIFGILGVQLFKGKFYHCLGVDTRNITNRSDCMAANYRWVHHKYNFDNLGQALMSLFVLASKDGWVNIMYNGLDAVAVDQQPVTNHNPWMLLYFISFLLIVSFFVLNMFVGVVVENFHKCRQHQEAEEARRREEKRLRRLEKKRRKAQRLPYYATYCHTRLLIHSMCTSHYLDIFITFIICLNVVTMSLEHYNQPTSLETALKYCNYMFTTVFVLEAVLKLVAFGLRRFFKDRWNQLDLAIVLLSVMGITLEEIEINAALPINPTIIRIMRVLRIARVLKLLKMATGMRALLDTVVQALPQVGNLGLLFMLLFFIYAALGVELFGKLVCNDENPCEGMSRHATFENFGMAFLTLFQVSTGDNWNGIMKDTLRDCTHDERSCLSSLQFVSPLYFVSFVLTAQFVLINVVVAVLMKHLDDSNKEAQEDAEMDAELELEMAHGLGPGPRLPTGSPGAPGRGPGGAGGGGDTEGGLCRRCYSPAQENLWLDSVSLIIKDSLEGELTIIDNLSGSIFHHYSSPAGCKKCHHDKQEVQLAETEAFSLNSDRSSSILLGDDLSLEDPTACPPGRKDSKGELDPPEPMRVGDLGECFFPLSSTAVSPDPENFLCEMEEIPFNPVRSWLKHDSSQAPPSPFSPDASSPLLPMPAEFFHPAVSASQKGPEKGTGTGTLPKIALQGSWASLRSPRVNCTLLRQVPTPPRP

SEQ ID NO: 10829 - protein, 927 aa, Homo sapiens
  Payload ID: 2148;
  Gene Symbol: CHERP;
  Gene Name: calcium homeostasis endoplasmic reticulum prt;
  ENSP ID: ENSP00000198939
MEMPLPPDDQELRNVIDKLAQFVARNGPEFEKMTMEKQKDNPKFSFLFGGEFYSYYKCKLALEQQQLICKQQTPELEPAATMPPLPQPPLAPAAPIPPAQGAPSMDELIQQSQWNLQQQEQHLLALRQEQVTAAVAHAVEQQMQKLLEETQLDMNEFDNLLQPIIDTCTKDAISAGKNWMFSNAKSPPHCELMAGHLRNRITADGAHFELRLHLIYLINDVLHHWALTRGKSLPHSQRKQARELLAALQKVVVPIYCTSFLAVEEDKQQKIARLLQLWEKNGYFDDSIIQQLQSPALGLGQYQATLINEYSSVVQPVQLAFQQQIQTLKTQHEEFVTSLAQQQQQQQQQQQQLQMPQMEAEVKATPPPPAPPPAPAPAPAIPPTTQPDDSKPPIQMPGSSEYEAPGGVQDPAAAGPRGPGPHDQIPPNKPPWFDQPHPVAPWGQQQPPEQPPYPHHQGGPPHCPPWNNSHEGMWGEQRGDPGWNGQRDAPWNNQPDAAWNSQFEGPWNSQHEQPPWGGGQREPPFRMQRPPHFRGPFPPHQQHPQFNQPPHPHNFNRFPPRFMQDDFPPRHPFERPPYPHRFDYPQGDFPAEMGPPHHHPGHRMPHPGINEHPPWAGPQHPDFGPPPHGFNGQPPHMRRQGPPHINHDDPSLVPNVPYFDLPAGLMAPLVKLEDHEYKPLDPKDIRLPPPMPPSERLLAAVEAFYSPPSHDRPRNSEGWEQNGLYEFFRAKMRARRRKGQEKRNSGPSRSRSRSKSRGRSSSRSNSRSSKSSGSYSRSRSRSCSRSYSRSRSRSRSRSRSSRSRSRSQSRSRSKSYSPGRRRRSRSRSPTPPSSAGLGSNSAPPIPDSRLGEENKGHQMLVKMGWSGSGGLGAKEQGIQDPIKGGDVRDKWDQYKGVGVALDDPYENYRRNKSYSFIARMKARDECK

SEQ ID NO: 10830 - protein, 916 aa, Homo sapiens
  Payload ID: 2148;
  Gene Symbol: CHERP;
  Gene Name: calcium homeostasis endoplasmic reticulum prt;
  Uniprot ID:  Q8IWX8;
  ENSP ID: ENSP00000439856
MEMPLPPDDQELRNVIDKLAQFVARNGPEFEKMTMEKQKDNPKFSFLFGGEFYSYYKCKLALEQQQLICKQQTPELEPAATMPPLPQPPLAPAAPIPPAQGAPSMDELIQQSQWNLQQQEQHLLALRQEQVTAAVAHAVEQQMQKLLEETQLDMNEFDNLLQPIIDTCTKDAISAGKNWMFSNAKSPPHCELMAGHLRNRITADGAHFELRLHLIYLINDVLHHCQRKQARELLAALQKVVVPIYCTSFLAVEEDKQQKIARLLQLWEKNGYFDDSIIQQLQSPALGLGQYQATLINEYSSVVQPVQLAFQQQIQTLKTQHEEFVTSLAQQQQQQQQQQQQLQMPQMEAEVKATPPPPAPPPAPAPAPAIPPTTQPDDSKPPIQMPGSSEYEAPGGVQDPAAAGPRGPGPHDQIPPNKPPWFDQPHPVAPWGQQQPPEQPPYPHHQGGPPHCPPWNNSHEGMWGEQRGDPGWNGQRDAPWNNQPDAAWNSQFEGPWNSQHEQPPWGGGQREPPFRMQRPPHFRGPFPPHQQHPQFNQPPHPHNFNRFPPRFMQDDFPPRHPFERPPYPHRFDYPQGDFPAEMGPPHHHPGHRMPHPGINEHPPWAGPQHPDFGPPPHGFNGQPPHMRRQGPPHINHDDPSLVPNVPYFDLPAGLMAPLVKLEDHEYKPLDPKDIRLPPPMPPSERLLAAVEAFYSPPSHDRPRNSEGWEQNGLYEFFRAKMRARRRKGQEKRNSGPSRSRSRSKSRGRSSSRSNSRSSKSSGSYSRSRSRSCSRSYSRSRSRSRSRSRSSRSRSRSQSRSRSKSYSPGRRRRSRSRSPTPPSSAGLGSNSAPPIPDSRLGEENKGHQMLVKMGWSGSGGLGAKEQGIQDPIKGGDVRDKWDQYKGVGVALDDPYENYRRNKSYSFIARMKARDECK

SEQ ID NO: 10831 - protein, 346 aa, Homo sapiens
  Payload ID: 2149;
  Gene Symbol: CALHM1;
  Gene Name: calcium homeostasis modulator 1;
  Uniprot ID:  Q8IU99;
  ENSP ID: ENSP00000329926
MMDKFRMIFQFLQSNQESFMNGICGIMALASAQMYSAFDFNCPCLPGYNAAYSAGILLAPPLVLFLLGLVMNNNVSMLAEEWKRPLGRRAKDPAVLRYMFCSMAQRALIAPVVWVAVTLLDGKCFLCAFCTAVPVSALGNGSLAPGLPAPELARLLARVPCPEIYDGDWLLAREVAVRYLRCISQALGWSFVLLTTLLAFVVRSVRPCFTQAAFLKSKYWSHYIDIERKLFDETCTEHAKAFAKVCIQQFFEAMNHDLELGHTHGTLATAPASAAAPTTPDGAEEEREKLRGITDQGTMNRLLTSWHKCKPPLRLGQEEPPLMGNGWAGGGPRPPRKEVATYFSKV

SEQ ID NO: 10832 - protein, 323 aa, Homo sapiens
  Payload ID: 2150;
  Gene Symbol: CALHM2;
  Gene Name: calcium homeostasis modulator 2;
  Uniprot ID:  Q9HA72;
  ENSP ID: ENSP00000260743
MAALIAENFRFLSLFFKSKDVMIFNGLVALGTVGSQELFSVVAFHCPCSPARNYLYGLAAIGVPALVLFIIGIILNNHTWNLVAECQHRRTKNCSAAPTFLLLSSILGRAAVAPVTWSVISLLRGEAYVCALSEFVDPSSLTAREEHFPSAHATEILARFPCKENPDNLSDFREEVSRRLRYESQLFGWLLIGVVAILVFLTKCLKHYCSPLSYRQEAYWAQYRANEDQLFQRTAEVHSRVLAANNVRRFFGFVALNKDDEELIANFPVEGTQPRPQWNAITGVYLYRENQGLPLYSRLHKWAQGLAGNGAAPDNVEMALLPS

SEQ ID NO: 10833 - protein, 323 aa, Homo sapiens; identical to SEQ ID NO: 10832
  Payload ID: 2150;
  Gene Symbol: CALHM2;
  Gene Name: calcium homeostasis modulator 2;
  Uniprot ID:  Q9HA72;
  ENSP ID: ENSP00000358803

SEQ ID NO: 10834 - protein, 344 aa, Homo sapiens
  Payload ID: 2151;
  Gene Symbol: CALHM3;
  Gene Name: calcium homeostasis modulator 3;
  Uniprot ID:  Q86XJ0;
  ENSP ID: ENSP00000358798
MDKFRMLFQHFQSSSESVMNGICLLLAAVTVKLYSSFDFNCPCLVHYNALYGLGLLLTPPLALFLCGLLANRQSVVMVEEWRRPAGHRRKDPGIIRYMCSSVLQRALAAPLVWILLALLDGKCFVCAFSSSVDPEKFLDFANMTPSQVQLFLAKVPCKEDELVRDSPARKAVSRYLRCLSQAIGWSVTLLLIIAAFLARCLRPCFDQTVFLQRRYWSNYVDLEQKLFDETCCEHARDFAHRCVLHFFASMRSELQARGLRRGNAGRRLELPAVPEPPEGLDSGSGKAHLRAISSREQVDRLLSTWYSSKPPLDLAASPGLCGGGLSHRAPTLALGTRLSQHTDV

SEQ ID NO: 10835 - protein, 296 aa, Homo sapiens
  Payload ID: 2152;
  Gene Symbol: CAMLG;
  Gene Name: calcium modulating ligand;
  Uniprot ID:  P49069;
  ENSP ID: ENSP00000297156
MESMAVATDGGERPGVPAGSGLSASQRRAELRRRKLLMNSEQRINRIMGFHRPGSGAEEESQTKSKQQDSDKLNSLSVPSVSKRVVLGDSVSTGTTDQQGGVAEVKGTQLGDKLDSFIKPPECSSDVNLELRQRNRGDLTADSVQRGSRHGLEQYLSRFEEAMKLRKQLISEKPSQEDGNTTEEFDSFRIFRLVGCALLALGVRAFVCKYLSIFAPFLTLQLAYMGLYKYFPKSEKKIKTTVLTAALLLSGIPAEVINRSMDTYSKMGEVFTDLCVYFFTFIFCHELLDYWGSEVP

SEQ ID NO: 10836 - protein, 80 aa, Homo sapiens
  Payload ID: 2152;
  Gene Symbol: CAMLG;
  Gene Name: calcium modulating ligand;
  ENSP ID: ENSP00000427331
MESMAVATDGGERPGVPAGSGLSASQRRAELRRRKLLMNSEQRINRIMGFHRPGSGAVHICSISYFTTCVHGIIQIFSQE

SEQ ID NO: 10837 - protein, 147 aa, Homo sapiens
  Payload ID: 2153;
  Gene Symbol: CARHSP1;
  Gene Name: calcium regulated heat stable prt 1, 24kDa;
  Uniprot ID:  Q9Y2V2;
  ENSP ID: ENSP00000311847
MSSEPPPPPQPPTHQASVGLLDTPRSRERSPSPLRGNVVPSPLPTRRTRTFSATVRASQGPVYKGVCKCFCRSKGHGFITPADGGPDIFLHISDVEGEYVPVEGDEVTYKMCSIPPKNEKLQAVEVVITHLAPGTKHETWSGHVISS

SEQ ID NO: 10838 - protein, 147 aa, Homo sapiens; identical to SEQ ID NO: 10837
  Payload ID: 2153;
  Gene Symbol: CARHSP1;
  Gene Name: calcium regulated heat stable prt 1, 24kDa;
  Uniprot ID:  Q9Y2V2;
  ENSP ID: ENSP00000379838

SEQ ID NO: 10839 - protein, 131 aa, Homo sapiens
  Payload ID: 2153;
  Gene Symbol: CARHSP1;
  Gene Name: calcium regulated heat stable prt 1, 24kDa;
  ENSP ID: ENSP00000455016
MSSEPPPPPQPPTHQASVGLLDTPRSRERSPSPLRGNVVPSPLPTRRTRTFSATVRASQGPVYKGVCKCFCRSKGHGFITPADGGPDIFLHISDVEGEYVPVEGDEVTYKMCSIPPKNEKLQAVEVVITHL

SEQ ID NO: 10840 - protein, 147 aa, Homo sapiens; identical to SEQ ID NO: 10837
  Payload ID: 2153;
  Gene Symbol: CARHSP1;
  Gene Name: calcium regulated heat stable prt 1, 24kDa;
  Uniprot ID:  Q9Y2V2;
  ENSP ID: ENSP00000455284

SEQ ID NO: 10841 - protein, 125 aa, Homo sapiens
  Payload ID: 2153;
  Gene Symbol: CARHSP1;
  Gene Name: calcium regulated heat stable prt 1, 24kDa;
  ENSP ID: ENSP00000455522
MSSEPPPPPQPPTHQASVGLLDTPRSRERSPSPLRGNVVPSPLPTRRTRTFSATVRASQGPVYKGVCKCFCRSKGHGFITPADGGPDIFLHISDVEGEYVPVEGDEVTYKMCSIPPKNEKLQAVE

SEQ ID NO: 10842 - protein, 147 aa, Homo sapiens; identical to SEQ ID NO: 10837
  Payload ID: 2153;
  Gene Symbol: CARHSP1;
  Gene Name: calcium regulated heat stable prt 1, 24kDa;
  Uniprot ID:  Q9Y2V2;
  ENSP ID: ENSP00000455855

SEQ ID NO: 10843 - protein, 114 aa, Homo sapiens
  Payload ID: 2153;
  Gene Symbol: CARHSP1;
  Gene Name: calcium regulated heat stable prt 1, 24kDa;
  ENSP ID: ENSP00000455988
MPPPPEGQPCHLSLPHHHSPPPIKLQSGCWTPLGAVSAHHPLCGATWSQAHCPLAGRGPSRRRCGLHRAPSTKESANASAGPRAMASLLQLMAAPTSSCTSLMWKGSMSQWKAT

SEQ ID NO: 10844 - protein, 112 aa, Homo sapiens
  Payload ID: 2153;
  Gene Symbol: CARHSP1;
  Gene Name: calcium regulated heat stable prt 1, 24kDa;
  ENSP ID: ENSP00000456909
MSSEPPPPPQPPTHQASVGLLDTPRSRERSPSPLRGNVVPSPLPTRRTRTFSATVRASQGPVYKGVCKCFCRSKGHGFITPADGGPDIFLHISDVEGEYVPVEGDEVTYKMC

SEQ ID NO: 10845 - protein, 71 aa, Homo sapiens
  Payload ID: 2153;
  Gene Symbol: CARHSP1;
  Gene Name: calcium regulated heat stable prt 1, 24kDa;
  ENSP ID: ENSP00000457213
MSSEPPPPPQPPTHQASVGLLDTPRSRERSPSPLRGNVVPSPLPTRRTRTFSATVRASQGPVYKGVCKCFC

SEQ ID NO: 10846 - protein, 124 aa, Homo sapiens
  Payload ID: 2153;
  Gene Symbol: CARHSP1;
  Gene Name: calcium regulated heat stable prt 1, 24kDa;
  ENSP ID: ENSP00000457864
MSSEPPPPPQPPTHQASVGLLDTPRSRERSPSPLRGNVVPSPLPTRRTRTFSATVRASQGPVYKGVCKCFCRSKGHGFITPADGGPDIFLHISDVEGEYVPVEGDEVTYKMCSIPPKNEKLQAV

SEQ ID NO: 10847 - protein, 94 aa, Homo sapiens
  Payload ID: 2153;
  Gene Symbol: CARHSP1;
  Gene Name: calcium regulated heat stable prt 1, 24kDa;
  ENSP ID: ENSP00000460812
MSSEPPPPPQPPTHQASVGLLDTPRSRERSPSPLRGNVVPSPLPTRRTRTFSATVRASQGPVYKGVCKCFCRSKGHGFITPADGGPDIFLHISE

SEQ ID NO: 10848 - protein, 147 aa, Homo sapiens; identical to SEQ ID NO: 10837
  Payload ID: 2153;
  Gene Symbol: CARHSP1;
  Gene Name: calcium regulated heat stable prt 1, 24kDa;
  Uniprot ID:  Q9Y2V2;
  ENSP ID: ENSP00000478055

SEQ ID NO: 10849 - protein, 147 aa, Homo sapiens; identical to SEQ ID NO: 10837
  Payload ID: 2153;
  Gene Symbol: CARHSP1;
  Gene Name: calcium regulated heat stable prt 1, 24kDa;
  Uniprot ID:  Q9Y2V2;
  ENSP ID: ENSP00000480144

SEQ ID NO: 10850 - protein, 147 aa, Homo sapiens; identical to SEQ ID NO: 10837
  Payload ID: 2153;
  Gene Symbol: CARHSP1;
  Gene Name: calcium regulated heat stable prt 1, 24kDa;
  Uniprot ID:  Q9Y2V2;
  ENSP ID: ENSP00000480542

SEQ ID NO: 10851 - protein, 147 aa, Homo sapiens; identical to SEQ ID NO: 10837
  Payload ID: 2153;
  Gene Symbol: CARHSP1;
  Gene Name: calcium regulated heat stable prt 1, 24kDa;
  Uniprot ID:  Q9Y2V2;
  ENSP ID: ENSP00000481550

SEQ ID NO: 10852 - protein, 147 aa, Homo sapiens; identical to SEQ ID NO: 10837
  Payload ID: 2153;
  Gene Symbol: CARHSP1;
  Gene Name: calcium regulated heat stable prt 1, 24kDa;
  Uniprot ID:  Q9Y2V2;
  ENSP ID: ENSP00000483591

SEQ ID NO: 10853 - protein, 395 aa, Homo sapiens
  Payload ID: 2154;
  Gene Symbol: CRACR2A;
  Gene Name: calcium release activated channel regulator 2A;
  Uniprot ID:  Q9BSW2;
  ENSP ID: ENSP00000252322
MAAPDGRVVSRPQRLGQGSGQGPKGSGACLHPLDSLEQKETQEQTSGQLVMLRKAQEFFQTCDAEGKGFIARKDMQRLHKELPLSLEELEDVFDALDADGNGYLTPQEFTTGFSHFFFSQNNPSQEDAGEQVAQRHEEKVYLSRGDEDLGDMGEDEEAQFRMLMDRLGAQKVLEDESDVKQLWLQLKKEEPHLLSNFEDFLTRIISQLQEAHEEKNELECALKRKIAAYDEEIQHLYEEMEQQIKSEKEQFLLKDTERFQARSQELEQKLLCKEQELEQLTQKQKRLEGQCTALHHDKHETKAENTKLKLTNQELARELERTSWELQDAQQQLESLQQEACKLHQEKEMEVYRVTESLQREKAGLLKQLDFLRCVGGHWPVLRAPPRSLGSEGPV

SEQ ID NO: 10854 - protein, 198 aa, Homo sapiens
  Payload ID: 2154;
  Gene Symbol: CRACR2A;
  Gene Name: calcium release activated channel regulator 2A;
  ENSP ID: ENSP00000331047
  MOD_RES (1)..(1): Any amino acid
XDFLTRIISQLQEAHEEKNELECALKRKIAAYDEEIQHLYEEMEQQIKSEKEQFLLKDTERFQARSQELEQKLLCKEQELEQLTQKQKRLEGQCTALHHDKHETKAENTKLKLTNQELARELERTSWELQDAQQQLESLQQEACKLHQEKEMEVYRVTESLQREKAGLLKQLDFLRCVGGHWPVLRAPPRSLGSEGPV

SEQ ID NO: 10855 - protein, 731 aa, Homo sapiens
  Payload ID: 2154;
  Gene Symbol: CRACR2A;
  Gene Name: calcium release activated channel regulator 2A;
  Uniprot ID:  Q9BSW2;
  ENSP ID: ENSP00000409382
MAAPDGRVVSRPQRLGQGSGQGPKGSGACLHPLDSLEQKETQEQTSGQLVMLRKAQEFFQTCDAEGKGFIARKDMQRLHKELPLSLEELEDVFDALDADGNGYLTPQEFTTGFSHFFFSQNNPSQEDAGEQVAQRHEEKVYLSRGDEDLGDMGEDEEAQFRMLMDRLGAQKVLEDESDVKQLWLQLKKEEPHLLSNFEDFLTRIISQLQEAHEEKNELECALKRKIAAYDEEIQHLYEEMEQQIKSEKEQFLLKDTERFQARSQELEQKLLCKEQELEQLTQKQKRLEGQCTALHHDKHETKAENTKLKLTNQELARELERTSWELQDAQQQLESLQQEACKLHQEKEMEVYRVTESLQREKAGLLKQLDFLRERNKHLRDERDICFQKNKAAKANTAASRASWKKRSGSVIGKYVDSRGILRSQSEEEEEVFGIPRRSSLGLSGYPLTEEEPGTGEPGPGGPYPRPLRRIISVEEDPLPQLLDGGFEQPLSKCSEEEEVSDQGVQGQIPEAPPLKLTPTSPRGQPVGKEALCKEESSPSAPDRLFKIVFVGNSAVGKTSFLRRFCEDRFSPGMAATVGIDYRVKTLNVDNSQVALQLWDTAGQERYRCITQQFFRKADGVIVMYDLTDKQSFLSVRRWLSSVEEAVGDRVPVLLLGNKLDNEKEREVPRGLGEQLATENNLIFYECSAYSGHNTKESLLHLARFLKEQEDTVREDTIQVGHPAKKKSCCG

SEQ ID NO: 10856 - protein, 118 aa, Homo sapiens
  Payload ID: 2154;
  Gene Symbol: CRACR2A;
  Gene Name: calcium release activated channel regulator 2A;
  ENSP ID: ENSP00000438777
  MOD_RES (1)..(1): Any amino acid
XEKEMEVYRVTESLQREKAGLLKQLDFLRERNKHLRDERDICFQKNKAAKANTAASRASWKKRSGSVIGKYVDSRGILRRWPQRDRGIPTLQYQTQRDLEDCKHEMKKICKAEVTLEM

SEQ ID NO: 10857 - protein, 294 aa, Homo sapiens
  Payload ID: 2155;
  Gene Symbol: CRACR2B;
  Gene Name: calcium release activated channel regulator 2B;
  Uniprot ID:  Q8N4Y2;
  ENSP ID: ENSP00000409256
MASPGKPGADEAQEEEGELEGGSAGPRAAILEQAEELFLLCDKEAKGFITKHDLQGLQSDLPLTPEQLEAVFESLDRAHTGFLTAREFCLGLGMFVGVASAQGANPCRTPEETFESGGLDVQGTAGSLDEEEEEEERFHTVLEQLGVAPVLGKQRAVRTLWARLQRERPELLGSFEDVLIRASACLEEAARERDGLEQALRRRESEHEREVRALYEETEQLREQSRRPPSQNFARGERRSRLELELQSREQDLERAGLRQRERRGRRLQEHAERESQPATATGAAQGAEYTAAG

SEQ ID NO: 10858 - protein, 294 aa, Homo sapiens; identical to SEQ ID NO: 10857
  Payload ID: 2155;
  Gene Symbol: CRACR2B;
  Gene Name: calcium release activated channel regulator 2B;
  Uniprot ID:  Q8N4Y2;
  ENSP ID: ENSP00000432334

SEQ ID NO: 10859 - protein, 88 aa, Homo sapiens
  Payload ID: 2155;
  Gene Symbol: CRACR2B;
  Gene Name: calcium release activated channel regulator 2B;
  ENSP ID: ENSP00000432726
MASPGKPGADEAQEEEGELEGGSAGPRAAILEQAEELFLLCDKEAKGFITKHDLQGLQSDLPLTPEQLEAVFESLDRAHTGFLTAREF

SEQ ID NO: 10860 - protein, 81 aa, Homo sapiens
  Payload ID: 2155;
  Gene Symbol: CRACR2B;
  Gene Name: calcium release activated channel regulator 2B;
  ENSP ID: ENSP00000433602
MASPGKPGADEAQEEEGELEGGSAGPRAAILEQAEELFLLCDKEAKGFITKHDLQGLQSDLPLTPEQLEAVFESLDRAHTG

SEQ ID NO: 10861 - protein, 34 aa, Homo sapiens
  Payload ID: 2155;
  Gene Symbol: CRACR2B;
  Gene Name: calcium release activated channel regulator 2B;
  ENSP ID: ENSP00000434198
MASPGKPGADEAQEEEGELEGGSAGPRAAILEQA

SEQ ID NO: 10862 - protein, 399 aa, Homo sapiens
  Payload ID: 2155;
  Gene Symbol: CRACR2B;
  Gene Name: calcium release activated channel regulator 2B;
  Uniprot ID:  Q8N4Y2;
  ENSP ID: ENSP00000435299
MASPGKPGADEAQEEEGELEGGSAGPRAAILEQAEELFLLCDKEAKGFITKHDLQGLQSDLPLTPEQLEAVFESLDRAHTGFLTAREFCLGLGMFVGVASAQGANPCRTPEETFESGGLDVQGTAGSLDEEEEEEERFHTVLEQLGVAPVLGKQRAVRTLWARLQRERPELLGSFEDVLIRASACLEEAARERDGLEQALRRRESEHEREVRALYEETEQLREQSRRPPSQNFARGERRSRLELELQSREQDLERAGLRQRELEQQLHAQAAEHLEAQAQNSQLWRAHEALRTQLEGAQEQIRRLESEARGRQEQTQRDVVAVSRNMQKEKVSLLRQLELLRELNTRLRDDRDACEARRAGSSCRKALTTARLPGPTCCCCCCWARPPRRGSGHLPSAR

SEQ ID NO: 10863 - protein, 53 aa, Homo sapiens
  Payload ID: 2155;
  Gene Symbol: CRACR2B;
  Gene Name: calcium release activated channel regulator 2B;
  ENSP ID: ENSP00000436624
MASPGKPGADEAQEEEGELEGGSAGPRAAILEQAEELFLLCDKEAKGFITKHD

SEQ ID NO: 10864 - protein, 649 aa, Homo sapiens
  Payload ID: 2156;
  Gene Symbol: CARF;
  Gene Name: calcium responsive transcription factor;
  Uniprot ID:  Q8N187;
  ENSP ID: ENSP00000316224
MEQSNDSLRVNHNDGEESKTSAQVFEMIVASPTENGQVLRVIPPTQTGMAQVIIPQGQLVDVNSPRDVPEEKPSNRNLPTVRVDTLADNTSNYILHPQTSFPLPKKSVTGMLEEPLLGPLQPLSSNTPIWACRLRSCEKIGDSYRGYCVSETELESVLTFHKQQTQSVWGTRQSPSPAKPATRLMWKSQYVPYDGIPFVNAGSRAVVMECQYGPRRKGFQLKKVSEQESRSCQLYKATCPARIYIKKVQKFPEYRVPTDPKIDKKIIRMEQEKAFNMLKKNLVDAGGVLRWYVQLPTQQAHQYHELETPCLTLSPSPFPVSSLEEEETAVRDENCALPSRLHPQVAHKIQELVSQGIEQVYAVRKQLRKFVERELFKPDEVPERHNLSFFPTVNDIKNHIHEVQKSLRNGDTVYNSEIIPATLQWTTDSGNILKETMTVTFAEGNSPGESITTKVETNQTRGSLSPEPTHLLSSLSSFQPKIFTQLQGLQLQPRYTSPDESPAVVSVNNQPSSSPSGLLDTIGSAVMNNNSLLLGQSHSLQRDTCLTQNNSTASTMGNLPEPDQNLVAMDELVEVGDVEDTGNLEGTVHRILLGDVQTIPIQIIDNHSALIEENPESTISVSQVKQEPKEPALSMEAKKTVDYKKLSAT

SEQ ID NO: 10865 - protein, 725 aa, Homo sapiens
  Payload ID: 2156;
  Gene Symbol: CARF;
  Gene Name: calcium responsive transcription factor;
  Uniprot ID:  Q8N187;
  ENSP ID: ENSP00000384006
MEQSNDSLRVNHNDGEESKTSAQVFEHLICMDSRDSSFGQNDSPTVLPITTREANNSLISQNIPGPLTQTQTLSAEQFHLVDQNGQAIQYELQSLGESNAQMMIVASPTENGQVLRVIPPTQTGMAQVIIPQGQLVDVNSPRDVPEEKPSNRNLPTVRVDTLADNTSNYILHPQTSFPLPKKSVTGMLEEPLLGPLQPLSSNTPIWACRLRSCEKIGDSYRGYCVSETELESVLTFHKQQTQSVWGTRQSPSPAKPATRLMWKSQYVPYDGIPFVNAGSRAVVMECQYGPRRKGFQLKKVSEQESRSCQLYKATCPARIYIKKVQKFPEYRVPTDPKIDKKIIRMEQEKAFNMLKKNLVDAGGVLRWYVQLPTQQAHQYHELETPCLTLSPSPFPVSSLEEEETAVRDENCALPSRLHPQVAHKIQELVSQGIEQVYAVRKQLRKFVERELFKPDEVPERHNLSFFPTVNDIKNHIHEVQKSLRNGDTVYNSEIIPATLQWTTDSGNILKETMTVTFAEGNSPGESITTKVETNQTRGSLSPEPTHLLSSLSSFQPKIFTQLQGLQLQPRYTSPDESPAVVSVNNQPSSSPSGLLDTIGSAVMNNNSLLLGQSHSLQRDTCLTQNNSTASTMGNLPEPDQNLVAMDELVEVGDVEDTGNLEGTVHRILLGDVQTIPIQIIDNHSALIEENPESTISVSQVKQEPKEPALSMEAKKTVDYKKLSAT

SEQ ID NO: 10866 - protein, 95 aa, Homo sapiens
  Payload ID: 2156;
  Gene Symbol: CARF;
  Gene Name: calcium responsive transcription factor;
  ENSP ID: ENSP00000387785
MEQSNDSLRVNHNDGEESKTSAQVFEHLICMDSRDSSFGQNDSPTVLPITTREANNSLISQNIPGPLTQTQTLSAEQFHLVDQNGQAIQYELQSL

SEQ ID NO: 10867 - protein, 131 aa, Homo sapiens
  Payload ID: 2156;
  Gene Symbol: CARF;
  Gene Name: calcium responsive transcription factor;
  ENSP ID: ENSP00000391617
MEQSNDSLRVNHNDGEESKTSAQVFEHLICMDSRDSSFGQNDSPTVLPITTREANNSLISQNIPGPLTQTQTLSAEQFHLVDQNGQAIQYELQSLGESNAQMMIVASPTENGQVLRVIPPTQTGMAQVIIP

SEQ ID NO: 10868 - protein, 419 aa, Homo sapiens
  Payload ID: 2156;
  Gene Symbol: CARF;
  Gene Name: calcium responsive transcription factor;
  ENSP ID: ENSP00000392274
MDSRDSSFGQNDSPTVLPITTREANNSLISQNIPGPLTQTQTLSAEQFHLVDQNGQAIQYELQSLGESNAQMMIVASPTENGQVLRVIPPTQTGMAQVIIPQGQLVDVNSPRDVPEEKPSNRNLPTVRVDTLADNTSNYILHPQTSFPLPKKSVTGMLEEPLLGPLQPLSSNTPIWACRLRSCEKIGDSYRGYCVSETELESVLTFHKQQTQSVWGTRQSPSPAKPATRLMWKSQYVPYDGIPFVNAGSRAVVMECQYGPRRKGFQLKKVSEQESRSCQLYKATCPARIYIKKVQKFPEYRVPTDPKIDKKIIRMEQEKAFNMLKKNLVDAGGVLRWYVQLPTQQAHQYHELETPCLTLSPSPFPVSSLEEEETAVRDENCALPSRLHPQVAHKIQELVSQGIEQVYAVRKQLSPSYFI

SEQ ID NO: 10869 - protein, 21 aa, Homo sapiens
  Payload ID: 2156;
  Gene Symbol: CARF;
  Gene Name: calcium responsive transcription factor;
  ENSP ID: ENSP00000394298
MEQSNDSLRVNHNDGEESKTS

SEQ ID NO: 10870 - protein, 80 aa, Homo sapiens
  Payload ID: 2156;
  Gene Symbol: CARF;
  Gene Name: calcium responsive transcription factor;
  ENSP ID: ENSP00000394990
MEQSNDSLRVNHNDGEESKTSAQVFEMIVASPTENGQVLRVIPPTQTGMAQVIIPQGQLVDVNSPRDVPEEKPSNRNLPT

SEQ ID NO: 10871 - protein, 92 aa, Homo sapiens
  Payload ID: 2156;
  Gene Symbol: CARF;
  Gene Name: calcium responsive transcription factor;
  ENSP ID: ENSP00000395276
MDSRDSSFGQNDSPTVLPITTREANNSLISQNIPGPLTQTQTLSAEQFHLVDQNGQAIQYELQSLGESNAQMMIVASPTENGQVLRVIPPTQ

SEQ ID NO: 10872 - protein, 649 aa, Homo sapiens; identical to SEQ ID NO: 10864
  Payload ID: 2156;
  Gene Symbol: CARF;
  Gene Name: calcium responsive transcription factor;
  Uniprot ID:  Q8N187;
  ENSP ID: ENSP00000396221

SEQ ID NO: 10873 - protein, 72 aa, Homo sapiens
  Payload ID: 2156;
  Gene Symbol: CARF;
  Gene Name: calcium responsive transcription factor;
  ENSP ID: ENSP00000401918
MEQSNDSLRVNHNDGEESKTSAQVFEHLICMDSRDSSFGQNDSPTVLPITTREANNSLISQNIPGPLTQTQT

SEQ ID NO: 10874 - protein, 38 aa, Homo sapiens
  Payload ID: 2156;
  Gene Symbol: CARF;
  Gene Name: calcium responsive transcription factor;
  ENSP ID: ENSP00000408998
MDSRDSSFGQNDSPTVLPITTREANNSLISQNIPGPLT

SEQ ID NO: 10875 - protein, 33 aa, Homo sapiens
  Payload ID: 2156;
  Gene Symbol: CARF;
  Gene Name: calcium responsive transcription factor;
  ENSP ID: ENSP00000409985
MEQSNDSLRVNHNDGEESKTSAQVFEGFFLWTK

SEQ ID NO: 10876 - protein, 73 aa, Homo sapiens
  Payload ID: 2156;
  Gene Symbol: CARF;
  Gene Name: calcium responsive transcription factor;
  ENSP ID: ENSP00000413166
MEQSNDSLRVNHNDGEESKTSAQVFEHLICMDSRDSSFGQNDSPTVLPITTREANNSLISQNIPGPLTQTQTL

SEQ ID NO: 10877 - protein, 54 aa, Homo sapiens
  Payload ID: 2156;
  Gene Symbol: CARF;
  Gene Name: calcium responsive transcription factor;
  ENSP ID: ENSP00000413296
MEQSNDSLRVNHNDGEESKTSAQVFEHLICMDSRDSSFGQNDSPTVLPITTREA

SEQ ID NO: 10878 - protein, 725 aa, Homo sapiens; identical to SEQ ID NO: 10865
  Payload ID: 2156;
  Gene Symbol: CARF;
  Gene Name: calcium responsive transcription factor;
  Uniprot ID:  Q8N187;
  ENSP ID: ENSP00000414644

SEQ ID NO: 10879 - protein, 189 aa, Homo sapiens
  Payload ID: 2156;
  Gene Symbol: CARF;
  Gene Name: calcium responsive transcription factor;
  ENSP ID: ENSP00000414789
MDSRDSSFGQNDSPTVLPITTREANNSLISQNIPGPLTQTQTLSAEQFHLVDQNGQAIQYELQSLGESNAQMMIVASPTENGQVLRVIPPTQTGMAQVIIPQGQLVDVNSPRDVPEEKPSNRNLPTVRVDTLADNTSNYILHPQTSFPLPKKSVTGMLEEPLLGPLQPLSSNTPIWACRLRSCEGVELW

SEQ ID NO: 10880 - protein, 207 aa, Homo sapiens
  Payload ID: 2156;
  Gene Symbol: CARF;
  Gene Name: calcium responsive transcription factor;
  Uniprot ID:  Q8N187;
  ENSP ID: ENSP00000415948
MIVASPTENGQVLRVIPPTQTGMAQVIIPQGQLVDVNSPRDVPEEKPSNRNLPTVRVDTLADNTSNYILHPQTSFPLPKKSVTGMLEEPLLGPLQPLSSNTPIWACRLRSCEKIGDSYRGYCVSETELESVLTFHKQQTQSVWGTRQSPSPAKPATRLMWKSQYVPYDGIPFVNAGTFLKNYFKRFSSSHSPLSKCDFPKVITFLFW

SEQ ID NO: 10881 - protein, 623 aa, Homo sapiens
  Payload ID: 2156;
  Gene Symbol: CARF;
  Gene Name: calcium responsive transcription factor;
  ENSP ID: ENSP00000416160
MIVASPTENGQVLRVIPPTQTGMAQVIIPQGQLVDVNSPRDVPEEKPSNRNLPTVRVDTLADNTSNYILHPQTSFPLPKKSVTGMLEEPLLGPLQPLSSNTPIWACRLRSCEKIGDSYRGYCVSETELESVLTFHKQQTQSVWGTRQSPSPAKPATRLMWKSQYVPYDGIPFVNAGSRAVVMECQYGPRRKGFQLKKVSEQESRSCQLYKATCPARIYIKKVQKFPEYRVPTDPKIDKKIIRMEQEKAFNMLKKNLVDAGGVLRWYVQLPTQQAHQYHELETPCLTLSPSPFPVSSLEEEETAVRDENCALPSRLHPQVAHKIQELVSQGIEQVYAVRKQLRKFVERELFKPDEVPERHNLSFFPTVNDIKNHIHEVQKSLRNGDTVYNSEIIPATLQWTTDSGNILKETMTVTFAEGNSPGESITTKVETNQTRGSLSPEPTHLLSSLSSFQPKIFTQLQGLQLQPRYTSPDESPAVVSVNNQPSSSPSGLLDTIGSAVMNNNSLLLGQSHSLQRDTCLTQNNSTASTMGNLPEPDQNLVAMDELVEVGDVEDTGNLEGTVHRILLGDVQTIPIQIIDNHSALIEENPESTISVSQVKQEPKEPALSMEAKKTVDYKKLSAT

SEQ ID NO: 10882 - protein, 309 aa, Homo sapiens
  Payload ID: 2156;
  Gene Symbol: CARF;
  Gene Name: calcium responsive transcription factor;
  ENSP ID: ENSP00000416812
MEQSNDSLRVNHNDGEESKTSAQVFEHLICMDSRDSSFGQNDSPTVLPITTREANNSLISQNIPGPLTQTQTLSAEQFHLVDQNGQAIQYELQSLGESNAQMMIVASPTENGQVLRVIPPTQTGMAQVIIPQGQLVDVNSPRDVPEEKPSNRNLPTVRVDTLADNTSNYILHPQTSFPLPKKSVTGMLEEPLLGPLQPLSSNTPIWACRLRSCEKIGDSYRGYCVSETELESVLTFHKQQTQSVWGTRQSPSPAKPATRLMWKSQYVPYDGIPFVNAGTFLKNYFKRFSSSHSPLSKCDFPKVITFLFW

SEQ ID NO: 10883 - protein, 370 aa, Homo sapiens
  Payload ID: 2157;
  Gene Symbol: CAMK1;
  Gene Name: calcium/calmodulin-dependent prt kinase I;
  Uniprot ID:  Q14012;
  ENSP ID: ENSP00000256460
MLGAVEGPRWKQAEDIRDIYDFRDVLGTGAFSEVILAEDKRTQKLVAIKCIAKEALEGKEGSMENEIAVLHKIKHPNIVALDDIYESGGHLYLIMQLVSGGELFDRIVEKGFYTERDASRLIFQVLDAVKYLHDLGIVHRDLKPENLLYYSLDEDSKIMISDFGLSKMEDPGSVLSTACGTPGYVAPEVLAQKPYSKAVDCWSIGVIAYILLCGYPPFYDENDAKLFEQILKAEYEFDSPYWDDISDSAKDFIRHLMEKDPEKRFTCEQALQHPWIAGDTALDKNIHQSVSEQIKKNFAKSKWKQAFNATAVVRHMRKLQLGTSQEGQGQTASHGELLTPVAGGPAAGCCCRDCCVEPGTELSPTLPHQL

SEQ ID NO: 10884 - protein, 39 aa, Homo sapiens
  Payload ID: 2157;
  Gene Symbol: CAMK1;
  Gene Name: calcium/calmodulin-dependent prt kinase I;
  ENSP ID: ENSP00000380447
MLGAVEGPRWKQAEDIRDIYDFRDVLGTLSPGGGKDDRH

SEQ ID NO: 10885 - protein, 260 aa, Homo sapiens
  Payload ID: 2157;
  Gene Symbol: CAMK1;
  Gene Name: calcium/calmodulin-dependent prt kinase I;
  ENSP ID: ENSP00000393238
  MOD_RES (1)..(1): Any amino acid
XDSKIMISDFGLSKMEDPGSVLSTACGTPGYVAPEVLAQKPYSKAVDCWSIGVIAYILLCGYPPFYDENDAKLFEQILKAEYEFDSPYWDDISDSAKDFIRHLMEKDPEKRFTCEQALQHPWIAGDTALDKNIHQSVSEQIKKNFAKSKWKQAFNATAVVRHMRKLQLGTSQEGQGQTASHGELLTPVAGGEERALQKGMGGPQRCTRAGVEGLPLRPPLFCLPMQGRQLAVAVETAAWSRAQNCPPHCPTSSRALDLGS

SEQ ID NO: 10886 - protein, 122 aa, Homo sapiens
  Payload ID: 2157;
  Gene Symbol: CAMK1;
  Gene Name: calcium/calmodulin-dependent prt kinase I;
  ENSP ID: ENSP00000404587
MLGAVEGPRWKQAEDIRDIYDFRDVLGTIKHPNIVALDDIYESGGHLYLIMQLVSGGELFDRIVEKGFYTERDASRLIFQVLDAVKYLHDLGIVHRDLKPENLLYYSLDEDSKIMISDFGLS

SEQ ID NO: 10887 - protein, 357 aa, Homo sapiens
  Payload ID: 2158;
  Gene Symbol: CAMK1D;
  Gene Name: calcium/calmodulin-dependent prt kinase ID;
  Uniprot ID:  Q8IU85;
  ENSP ID: ENSP00000368122
MARENGESSSSWKKQAEDIKKIFEFKETLGTGAFSEVVLAEEKATGKLFAVKCIPKKALKGKESSIENEIAVLRKIKHENIVALEDIYESPNHLYLVMQLVSGGELFDRIVEKGFYTEKDASTLIRQVLDAVYYLHRMGIVHRDLKPENLLYYSQDEESKIMISDFGLSKMEGKGDVMSTACGTPGYVAPEVLAQKPYSKAVDCWSIGVIAYILLCGYPPFYDENDSKLFEQILKAEYEFDSPYWDDISDSAKDFIRNLMEKDPNKRYTCEQAARHPWIAGDTALNKNIHESVSAQIRKNFAKSKWRQAFNATAVVRHMRKLHLGSSLDSSNASVSSSLSLASQKDCAYVAKPESLS

SEQ ID NO: 10888 - protein, 291 aa, Homo sapiens [sequence omitted]

SEQ ID NO: 10889 - protein, 385 aa, Homo sapiens
  Payload ID: 2158;
  Gene Symbol: CAMK1D;
  Gene Name: calcium/calmodulin-dependent prt kinase ID;
  Uniprot ID:  Q8IU85;
  ENSP ID: ENSP00000478874
MARENGESSSSWKKQAEDIKKIFEFKETLGTGAFSEVVLAEEKATGKLFAVKCIPKKALKGKESSIENEIAVLRKIKHENIVALEDIYESPNHLYLVMQLVSGGELFDRIVEKGFYTEKDASTLIRQVLDAVYYLHRMGIVHRDLKPENLLYYSQDEESKIMISDFGLSKMEGKGDVMSTACGTPGYVAPEVLAQKPYSKAVDCWSIGVIAYILLCGYPPFYDENDSKLFEQILKAEYEFDSPYWDDISDSAKDFIRNLMEKDPNKRYTCEQAARHPWIAGDTALNKNIHESVSAQIRKNFAKSKWRQAFNATAVVRHMRKLHLGSSLDSSNASVSSSLSLASQKDCLAPSTLCSFISSSSGVSGVGAERRPRPTTVTAVHSGSK

SEQ ID NO: 10890 - protein, 476 aa, Homo sapiens [sequence omitted]

SEQ ID NO: 10891 - protein, 476 aa, Homo sapiens [sequence omitted]

SEQ ID NO: 10892 - protein, 245 aa, Homo sapiens
  Payload ID: 2159;
  Gene Symbol: CAMK1G;
  Gene Name: calcium/calmodulin-dependent prt kinase IG;
  ENSP ID: ENSP00000392173
MGRKEEDDCSSWKKQTTNIRKTFIFMEVLGSGAFSEVFLVKQRLTGKLFALKCIKKSPAFRDSSLENEIAVLKKIKHENIVTLEDIYESTTHYYLVMQLVSGGELFDRILERGVYTEKDASLVIQQVLSAVKYLHENGIVHRDLKPENLLYLTPEENSKIMITDFGLSKMEQNGIMSTACGTPGYVGSVDTPHSMKKRSLSFSRRSRRATMSLSLHSGMTFLSQPRTLFATCLRRIRTSGTPVRR

SEQ ID NO: 10893 - protein, 478 aa, Homo sapiens
  Payload ID: 2160;
  Gene Symbol: CAMK2A;
  Gene Name: calcium/calmodulin-dependent prt kinase II alpha;
  Uniprot ID:  Q9UQM7;
  ENSP ID: ENSP00000261793
MATITCTRFTEEYQLFEELGKGAFSVVRRCVKVLAGQEYAAKIINTKKLSARDHQKLEREARICRLLKHPNIVRLHDSISEEGHHYLIFDLVTGGELFEDIVAREYYSEADASHCIQQILEAVLHCHQMGVVHRDLKPENLLLASKLKGAAVKLADFGLAIEVEGEQQAWFGFAGTPGYLSPEVLRKDPYGKPVDLWACGVILYILLVGYPPFWDEDQHRLYQQIKAGAYDFPSPEWDTVTPEAKDLINKMLTINPSKRITAAEALKHPWISHRSTVASCMHRQETVDCLKKFNARRKLKGAILTTMLATRNFSGGKSGGNKKSDGVKESSESTNTTIEDEDTKVRKQEIIKVTEQLIEAISNGDFESYTKMCDPGMTAFEPEALGNLVEGLDFHRFYFENLWSRNSKPVHTTILNPHIHLMGDESACIAYIRITQYLDAGGIPRTAQSEETRVWHRRDGKWQIVHFHRSGAPSVLPH

SEQ ID NO: 10894 - protein, 489 aa, Homo sapiens
  Payload ID: 2160;
  Gene Symbol: CAMK2A;
  Gene Name: calcium/calmodulin-dependent prt kinase II alpha;
  Uniprot ID:  Q9UQM7;
  ENSP ID: ENSP00000381412
MATITCTRFTEEYQLFEELGKGAFSVVRRCVKVLAGQEYAAKIINTKKLSARDHQKLEREARICRLLKHPNIVRLHDSISEEGHHYLIFDLVTGGELFEDIVAREYYSEADASHCIQQILEAVLHCHQMGVVHRDLKPENLLLASKLKGAAVKLADFGLAIEVEGEQQAWFGFAGTPGYLSPEVLRKDPYGKPVDLWACGVILYILLVGYPPFWDEDQHRLYQQIKAGAYDFPSPEWDTVTPEAKDLINKMLTINPSKRITAAEALKHPWISHRSTVASCMHRQETVDCLKKFNARRKLKGAILTTMLATRNFSGGKSGGNKKSDGVKKRKSSSSVQLMESSESTNTTIEDEDTKVRKQEIIKVTEQLIEAISNGDFESYTKMCDPGMTAFEPEALGNLVEGLDFHRFYFENLWSRNSKPVHTTILNPHIHLMGDESACIAYIRITQYLDAGGIPRTAQSEETRVWHRRDGKWQIVHFHRSGAPSVLPH

SEQ ID NO: 10895 - protein, 90 aa, Homo sapiens
  Payload ID: 2160;
  Gene Symbol: CAMK2A;
  Gene Name: calcium/calmodulin-dependent prt kinase II alpha;
  ENSP ID: ENSP00000426607
MATITCTRFTEEYQLFEELGKGAFSVVRRCVKVLAGQEYAAKIINTKKLSARDHQKLEREARICRLLKHPNIVRLHDSISEEGHHYLIFD

SEQ ID NO: 10896 - protein, 24 aa, Homo sapiens
  Payload ID: 2160;
  Gene Symbol: CAMK2A;
  Gene Name: calcium/calmodulin-dependent prt kinase II alpha;
  ENSP ID: ENSP00000427580
MGVVHRDLKPENLLLASKLKGAAV

SEQ ID NO: 10897 - protein, 517 aa, Homo sapiens
  Payload ID: 2161;
  Gene Symbol: CAMK2B;
  Gene Name: calcium/calmodulin-dependent prt kinase II beta;
  Uniprot ID:  Q13554;
  ENSP ID: ENSP00000258682
MATTVTCTRFTDEYQLYEDIGKGAFSVVRRCVKLCTGHEYAAKIINTKKLSARDHQKLEREARICRLLKHSNIVRLHDSISEEGFHYLVFDLVTGGELFEDIVAREYYSEADASHCIQQILEAVLHCHQMGVVHRDLKPENLLLASKCKGAAVKLADFGLAIEVQGDQQAWFGFAGTPGYLSPEVLRKEAYGKPVDIWACGVILYILLVGYPPFWDEDQHKLYQQIKAGAYDFPSPEWDTVTPEAKNLINQMLTINPAKRITAHEALKHPWVCQRSTVASMMHRQETVECLKKFNARRKLKGAILTTMLATRNFSAKSLLNKKADGVKPQTNSTKNSAAATSPKGTLPPAALEPQTTVIHNPVDGIKESSDSANTTIEDEDAKARKQEIIKTTEQLIEAVNNGDFEAYAKICDPGLTSFEPEALGNLVEGMDFHRFYFENLLAKNSKPIHTTILNPHVHVIGEDAACIAYIRLTQYIDGQGRPRTSQSEETRVWHRRDGKWQNVHFHCSGAPVAPLQ

SEQ ID NO: 10898 - protein, 542 aa, Homo sapiens
  Payload ID: 2161;
  Gene Symbol: CAMK2B;
  Gene Name: calcium/calmodulin-dependent prt kinase II beta;
  Uniprot ID:  Q13554;
  ENSP ID: ENSP00000326375
MATTVTCTRFTDEYQLYEDIGKGAFSVVRRCVKLCTGHEYAAKIINTKKLSARDHQKLEREARICRLLKHSNIVRLHDSISEEGFHYLVFDLVTGGELFEDIVAREYYSEADASHCIQQILEAVLHCHQMGVVHRDLKPENLLLASKCKGAAVKLADFGLAIEVQGDQQAWFGFAGTPGYLSPEVLRKEAYGKPVDIWACGVILYILLVGYPPFWDEDQHKLYQQIKAGAYDFPSPEWDTVTPEAKNLINQMLTINPAKRITAHEALKHPWVCQRSTVASMMHRQETVECLKKFNARRKLKGAILTTMLATRNFSVGRQTTAPATMSTAASGTTMGLVEQAKSLLNKKADGVKPQTNSTKNSAAATSPKGTLPPAALEPQTTVIHNPVDGIKESSDSANTTIEDEDAKARKQEIIKTTEQLIEAVNNGDFEAYAKICDPGLTSFEPEALGNLVEGMDFHRFYFENLLAKNSKPIHTTILNPHVHVIGEDAACIAYIRLTQYIDGQGRPRTSQSEETRVWHRRDGKWQNVHFHCSGAPVAPLQ

SEQ ID NO: 10899 - protein, 479 aa, Homo sapiens
  Payload ID: 2161;
  Gene Symbol: CAMK2B;
  Gene Name: calcium/calmodulin-dependent prt kinase II beta;
  Uniprot ID:  Q13554;
  ENSP ID: ENSP00000326427
MATTVTCTRFTDEYQLYEDIGKGAFSVVRRCVKLCTGHEYAAKIINTKKLSARDHQKLEREARICRLLKHSNIVRLHDSISEEGFHYLVFDLVTGGELFEDIVAREYYSEADASHCIQQILEAVLHCHQMGVVHRDLKPENLLLASKCKGAAVKLADFGLAIEVQGDQQAWFGFAGTPGYLSPEVLRKEAYGKPVDIWACGVILYILLVGYPPFWDEDQHKLYQQIKAGAYDFPSPEWDTVTPEAKNLINQMLTINPAKRITAHEALKHPWVCQRSTVASMMHRQETVECLKKFNARRKLKGAILTTMLATRNFSAAKSLLNKKADGVKESSDSANTTIEDEDAKARKQEIIKTTEQLIEAVNNGDFEAYAKICDPGLTSFEPEALGNLVEGMDFHRFYFENLLAKNSKPIHTTILNPHVHVIGEDAACIAYIRLTQYIDGQGRPRTSQSEETRVWHRRDGKWQNVHFHCSGAPVAPLQ

SEQ ID NO: 10900 - protein, 449 aa, Homo sapiens
  Payload ID: 2161;
  Gene Symbol: CAMK2B;
  Gene Name: calcium/calmodulin-dependent prt kinase II beta;
  Uniprot ID:  Q13554;
  ENSP ID: ENSP00000326518
MATTVTCTRFTDEYQLYEDIGKGAFSVVRRCVKLCTGHEYAAKIINTKKLSARDHQKLEREARICRLLKHSNIVRLHDSISEEGFHYLVFDLVTGGELFEDIVAREYYSEADASHCIQQILEAVLHCHQMGVVHRDLKPENLLLASKCKGAAVKLADFGLAIEVQGDQQAWFGFAGTPGYLSPEVLRKEAYGKPVDIWACGVILYILLVGYPPFWDEDQHKLYQQIKAGAYDFPSPEWDTVTPEAKNLINQMLTINPAKRITAHEALKHPWVCQRSTVASMMHRQETVECLKKFNARRKLKGAILTTMLATRNFSARKQEIIKTTEQLIEAVNNGDFEAYAKICDPGLTSFEPEALGNLVEGMDFHRFYFENLLAKNSKPIHTTILNPHVHVIGEDAACIAYIRLTQYIDGQGRPRTSQSEETRVWHRRDGKWQNVHFHCSGAPVAPLQ

SEQ ID NO: 10901 - protein, 492 aa, Homo sapiens
  Payload ID: 2161;
  Gene Symbol: CAMK2B;
  Gene Name: calcium/calmodulin-dependent prt kinase II beta;
  Uniprot ID:  Q13554;
  ENSP ID: ENSP00000326544
MATTVTCTRFTDEYQLYEDIGKGAFSVVRRCVKLCTGHEYAAKIINTKKLSARDHQKLEREARICRLLKHSNIVRLHDSISEEGFHYLVFDLVTGGELFEDIVAREYYSEADASHCIQQILEAVLHCHQMGVVHRDLKPENLLLASKCKGAAVKLADFGLAIEVQGDQQAWFGFAGTPGYLSPEVLRKEAYGKPVDIWACGVILYILLVGYPPFWDEDQHKLYQQIKAGAYDFPSPEWDTVTPEAKNLINQMLTINPAKRITAHEALKHPWVCQRSTVASMMHRQETVECLKKFNARRKLKGAILTTMLATRNFSVGRQTTAPATMSTAASGTTMGLVEQAKSLLNKKADGVKEPQTTVIHNPVDGIKESSDSANTTIEDEDAKARKQEIIKTTEQLIEAVNNGDFEAYAFYFENLLAKNSKPIHTTILNPHVHVIGEDAACIAYIRLTQYIDGQGRPRTSQSEETRVWHRRDGKWQNVHFHCSGAPVAPLQ

SEQ ID NO: 10902 - protein, 362 aa, Homo sapiens
  Payload ID: 2161;
  Gene Symbol: CAMK2B;
  Gene Name: calcium/calmodulin-dependent prt kinase II beta;
  ENSP ID: ENSP00000326600
MATTVTCTRFTDEYQLYEDIGKGAFSVVRRCVKLCTGHEYAAKIINTKKLSARDHQKLEREARICRLLKHSNIVRLHDSISEEGFHYLVFDLVTGGELFEDIVAREYYSEADASHCIQQILEAVLHCHQMGVVHRDLKPENLLLASKCKGAAVKLADFGLAIEVQGDQQAWFGFAGTPGYLSPEVLRKEAYGKPVDIWACGVILYILLVGYPPFWDEDQHKLYQQIKAGAYDFPSPEWDTVTPEAKNLINQMLTINPAKRITAHEALKHPWVCQRSTVASMMHRQETVECLKKFNARRKLKPRVYSTRKQMESSPRRIAPKTVQPPPAPKGRFLLPPWSLKPPSSITQWTGLRSLLTVPIPP

SEQ ID NO: 10903 - protein, 503 aa, Homo sapiens
  Payload ID: 2161;
  Gene Symbol: CAMK2B;
  Gene Name: calcium/calmodulin-dependent prt kinase II beta;
  Uniprot ID:  Q13554;
  ENSP ID: ENSP00000351542
MATTVTCTRFTDEYQLYEDIGKGAFSVVRRCVKLCTGHEYAAKIINTKKLSARDHQKLEREARICRLLKHSNIVRLHDSISEEGFHYLVFDLVTGGELFEDIVAREYYSEADASHCIQQILEAVLHCHQMGVVHRDLKPENLLLASKCKGAAVKLADFGLAIEVQGDQQAWFGFAGTPGYLSPEVLRKEAYGKPVDIWACGVILYILLVGYPPFWDEDQHKLYQQIKAGAYDFPSPEWDTVTPEAKNLINQMLTINPAKRITAHEALKHPWVCQRSTVASMMHRQETVECLKKFNARRKLKGAILTTMLATRNFSAAKSLLNKKADGVKPQTNSTKNSAAATSPKGTLPPAALESSDSANTTIEDEDAKARKQEIIKTTEQLIEAVNNGDFEAYAKICDPGLTSFEPEALGNLVEGMDFHRFYFENLLAKNSKPIHTTILNPHVHVIGEDAACIAYIRLTQYIDGQGRPRTSQSEETRVWHRRDGKWQNVHFHCSGAPVAPLQ

SEQ ID NO: 10904 - protein, 518 aa, Homo sapiens
  Payload ID: 2161;
  Gene Symbol: CAMK2B;
  Gene Name: calcium/calmodulin-dependent prt kinase II beta;
  Uniprot ID:  Q13554;
  ENSP ID: ENSP00000379096
MATTVTCTRFTDEYQLYEDIGKGAFSVVRRCVKLCTGHEYAAKIINTKKLSARDHQKLEREARICRLLKHSNIVRLHDSISEEGFHYLVFDLVTGGELFEDIVAREYYSEADASHCIQQILEAVLHCHQMGVVHRDLKPENLLLASKCKGAAVKLADFGLAIEVQGDQQAWFGFAGTPGYLSPEVLRKEAYGKPVDIWACGVILYILLVGYPPFWDEDQHKLYQQIKAGAYDFPSPEWDTVTPEAKNLINQMLTINPAKRITAHEALKHPWVCQRSTVASMMHRQETVECLKKFNARRKLKGAILTTMLATRNFSAAKSLLNKKADGVKPQTNSTKNSAAATSPKGTLPPAALEPQTTVIHNPVDGIKESSDSANTTIEDEDAKARKQEIIKTTEQLIEAVNNGDFEAYAKICDPGLTSFEPEALGNLVEGMDFHRFYFENLLAKNSKPIHTTILNPHVHVIGEDAACIAYIRLTQYIDGQGRPRTSQSEETRVWHRRDGKWQNVHFHCSGAPVAPLQ

SEQ ID NO: 10905 - protein, 666 aa, Homo sapiens
  Payload ID: 2161;
  Gene Symbol: CAMK2B;
  Gene Name: calcium/calmodulin-dependent prt kinase II beta;
  Uniprot ID:  Q13554;
  ENSP ID: ENSP00000379098
MATTVTCTRFTDEYQLYEDIGKGAFSVVRRCVKLCTGHEYAAKIINTKKLSARDHQKLEREARICRLLKHSNIVRLHDSISEEGFHYLVFDLVTGGELFEDIVAREYYSEADASHCIQQILEAVLHCHQMGVVHRDLKPENLLLASKCKGAAVKLADFGLAIEVQGDQQAWFGFAGTPGYLSPEVLRKEAYGKPVDIWACGVILYILLVGYPPFWDEDQHKLYQQIKAGAYDFPSPEWDTVTPEAKNLINQMLTINPAKRITAHEALKHPWVCQRSTVASMMHRQETVECLKKFNARRKLKGAILTTMLATRNFSVGRQTTAPATMSTAASGTTMGLVEQAKSLLNKKADGVKPQTNSTKNSAAATSPKGTLPPAALEPQTTVIHNPVDGIKESSDSANTTIEDEDAKAPRVPDILSSVRRGSGAPEAEGPLPCPSPAPFSPLPAPSPRISDILNSVRRGSGTPEAEGPLSAGPPPCLSPALLGPLSSPSPRISDILNSVRRGSGTPEAEGPSPVGPPPCPSPTIPGPLPTPSRKQEIIKTTEQLIEAVNNGDFEAYAKICDPGLTSFEPEALGNLVEGMDFHRFYFENLLAKNSKPIHTTILNPHVHVIGEDAACIAYIRLTQYIDGQGRPRTSQSEETRVWHRRDGKWQNVHFHCSGAPVAPLQ

SEQ ID NO: 10906 - protein, 180 aa, Homo sapiens
  Payload ID: 2161;
  Gene Symbol: CAMK2B;
  Gene Name: calcium/calmodulin-dependent prt kinase II beta;
  ENSP ID: ENSP00000388445
MATTVTCTRFTDEYQLYEDIGKGAFSVVRRCVKLCTGHEYAAKIINTKKLSARDHQKLEREARICRLLKHSNIVRLHDSISEEGFHYLVFDLVTGGELFEDIVAREYYSEADASHCIQQILEAVLHCHQMGVVHRDLKLHGELGASTHSRWQNHHVQWPVDWCSVDTDACAPAGWDPQGD

SEQ ID NO: 10907 - protein, 184 aa, Homo sapiens
  Payload ID: 2161;
  Gene Symbol: CAMK2B;
  Gene Name: calcium/calmodulin-dependent prt kinase II beta;
  ENSP ID: ENSP00000388951
  MOD_RES (1)..(1): Any amino acid
XAKNLINQMLTINPAKRITAHEALKHPWVCQRSTVASMMHRQETVECLKKFNARRKLKGAILTTMLATRNFSVGRQTTAPATMSTAASGTTMGLVEQAKSLLNKKADGVKPQTNSTKNSAAATSPKGTLPPAALEPQTTVIHNPVDGIKESSDSANTTIEDEDAKGMDDIPGLLPPPPVGRHQT

SEQ ID NO: 10908 - protein, 518 aa, Homo sapiens; identical to SEQ ID NO: 10904
  Payload ID: 2161;
  Gene Symbol: CAMK2B;
  Gene Name: calcium/calmodulin-dependent prt kinase II beta;
  Uniprot ID:  Q13554;
  ENSP ID: ENSP00000390292

SEQ ID NO: 10909 - protein, 173 aa, Homo sapiens
  Payload ID: 2161;
  Gene Symbol: CAMK2B;
  Gene Name: calcium/calmodulin-dependent prt kinase II beta;
  ENSP ID: ENSP00000390419
MRIPEWVAGSPVFTPQMHRSTPVCPLGLQRCPGHWRGRGAFSVVRRCVKLCTGHEYAAKIINTKKLSARDHQKLEREARICRLLKHSNIVRLHDSISEEGFHYLVFDLVTGGELFEDIVAREYYSEADASHCIQQILEAVLHCHQMGVVHRDLKPENLLLASKCKGAAVKLAD

SEQ ID NO: 10910 - protein, 542 aa, Homo sapiens; identical to SEQ ID NO: 10898
  Payload ID: 2161;
  Gene Symbol: CAMK2B;
  Gene Name: calcium/calmodulin-dependent prt kinase II beta;
  Uniprot ID:  Q13554;
  ENSP ID: ENSP00000397937

SEQ ID NO: 10911 - protein, 168 aa, Homo sapiens
  Payload ID: 2161;
  Gene Symbol: CAMK2B;
  Gene Name: calcium/calmodulin-dependent prt kinase II beta;
  ENSP ID: ENSP00000400387
MATTVTCTRFTDEYQLYEDIGKGAFSVVRRCVKLCTGHEYAAKIINTKKLSARDHQKLEREARICRLLKHSNIVRLHDSISEEGFHYLVFDLVTGGELFEDIVAREYYSEADARATRTNPPAVCHSHCIQQILEAVLHCHQMGVVHRDLKPENLLLASKCKGAAVKLA

SEQ ID NO: 10912 - protein, 184 aa, Homo sapiens
  Payload ID: 2161;
  Gene Symbol: CAMK2B;
  Gene Name: calcium/calmodulin-dependent prt kinase II beta;
  ENSP ID: ENSP00000410445
LPAVSLTGMDDIPGLLPPPPVGRHQTGGGVEILLEKRLLGHGLGMAGQWLARKQEIIKTTEQLIEAVNNGDFEAYAKICDPGLTSFEPEALGNLVEGMDFHRFYFENLLAKNSKPIHTTILNPHVHVIGEDAACIAYIRLTQYIDGQGRPRTSQSEETRVWHRRDGKWQNVHFHCSGAPVAPLQ

SEQ ID NO: 10913 - protein, 112 aa, Homo sapiens
  Payload ID: 2161;
  Gene Symbol: CAMK2B;
  Gene Name: calcium/calmodulin-dependent prt kinase II beta;
  ENSP ID: ENSP00000428912
MATTVTCTRFTDEYQLYEDIGKGAFSVVRRCVKLCTGHEYAAKIINTKKLSARDHQKLEREARICRLLKHSNIVTVSSRSWRPFSIVTKWGSSTETSSRRTCFWPASAKGLQ

SEQ ID NO: 10914 - protein, 478 aa, Homo sapiens
  Payload ID: 2162;
  Gene Symbol: CAMK2D;
  Gene Name: calcium/calmodulin-dependent prt kinase II delta;
  Uniprot ID:  Q13557;
  ENSP ID: ENSP00000296402
MASTTTCTRFTDEYQLFEELGKGAFSVVRRCMKIPTGQEYAAKIINTKKLSARDHQKLEREARICRLLKHPNIVRLHDSISEEGFHYLVFDLVTGGELFEDIVAREYYSEADASHCIQQILESVNHCHLNGIVHRDLKPENLLLASKSKGAAVKLADFGLAIEVQGDQQAWFGFAGTPGYLSPEVLRKDPYGKPVDMWACGVILYILLVGYPPFWDEDQHRLYQQIKAGAYDFPSPEWDTVTPEAKDLINKMLTINPAKRITASEALKHPWICQRSTVASMMHRQETVDCLKKFNARRKLKGAILTTMLATRNFSAAKSLLKKPDGVKESTESSNTTIEDEDVKARKQEIIKVTEQLIEAINNGDFEAYTKICDPGLTAFEPEALGNLVEGMDFHRFYFENALSKSNKPIHTIILNPHVHLVGDDAACIAYIRLTQYMDGSGMPKTMQSEETRVWHRRDGKWQNVHFHRSGSPTVPIK

SEQ ID NO: 10915 - protein, 499 aa, Homo sapiens
  Payload ID: 2162;
  Gene Symbol: CAMK2D;
  Gene Name: calcium/calmodulin-dependent prt kinase II delta;
  Uniprot ID:  Q13557;
  ENSP ID: ENSP00000339740
MASTTTCTRFTDEYQLFEELGKGAFSVVRRCMKIPTGQEYAAKIINTKKLSARDHQKLEREARICRLLKHPNIVRLHDSISEEGFHYLVFDLVTGGELFEDIVAREYYSEADASHCIQQILESVNHCHLNGIVHRDLKPENLLLASKSKGAAVKLADFGLAIEVQGDQQAWFGFAGTPGYLSPEVLRKDPYGKPVDMWACGVILYILLVGYPPFWDEDQHRLYQQIKAGAYDFPSPEWDTVTPEAKDLINKMLTINPAKRITASEALKHPWICQRSTVASMMHRQETVDCLKKFNARRKLKGAILTTMLATRNFSAAKSLLKKPDGVKESTESSNTTIEDEDVKARKQEIIKVTEQLIEAINNGDFEAYTKICDPGLTAFEPEALGNLVEGMDFHRFYFENALSKSNKPIHTIILNPHVHLVGDDAACIAYIRLTQYMDGSGMPKTMQSEETRVWHRRDGKWQNVHFHRSGSPTVPIKPPCIPNGKENFSGGTSLWQNI

SEQ ID NO: 10916 - protein, 478 aa, Homo sapiens; identical to SEQ ID NO: 10914
  Payload ID: 2162;
  Gene Symbol: CAMK2D;
  Gene Name: calcium/calmodulin-dependent prt kinase II delta;
  Uniprot ID:  Q13557;
  ENSP ID: ENSP00000369098

SEQ ID NO: 10917 - protein, 492 aa, Homo sapiens
  Payload ID: 2162;
  Gene Symbol: CAMK2D;
  Gene Name: calcium/calmodulin-dependent prt kinase II delta;
  Uniprot ID:  Q13557;
  ENSP ID: ENSP00000378030
MASTTTCTRFTDEYQLFEELGKGAFSVVRRCMKIPTGQEYAAKIINTKKLSARDHQKLEREARICRLLKHPNIVRLHDSISEEGFHYLVFDLVTGGELFEDIVAREYYSEADASHCIQQILESVNHCHLNGIVHRDLKPENLLLASKSKGAAVKLADFGLAIEVQGDQQAWFGFAGTPGYLSPEVLRKDPYGKPVDMWACGVILYILLVGYPPFWDEDQHRLYQQIKAGAYDFPSPEWDTVTPEAKDLINKMLTINPAKRITASEALKHPWICQRSTVASMMHRQETVDCLKKFNARRKLKGAILTTMLATRNFSAAKSLLKKPDGVKEPQTTVIHNPDGNKESTESSNTTIEDEDVKARKQEIIKVTEQLIEAINNGDFEAYTKICDPGLTAFEPEALGNLVEGMDFHRFYFENALSKSNKPIHTIILNPHVHLVGDDAACIAYIRLTQYMDGSGMPKTMQSEETRVWHRRDGKWQNVHFHRSGSPTVPIK

SEQ ID NO: 10918 - protein, 478 aa, Homo sapiens
  Payload ID: 2162;
  Gene Symbol: CAMK2D;
  Gene Name: calcium/calmodulin-dependent prt kinase II delta;
  Uniprot ID:  Q13557;
  ENSP ID: ENSP00000378032
MASTTTCTRFTDEYQLFEELGKGAFSVVRRCMKIPTGQEYAAKIINTKKLSARDHQKLEREARICRLLKHPNIVRLHDSISEEGFHYLVFDLVTGGELFEDIVAREYYSEADASHCIQQILESVNHCHLNGIVHRDLKPENLLLASKSKGAAVKLADFGLAIEVQGDQQAWFGFAGTPGYLSPEVLRKDPYGKPVDMWACGVILYILLVGYPPFWDEDQHRLYQQIKAGAYDFPSPEWDTVTPEAKDLINKMLTINPAKRITASEALKHPWICQRSTVASMMHRQETVDCLKKFNARRKLKGAILTTMLATRNFSAAKSLLKKPDGVKESTESSNTTIEDEDVKARKQEIIKVTEQLIEAINNGDFEAYTKICDPGLTAFEPEALGNLVEGMDFHRFYFENALSKSNKPIHTIILNPHVHLVGDDAACIAYIRLTQYMDGSGMPKTMQSEETRVWHRRDGKWQNVHFHRSGSPTVPIN

SEQ ID NO: 10919 - protein, 489 aa, Homo sapiens
  Payload ID: 2162;
  Gene Symbol: CAMK2D;
  Gene Name: calcium/calmodulin-dependent prt kinase II delta;
  Uniprot ID:  Q13557;
  ENSP ID: ENSP00000422566
MASTTTCTRFTDEYQLFEELGKGAFSVVRRCMKIPTGQEYAAKIINTKKLSARDHQKLEREARICRLLKHPNIVRLHDSISEEGFHYLVFDLVTGGELFEDIVAREYYSEADASHCIQQILESVNHCHLNGIVHRDLKPENLLLASKSKGAAVKLADFGLAIEVQGDQQAWFGFAGTPGYLSPEVLRKDPYGKPVDMWACGVILYILLVGYPPFWDEDQHRLYQQIKAGAYDFPSPEWDTVTPEAKDLINKMLTINPAKRITASEALKHPWICQRSTVASMMHRQETVDCLKKFNARRKLKGAILTTMLATRNFSAAKSLLKKPDGVKKRKSSSSVQMMESTESSNTTIEDEDVKARKQEIIKVTEQLIEAINNGDFEAYTKICDPGLTAFEPEALGNLVEGMDFHRFYFENALSKSNKPIHTIILNPHVHLVGDDAACIAYIRLTQYMDGSGMPKTMQSEETRVWHRRDGKWQNVHFHRSGSPTVPIK

SEQ ID NO: 10920 - protein, 510 aa, Homo sapiens
  Payload ID: 2162;
  Gene Symbol: CAMK2D;
  Gene Name: calcium/calmodulin-dependent prt kinase II delta;
  Uniprot ID:  Q13557;
  ENSP ID: ENSP00000423482
MASTTTCTRFTDEYQLFEELGKGAFSVVRRCMKIPTGQEYAAKIINTKKLSARDHQKLEREARICRLLKHPNIVRLHDSISEEGFHYLVFDLVTGGELFEDIVAREYYSEADASHCIQQILESVNHCHLNGIVHRDLKPENLLLASKSKGAAVKLADFGLAIEVQGDQQAWFGFAGTPGYLSPEVLRKDPYGKPVDMWACGVILYILLVGYPPFWDEDQHRLYQQIKAGAYDFPSPEWDTVTPEAKDLINKMLTINPAKRITASEALKHPWICQRSTVASMMHRQETVDCLKKFNARRKLKGAILTTMLATRNFSAAKSLLKKPDGVKKRKSSSSVQMMESTESSNTTIEDEDVKARKQEIIKVTEQLIEAINNGDFEAYTKICDPGLTAFEPEALGNLVEGMDFHRFYFENALSKSNKPIHTIILNPHVHLVGDDAACIAYIRLTQYMDGSGMPKTMQSEETRVWHRRDGKWQNVHFHRSGSPTVPIKPPCIPNGKENFSGGTSLWQNI

SEQ ID NO: 10921 - protein, 498 aa, Homo sapiens
  Payload ID: 2162;
  Gene Symbol: CAMK2D;
  Gene Name: calcium/calmodulin-dependent prt kinase II delta;
  ENSP ID: ENSP00000423677
MASTTTCTRFTDEYQLFEELGKGAFSVVRRCMKIPTGQEYAAKIINTKKLSARDHQKLEREARICRLLKHPNIVRLHDSISEEGFHYLVFDLVTGGELFEDIVAREYYSEADASHCIQQILESVNHCHLNGIVHRDLKPENLLLASKSKGAAVKLADFGLAIEVQGDQQAWFGFAGTPGYLSPEVLRKDPYGKPVDMWACGVILYILLVGYPPFWDEDQHRLYQQIKAGAYDFPSPEWDTVTPEAKDLINKMLTINPAKRITASEALKHPWICQRSTVASMMHRQETVDCLKKFNARRKLKGAILTTMLATRNFSAKSLLKKPDGVKESTESSNTTIEDEDVKARKQEIIKVTEQLIEAINNGDFEAYTKICDPGLTAFEPEALGNLVEGMDFHRFYFENALSKSNKPIHTIILNPHVHLVGDDAACIAYIRLTQYMDGSGMPKTMQSEETRVWHRRDGKWQNVHFHRSGSPTVPIKPPCIPNGKENFSGGTSLWQNI

SEQ ID NO: 10922 - protein, 194 aa, Homo sapiens
  Payload ID: 2162;
  Gene Symbol: CAMK2D;
  Gene Name: calcium/calmodulin-dependent prt kinase II delta;
  ENSP ID: ENSP00000423753
ILLVGYPPFWDEDQHRLYQQIKAGAYDFPSPEWDTVTPEAKDLINKMLTINPAKRITASEALKHPWICQRSTVASMMHRQETVDCLKKFNARRKLKGAILTTMLATRNFSAKSLLKKPDGVKSTESSNTTIEDEDVKARKQEIIKVTEQLIEAINNGDFEAYTKICDPGLTAFEPEALGNLVEGMDFHRFYFEN

SEQ ID NO: 10923 - protein, 512 aa, Homo sapiens
  Payload ID: 2162;
  Gene Symbol: CAMK2D;
  Gene Name: calcium/calmodulin-dependent prt kinase II delta;
  ENSP ID: ENSP00000424245
MASTTTCTRFTDEYQLFEELGKGAFSVVRRCMKIPTGQEYAAKIINTKKLSARDHQKLEREARICRLLKHPNIVRLHDSISEEGFHYLVFDLVTGGELFEDIVAREYYSEADASHCIQQILEAVLHCHQMGVVHRDLKPENLLLASKSKGAAVKLADFGLAIEVQGDQQAWFGFAGTPGYLSPEVLRKDPYGKPVDMWACGVILYILLVGYPPFWDEDQHRLYQQIKAGAYDFPSPEWDTVTPEAKDLINKMLTINPAKRITASEALKHPWICQRSTVASMMHRQETVDCLKKFNARRKLKGAILTTMLATRNFSAAKSLLKKPDGVKINNKANVVTSPKENIPTPALEPQTTVIHNPDGNKESTESSNTTIEDEDVKARKQEIIKVTEQLIEAINNGDFEAYTKICDPGLTAFEPEALGNLVEGMDFHRFYFENALSKSNKPIHTIILNPHVHLVGDDAACIAYIRLTQYMDGSGMPKTMQSEETRVWHRRDGKWQNVHFHRSGSPTVPIK

SEQ ID NO: 10924 - protein, 182 aa, Homo sapiens
  Payload ID: 2162;
  Gene Symbol: CAMK2D;
  Gene Name: calcium/calmodulin-dependent prt kinase II delta;
  ENSP ID: ENSP00000424247
  MOD_RES (1)..(1): Any amino acid
XRKLKGAILTTMLATRNFSAAKSLLKKPDGVKESTESSNTTIEDEDVKARKQEIIKVTEQLIEAINNGDFEAYTKICDPGLTAFEPEALGNLVEGMDFHRFYFENALSKSNKPIHTIILNPHVHLVGDDAACIAYIRLTQYMDGSGMPKTMQSEETRVWHRRDGKWQNVHFHRSGSPTVPIK

SEQ ID NO: 10925 - protein, 533 aa, Homo sapiens
  Payload ID: 2162;
  Gene Symbol: CAMK2D;
  Gene Name: calcium/calmodulin-dependent prt kinase II delta;
  ENSP ID: ENSP00000425824
MASTTTCTRFTDEYQLFEELGKGAFSVVRRCMKIPTGQEYAAKIINTKKLSARDHQKLEREARICRLLKHPNIVRLHDSISEEGFHYLVFDLVTGGELFEDIVAREYYSEADASHCIQQILEAVLHCHQMGVVHRDLKPENLLLASKSKGAAVKLADFGLAIEVQGDQQAWFGFAGTPGYLSPEVLRKDPYGKPVDMWACGVILYILLVGYPPFWDEDQHRLYQQIKAGAYDFPSPEWDTVTPEAKDLINKMLTINPAKRITASEALKHPWICQRSTVASMMHRQETVDCLKKFNARRKLKGAILTTMLATRNFSAAKSLLKKPDGVKINNKANVVTSPKENIPTPALEPQTTVIHNPDGNKESTESSNTTIEDEDVKARKQEIIKVTEQLIEAINNGDFEAYTKICDPGLTAFEPEALGNLVEGMDFHRFYFENALSKSNKPIHTIILNPHVHLVGDDAACIAYIRLTQYMDGSGMPKTMQSEETRVWHRRDGKWQNVHFHRSGSPTVPIKPPCIPNGKENFSGGTSLWQNI

SEQ ID NO: 10926 - protein, 495 aa, Homo sapiens
  Payload ID: 2163;
  Gene Symbol: CAMK2G;
  Gene Name: calcium/calmodulin-dependent prt kinase II gamma;
  Uniprot ID:  Q13555;
  ENSP ID: ENSP00000277853
MATTATCTRFTDDYQLFEELGKGAFSVVRRCVKKTSTQEYAAKIINTKKLSARDHQKLEREARICRLLKHPNIVRLHDSISEEGFHYLVFDLVTGGELFEDIVAREYYSEADASHCIHQILESVNHIHQHDIVHRDLKPENLLLASKCKGAAVKLADFGLAIEVQGEQQAWFGFAGTPGYLSPEVLRKDPYGKPVDIWACGVILYILLVGYPPFWDEDQHKLYQQIKAGAYDFPSPEWDTVTPEAKNLINQMLTINPAKRITADQALKHPWVCQRSTVASMMHRQETVECLRKFNARRKLKGAILTTMLVSRNFSAAKSLLNKKSDGGVKEPQTTVVHNATDGIKGSTESCNTTTEDEDLKVRKQEIIKITEQLIEAINNGDFEAYTKICDPGLTSFEPEALGNLVEGMDFHKFYFENLLSKNSKPIHTTILNPHVHVIGEDAACIAYIRLTQYIDGQGRPRTSQSEETRVWHRRDGKWLNVHYHCSGAPAAPLQ

SEQ ID NO: 10927 - protein, 529 aa, Homo sapiens
  Payload ID: 2163;
  Gene Symbol: CAMK2G;
  Gene Name: calcium/calmodulin-dependent prt kinase II gamma;
  Uniprot ID:  Q13555;
  ENSP ID: ENSP00000307082
MATTATCTRFTDDYQLFEELGKGAFSVVRRCVKKTSTQEYAAKIINTKKLSARDHQKLEREARICRLLKHPNIVRLHDSISEEGFHYLVFDLVTGGELFEDIVAREYYSEADASHCIHQILESVNHIHQHDIVHRDLKPENLLLASKCKGAAVKLADFGLAIEVQGEQQAWFGFAGTPGYLSPEVLRKDPYGKPVDIWACGVILYILLVGYPPFWDEDQHKLYQQIKAGAYDFPSPEWDTVTPEAKNLINQMLTINPAKRITADQALKHPWVCQRSTVASMMHRQETVECLRKFNARRKLKGAILTTMLVSRNFSAAKSLLNKKSDGGVKKRKSSSSVHLMPQSNNKNSLVSPAQEPAPLQTAMEPQTTVVHNATDGIKGSTESCNTTTEDEDLKVRKQEIIKITEQLIEAINNGDFEAYTKICDPGLTSFEPEALGNLVEGMDFHKFYFENLLSKNSKPIHTTILNPHVHVIGEDAACIAYIRLTQYIDGQGRPRTSQSEETRVWHRRDGKWLNVHYHCSGAPAAPLQ

SEQ ID NO: 10928 - protein, 527 aa, Homo sapiens
  Payload ID: 2163;
  Gene Symbol: CAMK2G;
  Gene Name: calcium/calmodulin-dependent prt kinase II gamma;
  Uniprot ID:  Q13555;
  ENSP ID: ENSP00000315599
MATTATCTRFTDDYQLFEELGKGAFSVVRRCVKKTSTQEYAAKIINTKKLSARDHQKLEREARICRLLKHPNIVRLHDSISEEGFHYLVFDLVTGGELFEDIVAREYYSEADASHCIHQILESVNHIHQHDIVHRDLKPENLLLASKCKGAAVKLADFGLAIEVQGEQQAWFGFAGTPGYLSPEVLRKDPYGKPVDIWACGVILYILLVGYPPFWDEDQHKLYQQIKAGAYDFPSPEWDTVTPEAKNLINQMLTINPAKRITADQALKHPWVCQRSTVASMMHRQETVECLRKFNARRKLKGAILTTMLVSRNFSVGRQSSAPASPAASAAGLAGQAAKSLLNKKSDGGVKKRKSSSSVHLMEPQTTVVHNATDGIKGSTESCNTTTEDEDLKVRKQEIIKITEQLIEAINNGDFEAYTKICDPGLTSFEPEALGNLVEGMDFHKFYFENLLSKNSKPIHTTILNPHVHVIGEDAACIAYIRLTQYIDGQGRPRTSQSEETRVWHRRDGKWLNVHYHCSGAPAAPLQ

SEQ ID NO: 10929 - protein, 556 aa, Homo sapiens
  Payload ID: 2163;
  Gene Symbol: CAMK2G;
  Gene Name: calcium/calmodulin-dependent prt kinase II gamma;
  Uniprot ID:  Q13555;
  ENSP ID: ENSP00000319060
MATTATCTRFTDDYQLFEELGKGAFSVVRRCVKKTSTQEYAAKIINTKKLSARDHQKLEREARICRLLKHPNIVRLHDSISEEGFHYLVFDLVTGGELFEDIVAREYYSEADASHCIHQILESVNHIHQHDIVHRDLKPENLLLASKCKGAAVKLADFGLAIEVQGEQQAWFGFAGTPGYLSPEVLRKDPYGKPVDIWACGVILYILLVGYPPFWDEDQHKLYQQIKAGAYDFPSPEWDTVTPEAKNLINQMLTINPAKRITADQALKHPWVCQRSTVASMMHRQETVECLRKFNARRKLKGAILTTMLVSRNFSAAKSLLNKKSDGGVKPQSNNKNSLVSPAQEPAPLQTAMEPQTTVVHNATDGIKGSTESCNTTTEDEDLKAAPLRTGNGSSVPEGRSSRDRTAPSAGMQPQPSLCSSAMRKQEIIKITEQLIEAINNGDFEAYTKICDPGLTSFEPEALGNLVEGMDFHKFYFENLLSKNSKPIHTTILNPHVHVIGEDAACIAYIRLTQYIDGQGRPRTSQSEETRVWHRRDGKWLNVHYHCSGAPAAPLQ

SEQ ID NO: 10930 - protein, 516 aa, Homo sapiens
  Payload ID: 2163;
  Gene Symbol: CAMK2G;
  Gene Name: calcium/calmodulin-dependent prt kinase II gamma;
  ENSP ID: ENSP00000361851
MATTATCTRFTDDYQLFEELGKGAFSVVRRCVKKTSTQEYAAKIINTKKLSARDHQKLEREARICRLLKHPNIVRLHDSISEEGFHYLVFDLVTGGELFEDIVAREYYSEADASHCIHQILESVNHIHQHDIVHRDLKPENLLLASKCKGAAVKLADFGLAIEVQGEQQAWFGFAGTPGYLSPEVLRKDPYGKPVDIWACGVILYILLVGYPPFWDEDQHKLYQQIKAGAYDFPSPEWDTVTPEAKNLINQMLTINPAKRITADQALKHPWVCQRSTVASMMHRQETVECLRKFNARRKLKGAILTTMLVSRNFSVGRQSSAPASPAASAAGLAGQAAKSLLNKKSDGGVKEPQTTVVHNATDGIKGSTESCNTTTEDEDLKVRKQEIIKITEQLIEAINNGDFEAYTKICDPGLTSFEPEALGNLVEGMDFHKFYFENLLSKNSKPIHTTILNPHVHVIGEDAACIAYIRLTQYIDGQGRPRTSQSEETRVWHRRDGKWLNVHYHCSGAPAAPLQ

SEQ ID NO: 10931 - protein, 539 aa, Homo sapiens
  Payload ID: 2163;
  Gene Symbol: CAMK2G;
  Gene Name: calcium/calmodulin-dependent prt kinase II gamma;
  ENSP ID: ENSP00000378243
MATTATCTRFTDDYQLFEELGKGAFSVVRRCVKKTSTQEYAAKIINTKKLSARDHQKLEREARICRLLKHPNIVRLHDSISEEGFHYLVFDLVTGGELFEDIVAREYYSEADASHCIHQILESVNHIHQHDIVHRDLKPENLLLASKCKGAAVKLADFGLAIEVQGEQQAWFGFAGTPGYLSPEVLRKDPYGKPVDIWACGVILYILLVGYPPFWDEDQHKLYQQIKAGAYDFPSPEWDTVTPEAKNLINQMLTINPAKRITADQALKHPWVCQRSTVASMMHRQETVECLRKFNARRKLKGAILTTMLVSRNFSVGRQSSAPASPAASAAGLAGQAAKSLLNKKSDGGVKPQSNNKNSLVSPAQEPAPLQTAMEPQTTVVHNATDGIKGSTESCNTTTEDEDLKVRKQEIIKITEQLIEAINNGDFEAYTKICDPGLTSFEPEALGNLVEGMDFHKFYFENLLSKNSKPIHTTILNPHVHVIGEDAACIAYIRLTQYIDGQGRPRTSQSEETRVWHRRDGKWLNVHYHCSGAPAAPLQ

SEQ ID NO: 10932 - protein, 453 aa, Homo sapiens
  Payload ID: 2163;
  Gene Symbol: CAMK2G;
  Gene Name: calcium/calmodulin-dependent prt kinase II gamma;
  ENSP ID: ENSP00000393784
RLLKHPNIVRLHDSISEEGFHYLVFDLVTGGELFEDIVAREYYSEADASHCIHQILESVNHIHQHDIVHRDLKPENLLLASKCKGAAVKLADFGLAIEVQGEQQAWFGFAGTPGYLSPEVLRKDPYGKPVDIWACGVILYILLVGYPPFWDEDQHKLYQQIKAGAYDFPSPEWDTVTPEAKNLINQMLTINPAKRITADQALKHPWVCQRSTVASMMHRQETVECLRKFNARRKLKGAILTTMLVSRNFSAAKSLLNKKSDGGVKPQSNNKNSLVSPAQEPAPLQTAMEPQTTVVHNATDGIKGSTESCNTTTEDEDLKVRKQEIIKITEQLIEAINNGDFEAYTKICDPGLTSFEPEALGNLVEGMDFHKFYFENLLSKNSKPIHTTILNPHVHVIGEDAACIAYIRLTQYIDGQGRPRTSQSEETRVWHRRDGKWLNVHYHCSGAPAAPLQ

SEQ ID NO: 10933 - protein, 335 aa, Homo sapiens
  Payload ID: 2163;
  Gene Symbol: CAMK2G;
  Gene Name: calcium/calmodulin-dependent prt kinase II gamma;
  ENSP ID: ENSP00000405561
  MOD_RES (1)..(1): Any amino acid
XYQQIKAGAYDFPSPEWDTVTPEAKNLINQMLTINPAKRITADQALKHPWVCQRSTVASMMHRQETVECLRKFNARRKLKGAILTTMLVSRNFSAAKSLLNKKSDGGVKPQSNNKNSLVSPAQEPAPLQTAMEPQTTVVHNATDGIKGSTESCNTTTEDEDLKAAPLRTGNGSSVPEGRSSRDRTAPSAGMQPQPSLCSSAMRKQEIIKITEQLIEAINNGDFEAYTKICDPGLTSFEPEALGNLVEGMDFHKFYFENLLSKNSKPIHTTILNPHVHVIGEDAACIAYIRLTQYIDGQGRPRTSQSEETRVWHRRDGKWLNVHYHCSGAPAAPLQ

SEQ ID NO: 10934 - protein, 558 aa, Homo sapiens
  Payload ID: 2163;
  Gene Symbol: CAMK2G;
  Gene Name: calcium/calmodulin-dependent prt kinase II gamma;
  ENSP ID: ENSP00000410298
MATTATCTRFTDDYQLFEELGKGAFSVVRRCVKKTSTQEYAAKIINTKKLSARDHQKLEREARICRLLKHPNIVRLHDSISEEGFHYLVFDLVTGGELFEDIVAREYYSEADASHCIHQILESVNHIHQHDIVHRDLKPENLLLASKCKGAAVKLADFGLAIEVQGEQQAWFGFAGTPGYLSPEVLRKDPYGKPVDIWACGVILYILLVGYPPFWDEDQHKLYQQIKAGAYDFPSPEWDTVTPEAKNLINQMLTINPAKRITADQALKHPWVCQRSTVASMMHRQETVECLRKFNARRKLKGAILTTMLVSRNFSAAKSLLNKKSDGGVKKRKSSSSVHLMPQSNNKNSLVSPAQEPAPLQTAMEPQTTVVHNATDGIKGSTESCNTTTEDEDLKGRVPEGRSSRDRTAPSAGMQPQPSLCSSAMRKQEIIKITEQLIEAINNGDFEAYTKICDPGLTSFEPEALGNLVEGMDFHKFYFENLLSKNSKPIHTTILNPHVHVIGEDAACIAYIRLTQYIDGQGRPRTSQSEETRVWHRRDGKWLNVHYHCSGAPAAPLQ

SEQ ID NO: 10935 - protein, 78 aa, Homo sapiens
  Payload ID: 2164;
  Gene Symbol: CAMK2N1;
  Gene Name: calcium/calmodulin-dependent prt kinase II inhibitor 1;
  Uniprot ID:  Q7Z7J9;
  ENSP ID: ENSP00000364219
MSEVLPYGDEKLSPYGDGGDVGQIFSCRLQDTNNFFGAGQNKRPPKLGQIGRSKRVVIEDDRIDDVLKNMTDKAPPGV

SEQ ID NO: 10936 - protein, 79 aa, Homo sapiens
  Payload ID: 2165;
  Gene Symbol: CAMK2N2;
  Gene Name: calcium/calmodulin-dependent prt kinase II inhibitor 2;
  Uniprot ID:  Q96S95;
  ENSP ID: ENSP00000296238
MSEILPYSEDKMGRFGADPEGSDLSFSCRLQDTNSFFAGNQAKRPPKLGQIGRAKRVVIEDDRIDDVLKGMGEKPPSGV

SEQ ID NO: 10937 - protein, 473 aa, Homo sapiens
  Payload ID: 2166;
  Gene Symbol: CAMK4;
  Gene Name: calcium/calmodulin-dependent prt kinase IV;
  Uniprot ID:  Q16566;
  ENSP ID: ENSP00000282356
MLKVTVPSCSASSCSSVTASAAPGTASLVPDYWIDGSNRDALSDFFEVESELGRGATSIVYRCKQKGTQKPYALKVLKKTVDKKIVRTEIGVLLRLSHPNIIKLKEIFETPTEISLVLELVTGGELFDRIVEKGYYSERDAADAVKQILEAVAYLHENGIVHRDLKPENLLYATPAPDAPLKIADFGLSKIVEHQVLMKTVCGTPGYCAPEILRGCAYGPEVDMWSVGIITYILLCGFEPFYDERGDQFMFRRILNCEYYFISPWWDEVSLNAKDLVRKLIVLDPKKRLTTFQALQHPWVTGKAANFVHMDTAQKKLQEFNARRKLKAAVKAVVASSRLGSASSSHGSIQESHKASRDPSPIQDGNEDMKAIPEGEKIQGDGAQAAVKGAQAELMKVQALEKVKGADINAEEAPKMVPKAVEDGIKVADLELEEGLAEEKLKTVEEAAAPREGQGSSAVGFEVPQQDVILPEY

SEQ ID NO: 10938 - protein, 109 aa, Homo sapiens
  Payload ID: 2166;
  Gene Symbol: CAMK4;
  Gene Name: calcium/calmodulin-dependent prt kinase IV;
  ENSP ID: ENSP00000421606
MLKVTVPSCSASSCSSVTASAAPGTASLVPDYWIDGSNRDALSDFFEVESELGRGATSIVYRCKQKGTQKPYALKVLKKTVDKKIVRTEIGVLLRLSHPNIDCGKGILQ

SEQ ID NO: 10939 - protein, 473 aa, Homo sapiens; identical to SEQ ID NO: 10937
  Payload ID: 2166;
  Gene Symbol: CAMK4;
  Gene Name: calcium/calmodulin-dependent prt kinase IV;
  Uniprot ID:  Q16566;
  ENSP ID: ENSP00000422634

SEQ ID NO: 10940 - protein, 88 aa, Homo sapiens
  Payload ID: 2166;
  Gene Symbol: CAMK4;
  Gene Name: calcium/calmodulin-dependent prt kinase IV;
  ENSP ID: ENSP00000423761
MLKVTVPSCSASSCSSVTASAAPGTASLVPDYWIDGSNRDALSDFFEVESELGRGATSIVYRCKQKGTQKPYALKVLKKTDCGKGILQ

SEQ ID NO: 10941 - protein, 88 aa, Homo sapiens; identical to SEQ ID NO: 10940
  Payload ID: 2166;
  Gene Symbol: CAMK4;
  Gene Name: calcium/calmodulin-dependent prt kinase IV;
  ENSP ID: ENSP00000424912

SEQ ID NO: 10942 - protein, 142 aa, Homo sapiens
  Payload ID: 2166;
  Gene Symbol: CAMK4;
  Gene Name: calcium/calmodulin-dependent prt kinase IV;
  ENSP ID: ENSP00000426940
MLKVTVPSCSASSCSSVTASAAPGTASLVPDYWIDGSNRDALSDFFEVESELGRGATSIVYRCKQKGTQKPYALKVLKKTVDKKIVRTEIGVLLRLSHPNIIKLKEIFETPTEISLVLELVTGGELFDRIVEKGYYSERDAA

SEQ ID NO: 10943 - protein, 520 aa, Homo sapiens
  Payload ID: 2167;
  Gene Symbol: CAMKK1;
  Gene Name: calcium/calmodulin-dependent prt kinase kinase 1, alpha;
  Uniprot ID:  Q8N5S9;
  ENSP ID: ENSP00000158166
MEGGPAVCCQDPRAELVERVAAIDVTHLEEADGGPEPTRNGVDPPPRARAASVIPGSTSRLLPARPSLSARKLSLQERPAGSYLEAQAGPYATGPASHISPRAWRRPTIESHHVAISDAEDCVQLNQYKLQSEIGKGAYGVVRLAYNESEDRHYAMKVLSKKKLLKQYGFPRRPPPRGSQAAQGGPAKQLLPLERVYQEIAILKKLDHVNVVKLIEVLDDPAEDNLYLALQNQAQNIQLDSTNIAKPHSLLPSEQQDSGSTWAARSVFDLLRKGPVMEVPCDKPFSEEQARLYLRDVILGLEYLHCQKIVHRDIKPSNLLLGDDGHVKIADFGVSNQFEGNDAQLSSTAGTPAFMAPEAISDSGQSFSGKALDVWATGVTLYCFVYGKCPFIDDFILALHRKIKNEPVVFPEEPEISEELKDLILKMLDKNPETRIGVPDIKLHPWVTKNGEEPLPSEEEHCSVVEVTEEEVKNSVRLIPSWTTVILVKSMLRKRSFGNPFEPQARREERSMSAPGNLLV

SEQ ID NO: 10944 - protein, 505 aa, Homo sapiens
  Payload ID: 2167;
  Gene Symbol: CAMKK1;
  Gene Name: calcium/calmodulin-dependent prt kinase kinase 1, alpha;
  Uniprot ID:  Q8N5S9;
  ENSP ID: ENSP00000323118
MEGGPAVCCQDPRAELVERVAAIDVTHLEEADGGPEPTRNGVDPPPRARAASVIPGSTSRLLPARPSLSARKLSLQERPAGSYLEAQAGPYATGPASHISPRAWRRPTIESHHVAISDAEDCVQLNQYKLQSEIGKGAYGVVRLAYNESEDRHYAMKVLSKKKLLKQYGFPRRPPPRGSQAAQGGPAKQLLPLERVYQEIAILKKLDHVNVVKLIEVLDDPAEDNLYLVFDLLRKGPVMEVPCDKPFSEEQARLYLRDVILGLEYLHCQKIVHRDIKPSNLLLGDDGHVKIADFGVSNQFEGNDAQLSSTAGTPAFMAPEAISDSGQSFSGKALDVWATGVTLYCFVYGKCPFIDDFILALHRKIKNEPVVFPEEPEISEELKDLILKMLDKNPETRIGVPDIKLHPWVTKNGEEPLPSEEEHCSVVEVTEEEVKNSVRLIPSWTTVILVKSMLRKRSFGNPFEPQARREERSMSAPGNLLVKEGFGEGGKSPELPGVQEDEAAS

SEQ ID NO: 10945 - protein, 532 aa, Homo sapiens
  Payload ID: 2167;
  Gene Symbol: CAMKK1;
  Gene Name: calcium/calmodulin-dependent prt kinase kinase 1, alpha;
  ENSP ID: ENSP00000371188
MQFGKLWCGCSGEFPTRLRRRTPLTEAMEGGPAVCCQDPRAELVERVAAIDVTHLEEADGGPEPTRNGVDPPPRARAASVIPGSTSRLLPARPSLSARKLSLQERPAGSYLEAQAGPYATGPASHISPRAWRRPTIESHHVAISDAEDCVQLNQYKLQSEIGKGAYGVVRLAYNESEDRHYAMKVLSKKKLLKQYGFPRRPPPRGSQAAQGGPAKQLLPLERVYQEIAILKKLDHVNVVKLIEVLDDPAEDNLYLVFDLLRKGPVMEVPCDKPFSEEQARLYLRDVILGLEYLHCQKIVHRDIKPSNLLLGDDGHVKIADFGVSNQFEGNDAQLSSTAGTPAFMAPEAISDSGQSFSGKALDVWATGVTLYCFVYGKCPFIDDFILALHRKIKNEPVVFPEEPEISEELKDLILKMLDKNPETRIGVPDIKLHPWVTKNGEEPLPSEEEHCSVVEVTEEEVKNSVRLIPSWTTVILVKSMLRKRSFGNPFEPQARREERSMSAPGNLLVKEGFGEGGKSPELPGVQEDEAAS

SEQ ID NO: 10946 - protein, 588 aa, Homo sapiens
  Payload ID: 2168;
  Gene Symbol: CAMKK2;
  Gene Name: calcium/calmodulin-dependent prt kinase kinase 2, beta;
  Uniprot ID:  Q96RR4;
  ENSP ID: ENSP00000312741
MSSCVSSQPSSNRAAPQDELGGRGSSSSESQKPCEALRGLSSLSIHLGMESFIVVTECEPGCAVDLGLARDRPLEADGQEVPLDTSGSQARPHLSGRKLSLQERSQGGLAAGGSLDMNGRCICPSLPYSPVSSPQSSPRLPRRPTVESHHVSITGMQDCVQLNQYTLKDEIGKGSYGVVKLAYNENDNTYYAMKVLSKKKLIRQAGFPRRPPPRGTRPAPGGCIQPRGPIEQVYQEIAILKKLDHPNVVKLVEVLDDPNEDHLYMVFELVNQGPVMEVPTLKPLSEDQARFYFQDLIKGIEYLHYQKIIHRDIKPSNLLVGEDGHIKIADFGVSNEFKGSDALLSNTVGTPAFMAPESLSETRKIFSGKALDVWAMGVTLYCFVFGQCPFMDERIMCLHSKIKSQALEFPDQPDIAEDLKDLITRMLDKNPESRIVVPEIKLHPWVTRHGAEPLPSEDENCTLVEVTEEEVENSVKHIPSLATVILVKTMIRKRSFGNPFEGSRREERSLSAPGNLLTKKPTRECESLSELKEARQRRQPPGHRPAPRGGGGSALVRGSPCVESCWAPAPGSPARMHPLRPEEAMEPE

SEQ ID NO: 10947 - protein, 545 aa, Homo sapiens
  Payload ID: 2168;
  Gene Symbol: CAMKK2;
  Gene Name: calcium/calmodulin-dependent prt kinase kinase 2, beta;
  Uniprot ID:  Q96RR4;
  ENSP ID: ENSP00000321230
MSSCVSSQPSSNRAAPQDELGGRGSSSSESQKPCEALRGLSSLSIHLGMESFIVVTECEPGCAVDLGLARDRPLEADGQEVPLDTSGSQARPHLSGRKLSLQERSQGGLAAGGSLDMNGRCICPSLPYSPVSSPQSSPRLPRRPTVESHHVSITGMQDCVQLNQYTLKDEIGKGSYGVVKLAYNENDNTYYAMKVLSKKKLIRQAGFPRRPPPRGTRPAPGGCIQPRGPIEQVYQEIAILKKLDHPNVVKLVEVLDDPNEDHLYMVFELVNQGPVMEVPTLKPLSEDQARFYFQDLIKGIEYLHYQKIIHRDIKPSNLLVGEDGHIKIADFGVSNEFKGSDALLSNTVGTPAFMAPESLSETRKIFSGKALDVWAMGVTLYCFVFGQCPFMDERIMCLHSKIKSQALEFPDQPDIAEDLKDLITRMLDKNPESRIVVPEIKILVKTMIRKRSFGNPFEGSRREERSLSAPGNLLTKKPTRECESLSELKEARQRRQPPGHRPAPRGGGGSALVRGSPCVESCWAPAPGSPARMHPLRPEEAMEPE

SEQ ID NO: 10948 - protein, 541 aa, Homo sapiens
  Payload ID: 2168;
  Gene Symbol: CAMKK2;
  Gene Name: calcium/calmodulin-dependent prt kinase kinase 2, beta;
  Uniprot ID:  Q96RR4;
  ENSP ID: ENSP00000336634
MSSCVSSQPSSNRAAPQDELGGRGSSSSESQKPCEALRGLSSLSIHLGMESFIVVTECEPGCAVDLGLARDRPLEADGQEVPLDTSGSQARPHLSGRKLSLQERSQGGLAAGGSLDMNGRCICPSLPYSPVSSPQSSPRLPRRPTVESHHVSITGMQDCVQLNQYTLKDEIGKGSYGVVKLAYNENDNTYYAMKVLSKKKLIRQAGFPRRPPPRGTRPAPGGCIQPRGPIEQVYQEIAILKKLDHPNVVKLVEVLDDPNEDHLYMVFELVNQGPVMEVPTLKPLSEDQARFYFQDLIKGIEYLHYQKIIHRDIKPSNLLVGEDGHIKIADFGVSNEFKGSDALLSNTVGTPAFMAPESLSETRKIFSGKALDVWAMGVTLYCFVFGQCPFMDERIMCLHSKIKSQALEFPDQPDIAEDLKDLITRMLDKNPESRIVVPEIKLHPWVTRHGAEPLPSEDENCTLVEVTEEEVENSVKHIPSLATVILVKTMIRKRSFGNPFEGSRREERSLSAPGNLLTKQGSEDNLQGTDPPPVGEEEVLL

SEQ ID NO: 10949 - protein, 533 aa, Homo sapiens
  Payload ID: 2168;
  Gene Symbol: CAMKK2;
  Gene Name: calcium/calmodulin-dependent prt kinase kinase 2, beta;
  Uniprot ID:  Q96RR4;
  ENSP ID: ENSP00000376265
MSSCVSSQPSSNRAAPQDELGGRGSSSSESQKPCEALRGLSSLSIHLGMESFIVVTECEPGCAVDLGLARDRPLEADGQEVPLDTSGSQARPHLSGRKLSLQERSQGGLAAGGSLDMNGRCICPSLPYSPVSSPQSSPRLPRRPTVESHHVSITGMQDCVQLNQYTLKDEIGKGSYGVVKLAYNENDNTYYAMKVLSKKKLIRQAGFPRRPPPRGTRPAPGGCIQPRGPIEQVYQEIAILKKLDHPNVVKLVEVLDDPNEDHLYMVFELVNQGPVMEVPTLKPLSEDQARFYFQDLIKGIEYLHYQKIIHRDIKPSNLLVGEDGHIKIADFGVSNEFKGSDALLSNTVGTPAFMAPESLSETRKIFSGKALDVWAMGVTLYCFVFGQCPFMDERIMCLHSKIKSQALEFPDQPDIAEDLKDLITRMLDKNPESRIVVPEIKLHPWVTRHGAEPLPSEDENCTLVEVTEEEVENSVKHIPSLATVILVKTMIRKRSFGNPFEGSRREERSLSAPGNLLTKKPTRECESLSELKT

SEQ ID NO: 10950 - protein, 556 aa, Homo sapiens
  Payload ID: 2168;
  Gene Symbol: CAMKK2;
  Gene Name: calcium/calmodulin-dependent prt kinase kinase 2, beta;
  Uniprot ID:  Q96RR4;
  ENSP ID: ENSP00000376266
MSSCVSSQPSSNRAAPQDELGGRGSSSSESQKPCEALRGLSSLSIHLGMESFIVVTECEPGCAVDLGLARDRPLEADGQEVPLDTSGSQARPHLSGRKLSLQERSQGGLAAGGSLDMNGRCICPSLPYSPVSSPQSSPRLPRRPTVESHHVSITGMQDCVQLNQYTLKDEIGKGSYGVVKLAYNENDNTYYAMKVLSKKKLIRQAGFPRRPPPRGTRPAPGGCIQPRGPIEQVYQEIAILKKLDHPNVVKLVEVLDDPNEDHLYMVFELVNQGPVMEVPTLKPLSEDQARFYFQDLIKGIEYLHYQKIIHRDIKPSNLLVGEDGHIKIADFGVSNEFKGSDALLSNTVGTPAFMAPESLSETRKIFSGKALDVWAMGVTLYCFVFGQCPFMDERIMCLHSKIKSQALEFPDQPDIAEDLKDLITRMLDKNPESRIVVPEIKLHPWVTRHGAEPLPSEDENCTLVEVTEEEVENSVKHIPSLATVILVKTMIRKRSFGNPFEGSRREERSLSAPGNLLTKKPTRECESLSELKGTKKKKGLDSMTSTVAAGWLDRRV

SEQ ID NO: 10951 - protein, 588 aa, Homo sapiens; identical to SEQ ID NO: 10946
  Payload ID: 2168;
  Gene Symbol: CAMKK2;
  Gene Name: calcium/calmodulin-dependent prt kinase kinase 2, beta;
  Uniprot ID:  Q96RR4;
  ENSP ID: ENSP00000384591

SEQ ID NO: 10952 - protein, 588 aa, Homo sapiens; identical to SEQ ID NO: 10946
  Payload ID: 2168;
  Gene Symbol: CAMKK2;
  Gene Name: calcium/calmodulin-dependent prt kinase kinase 2, beta;
  Uniprot ID:  Q96RR4;
  ENSP ID: ENSP00000384600

SEQ ID NO: 10953 - protein, 490 aa, Homo sapiens
  Payload ID: 2168;
  Gene Symbol: CAMKK2;
  Gene Name: calcium/calmodulin-dependent prt kinase kinase 2, beta;
  Uniprot ID:  Q96RR4;
  ENSP ID: ENSP00000388273
MSSCVSSQPSSNRAAPQDELGGRGSSSSESQKPCEALRGLSSLSIHLGMESFIVVTECEPGCAVDLGLARDRPLEADGQEVPLDTSGSQARPHLSGRKLSLQERSQGGLAAGGSLDMNGRCICPSLPYSPVSSPQSSPRLPRRPTVESHHVSITGMQDCVQLNQYTLKDEIGKGSYGVVKLAYNENDNTYYAMKVLSKKKLIRQAGFPRRPPPRGTRPAPGGCIQPRGPIEQVYQEIAILKKLDHPNVVKLVEVLDDPNEDHLYMVFELVNQGPVMEVPTLKPLSEDQARFYFQDLIKGIEYLHYQKIIHRDIKPSNLLVGEDGHIKIADFGVSNEFKGSDALLSNTVGTPAFMAPESLSETRKIFSGKALDVWAMGVTLYCFVFGQCPFMDERIMCLHSKIKSQALEFPDQPDIAEDLKDLITRMLDKNPESRIVVPEIKILVKTMIRKRSFGNPFEGSRREERSLSAPGNLLTKKPTRECESLSELKT

SEQ ID NO: 10954 - protein, 541 aa, Homo sapiens; identical to SEQ ID NO: 10948
  Payload ID: 2168;
  Gene Symbol: CAMKK2;
  Gene Name: calcium/calmodulin-dependent prt kinase kinase 2, beta;
  Uniprot ID:  Q96RR4;
  ENSP ID: ENSP00000388368

SEQ ID NO: 10955 - protein, 343 aa, Homo sapiens
  Payload ID: 2168;
  Gene Symbol: CAMKK2;
  Gene Name: calcium/calmodulin-dependent prt kinase kinase 2, beta;
  ENSP ID: ENSP00000441352
MQPSCWQTQPRGCCLLPAHIYSLFFSPAIRLLPIPCGCAKVLDDPNEDHLYMVFELVNQGPVMEVPTLKPLSEDQARFYFQDLIKGIEYLHYQKIIHRDIKPSNLLVGEDGHIKIADFGVSNEFKGSDALLSNTVGTPAFMAPESLSETRKIFSGKALDVWAMGVTLYCFVFGQCPFMDERIMCLHSKIKSQALEFPDQPDIAEDLKDLITRMLDKNPESRIVVPEIKLHPWVTRHGAEPLPSEDENCTLVEVTEEEVENSVKHIPSLATVILVKTMIRKRSFGNPFEGSRREERSLSAPGNLLTKKPTRECESLSELKGTKKKKGLDSMTSTVAAGWLDRRV

SEQ ID NO: 10956 - protein, 125 aa, Homo sapiens
  Payload ID: 2168;
  Gene Symbol: CAMKK2;
  Gene Name: calcium/calmodulin-dependent prt kinase kinase 2, beta;
  ENSP ID: ENSP00000444894
MSSCVSSQPSSNRAAPQDELGGRGSSSSESQKPCEALRGLSSLSIHLGMESFIVVTECEPGCAVDLGLARDRPLEADGQEVPLDTSGSQARPHLSGRKLSLQERSQGGLAAGGSLDMNGRCICPS

SEQ ID NO: 10957 - protein, 87 aa, Homo sapiens
  Payload ID: 2168;
  Gene Symbol: CAMKK2;
  Gene Name: calcium/calmodulin-dependent prt kinase kinase 2, beta;
  ENSP ID: ENSP00000445400
MSSCVSSQPSSNRAAPQDELGGRGSSSSESQKPCEALRGLSSLSIHLGMESFIVVTECEPGCAVDLGLARDRPLEADGQEVPLDTSG

SEQ ID NO: 10958 - protein, 498 aa, Homo sapiens
  Payload ID: 2168;
  Gene Symbol: CAMKK2;
  Gene Name: calcium/calmodulin-dependent prt kinase kinase 2, beta;
  Uniprot ID:  Q96RR4;
  ENSP ID: ENSP00000445944
MSSCVSSQPSSNRAAPQDELGGRGSSSSESQKPCEALRGLSSLSIHLGMESFIVVTECEPGCAVDLGLARDRPLEADGQEVPLDTSGSQARPHLSGRKLSLQERSQGGLAAGGSLDMNGRCICPSLPYSPVSSPQSSPRLPRRPTVESHHVSITGMQDCVQLNQYTLKDEIGKGSYGVVKLAYNENDNTYYAMKVLSKKKLIRQAGFPRRPPPRGTRPAPGGCIQPRGPIEQVYQEIAILKKLDHPNVVKLVEVLDDPNEDHLYMVFELVNQGPVMEVPTLKPLSEDQARFYFQDLIKGIEYLHYQKIIHRDIKPSNLLVGEDGHIKIADFGVSNEFKGSDALLSNTVGTPAFMAPESLSETRKIFSGKALDVWAMGVTLYCFVFGQCPFMDERIMCLHSKIKSQALEFPDQPDIAEDLKDLITRMLDKNPESRIVVPEIKILVKTMIRKRSFGNPFEGSRREERSLSAPGNLLTKQGSEDNLQGTDPPPVGEEEVLL

SEQ ID NO: 10959 - protein, 590 aa, Homo sapiens
  Payload ID: 2169;
  Gene Symbol: CASK;
  Gene Name: calcium/calmodulin-dependent serine prt kinase (MAGUK family);
  ENSP ID: ENSP00000367396
MADDDVLFEDVYELCEVIGKGPFSVVRRCINRETGQQFAVKIVDVAKFTSSPGLSTEDLKREASICHMLKHPHIVELLETYSSDGMLYMVFEFMDGADLCFEIVKRADAGFVYSEAVASHYMRQILEALRYCHDNNIIHRDVKPHCVLLASKENSAPVKLGGFGVAIQLGESGLVAGGRVGTPHFMAPEVVKREPYGKPVDVWGCGVILFILLSGCLPFYGTKERLFEGIIKGKYKMNPRQWSHISESAKDLVRRMLMLDPAERITVYEALNHPWLKERDRYAYKIHLPETVEQLRKFNARRKLKGAVLAAVSSHKFNSFYGDPPEELPDFSEDPTSSGLLAAERAVSQVLDSLEEIHALTDCSEKDLDFLHSVFQDQHLHTLLDLYDKINTKSSPQIRNPPSDAVQRAKEVLEEISCYPENNDAKELKRILTQPHFMALLQTHDVVAHEVYSDEALRVTPPPTSPYLNGDSPESANGDMDMENVTRVRLVQFQKNTDEPMGITLKMNELNHCIVARIMHGGMIHRQGTLHVGDEIREINGISVANQTVEQLQKMLREMRGSITFKIVPSYRTQSSSCEVMTLTNHPHLL

SEQ ID NO: 10960 - protein, 909 aa, Homo sapiens
  Payload ID: 2169;
  Gene Symbol: CASK;
  Gene Name: calcium/calmodulin-dependent serine prt kinase (MAGUK family);
  Uniprot ID:  O14936;
  ENSP ID: ENSP00000367400
MADDDVLFEDVYELCEVIGKGPFSVVRRCINRETGQQFAVKIVDVAKFTSSPGLSTEDLKREASICHMLKHPHIVELLETYSSDGMLYMVFEFMDGADLCFEIVKRADAGFVYSEAVASHYMRQILEALRYCHDNNIIHRDVKPHCVLLASKENSAPVKLGGFGVAIQLGESGLVAGGRVGTPHFMAPEVVKREPYGKPVDVWGCGVILFILLSGCLPFYGTKERLFEGIIKGKYKMNPRQWSHISESAKDLVRRMLMLDPAERITVYEALNHPWLKERDRYAYKIHLPETVEQLRKFNARRKLKGAVLAAVSSHKFNSFYGDPPEELPDFSEDPTSSGLLAAERAVSQVLDSLEEIHALTDCSEKDLDFLHSVFQDQHLHTLLDLYDKINTKSSPQIRNPPSDAVQRAKEVLEEISCYPENNDAKELKRILTQPHFMALLQTHDVVAHEVYSDEALRVTPPPTSPYLNGDSPESANGDMDMENVTRVRLVQFQKNTDEPMGITLKMNELNHCIVARIMHGGMIHRQGTLHVGDEIREINGISVANQTVEQLQKMLREMRGSITFKIVPSYRTQSSSCERDSPSTSRQSPANGHSSTNNSVSIYVRAQFEYDPAKDDLIPCKEAGIRFRVGDIIQIISKDDHNWWQGKLENSKNGTAGLIPSPELQEWRVACIAMEKTKQEQQASCTWFGKKKKQYKDKYLAKHNADLVTYEEVVKLPAFKRKTLVLLGAHGVGRRHIKNTLITKHPDRFAYPIPHTTRPPKKDEENGKNYYFVSHDQMMQDISNNEYLEYGSHEDAMYGTKLETIRKIHEQGLIAILDVEPQALKVLRTAEFAPFVVFIAAPTITPGLNEDESLQRLQKESDILQRTYAHYFDLTIINNEIDETIRHLEEAVELVCTAPQWVPVSWVY

SEQ ID NO: 10961 - protein, 926 aa, Homo sapiens
  Payload ID: 2169;
  Gene Symbol: CASK;
  Gene Name: calcium/calmodulin-dependent serine prt kinase (MAGUK family);
  Uniprot ID:  O14936;
  ENSP ID: ENSP00000367405
MADDDVLFEDVYELCEVIGKGPFSVVRRCINRETGQQFAVKIVDVAKFTSSPGLSTEDLKREASICHMLKHPHIVELLETYSSDGMLYMVFEFMDGADLCFEIVKRADAGFVYSEAVASHYMRQILEALRYCHDNNIIHRDVKPHCVLLASKENSAPVKLGGFGVAIQLGESGLVAGGRVGTPHFMAPEVVKREPYGKPVDVWGCGVILFILLSGCLPFYGTKERLFEGIIKGKYKMNPRQWSHISESAKDLVRRMLMLDPAERITVYEALNHPWLKERDRYAYKIHLPETVEQLRKFNARRKLKGAVLAAVSSHKFNSFYGDPPEELPDFSEDPTSSGLLAAERAVSQVLDSLEEIHALTDCSEKDLDFLHSVFQDQHLHTLLDLYDKINTKSSPQIRNPPSDAVQRAKEVLEEISCYPENNDAKELKRILTQPHFMALLQTHDVVAHEVYSDEALRVTPPPTSPYLNGDSPESANGDMDMENVTRVRLVQFQKNTDEPMGITLKMNELNHCIVARIMHGGMIHRQGTLHVGDEIREINGISVANQTVEQLQKMLREMRGSITFKIVPSYRTQSSSCERDSPSTSRQSPANGHSSTNNSVSDLPSTTQPKGRQIYVRAQFEYDPAKDDLIPCKEAGIRFRVGDIIQIISKDDHNWWQGKLENSKNGTAGLIPSPELQEWRVACIAMEKTKQEQQASCTWFGKKKKQYKDKYLAKHNAVFDQLDLVTYEEVVKLPAFKRKTLVLLGAHGVGRRHIKNTLITKHPDRFAYPIPHTTRPPKKDEENGKNYYFVSHDQMMQDISNNEYLEYGSHEDAMYGTKLETIRKIHEQGLIAILDVEPQALKVLRTAEFAPFVVFIAAPTITPGLNEDESLQRLQKESDILQRTYAHYFDLTIINNEIDETIRHLEEAVELVCTAPQWVPVSWVY

SEQ ID NO: 10962 - protein, 921 aa, Homo sapiens
  Payload ID: 2169;
  Gene Symbol: CASK;
  Gene Name: calcium/calmodulin-dependent serine prt kinase (MAGUK family);
  Uniprot ID:  O14936;
  ENSP ID: ENSP00000367408
MADDDVLFEDVYELCEVIGKGPFSVVRRCINRETGQQFAVKIVDVAKFTSSPGLSTEDLKREASICHMLKHPHIVELLETYSSDGMLYMVFEFMDGADLCFEIVKRADAGFVYSEAVASHYMRQILEALRYCHDNNIIHRDVKPHCVLLASKENSAPVKLGGFGVAIQLGESGLVAGGRVGTPHFMAPEVVKREPYGKPVDVWGCGVILFILLSGCLPFYGTKERLFEGIIKGKYKMNPRQWSHISESAKDLVRRMLMLDPAERITVYEALNHPWLKERDRYAYKIHLPETVEQLRKFNARRKLKGAVLAAVSSHKFNSFYGDPPEELPDFSEDPTSSGLLAAERAVSQVLDSLEEIHALTDCSEKDLDFLHSVFQDQHLHTLLDLYDKINTKSSPQIRNPPSDAVQRAKEVLEEISCYPENNDAKELKRILTQPHFMALLQTHDVVAHEVYSDEALRVTPPPTSPYLNGDSPESANGDMDMENVTRVRLVQFQKNTDEPMGITLKMNELNHCIVARIMHGGMIHRQGTLHVGDEIREINGISVANQTVEQLQKMLREMRGSITFKIVPSYRTQSSSCERDSPSTSRQSPANGHSSTNNSVSDLPSTTQPKGRQIYVRAQFEYDPAKDDLIPCKEAGIRFRVGDIIQIISKDDHNWWQGKLENSKNGTAGLIPSPELQEWRVACIAMEKTKQEQQASCTWFGKKKKQYKDKYLAKHNADLVTYEEVVKLPAFKRKTLVLLGAHGVGRRHIKNTLITKHPDRFAYPIPHTTRPPKKDEENGKNYYFVSHDQMMQDISNNEYLEYGSHEDAMYGTKLETIRKIHEQGLIAILDVEPQALKVLRTAEFAPFVVFIAAPTITPGLNEDESLQRLQKESDILQRTYAHYFDLTIINNEIDETIRHLEEAVELVCTAPQWVPVSWVY

SEQ ID NO: 10963 - protein, 381 aa, Homo sapiens
  Payload ID: 2169;
  Gene Symbol: CASK;
  Gene Name: calcium/calmodulin-dependent serine prt kinase (MAGUK family);
  ENSP ID: ENSP00000367410
DEIREINGISVANQTVEQLQKMLREMRGSITFKIVPSYRTQSSSCERDSPSTSRQSPANGHSSTNNSVSIYVRAQFEYDPAKDDLIPCKEAGIRFRVGDIIQIISKDDHNWWQGKLENSKNGTAGLIPSPELQEWRVACIAMEKTKQEQQASCTWFGKKKKQYKDKYLAKHNAVFDQLDLVTYEEVVKLPAFKRKTLVLLGAHGVGRRHIKNTLITKHPDRFAYPIPHTTRPPKKDEENGKNYYFVSHDQMMQDISNNEYLEYGSHEDAMYGTKLETIRKIHEQGLIAILDVEPQALKVLRTAEFAPFVVFIAAPTITPGLNEDESLQRLQKESDILQRTYAHYFDLTIINNEIDETIRHLEEAVELVCTAPQWVPVSWVY

SEQ ID NO: 10964 - protein, 518 aa, Homo sapiens
  Payload ID: 2169;
  Gene Symbol: CASK;
  Gene Name: calcium/calmodulin-dependent serine prt kinase (MAGUK family);
  ENSP ID: ENSP00000367421
LYDKINTKSSPQIRNPPSDAVQRAKEVLEEISCYPENNDAKELKRILTQPHFMALLQTHDVVAHEVYSDEALRVTPPPTSPYLNGDSPESANGDMDMENVTRVRLVQFQKNTDEPMGITLKMNELNHCIVARIMHGGMIHRQGTLHVGDEIREINGISVANQTVEQLQKMLREMRGSITFKIVPSYRTQSSSCEDLPSTTQPKGRQIYVRAQFEYDPAKDDLIPCKEAGIRFRVGDIIQIISKDDHNWWQGKLENSKNGTAGLIPSPELQEWRVACIAMEKTKQEQQASCTWFGKKKKQYKDKYLAKHNAVFDQLDLVTYEEVVKLPAFKRKTLVLLGAHGVGRRHIKNTLITKHPDRFAYPIPHTTRPPKKDEENGKNYYFVSHDQMMQDISNNEYLEYGSHEDAMYGTKLETIRKIHEQGLIAILDVEPQALKVLRTAEFAPFVVFIAAPTITPGLNEDESLQRLQKESDILQRTYAHYFDLTIINNEIDETIRHLEEAVELVCTAPQWVPVSWVY

SEQ ID NO: 10965 - protein, 898 aa, Homo sapiens
  Payload ID: 2169;
  Gene Symbol: CASK;
  Gene Name: calcium/calmodulin-dependent serine prt kinase (MAGUK family);
  Uniprot ID:  O14936;
  ENSP ID: ENSP00000398007
MADDDVLFEDVYELCEVIGKGPFSVVRRCINRETGQQFAVKIVDVAKFTSSPGLSTEDLKREASICHMLKHPHIVELLETYSSDGMLYMVFEFMDGADLCFEIVKRADAGFVYSEAVASHYMRQILEALRYCHDNNIIHRDVKPHCVLLASKENSAPVKLGGFGVAIQLGESGLVAGGRVGTPHFMAPEVVKREPYGKPVDVWGCGVILFILLSGCLPFYGTKERLFEGIIKGKYKMNPRQWSHISESAKDLVRRMLMLDPAERITVYEALNHPWLKERDRYAYKIHLPETVEQLRKFNARRKLKGAVLAAVSSHKFNSFYGDPPEELPDFSEDPTSSGLLAAERAVSQVLDSLEEIHALTDCSEKDLDFLHSVFQDQHLHTLLDLYDKINTKSSPQIRNPPSDAVQRAKEVLEEISCYPENNDAKELKRILTQPHFMALLQTHDVVAHEVYSDEALRVTPPPTSPYLNGDSPESANGDMDMENVTRVRLVQFQKNTDEPMGITLKMNELNHCIVARIMHGGMIHRQGTLHVGDEIREINGISVANQTVEQLQKMLREMRGSITFKIVPSYRTQSSSCEDLPSTTQPKGRQIYVRAQFEYDPAKDDLIPCKEAGIRFRVGDIIQIISKDDHNWWQGKLENSKNGTAGLIPSPELQEWRVACIAMEKTKQEQQASCTWFGKKKKQYKDKYLAKHNADLVTYEEVVKLPAFKRKTLVLLGAHGVGRRHIKNTLITKHPDRFAYPIPHTTRPPKKDEENGKNYYFVSHDQMMQDISNNEYLEYGSHEDAMYGTKLETIRKIHEQGLIAILDVEPQALKVLRTAEFAPFVVFIAAPTITPGLNEDESLQRLQKESDILQRTYAHYFDLTIINNEIDETIRHLEEAVELVCTAPQWVPVSWVY

SEQ ID NO: 10966 - protein, 897 aa, Homo sapiens
  Payload ID: 2169;
  Gene Symbol: CASK;
  Gene Name: calcium/calmodulin-dependent serine prt kinase (MAGUK family);
  Uniprot ID:  O14936;
  ENSP ID: ENSP00000400526
MADDDVLFEDVYELCEVIGKGPFSVVRRCINRETGQQFAVKIVDVAKFTSSPGLSTEDLKREASICHMLKHPHIVELLETYSSDGMLYMVFEFMDGADLCFEIVKRADAGFVYSEAVASHYMRQILEALRYCHDNNIIHRDVKPHCVLLASKENSAPVKLGGFGVAIQLGESGLVAGGRVGTPHFMAPEVVKREPYGKPVDVWGCGVILFILLSGCLPFYGTKERLFEGIIKGKYKMNPRQWSHISESAKDLVRRMLMLDPAERITVYEALNHPWLKERDRYAYKIHLPETVEQLRKFNARRKLKGAVLAAVSSHKFNSFYGDPPEELPDFSEDPTSSGAVSQVLDSLEEIHALTDCSEKDLDFLHSVFQDQHLHTLLDLYDKINTKSSPQIRNPPSDAVQRAKEVLEEISCYPENNDAKELKRILTQPHFMALLQTHDVVAHEVYSDEALRVTPPPTSPYLNGDSPESANGDMDMENVTRVRLVQFQKNTDEPMGITLKMNELNHCIVARIMHGGMIHRQGTLHVGDEIREINGISVANQTVEQLQKMLREMRGSITFKIVPSYRTQSSSCEDLPSTTQPKGRQIYVRAQFEYDPAKDDLIPCKEAGIRFRVGDIIQIISKDDHNWWQGKLENSKNGTAGLIPSPELQEWRVACIAMEKTKQEQQASCTWFGKKKKQYKDKYLAKHNAVFDQLDLVTYEEVVKLPAFKRKTLVLLGAHGVGRRHIKNTLITKHPDRFAYPIPHTTRPPKKDEENGKNYYFVSHDQMMQDISNNEYLEYGSHEDAMYGTKLETIRKIHEQGLIAILDVEPQALKVLRTAEFAPFVVFIAAPTITPGLNEDESLQRLQKESDILQRTYAHYFDLTIINNEIDETIRHLEEAVELVCTAPQWVPVSWVY

SEQ ID NO: 10967 - protein, 395 aa, Homo sapiens
  Payload ID: 2170;
  Gene Symbol: CABS1;
  Gene Name: calcium-binding prt, spermatid-specific 1;
  Uniprot ID:  Q96KC9;
  ENSP ID: ENSP00000273936
MAEDGLPKIYSHPPTESSKTPTAATIFFGADNAIPKSETTITSEGDHVTSVNEYMLESDFSTTTDNKLTAKKEKLKSEDDMGTDFIKSTTHLQKEITSLTGTTNSITRDSITEHFMPVKIGNISSPVTTVSLIDFSTDIAKEDILLATIDTGDAEISITSEVSGTLKDSSAGVADAPAFPRKKDEADMSNYNSSIKSNVPADEAVQVTDSTIPEAEIPPAPEESFTTIPDITALEEEKITEIDLSVLEDDTSAVATLTDSDEKFITVFELTTSAEKDKDKREDTLLTDEETTEGASIWMERDTANEAETHSVLLTAVESRYDFVVPASIATNLVEESSTEEDLSETDNTETVPKITEPFSGTTSVLDTPDYKEDTSTTETDIFELLKEEPDEFMI

SEQ ID NO: 10968 - protein, 1078 aa, Homo sapiens
  Payload ID: 2171;
  Gene Symbol: CASR;
  Gene Name: calcium-sensing receptor;
  Uniprot ID:  P41180;
  ENSP ID: ENSP00000418685
MAFYSCCWVLLALTWHTSAYGPDQRAQKKGDIILGGLFPIHFGVAAKDQDLKSRPESVECIRYNFRGFRWLQAMIFAIEEINSSPALLPNLTLGYRIFDTCNTVSKALEATLSFVAQNKIDSLNLDEFCNCSEHIPSTIAVVGATGSGVSTAVANLLGLFYIPQVSYASSSRLLSNKNQFKSFLRTIPNDEHQATAMADIIEYFRWNWVGTIAADDDYGRPGIEKFREEAEERDICIDFSELISQYSDEEEIQHVVEVIQNSTAKVIVVFSSGPDLEPLIKEIVRRNITGKIWLASEAWASSSLIAMPQYFHVVGGTIGFALKAGQIPGFREFLKKVHPRKSVHNGFAKEFWEETFNCHLQEGAKGPLPVDTFLRGHEESGDRFSNSSTAFRPLCTGDENISSVETPYIDYTHLRISYNVYLAVYSIAHALQDIYTCLPGRGLFTNGSCADIKKVEAWQVLKHLRHLNFTNNMGEQVTFDECGDLVGNYSIINWHLSPEDGSIVFKEVGYYNVYAKKGERLFINEEKILWSGFSREVPFSNCSRDCLAGTRKGIIEGEPTCCFECVECPDGEYSDETDASACNKCPDDFWSNENHTSCIAKEIEFLSWTEPFGIALTLFAVLGIFLTAFVLGVFIKFRNTPIVKATNRELSYLLLFSLLCCFSSSLFFIGEPQDWTCRLRQPAFGISFVLCISCILVKTNRVLLVFEAKIPTSFHRKWWGLNLQFLLVFLCTFMQIVICVIWLYTAPPSSYRNQELEDEIIFITCHEGSLMALGFLIGYTCLLAAICFFFAFKSRKLPENFNEAKFITFSMLIFFIVWISFIPAYASTYGKFVSAVEVIAILAASFGLLACIFFNKIYIILFKPSRNTIEEVRCSTAAHAFKVAARATLRRSNVSRKRSSSLGGSTGSTPSSSISSKSNSEDPFPQPERQKQQQPLALTQQEQQQQPLTLPQQQRSQQQPRCKQKVIFGSGTVTFSLSFDEPQKNAMAHRNSTHQNSLEAQKSSDTLTRHEPLLPLQCGETDLDLTVQETGLQGPVGGDQRPEVEDPEELSPALVVSSSQSFVISGGGSTVTENVVNS

SEQ ID NO: 10969 - protein, 1088 aa, Homo sapiens
  Payload ID: 2171;
  Gene Symbol: CASR;
  Gene Name: calcium-sensing receptor;
  ENSP ID: ENSP00000420194
MAFYSCCWVLLALTWHTSAYGPDQRAQKKGDIILGGLFPIHFGVAAKDQDLKSRPESVECIRYNFRGFRWLQAMIFAIEEINSSPALLPNLTLGYRIFDTCNTVSKALEATLSFVAQNKIDSLNLDEFCNCSEHIPSTIAVVGATGSGVSTAVANLLGLFYIPQVSYASSSRLLSNKNQFKSFLRTIPNDEHQATAMADIIEYFRWNWVGTIAADDDYGRPGIEKFREEAEERDICIDFSELISQYSDEEEIQHVVEVIQNSTAKVIVVFSSGPDLEPLIKEIVRRNITGKIWLASEAWASSSLIAMPQYFHVVGGTIGFALKAGQIPGFREFLKKVHPRKSVHNGFAKEFWEETFNCHLQEGAKGPLPVDTFLRGHEESGDRFSNSSTAFRPLCTGDENISSVETPYIDYTHLRISYNVYLAVYSIAHALQDIYTCLPGRGLFTNGSCADIKKVEAWQVLKHLRHLNFTNNMGEQVTFDECGDLVGNYSIINWHLSPEDGSIVFKEVGYYNVYAKKGERLFINEEKILWSGFSREPLTFVLSVLQVPFSNCSRDCLAGTRKGIIEGEPTCCFECVECPDGEYSDETDASACNKCPDDFWSNENHTSCIAKEIEFLSWTEPFGIALTLFAVLGIFLTAFVLGVFIKFRNTPIVKATNRELSYLLLFSLLCCFSSSLFFIGEPQDWTCRLRQPAFGISFVLCISCILVKTNRVLLVFEAKIPTSFHRKWWGLNLQFLLVFLCTFMQIVICVIWLYTAPPSSYRNQELEDEIIFITCHEGSLMALGFLIGYTCLLAAICFFFAFKSRKLPENFNEAKFITFSMLIFFIVWISFIPAYASTYGKFVSAVEVIAILAASFGLLACIFFNKIYIILFKPSRNTIEEVRCSTAAHAFKVAARATLRRSNVSRKRSSSLGGSTGSTPSSSISSKSNSEDPFPQPERQKQQQPLALTQQEQQQQPLTLPQQQRSQQQPRCKQKVIFGSGTVTFSLSFDEPQKNAMAHRNSTHQNSLEAQKSSDTLTRHEPLLPLQCGETDLDLTVQETGLQGPVGGDQRPEVEDPEELSPALVVSSSQSFVISGGGSTVTENVVNS

SEQ ID NO: 10970 - protein, 228 aa, Homo sapiens
  Payload ID: 2172;
  Gene Symbol: CACYBP;
  Gene Name: calcyclin binding prt;
  Uniprot ID:  Q9HB71;
  ENSP ID: ENSP00000356652
MASEELQKDLEEVKVLLEKATRKRVRDALTAEKSKIETEIKNKMQQKSQKKAELLDNEKPAAVVAPITTGYTVKISNYGWDQSDKFVKIYITLTGVHQVPTENVQVHFTERSFDLLVKNLNGKSYSMIVNNLLKPISVEGSSKKVKTDTVLILCRKKVENTRWDYLTQVEKECKEKEKPSYDTETDPSEGLMNVLKKIYEDGDDDMKRTINKAWVESREKQAKGDTEF

SEQ ID NO: 10971 - protein, 80 aa, Homo sapiens
  Payload ID: 2172;
  Gene Symbol: CACYBP;
  Gene Name: calcyclin binding prt;
  Uniprot ID:  Q9HB71;
  ENSP ID: ENSP00000384139
MASEELQKDLEEVKVLLEKATRKRVRDALTAEKSKIETEIKNKMQQKSQKKAELLDNEKPAAVVAPITTGYTDGISQISL

SEQ ID NO: 10972 - protein, 185 aa, Homo sapiens
  Payload ID: 2172;
  Gene Symbol: CACYBP;
  Gene Name: calcyclin binding prt;
  Uniprot ID:  Q9HB71;
  ENSP ID: ENSP00000385771
MQQKSQKKAELLDNEKPAAVVAPITTGYTVKISNYGWDQSDKFVKIYITLTGVHQVPTENVQVHFTERSFDLLVKNLNGKSYSMIVNNLLKPISVEGSSKKVKTDTVLILCRKKVENTRWDYLTQVEKECKEKEKPSYDTETDPSEGLMNVLKKIYEDGDDDMKRTINKAWVESREKQAKGDTEF

SEQ ID NO: 10973 - protein, 50 aa, Homo sapiens
  Payload ID: 2172;
  Gene Symbol: CACYBP;
  Gene Name: calcyclin binding prt;
  ENSP ID: ENSP00000403674
MASEELQKDLEEVKVLLEKATRKRVRDALTAEKSKIETEIKNKMQQKSQK

SEQ ID NO: 10974 - protein, 185 aa, Homo sapiens; identical to SEQ ID NO: 10972
  Payload ID: 2172;
  Gene Symbol: CACYBP;
  Gene Name: calcyclin binding prt;
  Uniprot ID:  Q9HB71;
  ENSP ID: ENSP00000479414

SEQ ID NO: 10975 - protein, 217 aa, Homo sapiens
  Payload ID: 2173;
  Gene Symbol: CALY;
  Gene Name: calcyon neuron-specific vesicular prt;
  Uniprot ID:  Q9NYX4;
  ENSP ID: ENSP00000252939
MVKLGCSFSGKPGKDPGDQDGAAMDSVPLISPLDISQLQPPLPDQVVIKTQTEYQLSSPDQQNFPDLEGQRLNCSHPEEGRRLPTARMIAFAMALLGCVLIMYKAIWYDQFTCPDGFLLRHKICTPLTLEMYYTEMDPERHRSILAAIGAYPLSRKHGTETPAAWGDGYRAAKEERKGPTQAGAAAAATEPPGKPSAKAEKEAARKAAGSAAPPPAQ

SEQ ID NO: 10976 - protein, 158 aa, Homo sapiens
  Payload ID: 2173;
  Gene Symbol: CALY;
  Gene Name: calcyon neuron-specific vesicular prt;
  Uniprot ID:  Q9NYX4;
  ENSP ID: ENSP00000357543
MVKLGCSFSGKPGKDPGDQDGAAMDSVPLISPLDISQLQPPLPDQVVIKTQTEYQLSSPDQQNFPDLEGQRLNCSHPEEGRRVTTPTPPTVGTQDRRRRWKAAGGAWVPSRPVWGPLALREERVAVSHPAQSWPHRLPCTHQAPSRGCRCRLTKQWRS

SEQ ID NO: 10977 - protein, 124 aa, Homo sapiens
  Payload ID: 2173;
  Gene Symbol: CALY;
  Gene Name: calcyon neuron-specific vesicular prt;
  Uniprot ID:  Q9NYX4;
  ENSP ID: ENSP00000357546
MVKLGCSFSGKPGKDPGDQDGAAMDSVPLISPLDISQLQPPLPDQVVIKTQTEYQLSSPDQQNFPDLEGQRLNCSHPEEGRRLPTARMIAFAMALLGCVLIMYKAIWYDQFTCPDGFLLRGPEF

SEQ ID NO: 10978 - protein, 162 aa, Homo sapiens
  Payload ID: 2174;
  Gene Symbol: CAPS;
  Gene Name: calcyphosine;
  Uniprot ID:  Q13938;
  ENSP ID: ENSP00000222125
MDAVDATMEKLRAQCLSRGASGIQGLARFFRQLDRDGSRSLDADEFRQGLAKLGLVLDQAEAEGVCRKWDRNGSGTLDLEEFLRALRPPMSQAREAVIAAAFAKLDRSGDGVVTVDDLRGVYSGRAHPKVTLAEFQDYYSGVSASMNTDEEFVAMMTSAWQL

SEQ ID NO: 10979 - protein, 248 aa, Homo sapiens
  Payload ID: 2174;
  Gene Symbol: CAPS;
  Gene Name: calcyphosine;
  Uniprot ID:  Q13938;
  ENSP ID: ENSP00000403263
MQCHRDLALSQALWGWQLSKQSGWAHPSLPHSPLPSTVHSCSWAPPHLQRHLPLATVSPGTTQLTQGPAGRTLGQTQASCPEPRPSMDAVDATMEKLRAQCLSRGASGIQGLARFFRQLDRDGSRSLDADEFRQGLAKLGLVLDQAEAEGVCRKWDRNGSGTLDLEEFLRALRPPMSQAREAVIAAAFAKLDRSGDGVVTVDDLRGVYSGRAHPKVTLAEFQDYYSGVSASMNTDEEFVAMMTSAWQL

SEQ ID NO: 10980 - protein, 275 aa, Homo sapiens
  Payload ID: 2174;
  Gene Symbol: CAPS;
  Gene Name: calcyphosine;
  ENSP ID: ENSP00000465883
MQCHRDLALSQALWGWQLSKQSGWAHPSLPHSPLPSTVHSCSWAPPHLQRHLPLATVSPGTTQLTQGPAGRTLGQTQASCPEPRPSMDAVDATMEKLRAQCLSRGASGIQGLARFFRQLDRDGSRSLDADEFRQGLAKLGLVLDQAEAEGVCRKWDRNGSGTLDLEEFLRALRPPMSQAREAVIAAAFAKLDRSGDGVVTVDDLRGVYSGRAHPKVRSGEWTEDEVLRRFLDNFDSSEKDGQVTLAEFQDYYSGVSASMNTDEEFVAMMTSAWQL

SEQ ID NO: 10981 - protein, 134 aa, Homo sapiens
  Payload ID: 2174;
  Gene Symbol: CAPS;
  Gene Name: calcyphosine;
  ENSP ID: ENSP00000468582
MDAVDATMEKLRAQCLSRGASGIQGLARFFRQLDRDGSRSLDADEFRQGLAKLGLVLDQAEAEGVCRKWDRNGSGTLDLEEFLRALRPPMSQAREAVIAAAFAKLDRSGDGVVTVDDLRGVYSGRAHPKVRSGE

SEQ ID NO: 10982 - protein, 189 aa, Homo sapiens
  Payload ID: 2174;
  Gene Symbol: CAPS;
  Gene Name: calcyphosine;
  Uniprot ID:  Q13938;
  ENSP ID: ENSP00000484912
MDAVDATMEKLRAQCLSRGASGIQGLARFFRQLDRDGSRSLDADEFRQGLAKLGLVLDQAEAEGVCRKWDRNGSGTLDLEEFLRALRPPMSQAREAVIAAAFAKLDRSGDGVVTVDDLRGVYSGRAHPKVRSGEWTEDEVLRRFLDNFDSSEKDGQVTLAEFQDYYSGVSASMNTDEEFVAMMTSAWQL

SEQ ID NO: 10983 - protein, 41 aa, Homo sapiens
  Payload ID: 2175;
  Gene Symbol: CAPS2;
  Gene Name: calcyphosine 2;
  ENSP ID: ENSP00000331007
MSDKLKKDLCYHNSDSPEYQDSSFSLIVAFTDAKYCSWVCL

SEQ ID NO: 10984 - protein, 142 aa, Homo sapiens
  Payload ID: 2175;
  Gene Symbol: CAPS2;
  Gene Name: calcyphosine 2;
  ENSP ID: ENSP00000338474
MSDKLKKDLCYDQNIIPENLPAPTDKCKLKYQQCKTEIKEGYKQYSQRNAENTKSNVTHKQSPRNKIDEKCVQDEEANTDDLTTLDRKAILQQGYADNSCDKQQRARKLDAVSCQHFYLFGNCGCREEETDCCRASDDRPLI

SEQ ID NO: 10985 - protein, 382 aa, Homo sapiens
  Payload ID: 2175;
  Gene Symbol: CAPS2;
  Gene Name: calcyphosine 2;
  Uniprot ID:  Q9BXY5;
  ENSP ID: ENSP00000376963
MIDHLSRAVISDPEQNLAIEQKESDHILPDSKMTPLRFRKRTLHETKIRTHSTLTENVLSHKLQFDGRIVSRNGRDACRELIGFFFTHDQSLTIYEYRQFGKNRTNVLPFIQKSIYSHQCGRRKGKQYRLGDFYVGATLTFLSSDHLSLPESIKENTLLKLRITNIDQIALDSLKTASMEQEDDIIIQETNDRLVFKAIQDVLKEKLHKRGVRILTGLGKYFQQLDKEGNGLLDKADFKQALKVFHLEVSEKDFESAWLILNDNGNGKVDYGEFKRGIIGEMNEYRKSYVRKAFMKLDFNKSGSVPIINIRKCYCAKKHSQVISGHSTEEEIKSSFLETLKVACSKSDEVSYGEFEDYYEGLSIGIVDDEDFVNILRTPWGI

SEQ ID NO: 10986 - protein, 557 aa, Homo sapiens
  Payload ID: 2175;
  Gene Symbol: CAPS2;
  Gene Name: calcyphosine 2;
  Uniprot ID:  Q9BXY5;
  ENSP ID: ENSP00000386959
MGNSFCYTAVYCMINTGTQMDLEVKGVAATSRSQIQPFFGRKKPLQQRWTSESWTNQNSCPPVVPRLDLGSLVDSDDEDNFSYIPLSTANLPNSSSTLGWVTPCQTPYTQYHLNKLDQNIIPENLPAPTDKCKLKYQQCKTEIKEGYKQYSQRNAENTKSNVTHKQSPRNKIDEKCVQDEEANTDDLTTLDRKAILQQGYADNSCDKQQRARKLDAEIVAAEKKKQIVAEQVMIDHLSRAVISDPEQNLAIEQKESDHILPDSKMTPLRFRKRTLHETKIRTHSTLTENVLSHKLQFDGRIVSRNGRDACRELIGFFFTHDQSLTIYEYRQFGKNRTNVLPFIQKSIYSHQCGRRKGKQYRLGDFYVGATLTFLSSDHLSLPESIKENTLLKLRITNIDQIALDSLKTASMEQEDDIIIQETNDRLVFKAIQDVLKEKLHKRGVRILTGLGKYFQQLDKEGNGLLDKADFKQALKVFHLEVSEKDFESAWLILNDNGNGKVDYGEFKRGIIGEMNEYRKSYVRKAFMKLDFNKSGSVPIINIRKCYCAKKHSQVISG

SEQ ID NO: 10987 - protein, 475 aa, Homo sapiens
  Payload ID: 2175;
  Gene Symbol: CAPS2;
  Gene Name: calcyphosine 2;
  ENSP ID: ENSP00000386977
MINTGTQMDLEVKGVAATSRSQIQPFFGRKKPLQQRWTSESWTNQNSCPPVVPRLDLGSLVDSDDEDQNIIPENLPAPTDKCKLKYQQCKTEIKEGYKQYSQRNAENTKSNVTHKQSPRNKIDEKCVQDEEANTDDLTTLDRKAILQQGYADNSCDKQQRARKLDAEIVAAEKKKQIVAEQVMIDHLSRAVISDPEQNLAIEQKESDHILPDSKMTPLRFRKRTLHETKIRTHSTLTENVLSHKLQFDGRIVSRTNVLPFIQKSIYSHQCGRRKGKQYRLGDFYVGATLTFLSSDHLSLPESIKENTLLKLRITNIDQIALDSLKTASMEQEDDIIIQETNDRLVFKAIQDVLKEKLHKRGVRILTGLGKYFQQLDKEGNGLLDKADFKQALKVFHLEVSEKDFESAWLILNDNGNGKVDYGEFKRGIIGEMNEYRKSYVRKAFMKLDFNKSGSVPIINIRKCYCAKKHSQVISG

SEQ ID NO: 10988 - protein, 135 aa, Homo sapiens
  Payload ID: 2175;
  Gene Symbol: CAPS2;
  Gene Name: calcyphosine 2;
  ENSP ID: ENSP00000411797
MDKPEFLPTSDQNIIPENLPAPTDKCKLKYQQCKTEIKEGYKQYSQRNAENTKSNVTHKQSPRNKIDEKCVQDEEANTDDLTTLDRKAILQQGYADNSCDKQQRARKLDAEIVAAEKKKQIVAEQVMIDHLSRAV

SEQ ID NO: 10989 - protein, 33 aa, Homo sapiens
  Payload ID: 2175;
  Gene Symbol: CAPS2;
  Gene Name: calcyphosine 2;
  ENSP ID: ENSP00000447737
MIDHLSRAVISDPEQNLAIEQKESDHILPDSKM

SEQ ID NO: 10990 - protein, 187 aa, Homo sapiens
  Payload ID: 2175;
  Gene Symbol: CAPS2;
  Gene Name: calcyphosine 2;
  ENSP ID: ENSP00000449797
MSDKLKKDLCYDQNIIPENLPAPTDKCKLKYQQCKTEIKEGYKQYSQRNAENTKSNVTHKQSPRNKIDEKCVQDEEANTDDLTTLDRKAILQQGYADNSCDKQQRARKLDAEIVAAEKKKQIVAEQVMIDHLSRAVISDPEQNLAIEQKESDHILPDSKMTPLRFRKRTLHETKIRTHSTLTENVLS

SEQ ID NO: 10991 - protein, 208 aa, Homo sapiens
  Payload ID: 2176;
  Gene Symbol: CAPSL;
  Gene Name: calcyphosine-like;
  Uniprot ID:  Q8WWF8;
  ENSP ID: ENSP00000380523
MAGTARHDREMAIQAKKKLTTATDPIERLRLQCLARGSAGIKGLGRVFRIMDDDNNRTLDFKEFMKGLNDYAVVMEKEEVEELFRRFDKDGNGTIDFNEFLLTLRPPMSRARKEVIMQAFRKLDKTGDGVITIEDLREVYNAKHHPKYQNGEWSEEQVFRKFLDNFDSPYDKDGLVTPEEFMNYYAGVSASIDTDVYFIIMMRTAWKL

SEQ ID NO: 10992 - protein, 208 aa, Homo sapiens; identical to SEQ ID NO: 10991
  Payload ID: 2176;
  Gene Symbol: CAPSL;
  Gene Name: calcyphosine-like;
  Uniprot ID:  Q8WWF8;
  ENSP ID: ENSP00000380524

SEQ ID NO: 10993 - protein, 180 aa, Homo sapiens
  Payload ID: 2176;
  Gene Symbol: CAPSL;
  Gene Name: calcyphosine-like;
  ENSP ID: ENSP00000421018
MAGTARHDREMAIQAKKKLTTATDPIERLRLQCLARGSAGIKGLGRVFRIMDDDNNRTLDFKEFMKGLNDYAVVMEKEEVEELFRRFDKDGNGTIDFNEFLLTLRPPMSRARKEVIMQAFRKLDKTGDGVITIEDLREVYNAKHHPKYQNGEWSEEQVFRKFLDNFDSPYDKDGLVSKRA

SEQ ID NO: 10994 - protein, 190 aa, Homo sapiens
  Payload ID: 2176;
  Gene Symbol: CAPSL;
  Gene Name: calcyphosine-like;
  ENSP ID: ENSP00000424806
MAGTARHDREMAIQAKKKLTTATDPIERLRLQCLARGSAGIKGLGRVFRIMDDDNNRTLDFKEFMKGLNDYAVVMEKEEVEELFRRFDKDGNGTIDFNEFLLTLRPPMSRARKEVIMQAFRKLDKTGDGVITIEDLREVYNAKHHPKYQNGEWSEEQVFRKFLDNFDSPYDKDGLVTPEEFMNYYAGVSA

SEQ ID NO: 10995 - protein, 538 aa, Homo sapiens
  Payload ID: 2177;
  Gene Symbol: CALD1;
  Gene Name: caldesmon 1;
  Uniprot ID:  Q05682;
  ENSP ID: ENSP00000354513
MDDFERRRELRRQKREEMRLEAERIAYQRNDDDEEEAARERRRRARQERLRQKQEEESLGQVTDQVEVNAQNSVPDEEAKTTTTNTQVEGDDEAAFLERLARREERRQKRLQEALERQKEFDPTITDASLSLPSRRMQNDTAENETTEKEEKSESRQERYEIEETETVTKSYQKNDWRDAEENKKEDKEKEEEEEEKPKRGSIGENQIKDEKIKKDKEPKEEVKSFMDRKKGFTEVKSQNGEFMTHKLKHTENTFSRPGGRASVDTKEAEGAPQVEAGKRLEELRRRRGETESEEFEKLKQKQQEAALELEELKKKREERRKVLEEEEQRRKQEEADRKLREEEEKRRLKEEIERRRAEAAEKRQKMPEDGLSDDKKPFKCFTPKGSSLKIEERAEFLNKSVQKSSGVKSTHQAAIVSKIDSRLEQYTSAIEGTKSAKPTKPAASDLPVPAEGVRNIKSMWEKGNVFSSPTAAGTPNKETAGLKVGVSSRINEWLTKTPDGNKSPAPKPSDLRPGDVSSKRNLWEKQSVDKVTSPTKV

SEQ ID NO: 10996 - protein, 793 aa, Homo sapiens
  Payload ID: 2177;
  Gene Symbol: CALD1;
  Gene Name: caldesmon 1;
  Uniprot ID:  Q05682;
  ENSP ID: ENSP00000354826
MDDFERRRELRRQKREEMRLEAERIAYQRNDDDEEEAARERRRRARQERLRQKQEEESLGQVTDQVEVNAQNSVPDEEAKTTTTNTQVEGDDEAAFLERLARREERRQKRLQEALERQKEFDPTITDASLSLPSRRMQNDTAENETTEKEEKSESRQERYEIEETETVTKSYQKNDWRDAEENKKEDKEKEEEEEEKPKRGSIGENQVEVMVEEKTTESQEETVVMSLKNGQISSEEPKQEEEREQGSDEISHHEKMEEEDKERAEAERARLEAEERERIKAEQDKKIADERARIEAEEKAAAQERERREAEERERMREEEKRAAEERQRIKEEEKRAAEERQRIKEEEKRAAEERQRIKEEEKRAAEERQRARAEEEEKAKVEEQKRNKQLEEKKHAMQETKIKGEKVEQKIEGKWVNEKKAQEDKLQTAVLKKQGEEKGTKVQAKREKLQEDKPTFKKEEIKDEKIKKDKEPKEEVKSFMDRKKGFTEVKSQNGEFMTHKLKHTENTFSRPGGRASVDTKEAEGAPQVEAGKRLEELRRRRGETESEEFEKLKQKQQEAALELEELKKKREERRKVLEEEEQRRKQEEADRKLREEEEKRRLKEEIERRRAEAAEKRQKMPEDGLSDDKKPFKCFTPKGSSLKIEERAEFLNKSVQKSSGVKSTHQAAIVSKIDSRLEQYTSAIEGTKSAKPTKPAASDLPVPAEGVRNIKSMWEKGNVFSSPTAAGTPNKETAGLKVGVSSRINEWLTKTPDGNKSPAPKPSDLRPGDVSSKRNLWEKQSVDKVTSPTKV

SEQ ID NO: 10997 - protein, 558 aa, Homo sapiens
  Payload ID: 2177;
  Gene Symbol: CALD1;
  Gene Name: caldesmon 1;
  Uniprot ID:  Q05682;
  ENSP ID: ENSP00000376826
MLGGSGSHGRRSLAALSQIAYQRNDDDEEEAARERRRRARQERLRQKQEEESLGQVTDQVEVNAQNSVPDEEAKTTTTNTQVEGDDEAAFLERLARREERRQKRLQEALERQKEFDPTITDASLSLPSRRMQNDTAENETTEKEEKSESRQERYEIEETETVTKSYQKNDWRDAEENKKEDKEKEEEEEEKPKRGSIGENQGEEKGTKVQAKREKLQEDKPTFKKEEIKDEKIKKDKEPKEEVKSFMDRKKGFTEVKSQNGEFMTHKLKHTENTFSRPGGRASVDTKEAEGAPQVEAGKRLEELRRRRGETESEEFEKLKQKQQEAALELEELKKKREERRKVLEEEEQRRKQEEADRKLREEEEKRRLKEEIERRRAEAAEKRQKMPEDGLSDDKKPFKCFTPKGSSLKIEERAEFLNKSVQKSSGVKSTHQAAIVSKIDSRLEQYTSAIEGTKSAKPTKPAASDLPVPAEGVRNIKSMWEKGNVFSSPTAAGTPNKETAGLKVGVSSRINEWLTKTPDGNKSPAPKPSDLRPGDVSSKRNLWEKQSVDKVTSPTKV

SEQ ID NO: 10998 - protein, 132 aa, Homo sapiens
  Payload ID: 2177;
  Gene Symbol: CALD1;
  Gene Name: caldesmon 1;
  ENSP ID: ENSP00000390926
MDDFERRRELRRQKREEMRLEAESVYTNNSCNMLYLLKIAYQRNDDDEEEAARERRRRARQERLRQKQEEESLGQVTDQVEVNAQNSVPDEEAKTTTTNTQVEGDDEAAFLERLARREERRQKRLQEALERQ

SEQ ID NO: 10999 - protein, 532 aa, Homo sapiens
  Payload ID: 2177;
  Gene Symbol: CALD1;
  Gene Name: caldesmon 1;
  Uniprot ID:  Q05682;
  ENSP ID: ENSP00000393621
MLGGSGSHGRRSLAALSQIAYQRNDDDEEEAARERRRRARQERLRQKQEEESLGQVTDQVEVNAQNSVPDEEAKTTTTNTQVEGDDEAAFLERLARREERRQKRLQEALERQKEFDPTITDASLSLPSRRMQNDTAENETTEKEEKSESRQERYEIEETETVTKSYQKNDWRDAEENKKEDKEKEEEEEEKPKRGSIGENQIKDEKIKKDKEPKEEVKSFMDRKKGFTEVKSQNGEFMTHKLKHTENTFSRPGGRASVDTKEAEGAPQVEAGKRLEELRRRRGETESEEFEKLKQKQQEAALELEELKKKREERRKVLEEEEQRRKQEEADRKLREEEEKRRLKEEIERRRAEAAEKRQKMPEDGLSDDKKPFKCFTPKGSSLKIEERAEFLNKSVQKSSGVKSTHQAAIVSKIDSRLEQYTSAIEGTKSAKPTKPAASDLPVPAEGVRNIKSMWEKGNVFSSPTAAGTPNKETAGLKVGVSSRINEWLTKTPDGNKSPAPKPSDLRPGDVSSKRNLWEKQSVDKVTSPTKV

SEQ ID NO: 11000 - protein, 85 aa, Homo sapiens
  Payload ID: 2177;
  Gene Symbol: CALD1;
  Gene Name: caldesmon 1;
  ENSP ID: ENSP00000394715
MDDFERRRELRRQKREEMRLEAERIAYQRNDDDEEEAARERRRRARQERLRQKQEEESLGQVTDQQKMKLPRRKKKVKVAKKDTR

SEQ ID NO: 11001 - protein, 563 aa, Homo sapiens
  Payload ID: 2177;
  Gene Symbol: CALD1;
  Gene Name: caldesmon 1;
  Uniprot ID:  Q05682;
  ENSP ID: ENSP00000395710
MDDFERRRELRRQKREEMRLEAERIAYQRNDDDEEEAARERRRRARQERLRQKQEEESLGQVTDQVEVNAQNSVPDEEAKTTTTNTQVEGDDEAAFLERLARREERRQKRLQEALERQKEFDPTITDASLSLPSRRMQNDTAENETTEKEEKSESRQERYEIEETETVTKSYQKNDWRDAEENKKEDKEKEEEEEEKPKRGSIGENQGEEKGTKVQAKREKLQEDKPTFKKEEIKDEKIKKDKEPKEEVKSFMDRKKGFTEVKSQNGEFMTHKLKHTENTFSRPGGRASVDTKEAEGAPQVEAGKRLEELRRRRGETESEEFEKLKQKQQEAALELEELKKKREERRKVLEEEEQRRKQEEADRKLREEEEKRRLKEEIERRRAEAAEKRQKMPEDGLSDDKKPFKCFTPKGSSLKIEERAEFLNKSVQKSGVKSTHQAAIVSKIDSRLEQYTSAIEGTKSAKPTKPAASDLPVPAEGVRNIKSMWEKGNVFSSPTAAGTPNKETAGLKVGVSSRINEWLTKTPDGNKSPAPKPSDLRPGDVSSKRNLWEKQSVDKVTSPTKV

SEQ ID NO: 11002 - protein, 538 aa, Homo sapiens; identical to SEQ ID NO: 10995
  Payload ID: 2177;
  Gene Symbol: CALD1;
  Gene Name: caldesmon 1;
  Uniprot ID:  Q05682;
  ENSP ID: ENSP00000398826

SEQ ID NO: 11003 - protein, 72 aa, Homo sapiens
  Payload ID: 2177;
  Gene Symbol: CALD1;
  Gene Name: caldesmon 1;
  ENSP ID: ENSP00000401988
MDDFERRRELRRQKREEMRLEAERIAYQRNDDDEEEAARERRRRARQERLRQKQEEESLGQVTDQVEVNAQN

SEQ ID NO: 11004 - protein, 536 aa, Homo sapiens
  Payload ID: 2177;
  Gene Symbol: CALD1;
  Gene Name: caldesmon 1;
  ENSP ID: ENSP00000407522
MLGGSGSHGRRSLAALSQIAYQRNDDDEEEAARERRRRARQERLRQKQEEESLGQVTDQVEVNAQNSVPDEEAKTTTTNTQVEGDDEAAFLERLARREERRQKRLQEALERQKEFDPTITDASLSLPSRRMQNDTAENETTEKEEKSESRQERYEIEETETVTKSYQKNDWRDAEENKKEDKEKEEEEEEKPKRGSIGENQIKDEKIKKDKEPKEEVKSFMDRKKGFTEVKSQNGEFMTHKLKHTENTFSRPGGRASVDTKEAEGAPQVEAGKRLEELRRRRGETESEEFEKLKQKQQEAALELEELKKKREERRKVLEEEEQRRKQEEADRKLREEEEKRRLKEEIERRRAEAAEKRQKMPEDGLSDDKKPFKCFTPKGSSLKIEERAEFLNKSVQKSSGVKSTHQAAIVSKIDSRLEQYTSAIEGTKSAKPTKPAASDLPVPAEGVRNIKSMWEKGNVFSSPTAAGTPNKETAGLKVGVSSRINEWLTKTPDGNKSPAPKPSLTFCSSLFGLWLIGNLLLLPSFLPLLPEWVFL

SEQ ID NO: 11005 - protein, 459 aa, Homo sapiens
  Payload ID: 2177;
  Gene Symbol: CALD1;
  Gene Name: caldesmon 1;
  ENSP ID: ENSP00000411476
MDDFERRRELRRQKREEMRLEAERIAYQRNDDDEEEAARERRRRARQERLRQKQEEESLGQVTDQVEVNAQNSVPDEEAKTTTTNTQVEGDDEAAFLERLARREERRQKRLQEALERQKEFDPTITDASLSLPSRRMQNDTAENETTEKEEKSESRQERYEIEETETVTKSYQKNDWRDAEENKKEDKEKEEEEEEKPKRGSIGENQIKDEKIKKDKEPKEEVKSFMDRKKGFTEVKSQNGEFMTHKLKHTENTFSRPGGRASVDTKEAEGAPQVEAGKRLEELRRRRGETESEEFEKLKQKQQEAALELEELKKKREERRKVLEEEEQRRKQEEADRKLREEEEKRRLKEEIERRRAEAAEKRQKMPEDGLSDDKKPFKCFTPKGSSLKIEERAEFLNKSVQKSSGVKSTHQAAIVSKIDSRLEQYTSAIEGTKSAKPTKPAASDLPVPAEGVRNIKS

SEQ ID NO: 11006 - protein, 72 aa, Homo sapiens; identical to SEQ ID NO: 11003
  Payload ID: 2177;
  Gene Symbol: CALD1;
  Gene Name: caldesmon 1;
  ENSP ID: ENSP00000416611

SEQ ID NO: 11007 - protein, 557 aa, Homo sapiens
  Payload ID: 2177;
  Gene Symbol: CALD1;
  Gene Name: caldesmon 1;
  ENSP ID: ENSP00000419673
MLGGSGSHGRRSLAALSQIAYQRNDDDEEEAARERRRRARQERLRQKQEEESLGQVTDQVEVNAQNSVPDEEAKTTTTNTQVEGDDEAAFLERLARREERRQKRLQEALERQKEFDPTITDASLSLPSRRMQNDTAENETTEKEEKSESRQERYEIEETETVTKSYQKNDWRDAEENKKEDKEKEEEEEEKPKRGSIGENQGEEKGTKVQAKREKLQEDKPTFKKEEIKDEKIKKDKEPKEEVKSFMDRKKGFTEVKSQNGEFMTHKLKHTENTFSRPGGRASVDTKEAEGAPQVEAGKRLEELRRRRGETESEEFEKLKQKQQEAALELEELKKKREERRKVLEEEEQRRKQEEADRKLREEEEKRRLKEEIERRRAEAAEKRQKMPEDGLSDDKKPFKCFTPKGSSLKIEERAEFLNKSVQKSGVKSTHQAAIVSKIDSRLEQYTSAIEGTKSAKPTKPAASDLPVPAEGVRNIKSMWEKGNVFSSPTAAGTPNKETAGLKVGVSSRINEWLTKTPDGNKSPAPKPSDLRPGDVSSKRNLWEKQSVDKVTSPTKV

SEQ ID NO: 11008 - protein, 588 aa, Homo sapiens
  Payload ID: 2178;
  Gene Symbol: CCIN;
  Gene Name: calicin;
  Uniprot ID:  Q13939;
  ENSP ID: ENSP00000334996
MKLEFTEKNYNSFVLQNLNRQRKRKEYWDMALSVDNHVFFAHRNVLAAVSPLVRSLISSNDMKTADELFITIDTSYLSPVTVDQLLDYFYSGKVVISEQNVEELLRGAQYFNTPRLRVHCNDFLIKSICRANCLRYLFLAELFELKEVSDVAYSGIRDNFHYWASPEGSMHFMRCPPVIFGRLLRDENLHVLNEDQALSALINWVYFRKEDREKYFKKFFNYINLNAVSNKTLVFASNKLVGMENTSSHTTLIESVLMDRKQERPCSLLVYQRKGALLDSVVILGGQKAHGQFNDGVFAYIIQENLWMKLSDMPYRAAALSATSAGRYIYISGGTTEQISGLKTAWRYDMDDNSWTKLPDLPIGLVFHTMVTCGGTVYSVGGSIAPRRYVSNIYRYDERKEVWCLAGKMSIPMDGTAVITKGDRHLYIVTGRCLVKGYISRVGVVDCFDTSTGDVVQCITFPIEFNHRPLLSFQQDNILCVHSHRQSVEINLQKVKASKTTTSVPVLPNSCPLDVSHAICSIGDSKVFVCGGVTTASDVQTKDYTINPNAFLLDQKTGKWKTLAPPPEALDCPACCLAKLPCKILQRI

SEQ ID NO: 11009 - protein, 610 aa, Homo sapiens
  Payload ID: 2179;
  Gene Symbol: CLGN;
  Gene Name: calmegin;
  Uniprot ID:  O14967;
  ENSP ID: ENSP00000326699
MHFQAFWLCLGLLFISINAEFMDDDVETEDFEENSEEIDVNESELSSEIKYKTPQPIGEVYFAETFDSGRLAGWVLSKAKKDDMDEEISIYDGRWEIEELKENQVPGDRGLVLKSRAKHHAISAVLAKPFIFADKPLIVQYEVNFQDGIDCGGAYIKLLADTDDLILENFYDKTSYIIMFGPDKCGEDYKLHFIFRHKHPKTGVFEEKHAKPPDVDLKKFFTDRKTHLYTLVMNPDDTFEVLVDQTVVNKGSLLEDVVPPIKPPKEIEDPNDKKPEEWDERAKIPDPSAVKPEDWDESEPAQIEDSSVVKPAGWLDDEPKFIPDPNAEKPDDWNEDTDGEWEAPQILNPACRIGCGEWKPPMIDNPKYKGVWRPPLVDNPNYQGIWSPRKIPNPDYFEDDHPFLLTSFSALGLELWSMTSDIYFDNFIICSEKEVADHWAADGWRWKIMIANANKPGVLKQLMAAAEGHPWLWLIYLVTAGVPIALITSFCWPRKVKKKHKDTEYKKTDICIPQTKGVLEQEEKEEKAALEKPMDLEEEKKQNDGEMLEKEEESEPEEKSEEEIEIIEGQEESNQSNKSGSEDEMKEADESTGSGDGPIKSVRKRRVRKD

SEQ ID NO: 11010 - protein, 610 aa, Homo sapiens; identical to SEQ ID NO: 11009
  Payload ID: 2179;
  Gene Symbol: CLGN;
  Gene Name: calmegin;
  Uniprot ID:  O14967;
  ENSP ID: ENSP00000392782

SEQ ID NO: 11011 - protein, 179 aa, Homo sapiens
  Payload ID: 2179;
  Gene Symbol: CLGN;
  Gene Name: calmegin;
  ENSP ID: ENSP00000424593
MHFQAFWLCLGLLFISINAEFMDDDVETEDFEENSEEIDVNESELSSEIKYKTPQPIGEVYFAETFDSGRLAGWVLSKAKKDDMDEEISIYDGRWEIEELKENQVPGDRGLVLKSRAKHHAISAVLAKPFIFADKPLIVQYEVNFQDGIDCGGAYIKLLADTDDLILENFYDKTSYIIM

SEQ ID NO: 11012 - protein, 1002 aa, Homo sapiens
  Payload ID: 2180;
  Gene Symbol: CLMN;
  Gene Name: calmin (calponin-like, transmembrane);
  Uniprot ID:  Q96JQ2;
  ENSP ID: ENSP00000298912
MAAHEWDWFQREELIGQISDIRVQNLQVERENVQKRTFTRWINLHLEKCNPPLEVKDLFVDIQDGKILMALLEVLSGRNLLHEYKSSSHRIFRLNNIAKALKFLEDSNVKLVSIDAAEIADGNPSLVLGLIWNIILFFQIKELTGNLSRNSPSSSLSPGSGGTDSDSSFPPTPTAERSVAISVKDQRKAIKALLAWVQRKTRKYGVAVQDFAGSWRSGLAFLAVIKAIDPSLVDMKQALENSTRENLEKAFSIAQDALHIPRLLEPEDIMVDTPDEQSIMTYVAQFLERFPELEAEDIFDSDKEVPIESTFVRIKETPSEQESKVFVLTENGERTYTVNHETSHPPPSKVFVCDKPESMKEFRLDGVSSHALSDSSTEFMHQIIDQVLQGGPGKTSDISEPSPESSILSSRKENGRSNSLPIKKTVHFEADTYKDPFCSKNLSLCFEGSPRVAKESLRQDGHVLAVEVAEEKEQKQESSKIPESSSDKVAGDIFLVEGTNNNSQSSSCNGALESTARHDEESHSLSPPGENTVMADSFQIKVNLMTVEALEEGDYFEAIPLKASKFNSDLIDFASTSQAFNKVPSPHETKPDEDAEAFENHAEKLGKRSIKSAHKKKDSPEPQVKMDKHEPHQDSGEEAEGCPSAPEETPVDKKPEVHEKAKRKSTRPHYEEEGEDDDLQGVGEELSSSPPSSCVSLETLGSHSEEGLDFKPSPPLSKVSVIPHDLFYFPHYEVPLAAVLEAYVEDPEDLKNEEMDLEEPEGYMPDLDSREEEADGSQSSSSSSVPGESLPSASDQVLYLSRGGVGTTPASEPAPLAPHEDHQQRETKENDPMDSHQSQESPNLENIANPLEENVTKESISSKKKEKRKHVDHVESSLFVAPGSVQSSDDLEEDSSDYSIPSRTSHSDSSIYLRRHTHRSSESDHFSYVQLRNAADLDDRRNRILTRKANSSGEAMSLGSHSPQSDSLTQLVQQPDMMYFILFLWLLVYCLLLFPQLDVSRL

SEQ ID NO: 11013 - protein, 97 aa, Homo sapiens
  Payload ID: 2180;
  Gene Symbol: CLMN;
  Gene Name: calmin (calponin-like, transmembrane);
  ENSP ID: ENSP00000451189
MAAHEWDWFQREELIGQISDIRVQNLQVERENVQKRTFTRWINLHLEKCNPPLEVKDLFVDIQDGKILMALLEVLSGRNLSPGHQLLCPWWASTGSL

SEQ ID NO: 11014 - protein, 132 aa, Homo sapiens
  Payload ID: 2180;
  Gene Symbol: CLMN;
  Gene Name: calmin (calponin-like, transmembrane);
  ENSP ID: ENSP00000451705
MALLEVLSGRNLLHEYKSSSHRIFRLNNIAKALKFLEDSNVKLVSIDAAEIADGNPSLVLGLIWNIILFFQIKELTGNLSRNSPSSSLSPGSGGTDSDSSFPPTPTAERSVAISVKDQRKAIKALLAWVQRK

SEQ ID NO: 11015 - protein, 67 aa, Homo sapiens
  Payload ID: 2180;
  Gene Symbol: CLMN;
  Gene Name: calmin (calponin-like, transmembrane);
  ENSP ID: ENSP00000452305
MKRESKHARMSMKANSSGEAMSLGSHSPQSDSLTQLVQQPDMMYFILFLWLLVYCLLLFPQLDVSRL

SEQ ID NO: 11016 - protein, 101 aa, Homo sapiens
  Payload ID: 2180;
  Gene Symbol: CLMN;
  Gene Name: calmin (calponin-like, transmembrane);
  ENSP ID: ENSP00000452525
MALLEVLSGRNLLHEYKSSSHRIFRLNNIAKALKFLEDSNVKLVSIDAAEIADGNPSLVLGLIWNIILFFQIKELTGNLSRNSPSSSLSPGSGGTDSDSSF

SEQ ID NO: 11017 - protein, 149 aa, Homo sapiens [sequence omitted]

SEQ ID NO: 11018 - protein, 150 aa, Homo sapiens
  Payload ID: 2181;
  Gene Symbol: CALM1;
  Gene Name: calmodulin 1 (phosphorylase kinase, delta);
  ENSP ID: ENSP00000403491
MQADQLTEEQIAEFKEAFSLFDKDGDGTITTKELGTVMRSLGQNPTEAELQDMINEVDADGNGTIDFPEFLTMMARKMKDTDSEEEIREAFRVFDKDGNGYISAAELRHVMTNLGEKLTDEEVDEMIREADIDGDGQVNYEEFVQMMTAK

SEQ ID NO: 11019 - protein, 113 aa, Homo sapiens
  Payload ID: 2181;
  Gene Symbol: CALM1;
  Gene Name: calmodulin 1 (phosphorylase kinase, delta);
  ENSP ID: ENSP00000442853
MRSLGQNPTEAELQDMINEVDADGNGTIDFPEFLTMMARKMKDTDSEEEIREAFRVFDKDGNGYISAAELRHVMTNLGEKLTDEEVDEMIREADIDGDGQVNYEEFVQMMTAK

SEQ ID NO: 11020 - protein, 76 aa, Homo sapiens
  Payload ID: 2181;
  Gene Symbol: CALM1;
  Gene Name: calmodulin 1 (phosphorylase kinase, delta);
  ENSP ID: ENSP00000450425
MRSLGQNPTEAELQDMINEVDADGNGTIDFPEFLTMMARKMKDTDSEEEIREAFRVFDKCSRTTSRHDKLRRKTNR

SEQ ID NO: 11021 - protein, 113 aa, Homo sapiens; identical to SEQ ID NO: 11019
  Payload ID: 2181;
  Gene Symbol: CALM1;
  Gene Name: calmodulin 1 (phosphorylase kinase, delta);
  ENSP ID: ENSP00000450829

SEQ ID NO: 11022 - protein, 98 aa, Homo sapiens
  Payload ID: 2181;
  Gene Symbol: CALM1;
  Gene Name: calmodulin 1 (phosphorylase kinase, delta);
  ENSP ID: ENSP00000451062
MRSLGQNPTEAELQDMINEVDADGNGTIDFPEFLTMMARKMKDTDSEEEIREAFRVFDKDGNGYISAAELRHVMTNLGEKLTDEEVDEMIREADIDGD

SEQ ID NO: 11023 - protein, 83 aa, Homo sapiens
  Payload ID: 2181;
  Gene Symbol: CALM1;
  Gene Name: calmodulin 1 (phosphorylase kinase, delta);
  ENSP ID: ENSP00000451646
MADQLTEEQIAEFKEAFSLFDKDGDGTITTKELGTVMRSLGQNPTEAELQDMINEVDADGWQWLYQCSRTTSRHDKLRRKTNR

SEQ ID NO: 11024 - protein, 83 aa, Homo sapiens
  Payload ID: 2181;
  Gene Symbol: CALM1;
  Gene Name: calmodulin 1 (phosphorylase kinase, delta);
  ENSP ID: ENSP00000486402
MADQLTEEQIAEFKEAFSLFDKDGDGTITTKELGTVMRSLGQNPTEAELQDMINEVDEMIREADIDGDGQVNYEEFVQMMTAK

SEQ ID NO: 11025 - protein, 149 aa, Homo sapiens [sequence omitted]

SEQ ID NO: 11026 - protein, 196 aa, Homo sapiens
  Payload ID: 2182;
  Gene Symbol: CALM2;
  Gene Name: calmodulin 2 (phosphorylase kinase, delta);
  ENSP ID: ENSP00000387065
MILAHCNLCCPTSSNSPGSVSQVAGITGVHHHTRLVFVFLGEMGFHHVGQAGLELLTSEFKEAFSLFDKDGDGTITTKELGTVMRSLGQNPTEAELQDMINEVDADGNGTIDFPEFLTMMARKMKDTDSEEEIREAFRVFDKDGNGYISAAELRHVMTNLGEKLTDEEVDEMIREADIDGDGQVNYEEFVQMMTAK

SEQ ID NO: 11027 - protein, 65 aa, Homo sapiens
  Payload ID: 2182;
  Gene Symbol: CALM2;
  Gene Name: calmodulin 2 (phosphorylase kinase, delta);
  ENSP ID: ENSP00000406112
MADQLTEEQIAEFKEAFSLFDKDGDGTITTKELGTVMRSLGQNPTEAELQDMINEVDADGWQWLY

SEQ ID NO: 11028 - protein, 187 aa, Homo sapiens
  Payload ID: 2182;
  Gene Symbol: CALM2;
  Gene Name: calmodulin 2 (phosphorylase kinase, delta);
  ENSP ID: ENSP00000411440
SPSGESELSGCVVASRKPVALAAWLALYIASHFAQQPCKADQLTEEQIAEFKEAFSLFDKDGDGTITTKELGTVMRSLGQNPTEAELQDMINEVDADGNGTIDFPEFLTMMARKMKDTDSEEEIREAFRVFDKDGNGYISAAELRHVMTNLGEKLTDEEVDEMIREADIDGDGQVNYEEFVQMMTAK

SEQ ID NO: 11029 - protein, 83 aa, Homo sapiens; identical to SEQ ID NO: 11024
  Payload ID: 2182;
  Gene Symbol: CALM2;
  Gene Name: calmodulin 2 (phosphorylase kinase, delta);
  ENSP ID: ENSP00000486952

SEQ ID NO: 11030 - protein, 149 aa, Homo sapiens [sequence omitted]

SEQ ID NO: 11031 - protein, 113 aa, Homo sapiens; identical to SEQ ID NO: 11019
  Payload ID: 2183;
  Gene Symbol: CALM3;
  Gene Name: calmodulin 3 (phosphorylase kinase, delta);
  ENSP ID: ENSP00000375785

SEQ ID NO: 11032 - protein, 113 aa, Homo sapiens; identical to SEQ ID NO: 11019
  Payload ID: 2183;
  Gene Symbol: CALM3;
  Gene Name: calmodulin 3 (phosphorylase kinase, delta);
  ENSP ID: ENSP00000468877

SEQ ID NO: 11033 - protein, 83 aa, Homo sapiens; identical to SEQ ID NO: 11024
  Payload ID: 2183;
  Gene Symbol: CALM3;
  Gene Name: calmodulin 3 (phosphorylase kinase, delta);
  ENSP ID: ENSP00000470308

SEQ ID NO: 11034 - protein, 113 aa, Homo sapiens; identical to SEQ ID NO: 11019
  Payload ID: 2183;
  Gene Symbol: CALM3;
  Gene Name: calmodulin 3 (phosphorylase kinase, delta);
  ENSP ID: ENSP00000470502

SEQ ID NO: 11035 - protein, 113 aa, Homo sapiens; identical to SEQ ID NO: 11019
  Payload ID: 2183;
  Gene Symbol: CALM3;
  Gene Name: calmodulin 3 (phosphorylase kinase, delta);
  ENSP ID: ENSP00000471225

SEQ ID NO: 11036 - protein, 149 aa, Homo sapiens [sequence omitted]

SEQ ID NO: 11037 - protein, 1673 aa, Homo sapiens
  Payload ID: 2184;
  Gene Symbol: CAMTA1;
  Gene Name: calmodulin binding transcription activator 1;
  Uniprot ID:  Q9Y6Y1;
  ENSP ID: ENSP00000306522
MWRAEGKWLPKTSRKSVSQSVFCGTSTYCVLNTVPPIEDDHGNSNSSHVKIFLPKKLLECLPKCSSLPKERHRWNTNEEIAAYLITFEKHEEWLTTSPKTRPQNGSMILYNRKKVKYRKDGYCWKKRKDGKTTREDHMKLKVQGVECLYGCYVHSSIIPTFHRRCYWLLQNPDIVLVHYLNVPAIEDCGKPCGPILCSINTDKKEWAKWTKEELIGQLKPMFHGIKWTCSNGNSSSGFSVEQLVQQILDSHQTKPQPRTHNCLCTGSLGAGGSVHHKCNSAKHRIISPKVEPRTGGYGSHSEVQHNDVSEGKHEHSHSKGSSREKRNGKVAKPVLLHQSSTEVSSTNQVEVPDTTQSSPVSISSGLNSDPDMVDSPVVTGVSGMAVASVMGSLSQSATVFMSEVTNEAVYTMSPTAGPNHHLLSPDASQGLVLAVSSDGHKFAFPTTGSSESLSMLPTNVSEELVLSTTLDGGRKIPETTMNFDPDCFLNNPKQGQTYGGGGLKAEMVSSNIRHSPPGERSFSFTTVLTKEIKTEDTSFEQQMAKEAYSSSAAAVAASSLTLTAGSSLLPSGGGLSPSTTLEQMDFSAIDSNKDYTSSFSQTGHSPHIHQTPSPSFFLQDASKPLPVEQNTHSSLSDSGGTFVMPTVKTEASSQTSSCSGHVETRIESTSSLHLMQFQANFQAMTAEGEVTMETSQAAEGSEVLLKSGELQACSSEHYLQPETNGVIRSAGGVPILPGNVVQGLYPVAQPSLGNASNMELSLDHFDISFSNQFSDLINDFISVEGGSSTIYGHQLVSGDSTALSQSEDGARAPFTQAEMCLPCCSPQQGSLQLSSSEGGASTMAYMHVAEVVSAASAQGTLGMLQQSGRVFMVTDYSPEWSYPEGGVKVLITGPWQEASNNYSCLFDQISVPASLIQPGVLRCYCPAHDTGLVTLQVAFNNQIISNSVVFEYKARALPTLPSSQHDWLSLDDNQFRMSILERLEQMERRMAEMTGSQQHKQASGGGSSGGGSGSGNGGSQAQCASGTGALGSCFESRVVVVCEKMMSRACWAKSKHLIHSKTFRGMTLLHLAAAQGYATLIQTLIKWRTKHADSIDLELEVDPLNVDHFSCTPLMWACALGHLEAAVVLYKWDRRAISIPDSLGRLPLGIARSRGHVKLAECLEHLQRDEQAQLGQNPRIHCPASEEPSTESWMAQWHSEAISSPEIPKGVTVIASTNPELRRPRSEPSNYYSSESHKDYPAPKKHKLNPEYFQTRQEKLLPTALSLEEPNIRKQSPSSKQSVPETLSPSEGVRDFSRELSPPTPETAAFQASGSQPVGKWNSKDLYIGVSTVQVTGNPKGTSVGKEAAPSQVRPREPMSVLMMANREVVNTELGSYRDSAENEECGQPMDDIQVNMMTLAEHIIEATPDRIKQENFVPMESSGLERTDPATISSTMSWLASYLADADCLPSAAQIRSAYNEPLTPSSNTSLSPVGSPVSEIAFEKPNLPSAADWSEFLSASTSEKVENEFAQLTLSDHEQRELYEAARLVQTAFRKYKGRPLREQQEVAAAVIQRCYRKYKQYALYKKMTQAAILIQSKFRSYYEQKKFQQSRRAAVLIQKYYRSYKKCGKRRQARRTAVIVQQKLRSSLLTKKQDQAARKIMRFLRRCRHSPLVDHRLYKRSERIEKGQGT

SEQ ID NO: 11038 - protein, 92 aa, Homo sapiens
  Payload ID: 2184;
  Gene Symbol: CAMTA1;
  Gene Name: calmodulin binding transcription activator 1;
  ENSP ID: ENSP00000450530
MWRAEGKWLPKTSRKAQGRTDPVSVLMELRGRRTLIKMPYEISAGTQCCEDDHGNSNSSHVKIFLPKKLLECLPKCSSLPKERHRWNTNERS

SEQ ID NO: 11039 - protein, 80 aa, Homo sapiens
  Payload ID: 2184;
  Gene Symbol: CAMTA1;
  Gene Name: calmodulin binding transcription activator 1;
  Uniprot ID:  Q9Y6Y1;
  ENSP ID: ENSP00000451388
MWRAEGKWLPKTSRKSVSQSVFCGTSTYCVLNTVPPIEDDHGNSNSSHVKIFLPKKLLECLPKCSSLPKERHRWNTNERS

SEQ ID NO: 11040 - protein, 39 aa, Homo sapiens
  Payload ID: 2184;
  Gene Symbol: CAMTA1;
  Gene Name: calmodulin binding transcription activator 1;
  ENSP ID: ENSP00000451443
  MOD_RES (1)..(1): Any amino acid
XSSHVKIFLPKKLLECLPKCSSLPKERHRWNTNEVLKFW

SEQ ID NO: 11041 - protein, 101 aa, Homo sapiens
  Payload ID: 2184;
  Gene Symbol: CAMTA1;
  Gene Name: calmodulin binding transcription activator 1;
  Uniprot ID:  Q9Y6Y1;
  ENSP ID: ENSP00000451510
MWRAEGKWLPKTSRKSVSQSVFCGTSTYCVLNTVPPIEDDHGNSNSSHVKIFLPKKLLECLPKCSSLPKERHRWNTNEALTTHLFMGAAKKRDPQSWSHEG

SEQ ID NO: 11042 - protein, 637 aa, Homo sapiens
  Payload ID: 2184;
  Gene Symbol: CAMTA1;
  Gene Name: calmodulin binding transcription activator 1;
  ENSP ID: ENSP00000451720
  MOD_RES (1)..(1): Any amino acid
XMMSRACWAKSKHLIHSKTFRGMTLLHLAAAQGYATLIQTLIKWRTKHADSIDLELEVDPLNVDHFSCTPLMWACALGHLEAAVVLYKWDRRAISIPDSLGRLPLGIARSRGHVKLAECLEHLQRDEQAQLGQNPRIHCPASEEPSTESWMAQWHSEAISSPEIPKGVTVIASTNPELRRPRSEPSNYYSSESHKDYPAPKKHKLNPEYFQTRQEKLLPTALSLEEPNIRKQSPSSKQSVPETLSPSEGVRDFSRELSPPTPETAAFQASGSQPVGKWNSKDLYIGVSTVQVTGNPKGTSVGKEAAPSQVRPREPMSVLMMANREVVNTELGSYRDSAENEECGQPMDDIQVNMMTLAEHIIEATPDRIKQENFVPMESSGLERTDPATISSTMSWLASYLADADCLPSAAQIRSAYNEPLTPSSNTSLSPVGSPVSEIAFEKPNLPSAADWSEFLSASTSEKVENEFAQLTLSDHEQRELYEAARLVQTAFRKYKGRPLREQQEVAAAVIQRCYRKYKQLTWIALKYALYKKMTQAAILIQSKFRSYYEQKKFQQSRRAAVLIQKYYRSYKKCGKRRQARRTAVIVQQKLRSSLLTKKQDQAARKIMRFLRRCRHRVKELKKAKELEDIQQHPLAM

SEQ ID NO: 11043 - protein, 239 aa, Homo sapiens
  Payload ID: 2184;
  Gene Symbol: CAMTA1;
  Gene Name: calmodulin binding transcription activator 1;
  ENSP ID: ENSP00000452024
  MOD_RES (1)..(1): Any amino acid
XSSGLERTDPATISSTMSWLASYLADADCLPSAAQIRLSPVGSPVSEIAFEKPNLPSAADWSEFLSASTSEKVENEFAQLTLSDHEQRELYEAARLVQTAFRKYKGRPLREQQEVAAAVIQRCYRKYKQYALYKKMTQAAILIQSKFRSYYEQKKFQQSRRAAVLIQKYYRSYKKCGKRRQARRTAVIVQQKLRSSLLTKKQDQAARKIMRFLRRCRHRVKELKKAKELEDIQQHPLAM

SEQ ID NO: 11044 - protein, 73 aa, Homo sapiens
  Payload ID: 2184;
  Gene Symbol: CAMTA1;
  Gene Name: calmodulin binding transcription activator 1;
  ENSP ID: ENSP00000452184
WLPKTSRKSVSQSVFCGTSTYCVLNTVPPIEDDHGNSNSSHVKIFLPKKLLECLPKCSSLPKERHRWNTNERS

SEQ ID NO: 11045 - protein, 237 aa, Homo sapiens
  Payload ID: 2184;
  Gene Symbol: CAMTA1;
  Gene Name: calmodulin binding transcription activator 1;
  ENSP ID: ENSP00000452319
MSWLASYLADADCLPSAAQIRSAYNEPLTPSSNTSLSPVGSPVSEIAFEKPNLPSAADWSEFLSASTSEKVENEFAQLTLSDHEQRELYEAARLVQTAFRKYKGRPLREQQEVAAAVIQRCYRKYKQYALYKKMTQAAILIQSKFRSYYEQKKFQQSRRAAVLIQKYYRSYKKCGKRRQARRTAVIVQQKLRSSLLTKKQDQAARKIMRFLRRCRHRVKELKKAKELEDIQQHPLAM

SEQ ID NO: 11046 - protein, 44 aa, Homo sapiens
  Payload ID: 2184;
  Gene Symbol: CAMTA1;
  Gene Name: calmodulin binding transcription activator 1;
  ENSP ID: ENSP00000452505
  MOD_RES (1)..(1): Any amino acid
XGRTDPVSVLMELRGRRTLIKMPYEISAGTQCCEERFPKCILRN

SEQ ID NO: 11047 - protein, 1202 aa, Homo sapiens
  Payload ID: 2185;
  Gene Symbol: CAMTA2;
  Gene Name: calmodulin binding transcription activator 2;
  Uniprot ID:  O94983;
  ENSP ID: ENSP00000321813
MNTKDTTEVAENSHHLKIFLPKKLLECLPRCPLLPPERLRWNTNEEIASYLITFEKHDEWLSCAPKTRPQNGSIILYNRKKVKYRKDGYLWKKRKDGKTTREDHMKLKVQGMECLYGCYVHSSIVPTFHRRCYWLLQNPDIVLVHYLNVPALEDCGKGCSPIFCSISSDRREWLKWSREELLGQLKPMFHGIKWSCGNGTEEFSVEHLVQQILDTHPTKPAPRTHACLCSGGLGSGSLTHKCSSTKHRIISPKVEPRALTLTSIPHAHPPEPPPLIAPLPPELPKAHTSPSSSSSSSSSGFAEPLEIRPSPPTSRGGSSRGGTAILLLTGLEQRAGGLTPTRHLAPQADPRPSMSLAVVVGTEPSAPPAPPSPAFDPDRFLNSPQRGQTYGGGQGVSPDFPEAEAAHTPCSALEPAAALEPQAAARGPPPQSVAGGRRGNCFFIQDDDSGEELKGHGAAPPIPSPPPSPPPSPAPLEPSSRVGRGEALFGGPVGASELEPFSLSSFPDLMGELISDEAPSIPAPTPQLSPALSTITDFSPEWSYPEGGVKVLITGPWTEAAEHYSCVFDHIAVPASLVQPGVLRCYCPAHEVGLVSLQVAGREGPLSASVLFEYRARRFLSLPSTQLDWLSLDDNQFRMSILERLEQMEKRMAEIAAAGQVPCQGPDAPPVQDEGQGPGFEARVVVLVESMIPRSTWKGPERLAHGSPFRGMSLLHLAAAQGYARLIETLSQWRSVETGSLDLEQEVDPLNVDHFSCTPLMWACALGHLEAAVLLFRWNRQALSIPDSLGRLPLSVAHSRGHVRLARCLEELQRQEPSVEPPFALSPPSSSPDTGLSSVSSPSELSDGTFSVTSAYSSAPDGSPPPAPLPASEMTMEDMAPGQLSSGVPEAPLLLMDYEATNSKGPLSSLPALPPASDDGAAPEDADSPQAVDVIPVDMISLAKQIIEATPERIKREDFVGLPEAGASMRERTGAVGLSETMSWLASYLENVDHFPSSTPPSELPFERGRLAVPSAPSWAEFLSASTSGKMESDFALLTLSDHEQRELYEAARVIQTAFRKYKGRRLKEQQEVAAAVIQRCYRKYKQLTWIALKFALYKKMTQAAILIQSKFRSYYEQKRFQQSRRAAVLIQQHYRSYRRRPGPPHRTSATLPARNKGSFLTKKQDQAARKIMRFLRRCRHRMRELKQNQELEGLPQPGLAT

SEQ ID NO: 11048 - protein, 1201 aa, Homo sapiens
  Payload ID: 2185;
  Gene Symbol: CAMTA2;
  Gene Name: calmodulin binding transcription activator 2;
  Uniprot ID:  O94983;
  ENSP ID: ENSP00000354828
MGTDSPSPRPLRPGVTLPPGALTMNTKDTTEVAENSHHLKIFLPKKLLECLPRCPLLPPERLRWNTNEEIASYLITFEKHDEWLSCAPKTRPQNGSIILYNRKKVKYRKDGYLWKKRKDGKTTREDHMKLKVQGMENPDIVLVHYLNVPALEDCGKGCSPIFCSISSDRREWLKWSREELLGQLKPMFHGIKWSCGNGTEEFSVEHLVQQILDTHPTKPAPRTHACLCSGGLGSGSLTHKCSSTKHRIISPKVEPRALTLTSIPHAHPPEPPPLIAPLPPELPKAHTSPSSSSSSSSSGFAEPLEIRPSPPTSRGGSSRGGTAILLLTGLEQRAGGLTPTRHLAPQADPRPSMSLAVVVGTEPSAPPAPPSPAFDPDRFLNSPQRGQTYGGGQGVSPDFPEAEAAHTPCSALEPAAALEPQAAARGPPPQSVAGGRRGNCFFIQDDDSGEELKGHGAAPPIPSPPPSPPPSPAPLEPSSRVGRGEALFGGPVGASELEPFSLSSFPDLMGELISDEAPSIPAPTPQLSPALSTITDFSPEWSYPEGGVKVLITGPWTEAAEHYSCVFDHIAVPASLVQPGVLRCYCPAHEVGLVSLQVAGREGPLSASVLFEYRARRFLSLPSTQLDWLSLDDNQFRMSILERLEQMEKRMAEIAAAGQVPCQGPDAPPVQDEGQGPGFEARVVVLVESMIPRSTWKGPERLAHGSPFRGMSLLHLAAAQGYARLIETLSQWRSVETGSLDLEQEVDPLNVDHFSCTPLMWACALGHLEAAVLLFRWNRQALSIPDSLGRLPLSVAHSRGHVRLARCLEELQRQEPSVEPPFALSPPSSSPDTGLSSVSSPSELSDGTFSVTSAYSSAPDGSPPPAPLPASEMTMEDMAPGQLSSGVPEAPLLLMDYEATNSKGPLSSLPALPPASDDGAAPEDADSPQAVDVIPVDMISLAKQIIEATPERIKREDFVGLPEAGASMRERTGAVGLSETMSWLASYLENVDHFPSSTPPSELPFERGRLAVPSAPSWAEFLSASTSGKMESDFALLTLSDHEQRELYEAARVIQTAFRKYKGRRLKEQQEVAAAVIQRCYRKYKQLTWIALKFALYKKMTQAAILIQSKFRSYYEQKRFQQSRRAAVLIQQHYRSYRRRPGPPHRTSATLPARNKGSFLTKKQDQAARKIMRFLRRCRHRMRELKQNQELEGLPQPGLAT

SEQ ID NO: 11049 - protein, 1197 aa, Homo sapiens
  Payload ID: 2185;
  Gene Symbol: CAMTA2;
  Gene Name: calmodulin binding transcription activator 2;
  Uniprot ID:  O94983;
  ENSP ID: ENSP00000370712
MAAAAVTRGTPGENSHHLKIFLPKKLLECLPRCPLLPPERLRWNTNEEIASYLITFEKHDEWLSCAPKTRPQNGSIILYNRKKVKYRKDGYLWKKRKDGKTTREDHMKLKVQGMECLYGCYVHSSIVPTFHRRCYWLLQNPDIVLVHYLNVPALEDCGKGCSPIFCSISSDRREWLKWSREELLGQLKPMFHGIKWSCGNGTEEFSVEHLVQQILDTHPTKPAPRTHACLCSGGLGSGSLTHKCSSTKHRIISPKVEPRALTLTSIPHAHPPEPPPLIAPLPPELPKAHTSPSSSSSSSSSGFAEPLEIRPSPPTSRGGSSRGGTAILLLTGLEQRAGGLTPTRHLAPQADPRPSMSLAVVVGTEPSAPPAPPSPAFDPDRFLNSPQRGQTYGGGQGVSPDFPEAEAAHTPCSALEPAAALEPQAAARGPPPQSVAGGRRGNCFFIQDDDSGEELKGHGAAPPIPSPPPSPPPSPAPLEPSSRVGRGEALFGGPVGASELEPFSLSSFPDLMGELISDEAPSIPAPTPQLSPALSTITDFSPEWSYPEGGVKVLITGPWTEAAEHYSCVFDHIAVPASLVQPGVLRCYCPAHEVGLVSLQVAGREGPLSASVLFEYRARRFLSLPSTQLDWLSLDDNQFRMSILERLEQMEKRMAEIAAAGQVPCQGPDAPPVQDEGQGPGFEARVVVLVESMIPRSTWKGPERLAHGSPFRGMSLLHLAAAQGYARLIETLSQWRSVETGSLDLEQEVDPLNVDHFSCTPLMWACALGHLEAAVLLFRWNRQALSIPDSLGRLPLSVAHSRGHVRLARCLEELQRQEPSVEPPFALSPPSSSPDTGLSSVSSPSELSDGTFSVTSAYSSAPDGSPPPAPLPASEMTMEDMAPGQLSSGVPEAPLLLMDYEATNSKGPLSSLPALPPASDDGAAPEDADSPQAVDVIPVDMISLAKQIIEATPERIKREDFVGLPEAGASMRERTGAVGLSETMSWLASYLENVDHFPSSTPPSELPFERGRLAVPSAPSWAEFLSASTSGKMESDFALLTLSDHEQRELYEAARVIQTAFRKYKGRRLKEQQEVAAAVIQRCYRKYKQFALYKKMTQAAILIQSKFRSYYEQKRFQQSRRAAVLIQQHYRSYRRRPGPPHRTSATLPARNKGSFLTKKQDQAARKIMRFLRRCRHRMRELKQNQELEGLPQPGLAT

SEQ ID NO: 11050 - protein, 1241 aa, Homo sapiens
  Payload ID: 2185;
  Gene Symbol: CAMTA2;
  Gene Name: calmodulin binding transcription activator 2;
  Uniprot ID:  O94983;
  ENSP ID: ENSP00000412886
MGTDSPSPRPLRPGVTLPPGALTMNTKDTTEVAENSHHLKIFLPKKLLECLPRCPLLPPERLRWNTNEEIASYLITFEKHDEWLSCAPKTRPQNGSIILYNRKKVKYRKDGYLWKKRKDGKTTREDHMKLKVQGMECLYGCYVHSSIVPTFHRRCYWLLQNPDIVLVHYLNVPALEDCGKGCSPIFCSISSDRREWLKWSREELLGQLKPMFHGIKWSCGNGTEEFSVEHLVQQILDTHPTKPAPRTHACLCSGGLGSGSLTHKCSSTKHRIISPKVEPRALTLTSIPHAHPPEPPPLIAPLPPELPKAHTSPSSSSSSSSSGFAEPLEIRPSPPTSRGGSSRGGTAILLLTGLEQRAGGLTPTRHLAPQADPRPSMSLAVVVGTEPSAPPAPPSPAFDPDRFLNSPQRGQTYGGGQGVSPDFPEAEAAHTPCSALEPAAALEPQAAARGPPPQSVAGGRRGNCFFIQDDDSGEELKGHGAAPPIPSPPPSPPPSPAPLEPSSRVGRGEALFGGPVGASELEPFSLSSFPDLMGELISDEAPSIPAPTPQLSPALSTITDFSPEWSYPEGGVKVLITGPWTEAAEHYSCVFDHIAVPASLVQPGVLRCYCPAHEVGLVSLQVAGREGPLSASVLFEYRARRFLSLPSTQLDWLSLDDNQFRMSILERLEQMEKRMAEIAAAGQVPCQGPDAPPVQDEGQGPGFEARVVVLVESMIPRSTWKGPERLAHGSPFRGMSLLHLAAAQGYARLIETLSQWRSVETGSLDLEQEVDPLNVDHFSCTPLMWACALGHLEAAVLLFRWNRQALSIPDSLGRLPLSVAHSRGHVRLARCLEELQRQEPSVEPPFALSPPSSSPDTGLSSVSSPSELSDGTFSVTSAYSSAPDGSPPPAPLPASEMTMEDMAPGQLSSGVPEAPLLLMDYEATNSKGPLSSLPALPPASDDGAAPEDADSPQAVDVIPVDMISLAKQIIEATPERIKREDFVGLPEAGASMRERTGAVGLSETMSWLASYLENVDHFPSSTPPSELPFERGRLAVPSAPSWAEFLSASTSGKMESDFALLTLSDHEQRELYEAARVIQTAFRKYKGRRLKEQQEVAAAVIQRCYRKYKQLTWIALKFALYKKMTQAAILIQSKFRSYYEQKRFQQSRRAAVLIQQHYRSYRRRPGPPHRTSATLPARNKLLSHQEAGPGSPEDHEIPAALPTQDEGTEAEPGAGRASPAGTGHMTWPPPFSPPWGRLVQS

SEQ ID NO: 11051 - protein, 161 aa, Homo sapiens
  Payload ID: 2185;
  Gene Symbol: CAMTA2;
  Gene Name: calmodulin binding transcription activator 2;
  ENSP ID: ENSP00000458560
MNTKDTTEVAENSHHLKIFLPKKLLECLPRCPLLPPERLRWNTNEEIASYLITFEKHDEWLSCAPKTRPQNGSIILYNRKKVKYRKDGYLWKKRKDGKTTREDHMKLKVQGMEGLNRGRVGEQTSPPPTPACLLAVSLWLLRSLFHRPHIPSALLLAAPEP

SEQ ID NO: 11052 - protein, 178 aa, Homo sapiens
  Payload ID: 2185;
  Gene Symbol: CAMTA2;
  Gene Name: calmodulin binding transcription activator 2;
  ENSP ID: ENSP00000459519
KDTTEVAENSHHLKIFLPKKLLECLPRCPLLPPERLRWNTNEEIASYLITFEKHDEWLSCAPKTRPQNGSIILYNRKKVKYRKDGYLWKKRKDGKTTREDHMKLKVQGMEQRPSRVAEVVPGGVVGTAEAHVSWHQVELREWNRRVLCRTPGAADFGHPPNQACSPNPRLSLQWGAWF

SEQ ID NO: 11053 - protein, 163 aa, Homo sapiens
  Payload ID: 2185;
  Gene Symbol: CAMTA2;
  Gene Name: calmodulin binding transcription activator 2;
  ENSP ID: ENSP00000460751
MAAAAVTRGTPGENSHHLKIFLPKKLLECLPRCPLLPPERLRWNTNEEIASYLITFEKHDEWLSCAPKTRPQNGSIILYNRKKVKYRKDGYLWKKRKDGKTTREDHMKLKVQGMEGLNRGRVGEQTSPPPTPACLLAVSLWLLRSLFHRPHIPSALLLAAPEP

SEQ ID NO: 11054 - protein, 1207 aa, Homo sapiens
  Payload ID: 2185;
  Gene Symbol: CAMTA2;
  Gene Name: calmodulin binding transcription activator 2;
  ENSP ID: ENSP00000460779
MNTKDTTEVAENSHHLKIFLPKKLLECLPRCPLLPPERLRWNTNEEIASYLITFEKHDEWLSCAPKTRPQNGSIILYNRKKVKYRKDGYLWKKRKDGKTTREDHMKLKVQGMEPVSWQCLYGCYVHSSIVPTFHRRCYWLLQNPDIVLVHYLNVPALEDCGKGCSPIFCSISSDRREWLKWSREELLGQLKPMFHGIKWSCGNGTEEFSVEHLVQQILDTHPTKPAPRTHACLCSGGLGSGSLTHKCSSTKHRIISPKVEPRALTLTSIPHAHPPEPPPLIAPLPPELPKAHTSPSSSSSSSSSGFAEPLEIRPSPPTSRGGSSRGGTAILLLTGLEQRAGGLTPTRHLAPQADPRPSMSLAVVVGTEPSAPPAPPSPAFDPDRFLNSPQRGQTYGGGQGVSPDFPEAEAAHTPCSALEPAAALEPQAAARGPPPQSVAGGRRGNCFFIQDDDSGEELKGHGAAPPIPSPPPSPPPSPAPLEPSSRVGRGEALFGGPVGASELEPFSLSSFPDLMGELISDEAPSIPAPTPQLSPALSTITDFSPEWSYPEGGVKVLITGPWTEAAEHYSCVFDHIAVPASLVQPGVLRCYCPAHEVGLVSLQVAGREGPLSASVLFEYRARRFLSLPSTQLDWLSLDDNQFRMSILERLEQMEKRMAEIAAAGQVPCQGPDAPPVQDEGQGPGFEARVVVLVESMIPRSTWKGPERLAHGSPFRGMSLLHLAAAQGYARLIETLSQWRSVETGSLDLEQEVDPLNVDHFSCTPLMWACALGHLEAAVLLFRWNRQALSIPDSLGRLPLSVAHSRGHVRLARCLEELQRQEPSVEPPFALSPPSSSPDTGLSSVSSPSELSDGTFSVTSAYSSAPDGSPPPAPLPASEMTMEDMAPGQLSSGVPEAPLLLMDYEATNSKGPLSSLPALPPASDDGAAPEDADSPQAVDVIPVDMISLAKQIIEATPERIKREDFVGLPEAGASMRERTGAVGLSETMSWLASYLENVDHFPSSTPPSELPFERGRLAVPSAPSWAEFLSASTSGKMESDFALLTLSDHEQRELYEAARVIQTAFRKYKGRRLKEQQEVAAAVIQRCYRKYKQLTWIALKFALYKKMTQAAILIQSKFRSYYEQKRFQQSRRAAVLIQQHYRSYRRRPGPPHRTSATLPARNKGSFLTKKQDQAARKIMRFLRRCRHRMRELKQNQELEGLPQPGLAT

SEQ ID NO: 11055 - protein, 1324 aa, Homo sapiens
  Payload ID: 2186;
  Gene Symbol: CAMSAP1;
  Gene Name: calmodulin regulated spectrin-associated prt 1;
  Uniprot ID:  Q5T5Y3;
  ENSP ID: ENSP00000312463
MADSLYNIRLLREFSNEYLNKCFYLTLEDMLYAPLVLKPNVMVFIAELFWWFENVKPDFVQPRDVQELKDAKTVLHQKSSRPPVPISNATKRSFLGSPAAGTLAELQPPVQLPAEGCHRHYLHPEEPEYLGKGTAAFSPSHPLLPLRQKQQKSIQGEDIPDQRHRSNSLTRVDGQPRGAAIAWPEKKTRPASQPTPFALHHAASCEVDPSSGDSISLARSISKDSLASNIVNLTPQNQPHPTATKSHGKSLLSNVSIEDEEEELVAIVRADVVPQQADPEFPRASPRALGLTANARSPQGQLDTSESKPDSFFLEPLMPAVLKPAKEKQVITKEDERGEGRPRSIVSRRPSEGPQPLVRRKMTGSRDLNRTFTPIPCSEFPMGIDPTETGPLSVETAGEVCGGPLALGGFDPFPQGPSTDGFFLHVGRADEDTEGRLYVSCSKSPNSHDSEPWTLLRQDSDSDVVDIEEAEHDFMGEAHPVVFSRYIGEEESAKLQEDMKVKEHEDKDDASGRSSPCLSTASQMSSVSMASGSVKMTSFAERKLQRLNSCETKSSTSSSQKTTPDASESCPAPLTTWRQKREQSPSQHGKDPASLLASELVQLHMQLEEKRRAIEAQKKKMEALSARQRLKLGKAAFLHVVKKGKAEAAPPLRPEHFAKEYSQHNGEDCGDAVSKTEDFLVKEEQREELLHEPQDVDKESLAFAQQHKAKDPVALHELERNKVISAALLEDTVGEVVDVNECDLSIEKLNETISTLQQAILKISQQQEQLLMKSPTVPVPGSKNNSQDHKVKAPVHFVEPLSPTGVAGHRKAPRLGQGRNSRSGRPAELKVPKDRPQGSSRSKTPTPSVETLPHLRPFPASSHPRTPTDPGLDSALEPSGDPHGKCLFDSYRLHDESNQRTLTLSSSKDANILSEQMSLKEVLDASVKEVGSSSSDVSGKESVPVEEPLRSRASLIEVDLSDLKAPDEDGELVSLDGSADLVSEGDQKPGVGFFFKDEQKAEDELAKKRAAFLLKQQRKAEEARVRKQQLEAEVELKRDEARRKAEEDRVRKEEEKARRELIKQEYLRRKQQQILEEQGLGKPKSKPKKPRPKSVHREESCSDSGTKCSSTPDNLSRTQSGSSLSLASAATTEPESVHSGGTPSQRVESMEALPILSRNPSRSTDRDWETASAASSLASVAEYTGPKLFKEPSSKSNKPIIHNAISHCCLAGKVNEPHKNSILEELEKCDANHYIILFRDAGCQFRALYCYYPDTEEIYKLTGTGPKNITKKMIDKLYKYSSDRKQFNLIPAKTMSVSVDALTIHNHLWQPKRPAVPKKAQTRK

SEQ ID NO: 11056 - protein, 1602 aa, Homo sapiens
  Payload ID: 2186;
  Gene Symbol: CAMSAP1;
  Gene Name: calmodulin regulated spectrin-associated prt 1;
  Uniprot ID:  Q5T5Y3;
  ENSP ID: ENSP00000374183
MVDASGRAAAEGWRKMEAPPDGAADLVPLDRYDAARAKIAANLQWICAKAYGRDNIPEDLRDPFYVDQYEQEHIKPPVIKLLLSSELYCRVCSLILKGDQVAALQGHQSVIQALSRKGIYVMESDDTPVTESDLSRAPIKMSAHMAMVDALMMAYTVEMISIEKVVASVKRFSTFSASKELPYDLEDAMVFWINKVNLKMREITEKEVKLKQQLLESPAHQKVRYRREHLSARQSPYFPLLEDLMRDGSDGAALLAVIHYYCPEQMKLDDICLKEVTSMADSLYNIRLLREFSNEYLNKCFYLTLEDMLYAPLVLKPNVMVFIAELFWWFENVKPDFVQPRDVQELKDAKTVLHQKSSRPPVPISNATKRSFLGSPAAGTLAELQPPVQLPAEGCHRHYLHPEEPEYLGKGTAAFSPSHPLLPLRQKQQKSIQGEDIPDQRHRSNSLTRVDGQPRGAAIAWPEKKTRPASQPTPFALHHAASCEVDPSSGDSISLARSISKDSLASNIVNLTPQNQPHPTATKSHGKSLLSNVSIEDEEEELVAIVRADVVPQQADPEFPRASPRALGLTANARSPQGQLDTSESKPDSFFLEPLMPAVLKPAKEKQVITKEDERGEGRPRSIVSRRPSEGPQPLVRRKMTGSRDLNRTFTPIPCSEFPMGIDPTETGPLSVETAGEVCGGPLALGGFDPFPQGPSTDGFFLHVGRADEDTEGRLYVSCSKSPNSHDSEPWTLLRQDSDSDVVDIEEAEHDFMGEAHPVVFSRYIGEEESAKLQEDMKVKEHEDKDDASGRSSPCLSTASQMSSVSMASGSVKMTSFAERKLQRLNSCETKSSTSSSQKTTPDASESCPAPLTTWRQKREQSPSQHGKDPASLLASELVQLHMQLEEKRRAIEAQKKKMEALSARQRLKLGKAAFLHVVKKGKAEAAPPLRPEHFAKEYSQHNGEDCGDAVSKTEDFLVKEEQREELLHEPQDVDKESLAFAQQHKAKDPVALHELERNKVISAALLEDTVGEVVDVNECDLSIEKLNETISTLQQAILKISQQQEQLLMKSPTVPVPGSKNNSQDHKVKAPVHFVEPLSPTGVAGHRKAPRLGQGRNSRSGRPAELKVPKDRPQGSSRSKTPTPSVETLPHLRPFPASSHPRTPTDPGLDSALEPSGDPHGKCLFDSYRLHDESNQRTLTLSSSKDANILSEQMSLKEVLDASVKEVGSSSSDVSGKESVPVEEPLRSRASLIEVDLSDLKAPDEDGELVSLDGSADLVSEGDQKPGVGFFFKDEQKAEDELAKKRAAFLLKQQRKAEEARVRKQQLEAEVELKRDEARRKAEEDRVRKEEEKARRELIKQEYLRRKQQQILEEQGLGKPKSKPKKPRPKSVHREESCSDSGTKCSSTPDNLSRTQSGSSLSLASAATTEPESVHSGGTPSQRVESMEALPILSRNPSRSTDRDWETASAASSLASVAEYTGPKLFKEPSSKSNKPIIHNAISHCCLAGKVNEPHKNSILEELEKCDANHYIILFRDAGCQFRALYCYYPDTEEIYKLTGTGPKNITKKMIDKLYKYSSDRKQFNLIPAKTMSVSVDALTIHNHLWQPKRPAVPKKAQTRK

SEQ ID NO: 11057 - protein, 1613 aa, Homo sapiens
  Payload ID: 2186;
  Gene Symbol: CAMSAP1;
  Gene Name: calmodulin regulated spectrin-associated prt 1;
  Uniprot ID:  Q5T5Y3;
  ENSP ID: ENSP00000386420
MVDASGRAAAEGWRKMEAPPDGAADLVPLDRYDAARAKIAANLQWICAKAYGRDNIPEDLRDPFYVDQYEQEHIKPPVIKLLLSSELYCRVCSLILKGDQVAALQGHQSVIQALSRKGIYVMESDDTPVTESDLSRAPIKMSAHMAMVDALMMAYTVEMISIEKVVASVKRFSTFSASKELPYDLEDAMVFWINKVNLKMREITEKEVKLKQQLLESPAHQKSPSKWYWKLVPVRYRREHLSARQSPYFPLLEDLMRDGSDGAALLAVIHYYCPEQMKLDDICLKEVTSMADSLYNIRLLREFSNEYLNKCFYLTLEDMLYAPLVLKPNVMVFIAELFWWFENVKPDFVQPRDVQELKDAKTVLHQKSSRPPVPISNATKRSFLGSPAAGTLAELQPPVQLPAEGCHRHYLHPEEPEYLGKGTAAFSPSHPLLPLRQKQQKSIQGEDIPDQRHRSNSLTRVDGQPRGAAIAWPEKKTRPASQPTPFALHHAASCEVDPSSGDSISLARSISKDSLASNIVNLTPQNQPHPTATKSHGKSLLSNVSIEDEEEELVAIVRADVVPQQADPEFPRASPRALGLTANARSPQGQLDTSESKPDSFFLEPLMPAVLKPAKEKQVITKEDERGEGRPRSIVSRRPSEGPQPLVRRKMTGSRDLNRTFTPIPCSEFPMGIDPTETGPLSVETAGEVCGGPLALGGFDPFPQGPSTDGFFLHVGRADEDTEGRLYVSCSKSPNSHDSEPWTLLRQDSDSDVVDIEEAEHDFMGEAHPVVFSRYIGEEESAKLQEDMKVKEHEDKDDASGRSSPCLSTASQMSSVSMASGSVKMTSFAERKLQRLNSCETKSSTSSSQKTTPDASESCPAPLTTWRQKREQSPSQHGKDPASLLASELVQLHMQLEEKRRAIEAQKKKMEALSARQRLKLGKAAFLHVVKKGKAEAAPPLRPEHFAKEYSQHNGEDCGDAVSKTEDFLVKEEQREELLHEPQDVDKESLAFAQQHKAKDPVALHELERNKVISAALLEDTVGEVVDVNECDLSIEKLNETISTLQQAILKISQQQEQLLMKSPTVPVPGSKNNSQDHKVKAPVHFVEPLSPTGVAGHRKAPRLGQGRNSRSGRPAELKVPKDRPQGSSRSKTPTPSVETLPHLRPFPASSHPRTPTDPGLDSALEPSGDPHGKCLFDSYRLHDESNQRTLTLSSSKDANILSEQMSLKEVLDASVKEVGSSSSDVSGKESVPVEEPLRSRASLIEVDLSDLKAPDEDGELVSLDGSADLVSEGDQKPGVGFFFKDEQKAEDELAKKRAAFLLKQQRKAEEARVRKQQLEAEVELKRDEARRKAEEDRVRKEEEKARRELIKQEYLRRKQQQILEEQGLGKPKSKPKKPRPKSVHREESCSDSGTKCSSTPDNLSRTQSGSSLSLASAATTEPESVHSGGTPSQRVESMEALPILSRNPSRSTDRDWETASAASSLASVAEYTGPKLFKEPSSKSNKPIIHNAISHCCLAGKVNEPHKNSILEELEKCDANHYIILFRDAGCQFRALYCYYPDTEEIYKLTGTGPKNITKKMIDKLYKYSSDRKQFNLIPAKTMSVSVDALTIHNHLWQPKRPAVPKKAQTRK

SEQ ID NO: 11058 - protein, 1489 aa, Homo sapiens
  Payload ID: 2187;
  Gene Symbol: CAMSAP2;
  Gene Name: calmodulin regulated spectrin-associated prt family, member 2;
  Uniprot ID:  Q08AD1;
  ENSP ID: ENSP00000236925
MGDAADPREMRKTFIVPAIKPFDHYDFSRAKIACNLAWLVAKAFGTENVPEELQEPFYTDQYDQEHIKPPVVNLLLSAELYCRAGSLILKSDAAKPLLGHDAVIQALAQKGLYVTDQEKLVTERDLHKKPIQMSAHLAMIDTLMMAYTVEMVSIEKVIACAQQYSAFFQATDLPYDIEDAVMYWINKVNEHLKDIMEQEQKLKEHHTVEAPGGQKSPSKWFWKLVPARYRKEQTLLKQLPCIPLVENLLKDGTDGCALAALIHFYCPDVVRLEDICLKETMSLADSLYNLQLIQEFCQEYLNQCCHFTLEDMLYAASSIKSNYLVFMAELFWWFEVVKPSFVQPRVVRPQGAEPVKDMPSIPVLNAAKRNVLDSSSDFPSSGEGATFTQSHHHLPSRYSRPQAHSSASGGIRRSSSMSYVDGFIGTWPKEKRSSVHGVSFDISFDKEDSVQRSTPNRGITRSISNEGLTLNNSHVSKHIRKNLSFKPINGEEEAESIEEELNIDSHSDLKSCVPLNTNELNSNENIHYKLPNGALQNRILLDEFGNQIETPSIEEALQIIHDTEKSPHTPQPDQIANGFFLHSQEMSILNSNIKLNQSSPDNVTDTKGALSPITDNTEVDTGIHVPSEDIPETMDEDSSLRDYTVSLDSDMDDASKFLQDYDIRTGNTREALSPCPSTVSTKSQPGSSASSSSGVKMTSFAEQKFRKLNHTDGKSSGSSSQKTTPEGSELNIPHVVAWAQIPEETGLPQGRDTTQLLASEMVHLRMKLEEKRRAIEAQKKKMEAAFTKQRQKMGRTAFLTVVKKKGDGISPLREEAAGAEDEKVYTDRAKEKESQKTDGQRSKSLADIKESMENPQAKWLKSPTTPIDPEKQWNLASPSEETLNEGEILEYTKSIEKLNSSLHFLQQEMQRLSLQQEMLMQMREQQSWVISPPQPSPQKQIRDFKPSKQAGLSSAIAPFSSDSPRPTHPSPQSSNRKSASFSVKSQRTPRPNELKITPLNRTLTPPRSVDSLPRLRRFSPSQVPIQTRSFVCFGDDGEPQLKESKPKEEVKKEELESKGTLEQRGHNPEEKEIKPFESTVSEVLSLPVTETVCLTPNEDQLNQPTEPPPKPVFPPTAPKNVNLIEVSLSDLKPPEKADVPVEKYDGESDKEQFDDDQKVCCGFFFKDDQKAENDMAMKRAALLEKRLRREKETQLRKQQLEAEMEHKKEETRRKTEEERQKKEDERARREFIRQEYMRRKQLKLMEDMDTVIKPRPQVVKQKKQRPKSIHRDHIESPKTPIKGPPVSSLSLASLNTGDNESVHSGKRTPRSESVEGFLSPSRCGSRNGEKDWENASTTSSVASGTEYTGPKLYKEPSAKSNKHIIQNALAHCCLAGKVNEGQKKKILEEMEKSDANNFLILFRDSGCQFRSLYTYCPETEEINKLTGIGPKSITKKMIEGLYKYNSDRKQFSHIPAKTLSASVDAITIHSHLWQTKRPVTPKKLLPTKA

SEQ ID NO: 11059 - protein, 1478 aa, Homo sapiens
  Payload ID: 2187;
  Gene Symbol: CAMSAP2;
  Gene Name: calmodulin regulated spectrin-associated prt family, member 2;
  Uniprot ID:  Q08AD1;
  ENSP ID: ENSP00000351684
MGDAADPREMRKTFIVPAIKPFDHYDFSRAKIACNLAWLVAKAFGTENVPEELQEPFYTDQYDQEHIKPPVVNLLLSAELYCRAGSLILKSDAAKPLLGHDAVIQALAQKGLYVTDQEKLVTERDLHKKPIQMSAHLAMIDTLMMAYTVEMVSIEKVIACAQQYSAFFQATDLPYDIEDAVMYWINKVNEHLKDIMEQEQKLKEHHTVEAPGGQKARYRKEQTLLKQLPCIPLVENLLKDGTDGCALAALIHFYCPDVVRLEDICLKETMSLADSLYNLQLIQEFCQEYLNQCCHFTLEDMLYAASSIKSNYLVFMAELFWWFEVVKPSFVQPRVVRPQGAEPVKDMPSIPVLNAAKRNVLDSSSDFPSSGEGATFTQSHHHLPSRYSRPQAHSSASGGIRRSSSMSYVDGFIGTWPKEKRSSVHGVSFDISFDKEDSVQRSTPNRGITRSISNEGLTLNNSHVSKHIRKNLSFKPINGEEEAESIEEELNIDSHSDLKSCVPLNTNELNSNENIHYKLPNGALQNRILLDEFGNQIETPSIEEALQIIHDTEKSPHTPQPDQIANGFFLHSQEMSILNSNIKLNQSSPDNVTDTKGALSPITDNTEVDTGIHVPSEDIPETMDEDSSLRDYTVSLDSDMDDASKFLQDYDIRTGNTREALSPCPSTVSTKSQPGSSASSSSGVKMTSFAEQKFRKLNHTDGKSSGSSSQKTTPEGSELNIPHVVAWAQIPEETGLPQGRDTTQLLASEMVHLRMKLEEKRRAIEAQKKKMEAAFTKQRQKMGRTAFLTVVKKKGDGISPLREEAAGAEDEKVYTDRAKEKESQKTDGQRSKSLADIKESMENPQAKWLKSPTTPIDPEKQWNLASPSEETLNEGEILEYTKSIEKLNSSLHFLQQEMQRLSLQQEMLMQMREQQSWVISPPQPSPQKQIRDFKPSKQAGLSSAIAPFSSDSPRPTHPSPQSSNRKSASFSVKSQRTPRPNELKITPLNRTLTPPRSVDSLPRLRRFSPSQVPIQTRSFVCFGDDGEPQLKESKPKEEVKKEELESKGTLEQRGHNPEEKEIKPFESTVSEVLSLPVTETVCLTPNEDQLNQPTEPPPKPVFPPTAPKNVNLIEVSLSDLKPPEKADVPVEKYDGESDKEQFDDDQKVCCGFFFKDDQKAENDMAMKRAALLEKRLRREKETQLRKQQLEAEMEHKKEETRRKTEEERQKKEDERARREFIRQEYMRRKQLKLMEDMDTVIKPRPQVVKQKKQRPKSIHRDHIESPKTPIKGPPVSSLSLASLNTGDNESVHSGKRTPRSESVEGFLSPSRCGSRNGEKDWENASTTSSVASGTEYTGPKLYKEPSAKSNKHIIQNALAHCCLAGKVNEGQKKKILEEMEKSDANNFLILFRDSGCQFRSLYTYCPETEEINKLTGIGPKSITKKMIEGLYKYNSDRKQFSHIPAKTLSASVDAITIHSHLWQTKRPVTPKKLLPTKA

SEQ ID NO: 11060 - protein, 133 aa, Homo sapiens
  Payload ID: 2187;
  Gene Symbol: CAMSAP2;
  Gene Name: calmodulin regulated spectrin-associated prt family, member 2;
  ENSP ID: ENSP00000395365
  MOD_RES (1)..(1): Any amino acid
XKETMSLADSLYNLQLIQEFCQEYLNQCCHFTLEDMLYAASSIKSNYLVFMAELFWWFEVVKPSFVQPRVVRPQGAEPVKDMPSIPVLNAAKRNVLDSSSDFPSSGEGATFTQSHHHLPSRYSRPQAHSSASG

SEQ ID NO: 11061 - protein, 1462 aa, Homo sapiens
  Payload ID: 2187;
  Gene Symbol: CAMSAP2;
  Gene Name: calmodulin regulated spectrin-associated prt family, member 2;
  Uniprot ID:  Q08AD1;
  ENSP ID: ENSP00000416800
MGDAADPREMRKTFIVPAIKPFDHYDFSRAKIACNLAWLVAKAFGTENVPEELQEPFYTDQYDQEHIKPPVVNLLLSAELYCRAGSLILKSDAAKPLLGHDAVIQALAQKGLYVTDQEKLVTERDLHKKPIQMSAHLAMIDTLMMAYTVEMVSIEKVIACAQQYSAFFQATDLPYDIEDAVMYWINKVNEHLKDIMEQEQKLKEHHTVEAPGGQKARYRKEQTLLKQLPCIPLVENLLKDGTDGCALAALIHFYCPDVVRLEDICLKETMSLADSLYNLQLIQEFCQEYLNQCCHFTLEDMLYAASSIKSNYLVFMAELFWWFEVVKPSFVQPRVVRPQGAEPVKDMPSIPVLNAAKRNVLDSSSDFPSRYSRPQAHSSASGGIRRSSSMSYVDGFIGTWPKEKRSSVHGVSFDISFDKEDSVQRSTPNRGITRSISNEGLTLNNSHVSKHIRKNLSFKPINGEEEAESIEEELNIDSHSDLKSCVPLNTNELNSNENIHYKLPNGALQNRILLDEFGNQIETPSIEEALQIIHDTEKSPHTPQPDQIANGFFLHSQEMSILNSNIKLNQSSPDNVTDTKGALSPITDNTEVDTGIHVPSEDIPETMDEDSSLRDYTVSLDSDMDDASKFLQDYDIRTGNTREALSPCPSTVSTKSQPGSSASSSSGVKMTSFAEQKFRKLNHTDGKSSGSSSQKTTPEGSELNIPHVVAWAQIPEETGLPQGRDTTQLLASEMVHLRMKLEEKRRAIEAQKKKMEAAFTKQRQKMGRTAFLTVVKKKGDGISPLREEAAGAEDEKVYTDRAKEKESQKTDGQRSKSLADIKESMENPQAKWLKSPTTPIDPEKQWNLASPSEETLNEGEILEYTKSIEKLNSSLHFLQQEMQRLSLQQEMLMQMREQQSWVISPPQPSPQKQIRDFKPSKQAGLSSAIAPFSSDSPRPTHPSPQSSNRKSASFSVKSQRTPRPNELKITPLNRTLTPPRSVDSLPRLRRFSPSQVPIQTRSFVCFGDDGEPQLKESKPKEEVKKEELESKGTLEQRGHNPEEKEIKPFESTVSEVLSLPVTETVCLTPNEDQLNQPTEPPPKPVFPPTAPKNVNLIEVSLSDLKPPEKADVPVEKYDGESDKEQFDDDQKVCCGFFFKDDQKAENDMAMKRAALLEKRLRREKETQLRKQQLEAEMEHKKEETRRKTEEERQKKEDERARREFIRQEYMRRKQLKLMEDMDTVIKPRPQVVKQKKQRPKSIHRDHIESPKTPIKGPPVSSLSLASLNTGDNESVHSGKRTPRSESVEGFLSPSRCGSRNGEKDWENASTTSSVASGTEYTGPKLYKEPSAKSNKHIIQNALAHCCLAGKVNEGQKKKILEEMEKSDANNFLILFRDSGCQFRSLYTYCPETEEINKLTGIGPKSITKKMIEGLYKYNSDRKQFSHIPAKTLSASVDAITIHSHLWQTKRPVTPKKLLPTKA

SEQ ID NO: 11062 - protein, 56 aa, Homo sapiens
  Payload ID: 2187;
  Gene Symbol: CAMSAP2;
  Gene Name: calmodulin regulated spectrin-associated prt family, member 2;
  ENSP ID: ENSP00000434766
  MOD_RES (1)..(1): Any amino acid
XSSVASGTEYTGPKLYKEPSAKSNKHIIQNALAHCCLAGKVNEGQKKKILEVSMFA

SEQ ID NO: 11063 - protein, 1249 aa, Homo sapiens
  Payload ID: 2188;
  Gene Symbol: CAMSAP3;
  Gene Name: calmodulin regulated spectrin-associated prt family, member 3;
  Uniprot ID:  Q9P1Y5;
  ENSP ID: ENSP00000160298
MVEAAPPGPGPLRRTFLVPEIKSLDQYDFSRAKAAASLAWVLRAAFGGAEHVPPELWEPFYTDQYAQEHVKPPVTRLLLSAELYCRAWRQALPQLETPPNPSALLALLARRGTVPALPERPVREADLRHQPILMGAHLAVIDALMAAFAFEWTKTLPGPLALTSLEHKLLFWVDTTVRRLQEKTEQEAAQRASPAAPADGAAPAQPSIRYRKDRVVARRAPCFPTVTSLQDLASGAALAATIHCYCPQLLRLEEVCLKDPMSVADSLYNLQLVQDFCASRLPRGCPLSLEDLLYVPPPLKVNLVVMLAELFMCFEVLKPDFVQVKDLPDGHAASPRGTEASPPQNNSGSSSPVFTFRHPLLSSGGPQSPLRGSTGSLKSSPSMSHMEALGKAWNRQLSRPLSQAVSFSTPFGLDSDVDVVMGDPVLLRSVSSDSLGPPRPAPARTPTQPPPEPGDLPTIEEALQIIHSAEPRLLPDGAADGSFYLHSPEGPSKPSLASPYLPEGTSKPLSDRPTKAPVYMPHPETPSKPSPCLVGEASKPPAPSEGSPKAVASSPAATNSEVKMTSFAERKKQLVKAEAEAGAGSPTSTPAPPEALSSEMSELSARLEEKRRAIEAQKRRIEAIFAKHRQRLGKSAFLQVQPREASGEAEAEAEEADSGPVPGGERPAGEGQGEPTSRPKAVTFSPDLGPVPHEGLGEYNRAVSKLSAALSSLQRDMQRLTDQQQRLLAPPEAPGSAPPPAAWVIPGPTTGPKAASPSPARRVPATRRSPGPGPSQSPRSPKHTRPAELRLAPLTRVLTPPHDVDSLPHLRKFSPSQVPVQTRSSILLAEETPPEEPAARPGLIEIPLGSLADPAAEDEGDGSPAGAEDSLEEEASSEGEPRVGLGFFYKDEDKPEDEMAQKRASLLERQQRRAEEARRRKQWQEVEKEQRREEAARLAQEEAPGPAPLVSAVPMATPAPAARAPAEEEVGPRKGDFTRQEYERRAQLKLMDDLDKVLRPRAAGSGGPGRGGRRATRPRSGCCDDSALARSPARGLLGSRLSKIYSQSTLSLSTVANEAHNNLGVKRPTSRAPSPSGLMSPSRLPGSRERDWENGSNASSPASVPEYTGPRLYKEPSAKSNKFIIHNALSHCCLAGKVNEPQKNRILEEIEKSKANHFLILFRDSSCQFRALYTLSGETEELSRLAGYGPRTVTPAMVEGIYKYNSDRKRFTQIPAKTMSMSVDAFTIQGHLWQGKKPTTPKKGGGTPK

SEQ ID NO: 11064 - protein, 1276 aa, Homo sapiens
  Payload ID: 2188;
  Gene Symbol: CAMSAP3;
  Gene Name: calmodulin regulated spectrin-associated prt family, member 3;
  Uniprot ID:  Q9P1Y5;
  ENSP ID: ENSP00000416797
MVEAAPPGPGPLRRTFLVPEIKSLDQYDFSRAKAAASLAWVLRAAFGGAEHVPPELWEPFYTDQYAQEHVKPPVTRLLLSAELYCRAWRQALPQLETPPNPSALLALLARRGTVPALPERPVREADLRHQPILMGAHLAVIDALMAAFAFEWTKTLPGPLALTSLEHKLLFWVDTTVRRLQEKTEQEAAQRASPAAPADGAAPAQPSCPTRWYWKLVPHAIAFCLKESGSKPPMIRYRKDRVVARRAPCFPTVTSLQDLASGAALAATIHCYCPQLLRLEEVCLKDPMSVADSLYNLQLVQDFCASRLPRGCPLSLEDLLYVPPPLKVNLVVMLAELFMCFEVLKPDFVQVKDLPDGHAASPRGTEASPPQNNSGSSSPVFTFRHPLLSSGGPQSPLRGSTGSLKSSPSMSHMEALGKAWNRQLSRPLSQAVSFSTPFGLDSDVDVVMGDPVLLRSVSSDSLGPPRPAPARTPTQPPPEPGDLPTIEEALQIIHSAEPRLLPDGAADGSFYLHSPEGPSKPSLASPYLPEGTSKPLSDRPTKAPVYMPHPETPSKPSPCLVGEASKPPAPSEGSPKAVASSPAATNSEVKMTSFAERKKQLVKAEAEAGAGSPTSTPAPPEALSSEMSELSARLEEKRRAIEAQKRRIEAIFAKHRQRLGKSAFLQVQPREASGEAEAEAEEADSGPVPGGERPAGEGQGEPTSRPKAVTFSPDLGPVPHEGLGEYNRAVSKLSAALSSLQRDMQRLTDQQQRLLAPPEAPGSAPPPAAWVIPGPTTGPKAASPSPARRVPATRRSPGPGPSQSPRSPKHTRPAELRLAPLTRVLTPPHDVDSLPHLRKFSPSQVPVQTRSSILLAEETPPEEPAARPGLIEIPLGSLADPAAEDEGDGSPAGAEDSLEEEASSEGEPRVGLGFFYKDEDKPEDEMAQKRASLLERQQRRAEEARRRKQWQEVEKEQRREEAARLAQEEAPGPAPLVSAVPMATPAPAARAPAEEEVGPRKGDFTRQEYERRAQLKLMDDLDKVLRPRAAGSGGPGRGGRRATRPRSGCCDDSALARSPARGLLGSRLSKIYSQSTLSLSTVANEAHNNLGVKRPTSRAPSPSGLMSPSRLPGSRERDWENGSNASSPASVPEYTGPRLYKEPSAKSNKFIIHNALSHCCLAGKVNEPQKNRILEEIEKSKANHFLILFRDSSCQFRALYTLSGETEELSRLAGYGPRTVTPAMVEGIYKYNSDRKRFTQIPAKTMSMSVDAFTIQGHLWQGKKPTTPKKGGGTPK

SEQ ID NO: 11065 - protein, 149 aa, Homo sapiens
  Payload ID: 2189;
  Gene Symbol: CALML3;
  Gene Name: calmodulin-like 3;
  Uniprot ID:  P27482;
  ENSP ID: ENSP00000315299
MADQLTEEQVTEFKEAFSLFDKDGDGCITTRELGTVMRSLGQNPTEAELRDMMSEIDRDGNGTVDFPEFLGMMARKMKDTDNEEEIREAFRVFDKDGNGFVSAAELRHVMTRLGEKLSDEEVDEMIRAADTDGDGQVNYEEFVRVLVSK

SEQ ID NO: 11066 - protein, 59 aa, Homo sapiens
  Payload ID: 2190;
  Gene Symbol: CALML4;
  Gene Name: calmodulin-like 4;
  Uniprot ID:  Q96GE6;
  ENSP ID: ENSP00000378848
MAAEHLLPGPPPSLADFRLEAGGKGTERGSGSSKPTGSSRGPRMWMISSGKQISNPMAK

SEQ ID NO: 11067 - protein, 149 aa, Homo sapiens
  Payload ID: 2190;
  Gene Symbol: CALML4;
  Gene Name: calmodulin-like 4;
  Uniprot ID:  Q96GE6;
  ENSP ID: ENSP00000400755
MAAEHLLPGPPPSLADFRLEAGGKGTERGSGSSKPTGSSRGPRMAKFLSQDQINDGNGELDFSTFLTIMHMQIKQEDPKKEILLAMLMVDKEKKGYVMASDLRSKLTSLGEKLTHKEVDDLFREADIEPNGKVKYDEFIHKITLPGRDY

SEQ ID NO: 11068 - protein, 196 aa, Homo sapiens
  Payload ID: 2190;
  Gene Symbol: CALML4;
  Gene Name: calmodulin-like 4;
  Uniprot ID:  Q96GE6;
  ENSP ID: ENSP00000419081
MAAEHLLPGPPPSLADFRLEAGGKGTERGSGSSKPTGSSRGPRMAKFLSQDQINEYKECFSLYDKQQRGKIKATDLMVAMRCLGASPTPGEVQRHLQTHGIDGNGELDFSTFLTIMHMQIKQEDPKKEILLAMLMVDKEKKGYVMASDLRSKLTSLGEKLTHKEVDDLFREADIEPNGKVKYDEFIHKITLPGRDY

SEQ ID NO: 11069 - protein, 29 aa, Homo sapiens
  Payload ID: 2190;
  Gene Symbol: CALML4;
  Gene Name: calmodulin-like 4;
  ENSP ID: ENSP00000432629
ERGSGSSKPTGSSRGPRMTEMESWISPLF

SEQ ID NO: 11070 - protein, 60 aa, Homo sapiens
  Payload ID: 2190;
  Gene Symbol: CALML4;
  Gene Name: calmodulin-like 4;
  ENSP ID: ENSP00000435285
MAAEHLLPGPPPSLADFRLEAGGKGTERGSGSSKPTGSSRGPRMSTRNASPCMTSSRGGR

SEQ ID NO: 11071 - protein, 120 aa, Homo sapiens
  Payload ID: 2190;
  Gene Symbol: CALML4;
  Gene Name: calmodulin-like 4;
  Uniprot ID:  Q96GE6;
  ENSP ID: ENSP00000438177
MVAMRCLGASPTPGEVQRHLQTHGIDGNGELDFSTFLTIMHMQIKQEDPKKEILLAMLMVDKEKKGYVMASDLRSKLTSLGEKLTHKEVDDLFREADIEPNGKVKYDEFIHKITLPGRDY

SEQ ID NO: 11072 - protein, 88 aa, Homo sapiens
  Payload ID: 2190;
  Gene Symbol: CALML4;
  Gene Name: calmodulin-like 4;
  ENSP ID: ENSP00000456532
MVAMRCLGASPTPGEVQRHLQTHGIDGNGELDFSTFLTIMHMQIKQEDPKKEILLAMLMVDKEKKGYVMASDLRSKLTSLGEKLTHKE

SEQ ID NO: 11073 - protein, 146 aa, Homo sapiens
  Payload ID: 2191;
  Gene Symbol: CALML5;
  Gene Name: calmodulin-like 5;
  Uniprot ID:  Q9NZT1;
  ENSP ID: ENSP00000369689
MAGELTPEEEAQYKKAFSAVDTDGNGTINAQELGAALKATGKNLSEAQLRKLISEVDSDGDGEISFQEFLTAAKKARAGLEDLQVAFRAFDQDGDGHITVDELRRAMAGLGQPLPQEELDAMIREADVDQDGRVNYEEFARMLAQE

SEQ ID NO: 11074 - protein, 181 aa, Homo sapiens
  Payload ID: 2192;
  Gene Symbol: CALML6;
  Gene Name: calmodulin-like 6;
  Uniprot ID:  Q8TD86;
  ENSP ID: ENSP00000304643
MGLQQEISLQPWCHHPAESCQTTTDMTERLSAEQIKEYKGVFEMFDEEGNGEVKTGELEWLMSLLGINPTKSELASMAKDVDRDNKGFFNCDGFLALMGVYHEKAQNQESELRAAFRVFDKEGKGYIDWNTLKYVLMNAGEPLNEVEAEQMMKEADKDGDRTIDYEEFVAMMTGESFKLIQ

SEQ ID NO: 11075 - protein, 164 aa, Homo sapiens
  Payload ID: 2192;
  Gene Symbol: CALML6;
  Gene Name: calmodulin-like 6;
  ENSP ID: ENSP00000367867
MGLQQEISLTERLSAEQIKEYKGVFEMFDEEGNGEVKTGELEWLMSLLGINPTKSELASMAKDVDRDNKGFFNCDGFLALMGVYHEKAQNQESELRAAFRVFDKEGKGYIDWNTLKYVLMNAGEPLNEVEAEQMMKEADKDGDRTIDYEEFVAMMTGESFKLIQ

SEQ ID NO: 11076 - protein, 323 aa, Homo sapiens [sequence omitted]

SEQ ID NO: 11077 - protein, 136 aa, Homo sapiens
  Payload ID: 2193;
  Gene Symbol: CAMKMT;
  Gene Name: calmodulin-lysine N- methyltransferase;
  ENSP ID: ENSP00000384039
MESRVADAGTGETARAAGGSPAVGCTTRGPVVSAPLGAARWKLLRQVLKQKHLDDCLRHVSVRRFESFNLFSVTEGKERETEEEVGAWVQYTSIFCPEYSISLRHNSGSLNVEDVLTSFDNTGNVYDVSLYCPCWS

SEQ ID NO: 11078 - protein, 132 aa, Homo sapiens
  Payload ID: 2193;
  Gene Symbol: CAMKMT;
  Gene Name: calmodulin-lysine N- methyltransferase;
  Uniprot ID:  Q7Z624;
  ENSP ID: ENSP00000385124
MESRVADAGTGETARAAGGSPAVGCTTRGPVVSAPLGAARWKLLRQVLKQKHLDDCLRHVSVRRFESFNLFSVTEGKERETEEEVGAWVQYTSIFCPEYSISLRHNSGSLNVEDVLTSFDNTGNVWEATRGK

SEQ ID NO: 11079 - protein, 139 aa, Homo sapiens
  Payload ID: 2193;
  Gene Symbol: CAMKMT;
  Gene Name: calmodulin-lysine N- methyltransferase;
  ENSP ID: ENSP00000385587
MESRVADAGTGETARAAGGSPAVGCTTRGPVVSAPLGAARWKLLRQVLKQKHLDDCLRHVSVRRFESFNLFSVTEGKERETEEEVGAWVQYTSIFCPEYSISLRHNSGSLNVEDVLTSFDNTGNVYTGSHSVAQAGVQW

SEQ ID NO: 11080 - protein, 93 aa, Homo sapiens
  Payload ID: 2193;
  Gene Symbol: CAMKMT;
  Gene Name: calmodulin-lysine N- methyltransferase;
  ENSP ID: ENSP00000406936
  MOD_RES (1)..(1): Any amino acid
XAPLGAARWKLLRQVLKQKHLDDCLRHVSVRRFESFNLFSVTEGKERETEEEVGAWVQYTSIFCPEYSISLRHNSGSLNVEDVLTSFDNTGNV

SEQ ID NO: 11081 - protein, 71 aa, Homo sapiens
  Payload ID: 2193;
  Gene Symbol: CAMKMT;
  Gene Name: calmodulin-lysine N- methyltransferase;
  ENSP ID: ENSP00000407594
  MOD_RES (1)..(1): Any amino acid
XCLRHVSVRRFESFNLFSVTEGKERETEEEVGAWVQYTSIFCPEYSISLRHNSGSLNVEDVLTSFDNTGNV

SEQ ID NO: 11082 - protein, 83 aa, Homo sapiens
  Payload ID: 2193;
  Gene Symbol: CAMKMT;
  Gene Name: calmodulin-lysine N- methyltransferase;
  ENSP ID: ENSP00000410783
  MOD_RES (1)..(1): Any amino acid
XRHVSVRRFESFNLFSVTEGKERETEEEVGAWVQYTSIFCPEYSISLRHNSGSLNVEDVLTSFDNTGNVYTGSHSVAQAGVQW

SEQ ID NO: 11083 - protein, 197 aa, Homo sapiens
  Payload ID: 2193;
  Gene Symbol: CAMKMT;
  Gene Name: calmodulin-lysine N- methyltransferase;
  ENSP ID: ENSP00000482360
IWPSEEVLAYYCLKHNNIFRALAVCELGGGMTCLAGLMVAISADVKEVLLTDGNEKAIRNVQDIITRNQKAGVFKTQKISSCVLRWDNETDVSQLEGHFDIVMCADCLFLDQYRASLVDAIKRLLQPRGKAMVFAPRRGNTLNQFCNLAEKAGFCIQRHENYDEHISNFHSKLKKENPDIYEENLHYPLLLILTKHG

SEQ ID NO: 11084 - protein, 219 aa, Homo sapiens
  Payload ID: 2194;
  Gene Symbol: CALN1;
  Gene Name: calneuron 1;
  Uniprot ID:  Q9BXU9;
  ENSP ID: ENSP00000332498
MPFHHVTAGLLYKGNYLNRSLSAGSDSEQLANISVEELDEIREAFRVLDRDGNGFISKQELGMAMRSLGYMPSEVELAIIMQRLDMDGDGQVDFDEFMTILGPKLVSSEGRDGFLGNTIDSIFWQFDMQRITLEELKHILYHAFRDHLTMKDIENIIINEEESLNETSGNCQTEFEGVHSQKQNRQTCVRKSLICAFAMAFIISVMLIAANQILRSGME

SEQ ID NO: 11085 - protein, 261 aa, Homo sapiens
  Payload ID: 2194;
  Gene Symbol: CALN1;
  Gene Name: calneuron 1;
  Uniprot ID:  Q9BXU9;
  ENSP ID: ENSP00000378690
MRLPEQPGEGKPENEKKGDGGALGGGEEPPRSQAPDFPTWEKMPFHHVTAGLLYKGNYLNRSLSAGSDSEQLANISVEELDEIREAFRVLDRDGNGFISKQELGMAMRSLGYMPSEVELAIIMQRLDMDGDGQVDFDEFMTILGPKLVSSEGRDGFLGNTIDSIFWQFDMQRITLEELKHILYHAFRDHLTMKDIENIIINEEESLNETSGNCQTEFEGVHSQKQNRQTCVRKSLICAFAMAFIISVMLIAANQILRSGME

SEQ ID NO: 11086 - protein, 219 aa, Homo sapiens; identical to SEQ ID NO: 11084
  Payload ID: 2194;
  Gene Symbol: CALN1;
  Gene Name: calneuron 1;
  Uniprot ID:  Q9BXU9;
  ENSP ID: ENSP00000378691

SEQ ID NO: 11087 - protein, 95 aa, Homo sapiens
  Payload ID: 2194;
  Gene Symbol: CALN1;
  Gene Name: calneuron 1;
  ENSP ID: ENSP00000384354
QFDMQRITLEELKHILYHAFRDHLTMKDIENIIINEEESLNETSGNCQTEFEGVHSQKQNRQTCVRKSLICAFAMAFIISVMLIAANQILRSGME

SEQ ID NO: 11088 - protein, 219 aa, Homo sapiens; identical to SEQ ID NO: 11084
  Payload ID: 2194;
  Gene Symbol: CALN1;
  Gene Name: calneuron 1;
  Uniprot ID:  Q9BXU9;
  ENSP ID: ENSP00000410704

SEQ ID NO: 11089 - protein, 125 aa, Homo sapiens
  Payload ID: 2194;
  Gene Symbol: CALN1;
  Gene Name: calneuron 1;
  ENSP ID: ENSP00000411806
MPFHHVTAGLLYKGNYLNRSLSAGSDSEQLANISVEELDEIREAFRVLDRDGNGFISKQELGMAMRSLGYMPSEVELAIIMQRLDMDGDGQVDFDEFMTILGPKLVSSEGRDGFLGNTIDSIFWQ

SEQ ID NO: 11090 - protein, 592 aa, Homo sapiens
  Payload ID: 2195;
  Gene Symbol: CANX;
  Gene Name: calnexin;
  Uniprot ID:  P27824;
  ENSP ID: ENSP00000247461
MEGKWLLCMLLVLGTAIVEAHDGHDDDVIDIEDDLDDVIEEVEDSKPDTTAPPSSPKVTYKAPVPTGEVYFADSFDRGTLSGWILSKAKKDDTDDEIAKYDGKWEVEEMKESKLPGDKGLVLMSRAKHHAISAKLNKPFLFDTKPLIVQYEVNFQNGIECGGAYVKLLSKTPELNLDQFHDKTPYTIMFGPDKCGEDYKLHFIFRHKNPKTGIYEEKHAKRPDADLKTYFTDKKTHLYTLILNPDNSFEILVDQSVVNSGNLLNDMTPPVNPSREIEDPEDRKPEDWDERPKIPDPEAVKPDDWDEDAPAKIPDEEATKPEGWLDDEPEYVPDPDAEKPEDWDEDMDGEWEAPQIANPRCESAPGCGVWQRPVIDNPNYKGKWKPPMIDNPSYQGIWKPRKIPNPDFFEDLEPFRMTPFSAIGLELWSMTSDIFFDNFIICADRRIVDDWANDGWGLKKAADGAAEPGVVGQMIEAAEERPWLWVVYILTVALPVFLVILFCCSGKKQTSGMEYKKTDAPQPDVKEEEEEKEEEKDKGDEEEEGEEKLEEKQKSDAEEDGGTVSQEEEDRKPKAEEDEILNRSPRNRKPRRE

SEQ ID NO: 11091 - protein, 592 aa, Homo sapiens; identical to SEQ ID NO: 11090
  Payload ID: 2195;
  Gene Symbol: CANX;
  Gene Name: calnexin;
  Uniprot ID:  P27824;
  ENSP ID: ENSP00000391646

SEQ ID NO: 11092 - protein, 308 aa, Homo sapiens
  Payload ID: 2195;
  Gene Symbol: CANX;
  Gene Name: calnexin;
  ENSP ID: ENSP00000421107
MEGKWLLCMLLVLGTAIVEAHDGHDDDVIDIEDDLDDVIEEVEEMKESKLPGDKGLVLMSRAKHHAISAKLNKPFLFDTKPLIVQYEVNFQNGIECGGAYVKLLSKTPELNLDQFHDKTPYTIMFGPDKCGEDYKLHFIFRHKNPKTGIYEEKHAKRPDADLKTYFTDKKTHLYTLILNPDNSFEILVDQSVVNSGNLLNDMTPPVNPSREIEDPEDRKPEDWDERPKIPDPEAVKPDDWDEDAPAKIPDEEATKPEGWLDDEPEYVPDPDAEKPEDWDEDMDGEWEAPQIANPRCESAPGCGVWQRP

SEQ ID NO: 11093 - protein, 32 aa, Homo sapiens
  Payload ID: 2195;
  Gene Symbol: CANX;
  Gene Name: calnexin;
  ENSP ID: ENSP00000421434
MEGKWLLCMLLVLGTAIVEAHDGHDDDVIDIE

SEQ ID NO: 11094 - protein, 107 aa, Homo sapiens
  Payload ID: 2195;
  Gene Symbol: CANX;
  Gene Name: calnexin;
  ENSP ID: ENSP00000421813
MEGKWLLCMLLVLGTAIVEAHDGHDDDVIDIEDDLDDVIEEVEDSKPDTTAPPSSPKVTYKAPVPTGEVYFADSFDRGTLSGWILSKAKKDDTDDEIAKYDGKWEVE

SEQ ID NO: 11095 - protein, 592 aa, Homo sapiens; identical to SEQ ID NO: 11090
  Payload ID: 2195;
  Gene Symbol: CANX;
  Gene Name: calnexin;
  Uniprot ID:  P27824;
  ENSP ID: ENSP00000424063

SEQ ID NO: 11096 - protein, 189 aa, Homo sapiens
  Payload ID: 2195;
  Gene Symbol: CANX;
  Gene Name: calnexin;
  ENSP ID: ENSP00000424140
  MOD_RES (1)..(1): Any amino acid
XGLVLMSRAKHHAISAKLNKPFLFDTKPLIVQYEVNFQNGIECGGAYVKLLSKTPELNLDQFHDKTPYTIMFGPDKCGEDYKLHFIFRHKNPKTGIYEEKHAKRPDADLKTYFTDKKTHLYTLKSRGTNHLCFVHKEMGVSFPKTPGARHCSYPKASVLNPDNSFEILVDQSVVNSGNLLNDMTPPVNP

SEQ ID NO: 11097 - protein, 144 aa, Homo sapiens
  Payload ID: 2195;
  Gene Symbol: CANX;
  Gene Name: calnexin;
  ENSP ID: ENSP00000424341
MEGKWLLCMLLVLGTAIVEAHDGHDDDVIDIEDDLDDVIEEVEDSKPDTTAPPSSPKVTYKAPVPTGEVYFADSFDRGTLSGWILSKAKKDDTDDEIAKYDGKWEVEEMKESKLPGDKGLVLMSRAKHHAISAKLNKPFLFDTK

SEQ ID NO: 11098 - protein, 170 aa, Homo sapiens
  Payload ID: 2195;
  Gene Symbol: CANX;
  Gene Name: calnexin;
  ENSP ID: ENSP00000424740
  MOD_RES (1)..(1): Any amino acid
XLYCGAGQGVRAGRGTGTPAVPGRLEVTYKAPVPTGEVYFADSFDRGTLSGWILSKAKKDDTDDEIAKYDGKWEVEEMKESKLPGDKGLVLMSRAKHHAISAKLNKPFLFDTKPLIVQYEVNFQNGIECGGAYVKLLSKTPELNLDQFHDKTPYTIMFGPDKCGEDYKLH

SEQ ID NO: 11099 - protein, 134 aa, Homo sapiens
  Payload ID: 2195;
  Gene Symbol: CANX;
  Gene Name: calnexin;
  ENSP ID: ENSP00000424745
MEGKWLLCMLLVLGTAIVEAHDGHDDDVIDIEDDLDDVIEEVEDSKPDTTAPPSSPKVTYKAPVPTGEVYFADSFDRGTLSGWILSKAKKDDTDDEIAKYDGKWEVEEMKESKLPGDKGLVLMSRAKHHAISAK

SEQ ID NO: 11100 - protein, 168 aa, Homo sapiens
  Payload ID: 2195;
  Gene Symbol: CANX;
  Gene Name: calnexin;
  ENSP ID: ENSP00000425246
MEGKWLLCMLLVLGTAIVEAHDGHDDDVIDIEDDLDDVIEEVEDSKPDTTAPPSSPKVTYKAPVPTGEVYFADSFDRGTLSGWILSKAKKDDTDDEIAKYDGKWEVEEMKESKLPGDKGLVLMSRAKHHAISAKLNKPFLFDTKPLIVQYEVNFQNGIECGGAYVKLL

SEQ ID NO: 11101 - protein, 78 aa, Homo sapiens
  Payload ID: 2195;
  Gene Symbol: CANX;
  Gene Name: calnexin;
  ENSP ID: ENSP00000426052
MEGKWLLCMLLVLGTAIVEAHDGHDDDVIDIEDDLDDVIEEVEDSKPDTTAPPSSPKVTYKAPVPTGEVYFADSFDRG

SEQ ID NO: 11102 - protein, 61 aa, Homo sapiens
  Payload ID: 2195;
  Gene Symbol: CANX;
  Gene Name: calnexin;
  ENSP ID: ENSP00000426425
MEGKWLLCMLLVLGTAIVEAHDGHDDDVIDIEDDLDDVIEEVEDSKPDTTAPPSSPKESGR

SEQ ID NO: 11103 - protein, 131 aa, Homo sapiens
  Payload ID: 2195;
  Gene Symbol: CANX;
  Gene Name: calnexin;
  ENSP ID: ENSP00000426555
MKESKLPGDKGLVLMSRAKHHAISAKLNKPFLFDTKPLIVQYEVNFQNGIECGGAYVKLLSKTPELNLDQFHDKTPYTIMFGPDKCGEDYKLHFIFRHKNPKTGIYEEKHAKRPDADLKTYFTDKKTHLYT

SEQ ID NO: 11104 - protein, 96 aa, Homo sapiens
  Payload ID: 2195;
  Gene Symbol: CANX;
  Gene Name: calnexin;
  ENSP ID: ENSP00000427115
MEGKWLLCMLLVLGTAIVEAHDGHDDDVIDIEDDLDDVIEEVEDSKPDTTAPPSSPKVTYKAPVPTGEVYFADSFDRGTLSGKVGGRGNEGVKASR

SEQ ID NO: 11105 - protein, 714 aa, Homo sapiens
  Payload ID: 2196;
  Gene Symbol: CAPN1;
  Gene Name: calpain 1, (mu/I) large subunit;
  Uniprot ID:  P07384;
  ENSP ID: ENSP00000279247
MSEEIITPVYCTGVSAQVQKQRARELGLGRHENAIKYLGQDYEQLRVRCLQSGTLFRDEAFPPVPQSLGYKDLGPNSSKTYGIKWKRPTELLSNPQFIVDGATRTDICQGALGDCWLLAAIASLTLNDTLLHRVVPHGQSFQNGYAGIFHFQLWQFGEWVDVVVDDLLPIKDGKLVFVHSAEGNEFWSALLEKAYAKVNGSYEALSGGSTSEGFEDFTGGVTEWYELRKAPSDLYQIILKALERGSLLGCSIDISSVLDMEAITFKKLVKGHAYSVTGAKQVNYRGQVVSLIRMRNPWGEVEWTGAWSDSSSEWNNVDPYERDQLRVKMEDGEFWMSFRDFMREFTRLEICNLTPDALKSRTIRKWNTTLYEGTWRRGSTAGGCRNYPATFWVNPQFKIRLDETDDPDDYGDRESGCSFVLALMQKHRRRERRFGRDMETIGFAVYEVPPELVGQPAVHLKRDFFLANASRARSEQFINLREVSTRFRLPPGEYVVVPSTFEPNKEGDFVLRFFSEKSAGTVELDDQIQANLPDEQVLSEEEIDENFKALFRQLAGEDMEISVKELRTILNRIISKHKDLRTKGFSLESCRSMVNLMDRDGNGKLGLVEFNILWNRIRNYLSIFRKFDLDKSGSMSAYEMRMAIESAGFKLNKKLYELIITRYSEPDLAVDFDNFVCCLVRLETMFRFFKTLDTDLDGVVTFDLFKWLQLTMFA

SEQ ID NO: 11106 - protein, 152 aa, Homo sapiens
  Payload ID: 2196;
  Gene Symbol: CAPN1;
  Gene Name: calpain 1, (mu/I) large subunit;
  ENSP ID: ENSP00000431172
MSEEIITPVYCTGVSAQVQKQRARELGLGRHENAIKYLGQDYEQLRVRCLQSGTLFRDEAFPPVPQSLGYKDLGPNSSKTYGIKWKRPTELLSNPQFIVDGATRTDICQGALGDCWLLAAIASLTLNDTLLHRVVPHGQSFQNGYAGIFHFQ

SEQ ID NO: 11107 - protein, 161 aa, Homo sapiens
  Payload ID: 2196;
  Gene Symbol: CAPN1;
  Gene Name: calpain 1, (mu/I) large subunit;
  ENSP ID: ENSP00000431528
MSEEIITPVYCTGVSAQVQKQRARELGLGRHENAIKYLGQDYEQLRVRCLQSGTLFRDEAFPPVPQSLGYKDLGPNSSKTYGIKWKRPTELLSNPQFIVDGATRTDICQGALGDCWLLAAIASLTLNDTLLHRVVPHGQSFQNGYAGIFHFQLWQFGEWVD

SEQ ID NO: 11108 - protein, 714 aa, Homo sapiens; identical to SEQ ID NO: 11105
  Payload ID: 2196;
  Gene Symbol: CAPN1;
  Gene Name: calpain 1, (mu/I) large subunit;
  Uniprot ID:  P07384;
  ENSP ID: ENSP00000431686

SEQ ID NO: 11109 - protein, 135 aa, Homo sapiens
  Payload ID: 2196;
  Gene Symbol: CAPN1;
  Gene Name: calpain 1, (mu/I) large subunit;
  ENSP ID: ENSP00000431793
MSEEIITPVYCTGVSAQVQKQRARELGLGRHENAIKYLGQDYEQLRVRCLQSGTLFRDEAFPPVPQSLGYKDLGPNSSKTYGIKWKRPTELLSNPQFIVDGATRTDICQGALGDCWLLAAIASLTLNDTLLHRVV

SEQ ID NO: 11110 - protein, 714 aa, Homo sapiens; identical to SEQ ID NO: 11105
  Payload ID: 2196;
  Gene Symbol: CAPN1;
  Gene Name: calpain 1, (mu/I) large subunit;
  Uniprot ID:  P07384;
  ENSP ID: ENSP00000431984

SEQ ID NO: 11111 - protein, 191 aa, Homo sapiens
  Payload ID: 2196;
  Gene Symbol: CAPN1;
  Gene Name: calpain 1, (mu/I) large subunit;
  ENSP ID: ENSP00000432512
MSEEIITPVYCTGVSAQVQKQRARELGLGRHENAIKYLGQDYEQLRVRCLQSGTLFRDEAFPPVPQSLGYKDLGPNSSKTYGIKWKRPTELLSNPQFIVDGATRTDICQGALGDCWLLAAIASLTLNDTLLHRVVPHGQSFQNGYAGIFHFQLWQFGEWVDVVVDDLLPIKDGKLVFVHSAEGNEFWSALL

SEQ ID NO: 11112 - protein, 191 aa, Homo sapiens
  Payload ID: 2196;
  Gene Symbol: CAPN1;
  Gene Name: calpain 1, (mu/I) large subunit;
  ENSP ID: ENSP00000433366
MCIPPAPGDCWLLAAIASLTLNDTLLHRVVPHGQSFQNGYAGIFHFQLWQFGEWVDVVVDDLLPIKDGKLVFVHSAEGNEFWSALLEKAYAKVNGSYEALSGGSTSEGFEDFTGGVTEWYELRKAPSDLYQIILKALERGSLLGCSIDISSVLDMEAITFKKLVKGHAYSVTGAKQVNYRGQVVSLIRMRN

SEQ ID NO: 11113 - protein, 161 aa, Homo sapiens; identical to SEQ ID NO: 11107
  Payload ID: 2196;
  Gene Symbol: CAPN1;
  Gene Name: calpain 1, (mu/I) large subunit;
  ENSP ID: ENSP00000433823

SEQ ID NO: 11114 - protein, 714 aa, Homo sapiens; identical to SEQ ID NO: 11105
  Payload ID: 2196;
  Gene Symbol: CAPN1;
  Gene Name: calpain 1, (mu/I) large subunit;
  Uniprot ID:  P07384;
  ENSP ID: ENSP00000434176

SEQ ID NO: 11115 - protein, 122 aa, Homo sapiens
  Payload ID: 2196;
  Gene Symbol: CAPN1;
  Gene Name: calpain 1, (mu/I) large subunit;
  ENSP ID: ENSP00000435092
MSEEIITPVYCTGVSAQVQKQRARELGLGRHENAIKYLGQDYEQLRVRCLQSGTLFRDEAFPPVPQSLGYKDLGPNSSKTYGIKWKRPTELLSNPQFIVDGATRTDICQGALGDCWLLAAIA

SEQ ID NO: 11116 - protein, 148 aa, Homo sapiens
  Payload ID: 2196;
  Gene Symbol: CAPN1;
  Gene Name: calpain 1, (mu/I) large subunit;
  ENSP ID: ENSP00000435198
MSEEIITPVYCTGVSAQVQKQRARELGLGRHENAIKYLGQDYEQLRVRCLQSGTLFRDEAFPPVPQSLGYKDLGPNSSKTYGIKWKRPTELLSNPQFIVDGATRTDICQGALGDCWLLAAIASLTLNDTLLHRVVPHGQSFQNGYAGI

SEQ ID NO: 11117 - protein, 714 aa, Homo sapiens; identical to SEQ ID NO: 11105
  Payload ID: 2196;
  Gene Symbol: CAPN1;
  Gene Name: calpain 1, (mu/I) large subunit;
  Uniprot ID:  P07384;
  ENSP ID: ENSP00000435272

SEQ ID NO: 11118 - protein, 163 aa, Homo sapiens
  Payload ID: 2196;
  Gene Symbol: CAPN1;
  Gene Name: calpain 1, (mu/I) large subunit;
  ENSP ID: ENSP00000435847
MSEEIITPVYCTGVSAQVQKQRARELGLGRHENAIKYLGQDYEQLRVRCLQSGTLFRDEAFPPVPQSLGYKDLGPNSSKTYGIKWKRPTELLSNPQFIVDGATRTDICQGALGDCWLLAAIASLTLNDTLLHRVVPHGQSFQNGYAGIFHFQLWQFGEWVDVV

SEQ ID NO: 11119 - protein, 201 aa, Homo sapiens
  Payload ID: 2196;
  Gene Symbol: CAPN1;
  Gene Name: calpain 1, (mu/I) large subunit;
  ENSP ID: ENSP00000436002
MSEEIITPVYCTGVSAQVQKQRARELGLGRHENAIKYLGQDYEQLRVRCLQSGTLFRDEAFPPVPQSLGYKDLGPNSSKTYGIKWKRPTELLSNPQFIVDGATRTDICQGALGDCWLLAAIASLTLNDTLLHRVVPHGQSFQNGYAGIFHFQLWQFGEWVDVVVDDLLPIKDGKLVFVHSAEGNEFWSALLEKAYAKSPAF

SEQ ID NO: 11120 - protein, 63 aa, Homo sapiens
  Payload ID: 2196;
  Gene Symbol: CAPN1;
  Gene Name: calpain 1, (mu/I) large subunit;
  ENSP ID: ENSP00000436693
MSEEIITPVYCTGVSAQVQKQRARELGLGRHENAIKYLGQDYEQLRVRCLQSGTLFRDEAFPP

SEQ ID NO: 11121 - protein, 274 aa, Homo sapiens
  Payload ID: 2197;
  Gene Symbol: CAPN10;
  Gene Name: calpain 10;
  Uniprot ID:  Q9HC96;
  ENSP ID: ENSP00000270361
MRAGRGATPARELFRDAAFPAADSSLFCDLSTPLAQFREDITWRRPQEICATPRLFPDDPREGQVKQGLLGDCWFLCACAALQKSRHLLDQVIPPGQPSWADQEYRGSFTCRIWQFGRWVEVTTDDRLPCLAGRLCFSRCQREDVFWLPLLEKGPWVLRAPVGRAGGGCPGGPDRRPGRKMEPEGRSRKRRPAGQARPLGAQDLSAAAPPEGPVSDQLLRAQPQSRCPGAGGVPCLHCLGPAGAPGSGGPVHPAAADPEPLGPAVLAGALERGG

SEQ ID NO: 11122 - protein, 517 aa, Homo sapiens
  Payload ID: 2197;
  Gene Symbol: CAPN10;
  Gene Name: calpain 10;
  Uniprot ID:  Q9HC96;
  ENSP ID: ENSP00000270362
MRAGRGATPARELFRDAAFPAADSSLFCDLSTPLAQFREDITWRRPQEICATPRLFPDDPREGQVKQGLLGDCWFLCACAALQKSRHLLDQVIPPGQPSWADQEYRGSFTCRIWQFGRWVEVTTDDRLPCLAGRLCFSRCQREDVFWLPLLEKVYAKVHGSYEHLWAGQVADALVDLTGGLAERWNLKGVAGSGGQQDRPGRWEHRTCRQLLHLKDQCLISCCVLSPRAGARELGEFHAFIVSDLRELQGQAGQCILLLRIQNPWGRRCWQGLWREGGEGWSQVDAAVASELLSQLQEGEFWVEEEEFLREFDELTVGYPVTEAGHLQSLYTERLLCHTRALPGAWVKGQSAGGCRNNSGFPSNPKFWLRVSEPSEVYIAVLQRSRLHAADWAGRARALVGDSHTSWSPASIPGKHYQAVGLHLWKVPEGGRSQDAPPLLLQEPLLSCVPHRYAQEVSRLCLLPAGTYKVVPSTYLPDTEGAFTVTIATRIDRPSIHSQEMLGQFLQEVSIMAVMKT

SEQ ID NO: 11123 - protein, 139 aa, Homo sapiens
  Payload ID: 2197;
  Gene Symbol: CAPN10;
  Gene Name: calpain 10;
  Uniprot ID:  Q9HC96;
  ENSP ID: ENSP00000270364
MRAGRGATPARELFRDAAFPAADSSLFCDLSTPLAQFREDITWRRPQEICATPRLFPDDPREGQVKQGLLGDCWFLCACAALQKSRHLLDQVSCPVQLPADWTCKVQPVWLEFPCLPISCRLRVSSDTSPDSATWGSWK

SEQ ID NO: 11124 - protein, 138 aa, Homo sapiens
  Payload ID: 2197;
  Gene Symbol: CAPN10;
  Gene Name: calpain 10;
  Uniprot ID:  Q9HC96;
  ENSP ID: ENSP00000289381
MRAGRGATPARELFRDAAFPAADSSLFCDLSTPLAQFREDITWRRPQVPEGGRSQDAPPLLLQEPLLSCVPHRYAQEVSRLCLLPAGTYKVVPSTYLPDTEGAFTVTIATRIDRPSIHSQEMLGQFLQEVSIMAVMKT

SEQ ID NO: 11125 - protein, 513 aa, Homo sapiens
  Payload ID: 2197;
  Gene Symbol: CAPN10;
  Gene Name: calpain 10;
  Uniprot ID:  Q9HC96;
  ENSP ID: ENSP00000349556
MRAGRGATPARELFRDAAFPAADSSLFCDLSTPLAQFREDITWRRPQEICATPRLFPDDPREGQVKQGLLGDCWFLCACAALQKSRHLLDQVIPPGQPSWADQEYRGSFTCRIWQFGRWVEVTTDDRLPCLAGRLCFSRCQREDVFWLPLLEKVYAKVHGSYEHLWAGQVADALVDLTGGLAERWNLKGVAGSGGQQDRPGRWEHRTCRQLLHLKDQCLISCCVLSPRAGARELGEFHAFIVSDLRELQGQAGQCILLLRIQNPWGRRCWQGLWREGGEGWSQVDAAVASELLSQLQEGEFWVEEEEFLREFDELTVGYPVTEAGHLQSLYTERLLCHTRALPGAWVKGQSAGGCRNNSGFPSNPKFWLRVSEPSEVYIAVLQRSRLHAADWAGRARALVGDSHTSWSPASIPGKHYQAVGLHLWKVEKRRVNLPRVLSMPPVAGTACHAYDREVHLRCELSPGYYLAVPSTFLKDAPGEFLLRVFSTGRVSLRSQRVEGARTHPHCCCRSRC

SEQ ID NO: 11126 - protein, 544 aa, Homo sapiens
  Payload ID: 2197;
  Gene Symbol: CAPN10;
  Gene Name: calpain 10;
  Uniprot ID:  Q9HC96;
  ENSP ID: ENSP00000375843
MRAGRGATPARELFRDAAFPAADSSLFCDLSTPLAQFREDITWRRPQEICATPRLFPDDPREGQVKQGLLGDCWFLCACAALQKSRHLLDQVIPPGQPSWADQEYRGSFTCRIWQFGRWVEVTTDDRLPCLAGRLCFSRCQREDVFWLPLLEKVYAKVHGSYEHLWAGQVADALVDLTGGLAERWNLKGVAGSGGQQDRPGRWEHRTCRQLLHLKDQCLISCCVLSPRAGARELGEFHAFIVSDLRELQGQAGQCILLLRIQNPWGRRCWQGLWREGGEGWSQVDAAVASELLSQLQEGEFWVEEEEFLREFDELTVGYPVTEAGHLQSLYTERLLCHTRALPGAWVKGQSAGGCRNNSGFPSNPKFWLRVSEPSEVYIAVLQRSRLHAADWAGRARALVGDSHTSWSPASIPGKHYQAVGLHLWKVEKRRVNLPRVLSMPPVAGTACHAYDREVHLRCELSPGYYLAVPSTFLKDAPGEFLLRVFSTGRVSLRALAPAASASLCISTAGPVTPSSTPSASISSRSQRVEGARTHPHCCCRSRC

SEQ ID NO: 11127 - protein, 672 aa, Homo sapiens
  Payload ID: 2197;
  Gene Symbol: CAPN10;
  Gene Name: calpain 10;
  Uniprot ID:  Q9HC96;
  ENSP ID: ENSP00000375844
MRAGRGATPARELFRDAAFPAADSSLFCDLSTPLAQFREDITWRRPQEICATPRLFPDDPREGQVKQGLLGDCWFLCACAALQKSRHLLDQVIPPGQPSWADQEYRGSFTCRIWQFGRWVEVTTDDRLPCLAGRLCFSRCQREDVFWLPLLEKVYAKVHGSYEHLWAGQVADALVDLTGGLAERWNLKGVAGSGGQQDRPGRWEHRTCRQLLHLKDQCLISCCVLSPRAGARELGEFHAFIVSDLRELQGQAGQCILLLRIQNPWGRRCWQGLWREGGEGWSQVDAAVASELLSQLQEGEFWVEEEEFLREFDELTVGYPVTEAGHLQSLYTERLLCHTRALPGAWVKGQSAGGCRNNSGFPSNPKFWLRVSEPSEVYIAVLQRSRLHAADWAGRARALVGDSHTSWSPASIPGKHYQAVGLHLWKVEKRRVNLPRVLSMPPVAGTACHAYDREVHLRCELSPGYYLAVPSTFLKDAPGEFLLRVFSTGRVSLSAIRAVAKNTTPGAALPAGEWGTVQLRGSWRVGQTAGGSRNFASYPTNPCFPFSVPEGPGPRCVRITLHQHCRPSDTEFHPIGFHIFQVPEGGRSQDAPPLLLQEPLLSCVPHRYAQEVSRLCLLPAGTYKVVPSTYLPDTEGAFTVTIATRIDRPSIHSQEMLGQFLQEVSIMAVMKT

SEQ ID NO: 11128 - protein, 653 aa, Homo sapiens
  Payload ID: 2197;
  Gene Symbol: CAPN10;
  Gene Name: calpain 10;
  ENSP ID: ENSP00000384422
MRAGRGATPARELFRDAAFPAADSSLFCDLSTPLAQFREDITWRRPQEICATPRLFPDDPREGQVKQGLLGDCWFLCACAALQKSRHLLDQVIPPGQPSWADQEYRGSFTCRIWQFGRWVEVTTDDRLPCLAGRLCFSRCQREDVFWLPLLEKVYAKVHGSYEHLWAGQVADALVDLTGGLAERWNLKGVAGSGGQQDRPGRWEHRTCRQLLHLKDQCLISCCVLSPRAGARELGEFHAFIVSDLRELQGQAGQCILLLRIQNPWGRRCWQGLWREGGEGWSQVDAAVASELLSQLQEGEFWVEEEEFLREFDELTVGYPVTEAGHLQSLYTERLLCHTRALPGAWVKGQSAGGCRNNSGFPSNPKFWLRVSEPSEVYIAVLQRSRLHAADWAGRARALVGDSHTSWSPASIPGKHYQAVGLHLWKVEKRRVNLPRVLSMPPVAGTACHAYDREVHLRCELSPGYYLAVPSTFLKDAPGEFLLRVFSTGRVSLSAIRAVAKNTTPGAALPAGEWGTVQLRGSWRVGQTAGGSRNFASYPTNPCFPFSVPEGPGPRCVRITLHQHCRPSDTEFHPIGFHIFQVPEGGRSQDAPPLLLQEPLLSCVPHRYAQEVSRLCLLPAGTYKVVPSTYLPDTEGAFTVTIATRIDRSPSWQ

SEQ ID NO: 11129 - protein, 444 aa, Homo sapiens
  Payload ID: 2197;
  Gene Symbol: CAPN10;
  Gene Name: calpain 10;
  Uniprot ID:  Q9HC96;
  ENSP ID: ENSP00000400144
MRAGRGATPARELFRDAAFPAADSSLFCDLSTPLAQFREDITWRRPQEICATPRLFPDDPREGQVKQGLLGDCWFLCACAALQKSRHLLDQVIPPGQPSWADQEYRGSFTCRIWQFGRWVEVTTDDRLPCLAGRLCFSRCQREDVFWLPLLEKVYAKVHGSYEHLWAGQVADALVDLTGGLAERWNLKGVAGSGGQQDRPGRWEHRTCRQLLHLKDQCLISCCVLSPRAGARELGEFHAFIVSDLRELQGQAGQCILLLRIQNPWGRRCWQGLWREGGEGWSQVDAAVASELLSQLQEGEFWVEEEEFLREFDELTVGYPVTEAGHLQSLYTERLLCHTRALPGAWVKGQSAGGCRNNSGFPSNPKFWLRVSEPSEVYIAVLQRSRLHAADWAGRARALVGDSHTSWSPASIPGKHYQAVGLHLWKGVTLGTTLFPVPSWMWPT

SEQ ID NO: 11130 - protein, 46 aa, Homo sapiens
  Payload ID: 2197;
  Gene Symbol: CAPN10;
  Gene Name: calpain 10;
  ENSP ID: ENSP00000404064
  MOD_RES (1)..(1): Any amino acid
XSTYLPDTEGAFTVTIATRIDRPSIHSQEMLGQFLQEVSIMAVMKT

SEQ ID NO: 11131 - protein, 85 aa, Homo sapiens
  Payload ID: 2197;
  Gene Symbol: CAPN10;
  Gene Name: calpain 10;
  ENSP ID: ENSP00000407090
LEKVYAKVHGSYEHLWAGQVADALVDLTGGLAERWNLKGVAGSGGQQDRPGRWEHRTCRQLLHLKDQCLISCCVLSPRAVIDNIR

SEQ ID NO: 11132 - protein, 739 aa, Homo sapiens [sequence omitted]

SEQ ID NO: 11133 - protein, 40 aa, Homo sapiens
  Payload ID: 2198;
  Gene Symbol: CAPN11;
  Gene Name: calpain 11;
  ENSP ID: ENSP00000431963
MLYSPGPQESSTPSVLGAARVEAAWSDCTVQGHGVVCLIV

SEQ ID NO: 11134 - protein, 182 aa, Homo sapiens
  Payload ID: 2198;
  Gene Symbol: CAPN11;
  Gene Name: calpain 11;
  ENSP ID: ENSP00000432420
MLYSPGPSLPESAESLDGSQEDKPRGSCAETRSCSVTQTGVPSHLIAASNCHSLELQGSEPTFTDTGMVAHINNSRLKAKGVGQHDNAQNFGNQSFEELRAACLRKGELFEDPLFPAEPSSLGFKDLGPNSKNVQNISWQRPKDIINNPLFIMDGISPTDICQGILGDCWLLAAIGSLTTCP

SEQ ID NO: 11135 - protein, 719 aa, Homo sapiens
  Payload ID: 2199;
  Gene Symbol: CAPN12;
  Gene Name: calpain 12;
  Uniprot ID:  Q6ZSI9;
  ENSP ID: ENSP00000331636
MASSSGRVTIQLVDEEAGVGAGRLQLFRGQSYEAIRAACLDSGILFRDPYFPAGPDALGYDQLGPDSEKAKGVKWMRPHEFCAEPKFICEDMSRTDVCQGSLGNCWFLAAAASLTLYPRLLRRVVPPGQDFQHGYAGVFHFQLWQFGRWMDVVVDDRLPVREGKLMFVRSEQRNEFWAPLLEKAYAKLHGSYEVMRGGHMNEAFVDFTGGVGEVLYLRQNSMGLFSALRHALAKESLVGATALSDRGEYRTEEGLVKGHAYSITGTHKVFLGFTKVRLLRLRNPWGCVEWTGAWSDSCPRWDTLPTECRDALLVKKEDGEFWMELRDFLLHFDTVQICSLSPEVLGPSPEGGGWHVHTFQGRWVRGFNSGGSQPNAETFWTNPQFRLTLLEPDEEDDEDEEGPWGGWGAAGARGPARGGRTPKCTVLLSLIQRNRRRLRAKGLTYLTVGFHVFQIPEELLGLWDSPRSHALLPRLLRADRSPLSARRDVTRRCCLRPGHYLVVPSTAHAGDEADFTLRVFSERRHTAVEIDDVISADLQSLQGPYLPLELGLEQLFQELAGEEEELNASQLQALLSIALEPARAHTSTPREIGLRTCEQLLQCFGHGQSLALHHFQQLWGYLLEWQAIFNKFDEDTSGTMNSYELRLALNAAGFHLNNQLTQTLTSRYRDSRLRVDFERFVSCVAHLTCIFCHCSQHLDGGEGVICLTHRQWMEVATFS

SEQ ID NO: 11136 - protein, 36 aa, Homo sapiens
  Payload ID: 2199;
  Gene Symbol: CAPN12;
  Gene Name: calpain 12;
  ENSP ID: ENSP00000469217
  MOD_RES (1)..(1): Any amino acid
XLGLEQLFQELAGEEEELNASQLQALLSIALEPGHI

SEQ ID NO: 11137 - protein, 179 aa, Homo sapiens
  Payload ID: 2199;
  Gene Symbol: CAPN12;
  Gene Name: calpain 12;
  ENSP ID: ENSP00000470233
MASSSGRVTIQLVDEEAGVGAGRLQLFRGQSYEAIRAACLDSGILFRDPYFPAGPDALGYDQLGPDSEKAKGVKWMRPHEFCAEPKFICEDMSRTDVCQGSLAAASLTLYPRLLRRVVPPGQDFQHGYAGVFHFQLWQFGRWMDVVVDDRLPVREGKLMFVRSEQRNEFWAPLLEKAYA

SEQ ID NO: 11138 - protein, 105 aa, Homo sapiens
  Payload ID: 2199;
  Gene Symbol: CAPN12;
  Gene Name: calpain 12;
  ENSP ID: ENSP00000470760
GLEQLFQELAGEAIFNKFDEDTSGTMNSYELRLALNAAGFHLNNQLTQTLTSRYRDSRLRVDFERFVSCVAHLTCIFCHCSQHLDGGEGVICLTHRQWMEVATFS

SEQ ID NO: 11139 - protein, 104 aa, Homo sapiens
  Payload ID: 2199;
  Gene Symbol: CAPN12;
  Gene Name: calpain 12;
  ENSP ID: ENSP00000471007
  MOD_RES (1)..(1): Any amino acid
XLPLELGLEQLFQELAGEEEELNASQLQALLSIALEPGFHLNNQLTQTLTSRYRDSRLRVDFERFVSCVAHLTCIFCHCSQHLDGGEGVICLTHRQWMEVATFS

SEQ ID NO: 11140 - protein, 93 aa, Homo sapiens
  Payload ID: 2199;
  Gene Symbol: CAPN12;
  Gene Name: calpain 12;
  ENSP ID: ENSP00000471510
MASSSGRVTIQLVDEEAGVGAGRLQLFRGQSYEAIRAACLDSGILFRDPYFPAGPDALGYDQLGPDSEKAKGVKWMRPHAEAWNPPPPTGVLC

SEQ ID NO: 11141 - protein, 570 aa, Homo sapiens
  Payload ID: 2199;
  Gene Symbol: CAPN12;
  Gene Name: calpain 12;
  ENSP ID: ENSP00000473156
MDVVVDDRLPVREGKLMFVRSEQRNEFWAPLLEKAYAKLHGSYEVMRGGHMNEAFVDFTGGVGEVLYLRQNSMGLFSALRHALAKESLVGATALSDRGEYRTEEGLVKGHAYSITGTHKVFLGFTKVRLLRLRNPWGCVEWTGAWSDSCPRWDTLPTECRDALLVKKEDGEFWMELRDFLLHFDTVQICSLSPEVLGPSPEGGGWHVHTFQGRWVRGFNSGGSQPNAETFWTNPQFRLTLLEPDEEDDEDEEGPWGGWGAAGARGPARGGRTPKCTVLLSLIQRNRRRLRAKGLTYLTVGFHVFQIPEELLGLWDSPRSHALLPRLLRADRSPLSARRDVTRRCCLRPGHYLVVPSTAHAGDEADFTLRVFSERRHTAVEIDDVISADLQSLQGPYLPLELGLEQLFQELAGEEEELNASQLQALLSIALEPARAHTSTPREIGLRTCEQLLQCFGHGQSLALHHFQQLWGYLLEWQAIFNKFDEDTSGTMNSYELRLALNAAGFHLNNQLTQTLTSRYRDSRLRVDFERFVSCVAHLTCIFCHCSQHLDGGEGVICLTHRQWMEVATFS

SEQ ID NO: 11142 - protein, 719 aa, Homo sapiens; identical to SEQ ID NO: 11135
  Payload ID: 2199;
  Gene Symbol: CAPN12;
  Gene Name: Calpain 12;
  ENSP ID: ENSP00000488980

SEQ ID NO: 11143 - protein, 669 aa, Homo sapiens
  Payload ID: 2200;
  Gene Symbol: CAPN13;
  Gene Name: calpain 13;
  Uniprot ID:  Q6MZZ7;
  ENSP ID: ENSP00000295055
MAYYQEPSVETSIIKFKDQDFTTLRDHCLSMGRTFKDETFPAADSSIGQKLLQEKRLSNVIWKRPQDLPGGPPHFILDDISRFDIQQGGAADCWFLAALGSLTQNPQYRQKILMVQSFSHQYAGIFRFRFWQCGQWVEVVIDDRLPVQGDKCLFVRPRHQNQEFWPCLLEKAYAKLLGSYSDLHYGFLEDALVDLTGGVITNIHLHSSPVDLVKAVKTATKAGSLITCATPSGPTDTAQAMENGLVSLHAYTVTGAEQIQYRRGWEEIISLWNPWGWGEAEWRGRWSDGSQEWEETCDPRKSQLHKKREDGEFWMSCQDFQQKFIAMFICSEIPITLDHGNTLHEGWSQIMFRKQVILGNTAGGPRNDAQFNFSVQEPMEGTNVVVCVTVAVTPSNLKAEDAKFPLDFQVILAGSQRFREKFPPVFFSSFRNTVQSSNNKFRRNFTMTYHLSPGNYVVVAQTRRKSAEFLLRIFLKMPDSDRHLSSHFNLRMKGSPSEHGSQQSIFNRYAQQRLDIDATQLQGLLNQELLTGPPGDMFSLDECRSLVALMELKVNGRLDQEEFARLWKRLVHYQHVFQKVQTSPGVLLSSDLWKAIENTDFLRGIFISRELLHLVTLRYSDSVGRVSFPSLVCFLMRLEAMAKTFRNLSKDGKGLYLTEMEWMSLVMYN

SEQ ID NO: 11144 - protein, 125 aa, Homo sapiens
  Payload ID: 2200;
  Gene Symbol: CAPN13;
  Gene Name: calpain 13;
  ENSP ID: ENSP00000403180
  MOD_RES (1)..(1): Any amino acid
XNNKFRRNFTMTYHLSPGNYVVVAQTRRKSAEFLLRIFLKMPDSDRHLSSHFNLRMKGSPSEHGSQQSIFNRYAQQRLDIDATQLQGLLNQELLTGPPGDMFSLDECRSLVALMEVSFAVIPPML

SEQ ID NO: 11145 - protein, 423 aa, Homo sapiens
  Payload ID: 2200;
  Gene Symbol: CAPN13;
  Gene Name: calpain 13;
  Uniprot ID:  Q6MZZ7;
  ENSP ID: ENSP00000416191
MAYYQEPSVETSIIKFKDQDFTTLRDHCLSMGRTFKDETFPAADSSIGQKLLQEKRLSNVIWKRPQDLPGGPPHFILDDISRFDIQQGGAADCWFLAALGSLTQNPQYRQKILMVQSFSHQYAGIFRFRFWQCGQWVEVVIDDRLPVQGDKCLFVRPRHQNQEFWPCLLEKAYAKLLGSYSDLHYGFLEDALVDLTGGVITNIHLHSSPVDLVKAVKTATKAGSLITCATPSGPTDTAQAMENGLVSLHAYTVTGAEQIQYRRGWEEIISLWNPWGWGEAEWRGRWSDGSQEWEETCDPRKSQLHKKREDGEFWMSCQDFQQKFIAMFICSEIPITLDHGNTLHEGWSQIMFRKQVILGNTAGGPRNDAQFNFSVQEPMEGTNVVVCVTVAVTPSNLKAEDAKFPLDFQVILAGSQKHCPKLK

SEQ ID NO: 11146 - protein, 102 aa, Homo sapiens
  Payload ID: 2200;
  Gene Symbol: CAPN13;
  Gene Name: calpain 13;
  ENSP ID: ENSP00000440723
MAYYQEPSVETSIIKFKDQDFTTLRDHCLSMGRTFKDETFPAADSSIGQKLLQEKRLSNVIWKRPQDLPGGPPHFILDDISRFDIQQGGAVLAMWPVGGSGD

SEQ ID NO: 11147 - protein, 143 aa, Homo sapiens
  Payload ID: 2201;
  Gene Symbol: CAPN14;
  Gene Name: calpain 14;
  ENSP ID: ENSP00000381805
MSLWPPFRCRWKLAPRYSRRASPQQPQQDFEALLAECLRNGCLFEDTSFPATLSSIGSGSLLQKLPPRLQWKRPPELHSNPQFYFAKAKRLDLCQGIVGDCWFLAALQALALHQDILSRVVPLNQSFTEKYAGIFRFWALWFL

SEQ ID NO: 11148 - protein, 684 aa, Homo sapiens
  Payload ID: 2201;
  Gene Symbol: CAPN14;
  Gene Name: calpain 14;
  Uniprot ID:  A8MX76;
  ENSP ID: ENSP00000385247
MSLWPPFRCRWKLAPRYSRRASPQQPQQDFEALLAECLRNGCLFEDTSFPATLSSIGSGSLLQKLPPRLQWKRPPELHSNPQFYFAKAKRLDLCQGIVGDCWFLAALQALALHQDILSRVVPLNQSFTEKYAGIFRFWFWHYGNWVPVVIDDRLPVNEAGQLVFVSSTYKNLFWGALLEKAYAKLSGSYEDLQSGQVSEALVDFTGGVTMTINLAEAHGNLWDILIEATYNRTLIGCQTHSGEKILENGLVEGHAYTLTGIRKVTCKHRPEYLVKLRNPWGKVEWKGDWSDSSSKWELLSPKEKILLLRKDNDGEFWMTLQDFKTHFVLLVICKLTPGLLSQEAAQKWTYTMREGRWEKRSTAGGQRQLLQDTFWKNPQFLLSVWRPEEGRRSLRPCSVLVSLLQKPRHRCRKRKPLLAIGFYLYRMNKYHDDQRRLPPEFFQRNTPLSQPDRFLKEKEVSQELCLEPGTYLIVPCILEAHQKSEFVLRVFSRKHIFYEIGSNSGVVFSKEIEDQNERQDEFFTKFFEKHPEINAVQLQNLLNQMTWSSLGSRQPFFSLEACQGILALLDLNASGTMSIQEFRDLWKQLKLSQKVFHKQDRGSGYLNWEQLHAAMREAGIMLSDDVCQLMLIRYGGPRLQMDFVSFIHLMLRVENMEDVFQNLTQDGKGIYLQKPEWMMMALYS

SEQ ID NO: 11149 - protein, 1086 aa, Homo sapiens
  Payload ID: 2202;
  Gene Symbol: CAPN15;
  Gene Name: calpain 15;
  Uniprot ID:  O75808;
  ENSP ID: ENSP00000219611
MATVGEWSCVRCTFLNPAGQRQCSICEAPRHKPDLNHILRLSVEEQKWPCARCTFRNFLGKEACEVCGFTPEPAPGAAFLPVLNGVLPKPPAILGEPKGSCQEEAGPVRTAGLVATEPARGQCEDKDEEEKEEQEEEEGAAEPRGGWACPRCTLHNTPVASSCSVCGGPRRLSLPRIPPEALVVPEVVAPAGFHVVPAAPPPGLPGEGAEANPPATSQGPAAEPEPPRVPPFSPFSSTLQNNPVPRSRREVPPQLQPPVPEAAQPSPSAGCRGAPQGSGWAGASRLAELLSGKRLSVLEEEATEGGTSRVEAGSSTSGSDIIDLAGDTVRYTPASPSSPDFTTWSCAKCTLRNPTVAPRCSACGCSKLHGFQEHGEPPTHCPDCGADKPSPCGRSCGRVSSAQKAARVLPERPGQWACPACTLLNALRAKHCAACHTPQLLVAQRRGAAPLRRRESMHVEQRRQTDEGEAKALWENIVAFCRENNVSFVDDSFPPGPESVGFPAGDSVQQRVRQWLRPQEINCSVFRDHRATWSVFHTLRPSDILQGLLGNCWFLSALAVLAERPDLVERVMVTRSLCAEGAYQVRLCKDGTWTTVLVDDMLPCDEAGCLLFSQAQRKQLWVALIEKALAKLHGSYFALQAGRAIEGLATLTGAPCESLALQLSSTNPREEPVDTDLIWAKMLSSKEAGFLMGASCGGGNMKVDDSAYESLGLRPRHAYSILDVRDVQGTRLLRLRNPWGRFSWNGSWSDEWPHWPGHLRGELMPHGSSEGVFWMEYGDFVRYFDSVDICKVHSDWQEARVQGCFPSSASAPVGVTALTVLERASLEFALFQEGSRRSDAVDSHLLDLCILVFRATFGSGGHLSLGRLLAHSKRAVKKFVSCDVMLEPGEYAVVCCAFNHWGPPLPGTPAPQASSPSAGVPRASPEPPGHVLAVYSSRLVMVEPVEAQPTTLADAIILLTESRGERHEGREGMTCYYLTHGWAGLIVVVENRHPKAYLHVQCDCTDSFNVVSTRGSLRTQDSVPPLHRQVLVILSQLEGNAGFSITHRLAHRKAAQAFLSDWTASKGTHSPPLTPEVAGLHGPRPL

SEQ ID NO: 11150 - protein, 184 aa, Homo sapiens
  Payload ID: 2202;
  Gene Symbol: CAPN15;
  Gene Name: calpain 15;
  ENSP ID: ENSP00000456017
MATVGEWSCVRCTFLNPAGQRQCSICEAPRHKPDLNHILRLSVEEQKWPCARCTFRNFLGKEACEVCGFTPEPAPGAAFLPVLNGVLPKPPAILGEPKGSCQEEAGPVRTAGLVATEPARGQCEDKDEEEKEEQEEEEGAAEPRGGWACPRCTLHNTPVASSCSVCGGPRRLSLPRIPPEALVV

SEQ ID NO: 11151 - protein, 112 aa, Homo sapiens
  Payload ID: 2202;
  Gene Symbol: CAPN15;
  Gene Name: calpain 15;
  ENSP ID: ENSP00000457030
MCQVHAQKPHSGPQVLGLRLLQTARLPGAWRAPHPLPRLWGRQAQPLRQKLRTGVLGPEGRPRPARAPGPVGLPCLYPAQRTAGQALRRLPHASAPGGPAAGGRAPEAQGEH

SEQ ID NO: 11152 - protein, 71 aa, Homo sapiens
  Payload ID: 2202;
  Gene Symbol: CAPN15;
  Gene Name: calpain 15;
  ENSP ID: ENSP00000457306
  MOD_RES (1)..(1): Any amino acid
XGERHEGREGMTCYYLTHGWAGLIVVVENRHPKAYLHVQCDCTDSFNVVSTRGSLRTQDSVPPLHSPVPLP

SEQ ID NO: 11153 - protein, 700 aa, Homo sapiens
  Payload ID: 2203;
  Gene Symbol: CAPN2;
  Gene Name: calpain 2, (m/II) large subunit;
  Uniprot ID:  P17655;
  ENSP ID: ENSP00000295006
MAGIAAKLAKDREAAEGLGSHDRAIKYLNQDYEALRNECLEAGTLFQDPSFPAIPSALGFKELGPYSSKTRGIEWKRPTEICADPQFIIGGATRTDICQGALGDCWLLAAIASLTLNEEILARVVPLNQSFQENYAGIFHFQFWQYGEWVEVVVDDRLPTKDGELLFVHSAEGSEFWSALLEKAYAKINGCYEALSGGATTEGFEDFTGGIAEWYELKKPPPNLFKIIQKALQKGSLLGCSIDITSAADSEAITFQKLVKGHAYSVTGAEEVESNGSLQKLIRIRNPWGEVEWTGRWNDNCPSWNTIDPEERERLTRRHEDGEFWMSFSDFLRHYSRLEICNLTPDTLTSDTYKKWKLTKMDGNWRRGSTAGGCRNYPNTFWMNPQYLIKLEEEDEDEEDGESGCTFLVGLIQKHRRRQRKMGEDMHTIGFGIYEVPEELSGQTNIHLSKNFFLTNRARERSDTFINLREVLNRFKLPPGEYILVPSTFEPNKDGDFCIRVFSEKKADYQAVDDEIEANLEEFDISEDDIDDGFRRLFAQLAGEDAEISAFELQTILRRVLAKRQDIKSDGFSIETCKIMVDMLDSDGSGKLGLKEFYILWTKIQKYQKIYREIDVDRSGTMNSYEMRKALEEAGFKMPCQLHQVIVARFADDQLIIDFDNFVRCLVRLETLFKIFKQLDPENTGTIELDLISWLCFSVL

SEQ ID NO: 11154 - protein, 131 aa, Homo sapiens
  Payload ID: 2203;
  Gene Symbol: CAPN2;
  Gene Name: calpain 2, (m/II) large subunit;
  ENSP ID: ENSP00000399949
MEICADPQFIIGGATRTDICQGALGDCWLLAAIASLTLNEEILARVVPLNQSFQENYAGIFHFQFWQYGEWVEVVVDDRLPTKDGELLFVHSAEGSEFWSALLEKAYAKINGCYEALSGGATTEGFEDFTG

SEQ ID NO: 11155 - protein, 622 aa, Homo sapiens
  Payload ID: 2203;
  Gene Symbol: CAPN2;
  Gene Name: calpain 2, (m/II) large subunit;
  Uniprot ID:  P17655;
  ENSP ID: ENSP00000413158
MEICADPQFIIGGATRTDICQGALGDCWLLAAIASLTLNEEILARVVPLNQSFQENYAGIFHFQFWQYGEWVEVVVDDRLPTKDGELLFVHSAEGSEFWSALLEKAYAKINGCYEALSGGATTEGFEDFTGGIAEWYELKKPPPNLFKIIQKALQKGSLLGCSIDITSAADSEAITFQKLVKGHAYSVTGAEEVESNGSLQKLIRIRNPWGEVEWTGRWNDNCPSWNTIDPEERERLTRRHEDGEFWMSFSDFLRHYSRLEICNLTPDTLTSDTYKKWKLTKMDGNWRRGSTAGGCRNYPNTFWMNPQYLIKLEEEDEDEEDGESGCTFLVGLIQKHRRRQRKMGEDMHTIGFGIYEVPEELSGQTNIHLSKNFFLTNRARERSDTFINLREVLNRFKLPPGEYILVPSTFEPNKDGDFCIRVFSEKKADYQAVDDEIEANLEEFDISEDDIDDGFRRLFAQLAGEDAEISAFELQTILRRVLAKRQDIKSDGFSIETCKIMVDMLDSDGSGKLGLKEFYILWTKIQKYQKIYREIDVDRSGTMNSYEMRKALEEAGFKMPCQLHQVIVARFADDQLIIDFDNFVRCLVRLETLFKIFKQLDPENTGTIELDLISWLCFSVL

SEQ ID NO: 11156 - protein, 729 aa, Homo sapiens
  Payload ID: 2204;
  Gene Symbol: CAPN3;
  Gene Name: calpain 3;
  Uniprot ID:  P20807;
  ENSP ID: ENSP00000183936
MPTVISASVAPRTAAEPRSPGPVPHPAQSKATEAGGGNPSGIYSAIISRNFPIIGVKEKTFEQLHKKCLEKKVLYVDPEFPPDETSLFYSQKFPIQFVWKRPPEICENPRFIIDGANRTDICQGELGDCWFLAAIACLTLNQHLLFRVIPHDQSFIENYAGIFHFQFWRYGEWVDVVIDDCLPTYNNQLVFTKSNHRNEFWSALLEKAYAKLHGSYEALKGGNTTEAMEDFTGGVAEFFEIRDAPSDMYKIMKKAIERGSLMGCSIDTIIPVQYETRMACGLVRGHAYSVTGLDEVPFKGEKVKLVRLRNPWGQVEWNGSWSDRWKDWSFVDKDEKARLQHQVTEDGEFWMSYEDFIYHFTKLEICNLTADALQSDKLQTWTVSVNEGRWVRGCSAGGCRNFPDTFWTNPQYRLKLLEEDDDPDDSEVICSFLVALMQKNRRKDRKLGASLFTIGFAIYEVPKEMHGNKQHLQKDFFLYNASKARSKTYINMREVSQRFRLPPSEYVIVPSTYEPHQEGEFILRVFSEKRNLSEEVENTISVDRPVPQPGSSDQESEEQQQFRNIFKQIAGDDMEICADELKKVLNTVVNKHKDLKTHGFTLESCRSMIALMDTDGSGKLNLQEFHHLWNKIKAWQKIFKHYDTDQSGTINSYEMRNAVNDAGFHLNNQLYDIITMRYADKHMNIDFDSFICCFVRLEGMFRAFHAFDKDGDGIIKLNVLEWLQLTMYA

SEQ ID NO: 11157 - protein, 773 aa, Homo sapiens
  Payload ID: 2204;
  Gene Symbol: CAPN3;
  Gene Name: calpain 3;
  ENSP ID: ENSP00000326281
MPTVISASVAPRTAAEPRSPGPVPHPAQSKATEAGGGNPSGIYSAIISRNFPIIGVKEKTFEQLHKKCLEKKVLYVDPEFPPDETSLFYSQKFPIQFVWKRPPEICENPRFIIDGANRTDICQGELGDCWFLAAIACLTLNQHLLFRVIPHDQSFIENYAGIFHFQFWRYGEWVDVVIDDCLPTYNNQLVFTKSNHRNEFWSALLEKAYAKLHGSYEALKGGNTTEAMEDFTGGVAEFFEIRDAPSDMYKIMKKAIERGSLMGCSIDTIIPVQYETRMACGLVRGHAYSVTGLDEVPFKGEKVKLVRLRNPWGQVEWNGSWSDRWKDWSFVDKDEKARLQHQVTEDGEFWMSYEDFIYHFTKLEICNLTADALQSDKLQTWTVSVNEGRWVRGCSAGGCRNFPDTFWTNPQYRLKLLEEDDDPDDSEVICSFLVALMQKNRRKDRKLGASLFTIGFAIYEVPKEMHGNKQHLQKDFFLYNASKARSKTYINMREVSQRFRLPPSEYVIVPSTYEPHQEGEFILRVFSEKRNLSEEVENTISVDRPVKKKKTKPIIFVSDRANSNKELGVDQESEEGKGKTSPDKQKQSPQPQPGSSDQESEEQQQFRNIFKQIAGDDMEICADELKKVLNTVVNKHKDLKTHGFTLESCRSMIALMDTDGSGKLNLQEFHHLWNKIKAWQKIFKHYDTDQSGTINSYEMRNAVNDAGFHLNNQLYDIITMRYADKHMNIDFDSFICCFVRLEGMFRAFHAFDKDGDGIIKLNVLEWLQLTMYA

SEQ ID NO: 11158 - protein, 156 aa, Homo sapiens
  Payload ID: 2204;
  Gene Symbol: CAPN3;
  Gene Name: calpain 3;
  Uniprot ID:  P20807;
  ENSP ID: ENSP00000336840
MEICADELKKVLNTVVNKHKDLKTHGFTLESCRSMIALMDTDGSGKLNLQEFHHLWNKIKAWQKIFKHYDTDQSGTINSYEMRNAVNDAGFHLNNQLYDIITMRYADKHMNIDFDSFICCFVRLEGMFRAFHAFDKDGDGIIKLNVLEWLQLTMYA

SEQ ID NO: 11159 - protein, 156 aa, Homo sapiens; identical to SEQ ID NO: 11158
  Payload ID: 2204;
  Gene Symbol: CAPN3;
  Gene Name: calpain 3;
  Uniprot ID:  P20807;
  ENSP ID: ENSP00000348667

SEQ ID NO: 11160 - protein, 815 aa, Homo sapiens
  Payload ID: 2204;
  Gene Symbol: CAPN3;
  Gene Name: calpain 3;
  Uniprot ID:  P20807;
  ENSP ID: ENSP00000350181
MPTVISASVAPRTAAEPRSPGPVPHPAQSKATEAGGGNPSGIYSAIISRNFPIIGVKEKTFEQLHKKCLEKKVLYVDPEFPPDETSLFYSQKFPIQFVWKRPPEICENPRFIIDGANRTDICQGELGDCWFLAAIACLTLNQHLLFRVIPHDQSFIENYAGIFHFQFWRYGEWVDVVIDDCLPTYNNQLVFTKSNHRNEFWSALLEKAYAKLHGSYEALKGGNTTEAMEDFTGGVAEFFEIRDAPSDMYKIMKKAIERGSLMGCSIDDGTNMTYGTSPSGLNMGELIARMVRNMDNSLLQDSDLDPRGSDERPTRTIIPVQYETRMACGLVRGHAYSVTGLDEVPFKGEKVKLVRLRNPWGQVEWNGSWSDRWKDWSFVDKDEKARLQHQVTEDGEFWMSYEDFIYHFTKLEICNLTADALQSDKLQTWTVSVNEGRWVRGCSAGGCRNFPDTFWTNPQYRLKLLEEDDDPDDSEVICSFLVALMQKNRRKDRKLGASLFTIGFAIYEVPKEMHGNKQHLQKDFFLYNASKARSKTYINMREVSQRFRLPPSEYVIVPSTYEPHQEGEFILRVFSEKRNLSEEVENTISVDRPVPIIFVSDRANSNKELGVDQESEEGKGKTSPDKQKQSPQPQPGSSDQESEEQQQFRNIFKQIAGDDMEICADELKKVLNTVVNKHKDLKTHGFTLESCRSMIALMDTDGSGKLNLQEFHHLWNKIKAWQKIFKHYDTDQSGTINSYEMRNAVNDAGFHLNNQLYDIITMRYADKHMNIDFDSFICCFVRLEGMFRAFHAFDKDGDGIIKLNVLEWLQLTMYA

SEQ ID NO: 11161 - protein, 821 aa, Homo sapiens
  Payload ID: 2204;
  Gene Symbol: CAPN3;
  Gene Name: calpain 3;
  Uniprot ID:  P20807;
  ENSP ID: ENSP00000380349
MPTVISASVAPRTAAEPRSPGPVPHPAQSKATEAGGGNPSGIYSAIISRNFPIIGVKEKTFEQLHKKCLEKKVLYVDPEFPPDETSLFYSQKFPIQFVWKRPPEICENPRFIIDGANRTDICQGELGDCWFLAAIACLTLNQHLLFRVIPHDQSFIENYAGIFHFQFWRYGEWVDVVIDDCLPTYNNQLVFTKSNHRNEFWSALLEKAYAKLHGSYEALKGGNTTEAMEDFTGGVAEFFEIRDAPSDMYKIMKKAIERGSLMGCSIDDGTNMTYGTSPSGLNMGELIARMVRNMDNSLLQDSDLDPRGSDERPTRTIIPVQYETRMACGLVRGHAYSVTGLDEVPFKGEKVKLVRLRNPWGQVEWNGSWSDRWKDWSFVDKDEKARLQHQVTEDGEFWMSYEDFIYHFTKLEICNLTADALQSDKLQTWTVSVNEGRWVRGCSAGGCRNFPDTFWTNPQYRLKLLEEDDDPDDSEVICSFLVALMQKNRRKDRKLGASLFTIGFAIYEVPKEMHGNKQHLQKDFFLYNASKARSKTYINMREVSQRFRLPPSEYVIVPSTYEPHQEGEFILRVFSEKRNLSEEVENTISVDRPVKKKKTKPIIFVSDRANSNKELGVDQESEEGKGKTSPDKQKQSPQPQPGSSDQESEEQQQFRNIFKQIAGDDMEICADELKKVLNTVVNKHKDLKTHGFTLESCRSMIALMDTDGSGKLNLQEFHHLWNKIKAWQKIFKHYDTDQSGTINSYEMRNAVNDAGFHLNNQLYDIITMRYADKHMNIDFDSFICCFVRLEGMFRAFHAFDKDGDGIIKLNVLEWLQLTMYA

SEQ ID NO: 11162 - protein, 309 aa, Homo sapiens
  Payload ID: 2204;
  Gene Symbol: CAPN3;
  Gene Name: calpain 3;
  Uniprot ID:  P20807;
  ENSP ID: ENSP00000380384
MHGNKQHLQKDFFLYNASKARSKTYINMREVSQRFRLPPSEYVIVPSTYEPHQEGEFILRVFSEKRNLSEEVENTISVDRPVKKKKTKPIIFVSDRANSNKELGVDQESEEGKGKTSPDKQKQSPQPQPGSSDQESEEQQQFRNIFKQIAGDDMEICADELKKVLNTVVNKHKDLKTHGFTLESCRSMIALMDTDGSGKLNLQEFHHLWNKIKAWQKIFKHYDTDQSGTINSYEMRNAVNDAGFHLNNQLYDIITMRYADKHMNIDFDSFICCFVRLEGMFRAFHAFDKDGDGIIKLNVLEWLQLTMYA

SEQ ID NO: 11163 - protein, 156 aa, Homo sapiens; identical to SEQ ID NO: 11158
  Payload ID: 2204;
  Gene Symbol: CAPN3;
  Gene Name: calpain 3;
  Uniprot ID:  P20807;
  ENSP ID: ENSP00000380387

SEQ ID NO: 11164 - protein, 255 aa, Homo sapiens
  Payload ID: 2204;
  Gene Symbol: CAPN3;
  Gene Name: calpain 3;
  ENSP ID: ENSP00000454379
MHGNKQHLQKDFFLYNASKARSKTYINMREVSQRFRLPPSEYVIVPSTYEPHQEGEFILRVFSEKRNLSEEVENTISVDRPVPQPGSSDQESEEQQQFRNIFKQIAGDDMEICADELKKVLNTVVNKHKDLKTHGFTLESCRSMIALMDTDGSGKLNLQEFHHLWNKIKAWQKIFKHYDTDQSGTINSYEMRNAVNDAGFHLNNQLYDIITMRYADKHMNIDFDSFICCFVRLEGMFRAFHAFDKDGDGIIKLNV

SEQ ID NO: 11165 - protein, 67 aa, Homo sapiens
  Payload ID: 2204;
  Gene Symbol: CAPN3;
  Gene Name: calpain 3;
  ENSP ID: ENSP00000454937
  MOD_RES (1)..(1): Any amino acid
XFHLNNQLYDIITMRYADKHMNIDFDSFICCFVRLEGMFRAFHAFDKDGDGIIKLNVLEWLQLTMYA

SEQ ID NO: 11166 - protein, 156 aa, Homo sapiens; identical to SEQ ID NO: 11158
  Payload ID: 2204;
  Gene Symbol: CAPN3;
  Gene Name: calpain 3;
  Uniprot ID:  P20807;
  ENSP ID: ENSP00000455254

SEQ ID NO: 11167 - protein, 93 aa, Homo sapiens
  Payload ID: 2204;
  Gene Symbol: CAPN3;
  Gene Name: calpain 3;
  ENSP ID: ENSP00000456514
KIFKHYDTDQSGTINSYEMRNAVNDAGFHLNNQLYDIITMRYADKHMNIDFDSFICCFVRLEGMFRAFHAFDKDGDGIIKLNVLEWLQLTMYA

SEQ ID NO: 11168 - protein, 191 aa, Homo sapiens
  Payload ID: 2204;
  Gene Symbol: CAPN3;
  Gene Name: calpain 3;
  ENSP ID: ENSP00000456575
MEICADELKKVLNTVVNKHKDLKTHGFTLESCRSMIALMDTDGSGKLNLQEFHHLWNKIKAWQKIFKHYDTDQSGTINSYEMRNAVNDAGFHLNNQLYDIITMRYADKHMNIDFDSFICCFVRLEGMFRAFHAFDKDGDGIIKLNVLEAVCRSTCRWHSAPPCARALHHLHAVPPWARNQTSTGFYCCGVN

SEQ ID NO: 11169 - protein, 188 aa, Homo sapiens
  Payload ID: 2204; Gene Symbol: CAPN3; Gene Name: calpain 3; ENSP ID: ENSP00000456607
  MOD_RES (1)..(1): Any amino acid
XGNKQHLQKDFFLYNASKARSKTYINMREVSQRFRLPPSEYVIVPSTYEPHQEGEFILRVFSEKRNLSEEVENTISVDRPVKKKKTKPIIFVSDRANSNKELGVDQESEEGKGKTSPDKQKQSPQFSFVPPQPQPGSSDQESEEQQQFRNIFKQIAGDDMEICADELKKVLNTVVNKHKDLKTHGFTL

SEQ ID NO: 11170 - protein, 110 aa, Homo sapiens
  Payload ID: 2204
  Gene Symbol: CAPN3
  Gene Name: calpain 3
  ENSP ID: ENSP00000457759
KKTKPIIFVSDRANSNKELGVDQESEEGKGKTSPDKQKQSPQPQPGSSDQESEEQQQFRNIFKQIAGDDMEICADELKKVLNTVVNKHKDLKTHGFTLESCRSMIALMDP

SEQ ID NO: 11171 - protein, 157 aa, Homo sapiens
  Payload ID: 2204
  Gene Symbol: CAPN3
  Gene Name: calpain 3
  ENSP ID: ENSP00000457878
MGGVASTLQGLPMRLGYTGAGGFPGVCLEHLEPQPGSSDQESEEQQQFRNIFKQIAGDDMEICADELKKVLNTVVNKHKDLKTHGFTLESCRSMIALMDTDGSGKLNLQEFHHLWNKIKAWQKIFKHYDTDQSGTINSYEMRNAVNDAGFHLNNQLY

SEQ ID NO: 11172 - protein, 169 aa, Homo sapiens
  Payload ID: 2204
  Gene Symbol: CAPN3
  Gene Name: calpain 3
  ENSP ID: ENSP00000457898
  MOD_RES (1)..(1): Any amino acid
XSPQPQPGSSDQESEEQQQFRNIFKQIAGDDMEICADELKKVLNTVVNKHKDLKTHGFTLESCRSMIALMDTDGSGKLNLQEFHHLWNKIKAWQMRNAVNDAGFHLNNQLYDIITMRYADKHMNIDFDSFICCFVRLEGMFRAFHAFDKDGDGIIKLNVLEWLQLTMYA

SEQ ID NO: 11173 - protein, 640 aa, Homo sapiens
  Payload ID: 2205
  Gene Symbol: CAPN5
  Gene Name: calpain 5
  Uniprot ID: O15484
  ENSP ID: ENSP00000278559
MFSCVKPYEDQNYSALRRDCRRRKVLFEDPLFPATDDSLYYKGTPGPAVRWKRPKGICEDPRLFVDGISSHDLHQGQVGNCWFVAACSSLASRESLWQKVIPDWKEQEWDPEKPNAYAGIFHFHFWRFGEWVDVVIDDRLPTVNNQLIYCHSNSRNEFWCALVEKAYAKLAGCYQALDGGNTADALVDFTGGVSEPIDLTEGDFANDETKRNQLFERMLKVHSRGGLISASIKAVTAADMEARLACGLVKGHAYAVTDVRKVRLGHGLLAFFKSEKLDMIRLRNPWGEREWNGPWSDTSEEWQKVSKSEREKMGVTVQDDGEFWMTFEDVCRYFTDIIKCRVINTSHLSIHKTWEEARLHGAWTLHEDPRQNRGGGCINHKDTFFQNPQYIFEVKKPEDEVLICIQQRPKRSTRREGKGENLAIGFDIYKVEENRQYRMHSLQHKAASSIYINSRSVFLRTDQPEGRYVIIPTTFEPGHTGEFLLRVFTDVPSNCRELRLDEPPHTCWSSLCGYPQLVTQVHVLGAAGLKDSPTGANSYVIIKCEGDKVRSAVQKGTSTPEYNVKGIFYRKKLSQPITVQVWNHRVLKDEFLGQVHLKADPDNLQALHTLHLRDRNSRQPSNLPGTVAVHILSSTSLMAV

SEQ ID NO: 11174 - protein, 680 aa, Homo sapiens
  Payload ID: 2205
  Gene Symbol: CAPN5
  Gene Name: calpain 5
  ENSP ID: ENSP00000409996
MFSCVKPYEDQNYSALRRDCRRRKVLFEDPLFPATDDSLYYKGTPGPAVRWKRPKYSGHSLAPHRPGWGDARRMENVPRPGSSGCPSSSLRARDLGICEDPRLFVDGISSHDLHQGQVGNCWFVAACSSLASRESLWQKVIPDWKEQEWDPEKPNAYAGIFHFHFWRFGEWVDVVIDDRLPTVNNQLIYCHSNSRNEFWCALVEKAYAKLAGCYQALDGGNTADALVDFTGGVSEPIDLTEGDFANDETKRNQLFERMLKVHSRGGLISASIKAVTAADMEARLACGLVKGHAYAVTDVRKVRLGHGLLAFFKSEKLDMIRLRNPWGEREWNGPWSDTSEEWQKVSKSEREKMGVTVQDDGEFWMTFEDVCRYFTDIIKCRVINTSHLSIHKTWEEARLHGAWTLHEDPRQNRGGGCINHKDTFFQNPQYIFEVKKPEDEVLICIQQRPKRSTRREGKGENLAIGFDIYKVEENRQYRMHSLQHKAASSIYINSRSVFLRTDQPEGRYVIIPTTFEPGHTGEFLLRVFTDVPSNCRELRLDEPPHTCWSSLCGYPQLVTQVHVLGAAGLKDSPTGANSYVIIKCEGDKVRSAVQKGTSTPEYNVKGIFYRKKLSQPITVQVWNHRVLKDEFLGQVHLKADPDNLQALHTLHLRDRNSRQPSNLPGTVAVHILSSTSLMAV

SEQ ID NO: 11175 - protein, 640 aa, Homo sapiens; identical to SEQ ID NO: 11173
  Payload ID: 2205
  Gene Symbol: CAPN5
  Gene Name: calpain 5
  Uniprot ID: O15484
  ENSP ID: ENSP00000432332

SEQ ID NO: 11176 - protein, 97 aa, Homo sapiens
  Payload ID: 2205
  Gene Symbol: CAPN5
  Gene Name: calpain 5
  ENSP ID: ENSP00000435894
MFSCVKPYEDQNYSALRRDCRRRKVLFEDPLFPATDDSLYYKGTPGPAVRWKRPKGICEDPRLFVDGISSHDLHQGQVGNCWFVAACSSLASRESLW

SEQ ID NO: 11177 - protein, 52 aa, Homo sapiens
  Payload ID: 2205
  Gene Symbol: CAPN5
  Gene Name: calpain 5
  ENSP ID: ENSP00000467244
MFSCVKPYEDQNYSALRRDCRRRKVLFEDPLFPATDDSLYYKGTPGPAVRCT

SEQ ID NO: 11178 - protein, 639 aa, Homo sapiens
  Payload ID: 2205
  Gene Symbol: CAPN5
  Gene Name: calpain 5
  ENSP ID: ENSP00000483282
MFSCVKPYEDQNYSALRRDCRRRKVLFEDPLFPATDDSLYYKGTPGPAVRWKRPKGICEDPRLFVDGISSHDLHQGQVGNCWFVAACSSLASRESLWQKVIPDWKEQEWDPEKPNAYAGIFHFHFWRFGMVDVVIDDRLPTVNNQLIYCHSNSRNEFWCALVEKAYAKLAGCYQALDGGNTADALVDFTGGVSEPIDLTEGDFANDETKRNQLFERMLKVHSRGGLISASIKAVTAADMEARLACGLVKGHAYAVTDVRKVRLGHGLLAFFKSEKLDMIRLRNPWGEREWNGPWSDTSEEWQKVSKSEREKMGVTVQDDGEFWMTFEDVCRYFTDIIKCRVINTSHLSIHKTWEEARLHGAWTLHEDPRQNRGGGCINHKDTFFQNPQYIFEVKKPEDEVLICIQQRPKRSTRREGKGENLAIGFDIYKVEENRQYRMHSLQHKAASSIYINSRSVFLRTDQPEGRYVIIPTTFEPGHTGEFLLRVFTDVPSNCRELRLDEPPHTCWSSLCGYPQLVTQVHVLGAAGLKDSPTGANSYVIIKCEGDKVRSAVQKGTSTPEYNVKGIFYRKKLSQPITVQVWNHRVLKDEFLGQVHLKADPDNLQALHTLHLRDRNSRQPSNLPGTVAVHILSSTSLMAV

SEQ ID NO: 11179 - protein, 641 aa, Homo sapiens
  Payload ID: 2206
  Gene Symbol: CAPN6
  Gene Name: calpain 6
  Uniprot ID: Q9Y6Q1
  ENSP ID: ENSP00000317214
MGPPLKLFKNQKYQELKQECIKDSRLFCDPTFLPENDSLFYNRLLPGKVVWKRPQDICDDPHLIVGNISNHQLTQGRLGHKPMVSAFSCLAVQESHWTKTIPNHKEQEWDPQKTEKYAGIFHFRFWHFGEWTEVVIDDLLPTINGDLVFSFSTSMNEFWNALLEKAYAKLLGCYEALDGLTITDIIVDFTGTLAETVDMQKGRYTELVEEKYKLFGELYKTFTKGGLICCSIESPNQEEQEVETDWGLLKGHTYTMTDIRKIRLGERLVEVFSAEKVYMVRLRNPLGRQEWSGPWSEISEEWQQLTASDRKNLGLVMSDDGEFWMSLEDFCRNFHKLNVCRNVNNPIFGRKELESVLGCWTVDDDPLMNRSGGCYNNRDTFLQNPQYIFTVPEDGHKVIMSLQQKDLRTYRRMGRPDNYIIGFELFKVEMNRKFRLHHLYIQERAGTSTYIDTRTVFLSKYLKKGNYVLVPTMFQHGRTSEFLLRIFSEVPVQLRELTLDMPKMSCWNLARGYPKVVTQITVHSAEDLEKKYANETVNPYLVIKCGKEEVRSPVQKNTVHAIFDTQAIFYRRTTDIPIIVQVWNSRKFCDQFLGQVTLDADPSDCRDLKSLYLRKKGGPTAKVKQGHISFKVISSDDLTEL

SEQ ID NO: 11180 - protein, 813 aa, Homo sapiens
  Payload ID: 2207
  Gene Symbol: CAPN7
  Gene Name: calpain 7
  Uniprot ID: Q9Y6W3
  ENSP ID: ENSP00000253693
MDATALERDAVQFARLAVQRDHEGRYSEAVFYYKEAAQALIYAEMAGSSLENIQEKITEYLERVQALHSAVQSKSADPLKSKHQLDLERAHFLVTQAFDEDEKENVEDAIELYTEAVDLCLKTSYETADKVLQNKLKQLARQALDRAEALSEPLTKPVGKISSTSVKPKPPPVRAHFPLGANPFLERPQSFISPQSCDAQGQRYTAEEIEVLRTTSKINGIEYVPFMNVDLRERFAYPMPFCDRWGKLPLSPKQKTTFSKWVRPEDLTNNPTMIYTVSSFSIKQTIVSDCSFVASLAISAAYERRFNKKLITGIIYPQNKDGEPEYNPCGKYMVKLHLNGVPRKVIIDDQLPVDHKGELLCSYSNNKSELWVSLIEKAYMKVMGGYDFPGSNSNIDLHALTGWIPERIAMHSDSQTFSKDNSFRMLYQRFHKGDVLITASTGMMTEAEGEKWGLVPTHAYAVLDIREFKGLRFIQLKNPWSHLRWKGRYSENDVKNWTPELQKYLNFDPRTAQKIDNGIFWISWDDLCQYYDVIYLSWNPGLFKESTCIHSTWDAKQGPVKDAYSLANNPQYKLEVQCPQGGAAVWVLLSRHITDKDDFANNREFITMVVYKTDGKKVYYPADPPPYIDGIRINSPHYLTKIKLTTPGTHTFTLVVSQYEKQNTIHYTVRVYSACSFTFSKIPSPYTLSKRINGKWSGQSAGGCGNFQETHKNNPIYQFHIEKTGPLLIELRGPRQYSVGFEVVTVSTLGDPGPHGFLRKSSGDYRCGFCYLELENIPSGIFNIIPSTFLPKQEGPFFLDFNSIIPIKITQLQ

SEQ ID NO: 11181 - protein, 42 aa, Homo sapiens
  Payload ID: 2207
  Gene Symbol: CAPN7
  Gene Name: calpain 7
  ENSP ID: ENSP00000389786
MDATALERDAVQFARLAVQRDHEGRYSEAVFYYKFSQRVLIL

SEQ ID NO: 11182 - protein, 112 aa, Homo sapiens
  Payload ID: 2207
  Gene Symbol: CAPN7
  Gene Name: calpain 7
  ENSP ID: ENSP00000394708
HLRWKGRYSENDVKNWTPELQKYLNFDPRTAQKIDNGIFWISWDDLCQYYDVIYLSWNPGLFKESTCIHRMILRIIENLSQWLYTRLMGKKFITQLTHLHTLMEFELTALII

SEQ ID NO: 11183 - protein, 248 aa, Homo sapiens
  Payload ID: 2207
  Gene Symbol: CAPN7
  Gene Name: calpain 7
  ENSP ID: ENSP00000399486
  MOD_RES (1)..(1): Any amino acid
XFSIKQTIVSDCSFVASLAISAAYERRFNKKLITGIIYPQNKDGEPEYNPCGKYMVKLHLNGVPRKNTYKLNISNLKIQNTPVIIDDQLPVDHKGELLCSYSNNKSELWVSLIEKAYMKVMGGYDFPGSNSNIDLHALTGWIPERIAMHSDSQTFSKDNSFRMLYQRFHKGDVLITASTGMMTEAEGEKWGLVPTHAYAVLDIREFKGLRFIQLKNPWSHLRWKGRYSENDVKNWTPELQKYLNFDPR

SEQ ID NO: 11184 - protein, 36 aa, Homo sapiens
  Payload ID: 2207
  Gene Symbol: CAPN7
  Gene Name: calpain 7
  ENSP ID: ENSP00000415482
MDATALERDAVQFARLAVQRDHEGRYSEAVFYYKVQ

SEQ ID NO: 11185 - protein, 703 aa, Homo sapiens
  Payload ID: 2208
  Gene Symbol: CAPN8
  Gene Name: calpain 8
  Uniprot ID: A6NHC0
  ENSP ID: ENSP00000355837
MAAQAAGVSRQRAATQGLGSNQNALKYLGQDFKTLRQQCLDSGVLFKDPEFPACPSALGYKDLGPGSPQTQGIIWKRPTELCPSPQFIVGGATRTDICQGGLGDCWLLAAIASLTLNEELLYRVVPRDQDFQENYAGIFHFQFWQYGEWVEVVIDDRLPTKNGQLLFLHSEQGNEFWSALLEKAYAKLNGCYEALAGGSTVEGFEDFTGGISEFYDLKKPPANLYQIIRKALCAGSLLGCSIDVSSAAEAEAITSQKLVKSHAYSVTGVEEVNFQGHPEKLIRLRNPWGEVEWSGAWSDDAPEWNHIDPRRKEELDKKVEDGEFWMSLSDFVRQFSRLEICNLSPDSLSSEEVHKWNLVLFNGHWTRGSTAGGCQNYPATYWTNPQFKIRLDEVDEDQEESIGEPCCTVLLGLMQKNRRWRKRIGQGMLSIGYAVYQVPKELESHTDAHLGRDFFLAYQPSARTSTYVNLREVSGRARLPPGEYLVVPSTFEPFKDGEFCLRVFSEKKAQALEIGDVVAGNPYEPHPSEVDQEDDQFRRLFEKLAGKDSEITANALKILLNEAFSKRTDIKFDGFNINTCREMISLLDSNGTGTLGAVEFKTLWLKIQKYLEIYWETDYNHSGTIDAHEMRTALRKAGFTLNSQVQQTIALRYACSKLGINFDSFVACMIRLETLFKLFSLLDEDKDGMVQLSLAEWLCCVLV

SEQ ID NO: 11186 - protein, 381 aa, Homo sapiens
  Payload ID: 2208
  Gene Symbol: CAPN8
  Gene Name: calpain 8
  ENSP ID: ENSP00000355838
MAAQAAGVSRQRAATQGLGSNQNALKYLGQDFKTLRQQCLDSGVLFKDPEFPACPSALGYKDLGPGSPQTQGIIWKRPTELCPSPQFIVGGATRTDICQGGLGDCWLLAAIASLTLNEELLYRVVPRDQDFQENYAGIFHFQFWQYGEWVEVVIDDRLPTKNGQLLFLHSEQGNEFWSALLEKAYAKLNGCYEALAGGSTVEGFEDFTGGISEFYDLKKPPANLYQIIRKALCAGSLLGCSIDVSSAAEAEAITSQKLVKSHAYSVTGVEEVNFQGHPEKLIRLRNPWGEVEWSGAWSDDAPEWNHIDPRRKEELDKKVEDGEFWMSLSDFVRQFSRLEICNLSPDSLSSEEVHKWNLVLFNGHWTRGSTAGGCQNYPGSS

SEQ ID NO: 11187 - protein, 156 aa, Homo sapiens
  Payload ID: 2208
  Gene Symbol: CAPN8
  Gene Name: calpain 8
  ENSP ID: ENSP00000390294
DSEITANALKILLNEAFSKRTDIKFDGFNINTCREMISLLDSNGTGTLGAVEFKTLWLKIQKYLEIYWETDYNHSGTIDAHEMRTALRKAGFTLNSQVQQTIALRYACSKLGINFDSFVACMIRLETLFKLFSLLDEDKDGMVQLSLAEWLCCVLV

SEQ ID NO: 11188 - protein, 437 aa, Homo sapiens
  Payload ID: 2208
  Gene Symbol: CAPN8
  Gene Name: calpain 8
  ENSP ID: ENSP00000401665
MAAQAAGVSRQRAATQGLGSNQNALKYLGQDFKTLRQQCLDSGVLFKDPEFPACPSALGYKDLGPGSPQTQGIIWKRPTELCPSPQFIVGGATRTDICQGGLGDCWLLAAIASLTLNEELLYRVVPRDQDFQENYAGIFHFQFWQYGEWVEVVIDDRLPTKNGQLLFLHSEQGNEFWSALLEKAYAKLNGCYEALAGGSTVEGFEDFTGGISEFYDLKKPPANLYQIIRKALCAGSLLGCSIDVSSAAEAEAITSQKLVKSHAYSVTGVEEVNFQGHPEKLIRLRNPWGEVEWSGAWSDDAPEWNHIDPRRKEELDKKVEDGEFWMSLSDFVRQFSRLEICNLSPDSLSSEEVHKWNLVLFNGHWTRGSTAGGCQNYPATYWTNPQFKIRLDEVDEDQEESIGEPCCTVLLGLMQKNRRWRKRIGQGMLSIGYAVYQ

SEQ ID NO: 11189 - protein, 101 aa, Homo sapiens
  Payload ID: 2208
  Gene Symbol: CAPN8
  Gene Name: calpain 8
  ENSP ID: ENSP00000409233
DSEITANALKILLNEAFSKRTDIKFDGFNINTCREMISLLDEETQDTMQVPDSSETFWNTEADILDTVRRWPSMNQEGGPHRHQICQCFDLGLLSLRNYEK

SEQ ID NO: 11190 - protein, 38 aa, Homo sapiens
  Payload ID: 2208
  Gene Symbol: CAPN8
  Gene Name: calpain 8
  ENSP ID: ENSP00000434013
ELCPSPQFIVGGATRTDICQGGLETRWMRIGLVGFRSN

SEQ ID NO: 11191 - protein, 173 aa, Homo sapiens
  Payload ID: 2208
  Gene Symbol: CAPN8
  Gene Name: calpain 8
  ENSP ID: ENSP00000435953
  MOD_RES (1)..(1): Any amino acid
XQDFQENYAGIFHFQFWQYGEWVEVVIDDRLPTKNGQLLFLHSEQGNEFWSALLEKAYAKLNGCYEALAGGSTVEGFEDFTGGISEFYDLKKPPANLYQIIRKALCAGSLLGCSIDVSSAAEAEAITSQKLVKSHAYSVTGVEEVNFQGHPEKLIRLRNPWGEVEWSGAWSDE

SEQ ID NO: 11192 - protein, 20 aa, Homo sapiens
  Payload ID: 2208
  Gene Symbol: CAPN8
  Gene Name: calpain 8
  ENSP ID: ENSP00000436371
  MOD_RES (1)..(1): Any amino acid
XLFSLLDEDKDGMVQLSLAE

SEQ ID NO: 11193 - protein, 690 aa, Homo sapiens
  Payload ID: 2209
  Gene Symbol: CAPN9
  Gene Name: calpain 9
  Uniprot ID: O14815
  ENSP ID: ENSP00000271971
MPYLYRAPGPQAHPVPKDARITHSSGQSFEQMRQECLQRGTLFEDADFPASNSSLFYSERPQIPFVWKRPGEIVKNPEFILGGATRTDICQGELGDCWLLAAIASLTLNQKALARVIPQDQSFGPGYAGIFHFQFWQHSEWLDVVIDDRLPTFRDRLVFLHSADHNEFWSALLEKAYAKLNGSYEALKGGSAIEAMEDFTGGVAETFQTKEAPENFYEILEKALKRGSLLGCFIDTRSAAESEARTPFGLIKGHAYSVTGIDQVSFRGQRIELIRIRNPWGQVEWNGSWSDSSPEWRSVGPAEQKRLCHTALDDGEFWMAFKDFKAHFDKVEICNLTPDALEEDAIHKWEVTVHQGSWVRGSTAGGCRNFLDTFWTNPQIKLSLTEKDEGQEECSFLVALMQKDRRKLKRFGANVLTIGYAIYECPDKDEHLNKDFFRYHASRARSKTFINLREVSDRFKLPPGEYILIPSTFEPHQEADFCLRIFSEKKAITRDMDGNVDIDLPEPPKPTPPDQETEEEQRFRALFEQVAGEDMEVTAEELEYVLNAVLQKKKDIKFKKLSLISCKNIISLMDTSGNGKLEFDEFKVFWDKLKQWINLFLRFDADKSGTMSTYELRTALKAAGFQLSSHLLQLIVLRYADEELQLDFDDFLNCLVRLENASRVFQALSTKNKEFIHLNINEFIHLTMNI

SEQ ID NO: 11194 - protein, 664 aa, Homo sapiens
  Payload ID: 2209
  Gene Symbol: CAPN9
  Gene Name: calpain 9
  Uniprot ID: O14815
  ENSP ID: ENSP00000346538
MPYLYRAPGPQAHPVPKDARITHSSGQSFEQMRQECLQRGTLFEDADFPASNSSLFYSERPQIPFVWKRPGEIVKNPEFILGGATRTDICQGELGDCWLLAAIASLTLNQKALARVIPQDQSFGPGYAGIFHFQFWQHSEWLDVVIDDRLPTFRDRLVFLHSADHNEFWSALLEKAYAKLNGSYEALKGGSAIEAMEDFTGGVAETFQTKEAPENFYEILEKALKRGSLLGCFIDTRSAAESEARTPFGLIKGHAYSVTGIDQVSFRGQRIELIRIRNPWGQVEWNGSWSDRMAFKDFKAHFDKVEICNLTPDALEEDAIHKWEVTVHQGSWVRGSTAGGCRNFLDTFWTNPQIKLSLTEKDEGQEECSFLVALMQKDRRKLKRFGANVLTIGYAIYECPDKDEHLNKDFFRYHASRARSKTFINLREVSDRFKLPPGEYILIPSTFEPHQEADFCLRIFSEKKAITRDMDGNVDIDLPEPPKPTPPDQETEEEQRFRALFEQVAGEDMEVTAEELEYVLNAVLQKKKDIKFKKLSLISCKNIISLMDTSGNGKLEFDEFKVFWDKLKQWINLFLRFDADKSGTMSTYELRTALKAAGFQLSSHLLQLIVLRYADEELQLDFDDFLNCLVRLENASRVFQALSTKNKEFIHLNINEFIHLTMNI

SEQ ID NO: 11195 - protein, 627 aa, Homo sapiens
  Payload ID: 2209
  Gene Symbol: CAPN9
  Gene Name: calpain 9
  ENSP ID: ENSP00000355626
MPYLYRAPGPQAHPVPKDARITHSSGQSFEQMRQECLQRGTLFEDADFPASNSSLFYSERPQIPFVWKRPGFWQHSEWLDVVIDDRLPTFRDRLVFLHSADHNEFWSALLEKAYAKLNGSYEALKGGSAIEAMEDFTGGVAETFQTKEAPENFYEILEKALKRGSLLGCFIDTRSAAESEARTPFGLIKGHAYSVTGIDQVSFRGQRIELIRIRNPWGQVEWNGSWSDSSPEWRSVGPAEQKRLCHTALDDGEFWMAFKDFKAHFDKVEICNLTPDALEEDAIHKWEVTVHQGSWVRGSTAGGCRNFLDTFWTNPQIKLSLTEKDEGQEECSFLVALMQKDRRKLKRFGANVLTIGYAIYECPDKDEHLNKDFFRYHASRARSKTFINLREVSDRFKLPPGEYILIPSTFEPHQEADFCLRIFSEKKAITRDMDGNVDIDLPEPPKPTPPDQETEEEQRFRALFEQVAGEDMEVTAEELEYVLNAVLQKKKDIKFKKLSLISCKNIISLMDTSGNGKLEFDEFKVFWDKLKQWINLFLRFDADKSGTMSTYELRTALKAAGFQLSSHLLQLIVLRYADEELQLDFDDFLNCLVRLENASRVFQALSTKNKEFIHLNINEFIHLTMNI

SEQ ID NO: 11196 - protein, 268 aa, Homo sapiens
  Payload ID: 2210
  Gene Symbol: CAPNS1
  Gene Name: calpain, small subunit 1
  Uniprot ID: P04632
  ENSP ID: ENSP00000246533
MFLVNSFLKGGGGGGGGGGGLGGGLGNVLGGLISGAGGGGGGGGGGGGGGGGGGGGTAMRILGGVISAISEAAAQYNPEPPPPRTHYSNIEANESEEVRQFRRLFAQLAGDDMEVSATELMNILNKVVTRHPDLKTDGFGIDTCRSMVAVMDSDTTGKLGFEEFKYLWNNIKRWQAIYKQFDTDRSGTICSSELPGAFEAAGFHLNEHLYNMIIRRYSDESGNMDFDNFISCLVRLDAMFRAFKSLDKDGTGQIQVNIQEWLQLTMYS

SEQ ID NO: 11197 - protein, 268 aa, Homo sapiens; identical to SEQ ID NO: 11196
  Payload ID: 2210
  Gene Symbol: CAPNS1
  Gene Name: calpain, small subunit 1
  Uniprot ID: P04632
  ENSP ID: ENSP00000464849

SEQ ID NO: 11198 - protein, 196 aa, Homo sapiens
  Payload ID: 2210
  Gene Symbol: CAPNS1
  Gene Name: calpain, small subunit 1
  ENSP ID: ENSP00000464903
  MOD_RES (1)..(1): Any amino acid
XTAMRILGGVISAISEAAAQYNPEPPPPRTHYSNIEANESEEVRQFRRLFAQLAGDDMEVSATELMNILNKVVTRHPDLKTDGFGIDTCRSMVAVMDSDTTGKLGFEEFKYLWNNIKRWQAIYKQFDTDRSGTICSSELPGAFEAADESGNMDFDNFISCLVRLDAMFRAFKSLDKDGTGQIQVNIQEWLQLTMYS

SEQ ID NO: 11199 - protein, 238 aa, Homo sapiens
  Payload ID: 2210
  Gene Symbol: CAPNS1
  Gene Name: calpain, small subunit 1
  ENSP ID: ENSP00000465575
MFLVNSFLKGGGGGGGGGGGLGGGLGNVLGGLISGAGGGGGGGGGGGGGGGGGGGGTAMRILGGVISAISEAAAQYNPEPPDMEVSATELMNILNKVVTRHPDLKTDGFGIDTCRSMVAVMDSDTTGKLGFEEFKYLWNNIKRWQAIYKQFDTDRSGTICSSELPGAFEAAGFHLNEHLYNMIIRRYSDESGNMDFDNFISCLVRLDAMFRAFKSLDKDGTGQIQVNIQEWLQLTMYS

SEQ ID NO: 11200 - protein, 278 aa, Homo sapiens
  Payload ID: 2210
  Gene Symbol: CAPNS1
  Gene Name: calpain, small subunit 1
  ENSP ID: ENSP00000466113
MFLVNSFLKGGGGGGGGGGGLGGGLGNVLGGLISGAGGGGGGGGGGGGGGGGGGGGTAMRILGGVISAISEAAAQYNPEPPPPRTHYSNIEANESEEVRQFRRLFAQLAGDDMEVSATELMNILNKVVTRHPDLKTDGFGIDTCRSMVAVMDLSLFLTPSHQSDTTGKLGFEEFKYLWNNIKRWQAIYKQFDTDRSGTICSSELPGAFEAAGFHLNEHLYNMIIRRYSDESGNMDFDNFISCLVRLDAMFRAFKSLDKDGTGQIQVNIQEWLQLTMYS

SEQ ID NO: 11201 - protein, 163 aa, Homo sapiens
  Payload ID: 2210
  Gene Symbol: CAPNS1
  Gene Name: calpain, small subunit 1
  ENSP ID: ENSP00000466386
MFLVNSFLKGGGGGGGGGGGLGGGLGNVLGGLISGAGGGGGGGGGGGGGGGGGGGGTAMRILGGVISAISEAAAQYNPEPPPPRTHYSNIEANESEEVRQFRRLFAQLAGDDMEVSATELMNILNKVVTRHPDLKTDGFGIDTCRSMVAVMDSDTTGKLGFEE

SEQ ID NO: 11202 - protein, 94 aa, Homo sapiens
  Payload ID: 2210
  Gene Symbol: CAPNS1
  Gene Name: calpain, small subunit 1
  ENSP ID: ENSP00000466601
MFLVNSFLKGGGGGGGGGGGLGAFEAAGFHLNEHLYNMIIRRYSDESGNMDFDNFISCLVRLDAMFRAFKSLDKDGTGQIQVNIQEWLQLTMYS

SEQ ID NO: 11203 - protein, 322 aa, Homo sapiens
  Payload ID: 2210
  Gene Symbol: CAPNS1
  Gene Name: calpain, small subunit 1
  ENSP ID: ENSP00000468041
MFLVNSFLKGGGGGGGGGGGLGGGLGNVLGGLISGAGGGGGGGGGGGGGGGGGGGGTAMRILGGVISAISEAAAQYNPEPPPPRTHYSNIEANESEEVRQFRRLFAQLAGDDMEVSATELMNILNKVVTRHPDLKTDGFGIDTCRSMVAVMDSDTTGKLGFEEFKYLWNNIKRWQAIYKQFDTDRSGTICSSELPGAFEAAGFHLNEHLYNMIIRRYSDESGNMDFDNFISCLVRLDAMFRAFKSLDKDGTGQIQVNIQEVRTPILGYGCLGGPHPSALHTSSELQSPSSYFASRPWVRAKGLVLLGFPVLTLHPPLPSGCS

SEQ ID NO: 11204 - protein, 72 aa, Homo sapiens
  Payload ID: 2210
  Gene Symbol: CAPNS1
  Gene Name: calpain, small subunit 1
  ENSP ID: ENSP00000468591
MFLVNSFLKGGGGGGGGGGGLGGGLGNVLGGLISGAGGGGGGGGGGGGGGGGGGGGTAMRILGGVISAISEA

SEQ ID NO: 11205 - protein, 197 aa, Homo sapiens
  Payload ID: 2210
  Gene Symbol: CAPNS1
  Gene Name: calpain, small subunit 1
  ENSP ID: ENSP00000474036
GGGGGGGTAMRILGGVISAISEAAAQYNPEPPPPRTHYSNIEANESEEVRQFRRLFAQLAGDDMEVSATELMNILNKVVTRHPDLKTDGFGIDTCRSMVAVMDSDTTGKLGFEEFKYLWNNIKRWQAIYKQFDTDRSGTICSSELPGAFEAAGFHLNEHLYNMIIRRYSDESGNMDFDNFISCLAQEEINMPQLLIS

SEQ ID NO: 11206 - protein, 54 aa, Homo sapiens
  Payload ID: 2210
  Gene Symbol: CAPNS1
  Gene Name: calpain, small subunit 1
  ENSP ID: ENSP00000474280
  MOD_RES (1)..(1): Any amino acid
XILGGVISAISEAAAQYNPEPPPPRTHYSNIEDTLTSSVHGSPHSHQALHTPTP

SEQ ID NO: 11207 - protein, 100 aa, Homo sapiens
  Payload ID: 2210
  Gene Symbol: CAPNS1
  Gene Name: calpain, small subunit 1
  ENSP ID: ENSP00000475159
MEVSATELMNILNKVVTRHPDLKTDGFGIDTCRSMVAVMDSDTTGKLGFEEFKYLWNNIKRWQAIYKQFDTDRSGTICSSELPGAFEAAGFHLNEHLYNM

SEQ ID NO: 11208 - protein, 161 aa, Homo sapiens
  Payload ID: 2210
  Gene Symbol: CAPNS1
  Gene Name: calpain, small subunit 1
  ENSP ID: ENSP00000475804
MGEAAAQYNPEPPPPRTHYSNIEANESEEVRQFRRLFAQLAGDDMEVSATELMNILNKVVTRHPDLKTDGFGIDTCRSMVAVMDSDTTGKLGFEEFKYLWNNIKRWQAIYKQFDTDRSGTICSSELPGAFEAAGFHLNEHLYNMIIRRYSDESGNMDFDNF

SEQ ID NO: 11209 - protein, 94 aa, Homo sapiens; identical to SEQ ID NO: 11202
  Payload ID: 2210
  Gene Symbol: CAPNS1
  Gene Name: calpain, small subunit 1
  ENSP ID: ENSP00000486032

SEQ ID NO: 11210 - protein, 238 aa, Homo sapiens; identical to SEQ ID NO: 11199
  Payload ID: 2210
  Gene Symbol: CAPNS1
  Gene Name: calpain, small subunit 1
  ENSP ID: ENSP00000486832

SEQ ID NO: 11211 - protein, 278 aa, Homo sapiens; identical to SEQ ID NO: 11200
  Payload ID: 2210
  Gene Symbol: CAPNS1
  Gene Name: calpain, small subunit 1
  ENSP ID: ENSP00000487115

SEQ ID NO: 11212 - protein, 248 aa, Homo sapiens
  Payload ID: 2211
  Gene Symbol: CAPNS2
  Gene Name: calpain, small subunit 2
  Uniprot ID: Q96L46
  ENSP ID: ENSP00000400882
MFLAKALLEGADRGLGEALGGLFGGGGQRREGGGRNIGGIVGGIVNFISEAAAAQYTPEPPPTQQHFTSVEASESEEVRRFRQQFTQLAGPDMEVGATDLMNILNKVLSKHKDLKTDGFSLDTCRSIVSVMDSDTTGKLGFEEFKYLWNNIKKWQCVYKQYDRDHSGSLGSSQLRGALQAAGFQLNEQLYQMIVRRYANEDGDMDFNNFISCLVRLDAMFRAFKSLDRDRDGLIQVSIKEWLQLTMYS

SEQ ID NO: 11213 - protein, 686 aa, Homo sapiens
  Payload ID: 2212
  Gene Symbol: CAST
  Gene Name: calpastatin
  Uniprot ID: P20810
  ENSP ID: ENSP00000312523
MNPTETKAVKTEPEKKSQSTKLSVVHEKKSQEGKPKEHTEPKSLPKQASDTGSNDAHNKKAVSRSAEQQPSEKSTEPKTKPQDMISAGGESVAGITAISGKPGDKKKEKKSLTPAVPVESKPDKPSGKSGMDAALDDLIDTLGGPEETEEENTTYTGPEVSDPMSSTYIEELGKREVTIPPKYRELLAKKEGITGPPADSSKPIGPDDAIDALSSDFTCGSPTAAGKKTEKEESTEVLKAQSAGTVRSAAPPQEKKRKVEKDTMSDQALEALSASLGTRQAEPELDLRSIKEVDEAKAKEEKLEKCGEDDETIPSEYRLKPATDKDGKPLLPEPEEKPKPRSESELIDELSEDFDRSECKEKPSKPTEKTEESKAAAPAPVSEAVCRTSMCSIQSAPPEPATLKGTVPDDAVEALADSLGKKEADPEDGKPVMDKVKEKAKEEDREKLGEKEETIPPDYRLEEVKDKDGKPLLPKESKEQLPPMSEDFLLDALSEDFSGPQNASSLKFEDAKLAAAISEVVSQTPASTTQAGAPPRDTSQSDKDLDDALDKLSDSLGQRQPDPDENKPMEDKVKEKAKAEHRDKLGERDDTIPPEYRHLLDDNGQDKPVKPPTKKSEDSKKPADDQDPIDALSGDLDSCPSTTETSQNTAKDKCKKAASSSKAPKNGGKAKDSAKTTEETSKPKDD

SEQ ID NO: 11214 - protein, 430 aa, Homo sapiens
  Payload ID: 2212
  Gene Symbol: CAST
  Gene Name: calpastatin
  ENSP ID: ENSP00000320319
MGQFLSSTFLEGSPATVWHDKLCDGERRGAREAVRIFQDQAKAKEEKLEKCGEDDETIPSEYRLKPATDKDGKPLLPEPEEKPKPRSESELIDELSEDFDRSECKEKPSKPTEKTEESKAAAPAPVSEAVCRTSMCSIQSAPPEPATLKGTVPDDAVEALADSLGKKEADPEDGKPVMDKVKEKAKEEDREKLGEKEETIPPDYRLEEVKDKDGKPLLPKESKEQLPPMSEDFLLDALSEDFSGPQNASSLKFEDAKLAAAISEVVSQTPASTTQAGAPPRDTSSDKDLDDALDKLSDSLGQRQPDPDENKPMEDKVKEKAKAEHRDKLGERDDTIPPEYRHLLDDNGQDKPVKPPTKKSEDSKKPADDQDPIDALSGDLDSCPSTTETSQNTAKDKCKKAASSSKAPKNGGKAKDSAKTTEETSKPKDD

SEQ ID NO: 11215 - protein, 708 aa, Homo sapiens
  Payload ID: 2212
  Gene Symbol: CAST
  Gene Name: calpastatin
  Uniprot ID: P20810
  ENSP ID: ENSP00000339914
MNPTETKAIPVSQQMEGPHLPNKKKHKKQAVKTEPEKKSQSTKLSVVHEKKSQEGKPKEHTEPKSLPKQASDTGSNDAHNKKAVSRSAEQQPSEKSTEPKTKPQDMISAGGESVAGITAISGKPGDKKKEKKSLTPAVPVESKPDKPSGKSGMDAALDDLIDTLGGPEETEEENTTYTGPEVSDPMSSTYIEELGKREVTIPPKYRELLAKKEGITGPPADSSKPIGPDDAIDALSSDFTCGSPTAAGKKTEKEESTEVLKAQSAGTVRSAAPPQEKKRKVEKDTMSDQALEALSASLGTRQAEPELDLRSIKEVDEAKAKEEKLEKCGEDDETIPSEYRLKPATDKDGKPLLPEPEEKPKPRSESELIDELSEDFDRSECKEKPSKPTEKTEESKAAAPAPVSEAVCRTSMCSIQSAPPEPATLKGTVPDDAVEALADSLGKKEADPEDGKPVMDKVKEKAKEEDREKLGEKEETIPPDYRLEEVKDKDGKPLLPKESKEQLPPMSEDFLLDALSEDFSGPQNASSLKFEDAKLAAAISEVVSQTPASTTQAGAPPRDTSQSDKDLDDALDKLSDSLGQRQPDPDENKPMEDKVKEKAKAEHRDKLGERDDTIPPEYRHLLDDNGQDKPVKPPTKKSEDSKKPADDQDPIDALSGDLDSCPSTTETSQNTAKDKCKKAASSSKAPKNGGKAKDSAKTTEETSKPKDD

SEQ ID NO: 11216 - protein, 695 aa, Homo sapiens
  Payload ID: 2212
  Gene Symbol: CAST
  Gene Name: calpastatin
  Uniprot ID: P20810
  ENSP ID: ENSP00000343421
MNPTETKAIPVSQQMEGPHLPNKKKHKKQAVKTEPEKKSQSTKLSVVHEKKSQEGKPKEHTEPKSLPKQASDTGSNDAHNKKAVSRSAEQQPSEKSTEPKTKPQDMISAGGESVAGITAISGKPGDKKKEKKSLTPAVPVESKPDKPSGKSGMDAALDDLIDTLGGPEETEEENTTYTGPEVSDPMSSTYIEELGKREVTIPPKYRELLAKPIGPDDAIDALSSDFTCGSPTAAGKKTEKEESTEVLKAQSAGTVRSAAPPQEKKRKVEKDTMSDQALEALSASLGTRQAEPELDLRSIKEVDEAKAKEEKLEKCGEDDETIPSEYRLKPATDKDGKPLLPEPEEKPKPRSESELIDELSEDFDRSECKEKPSKPTEKTEESKAAAPAPVSEAVCRTSMCSIQSAPPEPATLKGTVPDDAVEALADSLGKKEADPEDGKPVMDKVKEKAKEEDREKLGEKEETIPPDYRLEEVKDKDGKPLLPKESKEQLPPMSEDFLLDALSEDFSGPQNASSLKFEDAKLAAAISEVVSQTPASTTQAGAPPRDTSQSDKDLDDALDKLSDSLGQRQPDPDENKPMEDKVKEKAKAEHRDKLGERDDTIPPEYRHLLDDNGQDKPVKPPTKKSEDSKKPADDQDPIDALSGDLDSCPSTTETSQNTAKDKCKKAASSSKAPKNGGKAKDSAKTTEETSKPKDD

SEQ ID NO: 11217 - protein, 750 aa, Homo sapiens
  Payload ID: 2212
  Gene Symbol: CAST
  Gene Name: calpastatin
  Uniprot ID: P20810
  ENSP ID: ENSP00000379157
MSQPGQKPAASPRPRRAAAARRTHEHVSEKTSESPSKPGEKKGSDEKKAASLGSSQSSRTYAGGTASATKVSASSGATSKSSSMNPTETKAVKTEPEKKSQSTKPKSLPKQASDTGSNDAHNKKAVSRSAEQQPSEKSTEPKTKPQDMISAGGESVAGITAISGKPGDKKKEKKSLTPAVPVESKPDKPSGKSGMDAALDDLIDTLGGPEETEEENTTYTGPEVSDPMSSTYIEELGKREVTIPPKYRELLAKKEGITGPPADSSKPIGPDDAIDALSSDFTCGSPTAAGKKTEKEESTEVLKAQSAGTVRSAAPPQEKKRKVEKDTMSDQALEALSASLGTRQAEPELDLRSIKEVDEAKAKEEKLEKCGEDDETIPSEYRLKPATDKDGKPLLPEPEEKPKPRSESELIDELSEDFDRSECKEKPSKPTEKTEESKAAAPAPVSEAVCRTSMCSIQSAPPEPATLKGTVPDDAVEALADSLGKKEADPEDGKPVMDKVKEKAKEEDREKLGEKEETIPPDYRLEEVKDKDGKPLLPKESKEQLPPMSEDFLLDALSEDFSGPQNASSLKFEDAKLAAAISEVVSQTPASTTQAGAPPRDTSQSDKDLDDALDKLSDSLGQRQPDPDENKPMEDKVKEKAKAEHRDKLGERDDTIPPEYRHLLDDNGQDKPVKPPTKKSEDSKKPADDQDPIDALSGDLDSCPSTTETSQNTAKDKCKKAASSSKAPKNGGKAKDSAKTTEETSKPKDD

SEQ ID NO: 11218 - protein, 708 aa, Homo sapiens; identical to SEQ ID NO: 11215
  Payload ID: 2212
  Gene Symbol: CAST
  Gene Name: calpastatin
  Uniprot ID: P20810
  ENSP ID: ENSP00000379158

SEQ ID NO: 11219 - protein, 304 aa, Homo sapiens
  Payload ID: 2212
  Gene Symbol: CAST
  Gene Name: calpastatin
  ENSP ID: ENSP00000396558
MSQPGQKPAASPRPRRAAAARRTHEHVSEKTSESPSKPGEKKGSDEKKAASLGSSQSSRTYAGGTASATKVSASSGATSKSSSMNPTETKAIPVSQQMEGPHLPNKKKHKKQAVKTEPEKKSQSTKPKSLPKQASDTGSNDAHNKKAVSRSAEQQPSEKSTEPKTKPQDMISAGGESVAGITAISGKPGDKKKEKKSLTPAVPVESKPDKPSGKSGMDAALDDLIDTLGGPEETEEENTTYTGPEVSDPMSSTYIEELGKREVTIPPKYRELLAKKEGITGPPADSSKPIGPDDAIDALSSDFT

SEQ ID NO: 11220 - protein, 436 aa, Homo sapiens
  Payload ID: 2212
  Gene Symbol: CAST
  Gene Name: calpastatin
  ENSP ID: ENSP00000412374
  MOD_RES (1)..(1): Any amino acid
XKTEKEESTEVLKAQSAGTVRSAAPPQEKKRKVEKDTMSDQALEALSASLGTRQAEPELDLRSIKEVDEAKAKEEKLEKCGEDDETIPSEYRLKPATDKDGKPLLPEPEEKPKPRSESELIDELSEDFDRSECKEKPSKPTEKTEESKAAAPAPVSEAVCRTSMCSIQSAPPEPATLKGTVPDDAVEALADSLGKKEADPEDGKPVMDKVKEKAKEEDREKLGEKEETIPPDYRLEEVKDKDGKPLLPKESKEQLPPMSEDFLLDALSEDFSGPQNASSLKFEDAKLAAAISEVVSQTPASTTQAGAPPRDTSQSDKDLDDALDKLSDSLGQRQPDPDENKPMEDKVKEKAKAEHRDKLGERDDTIPPEYRHLLDDNGQDKPVKPPTKKSEDSKKPADDQDPIDALSGDLDSCPSTTETSQNTAKTTEETSKPKDD

SEQ ID NO: 11221 - protein, 693 aa, Homo sapiens
  Payload ID: 2212
  Gene Symbol: CAST
  Gene Name: calpastatin
  ENSP ID: ENSP00000421130
MEGPHLPNKKKHKKQAVKTEPEKKSQSTKLSVVHEKKSQEGKPKEHTEPKSLPKQASDTGSNDAHNKKAVSRSAEQQPSEKSTEPKTKPQDMISAGGESVAGITAISGKPGDKKKEKKSLTPAVPVESKPDKPSGKSGMDAALDDLIDTLGGPEETEEENTTYTGPEVSDPMSSTYIEELGKREVTIPPKYRELLAKKEGITGPPADSSKPIGPDDAIDALSSDFTCGSPTAAGKKTEKEESTEVLKAQSAGTVRSAAPPQEKKRKVEKDTMSDQALEALSASLGTRQAEPELDLRSIKEVDEAKAKEEKLEKCGEDDETIPSEYRLKPATDKDGKPLLPEPEEKPKPRSESELIDELSEDFDRSECKEKPSKPTEKTEESKAAAPAPVSEAVCRTSMCSIQSAPPEPATLKGTVPDDAVEALADSLGKKEADPEDGKPVMDKVKEKAKEEDREKLGEKEETIPPDYRLEEVKDKDGKPLLPKESKEQLPPMSEDFLLDALSEDFSGPQNASSLKFEDAKLAAAISEVVSQTPASTTQAGAPPRDTSSDKDLDDALDKLSDSLGQRQPDPDENKPMEDKVKEKAKAEHRDKLGERDDTIPPEYRHLLDDNGQDKPVKPPTKKSEDSKKPADDQDPIDALSGDLDSCPSTTETSQNTAKDKCKKAASSSKAPKNGGKAKDSAKTTEETSKPKDD

SEQ ID NO: 11222 - protein, 149 aa, Homo sapiens
  Payload ID: 2212
  Gene Symbol: CAST
  Gene Name: calpastatin
  ENSP ID: ENSP00000421230
MAFASWWYKTHVSEKTSESPSKPGEKKGSDEKKAASLGSSQSSRTYAGGTASATKVSASSGATSKSSSMNPTETKAIPVSQQMEGPHLPNKKKHKKQAVKTEPEKKSQSTKPKSLPKQASDTGSNDAHNKKAVSRSAEQQPSEKSTEPK

SEQ ID NO: 11223 - protein, 769 aa, Homo sapiens
  Payload ID: 2212
  Gene Symbol: CAST
  Gene Name: calpastatin
  Uniprot ID: P20810
  ENSP ID: ENSP00000422176
MSQPGQKPAASPRPRRAAAARRTHEHVSEKTSESPSKPGEKKGSDEKKAASLGSSQSSRTYAGGTASATKVSASSGATSKSSSMNPTETKAVKTEPEKKSQSTKLSVVHEKKSQEGKPKEHTEPKSLPKQASDTGSNDAHNKKAVSRSAEQQPSEKSTEPKTKPQDMISAGGESVAGITAISGKPGDKKKEKKSLTPAVPVESKPDKPSGKSGMDAALDDLIDTLGGPEETEEENTTYTGPEVSDPMSSTYIEELGKREVTIPPKYRELLAKKEGITGPPADSSKPIGPDDAIDALSSDFTCGSPTAAGKKTEKEESTEVLKAQSAGTVRSAAPPQEKKRKVEKDTMSDQALEALSASLGTRQAEPELDLRSIKEVDEAKAKEEKLEKCGEDDETIPSEYRLKPATDKDGKPLLPEPEEKPKPRSESELIDELSEDFDRSECKEKPSKPTEKTEESKAAAPAPVSEAVCRTSMCSIQSAPPEPATLKGTVPDDAVEALADSLGKKEADPEDGKPVMDKVKEKAKEEDREKLGEKEETIPPDYRLEEVKDKDGKPLLPKESKEQLPPMSEDFLLDALSEDFSGPQNASSLKFEDAKLAAAISEVVSQTPASTTQAGAPPRDTSQSDKDLDDALDKLSDSLGQRQPDPDENKPMEDKVKEKAKAEHRDKLGERDDTIPPEYRHLLDDNGQDKPVKPPTKKSEDSKKPADDQDPIDALSGDLDSCPSTTETSQNTAKDKCKKAASSSKAPKNGGKAKDSAKTTEETSKPKDD

SEQ ID NO: 11224 - protein, 642 aa, Homo sapiens
  Payload ID: 2212
  Gene Symbol: CAST
  Gene Name: calpastatin
  ENSP ID: ENSP00000422325
MNPTETKAIPVSQQMEGPHLPNKKKHKKQAVKTEPEKKSQSTKLSVVHEKKSQEGKPKEHTEPKSLPKQASDTGSNDAHNKKAVSRSAEQQPSEKSTEPKTKPQDMISAGGESVAGITAISGKPGDKKKEKKSLTPAVPVESKPDKPSGKSGMDAALDDLIDTLGGPEETEEENTTYTGPEVSDPMSSTYIEELGKREVTIPPKYRELLAKKEGITGPPADSSKPIGPDDAIDALSSDFTCGSPTAAGKKTEKEESTEVLKAQSAGTVRSAAPPQEKKRKVEKDTMSDQALEALSASLGTRQAEPELDLRSIKEVDEAKAKEEKLEKCGEDDETIPSEYRLKPATDKDGKPLLPEPEEKPKPRSESELIDELSEDFDRSECKEKPSKPTEKTEESKAAAPAPVSEAVCRTSMCSIQSAPPEPATLKGTVPDDAVEALADSLGKKEADPEDGKPVMDKVKEKAKEEDREKLGEKEETIPPDYRLEEVKDKDGKPLLPKESKEQLPPMSEDFLLDALSEDFSGPQNASSLKFEDAKLAAAISEVVSQTPASTTQAGAPPRDTSQSDKDLDDALDKLSDSLGQRQPDPDENKPMEDKVKEKAKAEHRDKLGERDDTIPPEYRHLLDDNGQDKPVKPPTKKSEDSK

SEQ ID NO: 11225 - protein, 82 aa, Homo sapiens
  Payload ID: 2212
  Gene Symbol: CAST
  Gene Name: calpastatin
  ENSP ID: ENSP00000422466
MNPTETKAIPVSQQMEGPHLPNKKKHKKQAVKTEPEKKSQSTKLSVVHEKKSQEGKPKEHTEAPVCVLSAKKPTQAGIRYRK

SEQ ID NO: 11226 - protein, 150 aa, Homo sapiens
  Payload ID: 2212
  Gene Symbol: CAST
  Gene Name: calpastatin
  ENSP ID: ENSP00000422612
MAFASWWYKTHVSEKTSESPSKPGEKKGSDEKKAASLGSSQSSRTYAGGTASATKVSASSGATSKSSSMNPTETKAVKTEPEKKSQSTKPKSLPKQASDTGSNDAHNKKAVSRSAEQQPSEKSTEPKTKPQDMISAGGESVAGITAISGK

SEQ ID NO: 11227 - protein, 754 aa, Homo sapiens
  Payload ID: 2212
  Gene Symbol: CAST
  Gene Name: calpastatin
  ENSP ID: ENSP00000422677
MAFASWWYKTHVSEKTSESPSKPGEKKGSDEKKAASLGSSQSSRTYAGGTASATKVSASSGATSKSSSMNPTETKAVKTEPEKKSQSTKLSVVHEKKSQEGKPKEHTEPKSLPKQASDTGSNDAHNKKAVSRSAEQQPSEKSTEPKTKPQDMISAGGESVAGITAISGKPGDKKKEKKSLTPAVPVESKPDKPSGKSGMDAALDDLIDTLGGPEETEEENTTYTGPEVSDPMSSTYIEELGKREVTIPPKYRELLAKKEGITGPPADSSKPIGPDDAIDALSSDFTCGSPTAAGKKTEKEESTEVLKAQSAGTVRSAAPPQEKKRKVEKDTMSDQALEALSASLGTRQAEPELDLRSIKEVDEAKAKEEKLEKCGEDDETIPSEYRLKPATDKDGKPLLPEPEEKPKPRSESELIDELSEDFDRSECKEKPSKPTEKTEESKAAAPAPVSEAVCRTSMCSIQSAPPEPATLKGTVPDDAVEALADSLGKKEADPEDGKPVMDKVKEKAKEEDREKLGEKEETIPPDYRLEEVKDKDGKPLLPKESKEQLPPMSEDFLLDALSEDFSGPQNASSLKFEDAKLAAAISEVVSQTPASTTQAGAPPRDTSQSDKDLDDALDKLSDSLGQRQPDPDENKPMEDKVKEKAKAEHRDKLGERDDTIPPEYRHLLDDNGQDKPVKPPTKKSEDSKKPADDQDPIDALSGDLDSCPSTTETSQNTAKDKCKKAASSSKAPKNGGKAKDSAKTTEETSKPKDD

SEQ ID NO: 11228 - protein, 78 aa, Homo sapiens
  Payload ID: 2212
  Gene Symbol: CAST
  Gene Name: calpastatin
  ENSP ID: ENSP00000422807
MSDQALEALSASLGTRQAEPELDLRSIKEVDEAKAKEEKLEKCGEDDETIPSEYRLKPATDKDGKPLLPEPEEKPKVR

SEQ ID NO: 11229 - protein, 156 aa, Homo sapiens
  Payload ID: 2212
  Gene Symbol: CAST
  Gene Name: calpastatin
  ENSP ID: ENSP00000422831
MNPTETKAVKTEPEKKSQSTKLSVVHEKKSQEGKPKEHTEPKSLPKQASDTGSNDAHNKKAVSRSAEQQPSEKSTEPKKKEKKSLTPAVPVESKPDKPSGKSGMDAALDDLIDTLGGPEETEEENTTYTGPEVSDPMSSTYIEELGKREVTIPPKY

SEQ ID NO: 11230 - protein, 431 aa, Homo sapiens
  Payload ID: 2212
  Gene Symbol: CAST
  Gene Name: calpastatin
  ENSP ID: ENSP00000422929
MGQFLSSTFLEGSPATVWHDKLCDGERRGAREAVRIFQDQAKAKEEKLEKCGEDDETIPSEYRLKPATDKDGKPLLPEPEEKPKPRSESELIDELSEDFDRSECKEKPSKPTEKTEESKAAAPAPVSEAVCRTSMCSIQSAPPEPATLKGTVPDDAVEALADSLGKKEADPEDGKPVMDKVKEKAKEEDREKLGEKEETIPPDYRLEEVKDKDGKPLLPKESKEQLPPMSEDFLLDALSEDFSGPQNASSLKFEDAKLAAAISEVVSQTPASTTQAGAPPRDTSQSDKDLDDALDKLSDSLGQRQPDPDENKPMEDKVKEKAKAEHRDKLGERDDTIPPEYRHLLDDNGQDKPVKPPTKKSEDSKKPADDQDPIDALSGDLDSCPSTTETSQNTAKDKCKKAASSSKAPKNGGKAKDSAKTTEETSKPKDD

SEQ ID NO: 11231 - protein, 393 aa, Homo sapiens
  Payload ID: 2212
  Gene Symbol: CAST
  Gene Name: calpastatin
  ENSP ID: ENSP00000422951
MSQPGQKPAASPRPRRAAAARRTHEHVSEKTSESPSKPGEKKGSDEKKAASLGSSQSSRTYAGGTASATKVSASSGATSKSSSMNPTETKAVKTEPEKKSQSTKLSVVHEKKSQEGKPKEHTEPKSLPKQASDTGSNDAHNKKAVSRSAEQQPSEKSTEPKTKPQDMISAGGESVAGITAISGKPGDKKKEKKSLTPAVPVESKPDKPSGKSGMDAALDDLIDTLGGPEETEEENTTYTGPEVSDPMSSTYIEELGKREVTIPPKYRELLAKPIGPDDAIDALSSDFTCGSPTAAGKKTEKEESTEVLKAQSAGTVRSAAPPQEKKRKVEKDTMSDQALEALSASLGTRQAEPELDLRSIKEVDEAKAKEEKLEKCGEDDETIPSEYRLKPAT

SEQ ID NO: 11232 - protein, 288 aa, Homo sapiens
  Payload ID: 2212
  Gene Symbol: CAST
  Gene Name: calpastatin
  ENSP ID: ENSP00000422957
GEVPSAMIVSFLRPSQPFRTHVSEKTSESPSKPGEKKGSDEKKAASLGSSQSSRTYAGGTASATKVSASSGATSKSSSMNPTETKAIPVSQQMEGPHLPNKKKHKKQAVKTEPEKKSQSTKLSVVHEKKSQEGKPKEHTEPKSLPKQASDTGSNDAHNKKAVSRSAEQQPSEKSTEPKTKPQDMISAGGESVAGITAISGKPGDKKKEKKSLTPAVPVESKPDKPSGKSGMDAALDDLIDTLGGPEETEEENTTYTGPEVSDPMSSTYIEELGKREVTIPPKYRELLA

SEQ ID NO: 11233 - protein, 694 aa, Homo sapiens
  Payload ID: 2212
  Gene Symbol: CAST
  Gene Name: calpastatin
  ENSP ID: ENSP00000423638
MEGPHLPNKKKHKKQAVKTEPEKKSQSTKLSVVHEKKSQEGKPKEHTEPKSLPKQASDTGSNDAHNKKAVSRSAEQQPSEKSTEPKTKPQDMISAGGESVAGITAISGKPGDKKKEKKSLTPAVPVESKPDKPSGKSGMDAALDDLIDTLGGPEETEEENTTYTGPEVSDPMSSTYIEELGKREVTIPPKYRELLAKKEGITGPPADSSKPIGPDDAIDALSSDFTCGSPTAAGKKTEKEESTEVLKAQSAGTVRSAAPPQEKKRKVEKDTMSDQALEALSASLGTRQAEPELDLRSIKEVDEAKAKEEKLEKCGEDDETIPSEYRLKPATDKDGKPLLPEPEEKPKPRSESELIDELSEDFDRSECKEKPSKPTEKTEESKAAAPAPVSEAVCRTSMCSIQSAPPEPATLKGTVPDDAVEALADSLGKKEADPEDGKPVMDKVKEKAKEEDREKLGEKEETIPPDYRLEEVKDKDGKPLLPKESKEQLPPMSEDFLLDALSEDFSGPQNASSLKFEDAKLAAAISEVVSQTPASTTQAGAPPRDTSQSDKDLDDALDKLSDSLGQRQPDPDENKPMEDKVKEKAKAEHRDKLGERDDTIPPEYRHLLDDNGQDKPVKPPTKKSEDSKKPADDQDPIDALSGDLDSCPSTTETSQNTAKDKCKKAASSSKAPKNGGKAKDSAKTTEETSKPKDD

SEQ ID NO: 11234 - protein, 91 aa, Homo sapiens
  Payload ID: 2212
  Gene Symbol: CAST
  Gene Name: calpastatin
  ENSP ID: ENSP00000423846
MSDQALEALSASLGTRQAEPELDLRSIKEVDEDKDGKPLLPEPEEKPKPRSESELIDELSEDFDRSECKEKPSKPTEKTEESKAAAPAPVS

SEQ ID NO: 11235 - protein, 465 aa, Homo sapiens
  Payload ID: 2212
  Gene Symbol: CAST
  Gene Name: calpastatin
  ENSP ID: ENSP00000424160
  MOD_RES (1)..(1): Any amino acid
XPTAAGKKTEKEESTEVLKAQSAGTVRSAAPPQEKKRKVEKDTMSDQALEALSASLGTRQAEPELDLRSIKEVDEAKAKEEKLEKCGEDDETIPSEYRLKPATDKDGKPLLPEPEEKPKPRSESELIDELSEDFDRSECKEKPSKPTEKTEESKAAAPAPVSEAVCRTSMCSIQSAPPEPATLKGTVPDDAVEALADSLGKKEADPEDGKPVMDKVKEKAKEEDREKLGEKEETIPPDYRLEEVKDKDGKPLLPKESKEQLPPMSEDFLLDALSEDFSGPQNASSLKFEDAKLAAAISEVVSQTPASTTQAGAPPRDTSSDKDLDDALDKLSDSLGQRQPDPDENKPMEDKVKEKAKAEHRDKLGERDDTIPPEYRHLLDDNGQDKPVKPPTKKSEDSKKPADDQDPIDALSGDLDSCPSTTETSQNTAKDKCKKAASSSKAPKNGGKAKDSAKTTEETSKPKDD

SEQ ID NO: 11236 - protein, 636 aa, Homo sapiens
  Payload ID: 2212
  Gene Symbol: CAST
  Gene Name: calpastatin
  ENSP ID: ENSP00000425670
MNPTETKAVKTEPEKKSQSTKLSVVHEKKSQEGKPKEHTEPKSLPKQASDTGSNDAHNKKAVSRSAEQQPSEKSTEPKSGMDAALDDLIDTLGGPEETEEENTTYTGPEVSDPMSSTYIEELGKREVTIPPKYRELLAKKEGITGPPADSSKPIGPDDAIDALSSDFTCGSPTAAGKKTEKEESTEVLKAQSAGTVRSAAPPQEKKRKVEKDTMSDQALEALSASLGTRQAEPELDLRSIKEVDEAKAKEEKLEKCGEDDETIPSEYRLKPATDKDGKPLLPEPEEKPKPRSESELIDELSEDFDRSECKEKPSKPTEKTEESKAAAPAPVSEAVCRTSMCSIQSAPPEPATLKGTVPDDAVEALADSLGKKEADPEDGKPVMDKVKEKAKEEDREKLGEKEETIPPDYRLEEVKDKDGKPLLPKESKEQLPPMSEDFLLDALSEDFSGPQNASSLKFEDAKLAAAISEVVSQTPASTTQAGAPPRDTSQSDKDLDDALDKLSDSLGQRQPDPDENKPMEDKVKEKAKAEHRDKLGERDDTIPPEYRHLLDDNGQDKPVKPPTKKSEDSKKPADDQDPIDALSGDLDSCPSTTETSQNTAKDKCKKAASSSKAPKNGGKAKDSAKTTEETSKPKDD

SEQ ID NO: 11237 - protein, 791 aa, Homo sapiens
  Payload ID: 2212
  Gene Symbol: CAST
  Gene Name: calpastatin
  Uniprot ID: P20810
  ENSP ID: ENSP00000425721
MSQPGQKPAASPRPRRAAAARRTHEHVSEKTSESPSKPGEKKGSDEKKAASLGSSQSSRTYAGGTASATKVSASSGATSKSSSMNPTETKAIPVSQQMEGPHLPNKKKHKKQAVKTEPEKKSQSTKLSVVHEKKSQEGKPKEHTEPKSLPKQASDTGSNDAHNKKAVSRSAEQQPSEKSTEPKTKPQDMISAGGESVAGITAISGKPGDKKKEKKSLTPAVPVESKPDKPSGKSGMDAALDDLIDTLGGPEETEEENTTYTGPEVSDPMSSTYIEELGKREVTIPPKYRELLAKKEGITGPPADSSKPIGPDDAIDALSSDFTCGSPTAAGKKTEKEESTEVLKAQSAGTVRSAAPPQEKKRKVEKDTMSDQALEALSASLGTRQAEPELDLRSIKEVDEAKAKEEKLEKCGEDDETIPSEYRLKPATDKDGKPLLPEPEEKPKPRSESELIDELSEDFDRSECKEKPSKPTEKTEESKAAAPAPVSEAVCRTSMCSIQSAPPEPATLKGTVPDDAVEALADSLGKKEADPEDGKPVMDKVKEKAKEEDREKLGEKEETIPPDYRLEEVKDKDGKPLLPKESKEQLPPMSEDFLLDALSEDFSGPQNASSLKFEDAKLAAAISEVVSQTPASTTQAGAPPRDTSQSDKDLDDALDKLSDSLGQRQPDPDENKPMEDKVKEKAKAEHRDKLGERDDTIPPEYRHLLDDNGQDKPVKPPTKKSEDSKKPADDQDPIDALSGDLDSCPSTTETSQNTAKDKCKKAASSSKAPKNGGKAKDSAKTTEETSKPKDD

SEQ ID NO: 11238 - protein, 423 aa, Homo sapiens
  Payload ID: 2212
  Gene Symbol: CAST
  Gene Name: calpastatin
  ENSP ID: ENSP00000425787
MSDQALEALSASLGTRQAEPELDLRSIKEVDEAKAKEEKLEKCGEDDETIPSEYRLKPATDKDGKPLLPEPEEKPKPRSESELIDELSEDFDRSECKEKPSKPTEKTEESKAAAPAPVSEAVCRTSMCSIQSAPPEPATLKGTVPDDAVEALADSLGKKEADPEDGKPVMDKVKEKAKEEDREKLGEKEETIPPDYRLEEVKDKDGKPLLPKESKEQLPPMSEDFLLDALSEDFSGPQNASSLKFEDAKLAAAISEVVSQTPASTTQAGAPPRDTSQSDKDLDDALDKLSDSLGQRQPDPDENKPMEDKVKEKAKAEHRDKLGERDDTIPPEYRHLLDDNGQDKPVKPPTKKSEDSKKPADDQDPIDALSGDLDSCPSTTETSQNTAKDKCKKAASSSKAPKNGGKAKDSAKTTEETSKPKDD

SEQ ID NO: 11239 - protein, 301 aa, Homo sapiens
  Payload ID: 2212
  Gene Symbol: CAST
  Gene Name: calpastatin
  ENSP ID: ENSP00000426422
  MOD_RES (1)..(1): Any amino acid
XAARRTHEHVSEKTSESPSKPGEKKGSDEKKAASLGSSQSSRTYAGGTASATKVSASSGATSKSSSMNPTETKAVKTEPEKKSQSTKLSVVHEKKSQEGKPKEHTEPKSLPKQASDTGSNDAHNKKAVSRSAEQQPSEKSTEPKKKEKKSLTPAVPVESKPDKPSGKSGMDAALDDLIDTLGGPEETEEENTTYTGPEVSDPMSSTYIEELGKREVTIPPKYRELLAKKEGITGPPADSSKPIGPDDAIDALSSDFTCGSPTAAGKKTEKEESTEVLKAQSAGTVRSAAPPQEKKRKVEKV

SEQ ID NO: 11240 - protein, 673 aa, Homo sapiens
  Payload ID: 2212
  Gene Symbol: CAST
  Gene Name: calpastatin
  ENSP ID: ENSP00000426946
MNPTETKAVKTEPEKKSQSTKLSVVHEKKSQEGKPKEHTEPKSLPKQASDTGSNDAHNKKAVSRSAEQQPSEKSTEPKTKPQDMISAGGESVAGITAISGKPGDKKKEKKSLTPAVPVESKPDKPSGKSGMDAALDDLIDTLGGPEETEEENTTYTGPEVSDPMSSTYIEELGKREVTIPPKYRELLAKPIGPDDAIDALSSDFTCGSPTAAGKKTEKEESTEVLKAQSAGTVRSAAPPQEKKRKVEKDTMSDQALEALSASLGTRQAEPELDLRSIKEVDEAKAKEEKLEKCGEDDETIPSEYRLKPATDKDGKPLLPEPEEKPKPRSESELIDELSEDFDRSECKEKPSKPTEKTEESKAAAPAPVSEAVCRTSMCSIQSAPPEPATLKGTVPDDAVEALADSLGKKEADPEDGKPVMDKVKEKAKEEDREKLGEKEETIPPDYRLEEVKDKDGKPLLPKESKEQLPPMSEDFLLDALSEDFSGPQNASSLKFEDAKLAAAISEVVSQTPASTTQAGAPPRDTSQSDKDLDDALDKLSDSLGQRQPDPDENKPMEDKVKEKAKAEHRDKLGERDDTIPPEYRHLLDDNGQDKPVKPPTKKSEDSKKPADDQDPIDALSGDLDSCPSTTETSQNTAKDKCKKAASSSKAPKNGGKAKDSAKTTEETSKPKDD

SEQ ID NO: 11241 - protein, 156 aa, Homo sapiens
  Payload ID: 2212
  Gene Symbol: CAST
  Gene Name: calpastatin
  ENSP ID: ENSP00000427092
MAFASWWYKTHVSEKTSESPSKPGEKKGSDEKKAASLGSSQSSRTYAGGTASATKVSASSGATSKSSSMNPTETKAIPVSQQMEGPHLPNKKKHKKQAVKTEPEKKSQSTKLSVVHEKKSQEGKPKEHTEPKSLPKQASDTGSNDAHNKKAVSRSA

SEQ ID NO: 11242 - protein, 203 aa, Homo sapiens
  Payload ID: 2212
  Gene Symbol: CAST
  Gene Name: calpastatin
  ENSP ID: ENSP00000427195
MSEDFLLDALSEDFSGPQNASSLKFEDAKLAAAISEVVSQTPASTTQAGAPPRDTSQSDKDLDDALDKLSDSLGQRQPDPDENKPMEDKVKEKAKAEHRDKLGERDDTIPPEYRHLLDDNGQDKPVKPPTKKSEDSKKPADDQDPIDALSGDLDSCPSTTETSQNTAKDKCKKAASSSKAPKNGGKAKDSAKTTEETSKPKDD

SEQ ID NO: 11243 - protein, 450 aa, Homo sapiens
  Payload ID: 2212
  Gene Symbol: CAST
  Gene Name: calpastatin
  ENSP ID: ENSP00000432878
  MOD_RES (1)..(1): Any amino acid
XGSLPDFQQQSLSLGLPWPKMGQFLSSTFLEGSPATVWHDKLCDGERRGAREAVRIFQDQAKAKEEKLEKCGEDDETIPSEYRLKPATDKDGKPLLPEPEEKPKPRSESELIDELSEDFDRSECKEKPSKPTEKTEESKAAAPAPVSEAVCRTSMCSIQSAPPEPATLKGTVPDDAVEALADSLGKKEADPEDGKPVMDKVKEKAKEEDREKLGEKEETIPPDYRLEEVKDKDGKPLLPKESKEQLPPMSEDFLLDALSEDFSGPQNASSLKFEDAKLAAAISEVVSQTPASTTQAGAPPRDTSSDKDLDDALDKLSDSLGQRQPDPDENKPMEDKVKEKAKAEHRDKLGERDDTIPPEYRHLLDDNGQDKPVKPPTKKSEDSKKPADDQDPIDALSGDLDSCPSTTETSQNTAKDKCKKAASSSKAPKNGGKAKDSAKTTEETSKPKDD

SEQ ID NO: 11244 - protein, 297 aa, Homo sapiens
  Payload ID: 2213
  Gene Symbol: CNN1
  Gene Name: calponin 1, basic, smooth muscle
  Uniprot ID: P51911
  ENSP ID: ENSP00000252456
MSSAHFNRGPAYGLSAEVKNKLAQKYDHQREQELREWIEGVTGRRIGNNFMDGLKDGIILCEFINKLQPGSVKKINESTQNWHQLENIGNFIKAITKYGVKPHDIFEANDLFENTNHTQVQSTLLALASMAKTKGNKVNVGVKYAEKQERKFEPGKLREGRNIIGLQMGTNKFASQQGMTAYGTRRHLYDPKLGTDQPLDQATISLQMGTNKGASQAGMTAPGTKRQIFEPGLGMEHCDTLNVSLQMGSNKGASQRGMTVYGLPRQVYDPKYCLTPEYPELGEPAHNHHAHNYYNSA

SEQ ID NO: 11245 - protein, 247 aa, Homo sapiens
  Payload ID: 2213
  Gene Symbol: CNN1
  Gene Name: calponin 1, basic, smooth muscle
  ENSP ID: ENSP00000442031
MDGLKDGIILCEFINKLQPGSVKKINESTQNWHQLENIGNFIKAITKYGVKPHDIFEANDLFENTNHTQVQSTLLALASMAKTKGNKVNVGVKYAEKQERKFEPGKLREGRNIIGLQMGTNKFASQQGMTAYGTRRHLYDPKLGTDQPLDQATISLQMGTNKGASQAGMTAPGTKRQIFEPGLGMEHCDTLNVSLQMGSNKGASQRGMTVYGLPRQVYDPKYCLTPEYPELGEPAHNHHAHNYYNSA

SEQ ID NO: 11246 - protein, 116 aa, Homo sapiens
  Payload ID: 2213
  Gene Symbol: CNN1
  Gene Name: calponin 1, basic, smooth muscle
  ENSP ID: ENSP00000466886
MDGLKDGIILCEFINKLQPGSVKKINESTQNWHQLENIGNFIKAITKYGVKPHDIFEANDLFENTNHTQVQSTLLALASMAKTKGNKVNVGVKYAEKQERKFEPGKLREGRNIIGL

SEQ ID NO: 11247 - protein, 173 aa, Homo sapiens
  Payload ID: 2213
  Gene Symbol: CNN1
  Gene Name: calponin 1, basic, smooth muscle
  ENSP ID: ENSP00000467701
  MOD_RES (1)..(1): Any amino acid
XKINESTQNWHQLENIGNFIKAITKYGVKPHDIFEANDLFENTNHTQVQSTLLALASMAKTKGNKVNVGVKYAEKQERKFEPGKLREGRNIIGLQMGTNKFASQQGMTAYGTRRHLYDPKLGTDQPLDQATISLQMGTNKGASQVSGGPRDTPSRPRTLATPRPDHTTLRRLA

SEQ ID NO: 11248 - protein, 228 aa, Homo sapiens
  Payload ID: 2213
  Gene Symbol: CNN1
  Gene Name: calponin 1, basic, smooth muscle
  ENSP ID: ENSP00000468053
  MOD_RES (1)..(1): Any amino acid
XEKQERKFEPGKLREGRNIIGLQMGTNKFASQQGMTAYGTRRHLYDPKLGTDQPLDQATISLQMGTNKGASQAGMTAPGTKRQIFEPGLGMEHCDTLNVSLQMGSNKGASQRGMTVYGLPRQVYDPKYCLTPEYPELAPKGRTEQRYSSCPPTPSQVGTPRTRSSPSKAPRAQARPAPTPFPQWEQTACPETQRTHAVWFAATGILCGCDSGVCNESTFFFFYFTGAQ

SEQ ID NO: 11249 - protein, 247 aa, Homo sapiens; identical to SEQ ID NO: 11245
  Payload ID: 2213
  Gene Symbol: CNN1
  Gene Name: calponin 1, basic, smooth muscle
  ENSP ID: ENSP00000468259

SEQ ID NO: 11250 - protein, 175 aa, Homo sapiens
  Payload ID: 2213
  Gene Symbol: CNN1
  Gene Name: calponin 1, basic, smooth muscle
  ENSP ID: ENSP00000468293
  MOD_RES (1)..(1): Any amino acid
XFINKLQPGSVKKINESTQNWHQLENIGNFIKAITKYGVKPHDIFEANDLFENTNHTQVQSTLLALASMAKTKGNKVNVGVKYAEKQERKFEPGKLREGRNIIGLQAGMTAPGTKRQIFEPGLGMEHCDTLNVSLQMGSNKGASQRGMTVYGLPRQVYDPKYCLTPEYPELGEPA

SEQ ID NO: 11251 - protein, 119 aa, Homo sapiens
  Payload ID: 2213
  Gene Symbol: CNN1
  Gene Name: calponin 1, basic, smooth muscle
  ENSP ID: ENSP00000468326
MGTQDWAKKRQRWGRERQRSRGDKRERDIQTCKGWGLRQRQAPTTNQRQSPGAEDLGDTERQRCMTSTPLQASTQGHLLRHPSSLPELAQKYDHQREQELREWIEGVTGRRIGNNFMDG

SEQ ID NO: 11252 - protein, 115 aa, Homo sapiens
  Payload ID: 2213
  Gene Symbol: CNN1
  Gene Name: calponin 1, basic, smooth muscle
  ENSP ID: ENSP00000468737
LCEFINKLQPGSVKKINESTQNWHQLENIGNFIKAITKYGVKPHDIFEPGLGMEHCDTLNVSLQMGSNKGASQRGMTVYGLPRQVYDPKYCLTPEYPELGEPAHNHHAHNYYNSA

SEQ ID NO: 11253 - protein, 309 aa, Homo sapiens
  Payload ID: 2214
  Gene Symbol: CNN2
  Gene Name: calponin 2
  Uniprot ID: Q99439
  ENSP ID: ENSP00000263097
MSSTQFNKGPSYGLSAEVKNRLLSKYDPQKEAELRTWIEGLTGLSIGPDFQKGLKDGTILCTLMNKLQPGSVPKINRSMQNWHQLENLSNFIKAMVSYGMNPVDLFEANDLFESGNMTQVQVSLLALAGKAKTKGLQSGVDIGVKYSEKQERNFDDATMKAGQCVIGLQMGTNKCASQSGMTAYGTRRHLYDPKNHILPPMDHSTISLQMGTNKCASQVGMTAPGTRRHIYDTKLGTDKCDNSSMSLQMGYTQGANQSGQVFGLGRQIYDPKYCPQGTVADGAPSGTGDCPDPGEVPEYPPYYQEEAGY

SEQ ID NO: 11254 - protein, 270 aa, Homo sapiens
  Payload ID: 2214
  Gene Symbol: CNN2
  Gene Name: calponin 2
  Uniprot ID: Q99439
  ENSP ID: ENSP00000340129
MSSTQFNKGPSYGLSAEVKNRLLSKYDPQKEAELRTWIEGLTGLSIGPDFQKGLKDGTILCTLMNKLQPGSVPKINRSMQNWHQLENLSNFIKAMVSYGMNPVDLFEANDLFESGNMTQVQVSLLALAGKMGTNKCASQSGMTAYGTRRHLYDPKNHILPPMDHSTISLQMGTNKCASQVGMTAPGTRRHIYDTKLGTDKCDNSSMSLQMGYTQGANQSGQVFGLGRQIYDPKYCPQGTVADGAPSGTGDCPDPGEVPEYPPYYQEEAGY

SEQ ID NO: 11255 - protein, 154 aa, Homo sapiens
  Payload ID: 2214
  Gene Symbol: CNN2
  Gene Name: calponin 2
  ENSP ID: ENSP00000455777
MNKLQPGSVPKINRSMQNWHQLENLSNFIKAMVSYGMNPVDLFEANDLFESGNMTQVQVSLLALAGKMGTNKCASQSGMTAYGTRRHLYDPKNHILPPMDHSTISLQMGTNKCASQVGLARVPPTPLPAPLHPVVSAPPWGHLQLLSPLSVSAP

SEQ ID NO: 11256 - protein, 330 aa, Homo sapiens
  Payload ID: 2214
  Gene Symbol: CNN2
  Gene Name: calponin 2
  ENSP ID: ENSP00000456436
MSSTQFNKGPSYGLSAEVKNRLLSKYDPQKEAELRTWIEGLTGLSIGPDFQKGLKDGTILCTLMNKLQPGSVPKINRSMQNWHQLENLSNFIKAMVSYGMNPVDLFEANDLFESGNMTQVQVSLLALAGKGLDLGSLAALCWYSRPLSLTQAKTKGLQSGVDIGVKYSEKQERNFDDATMKAGQCVIGLQMGTNKCASQSGMTAYGTRRHLYDPKNHILPPMDHSTISLQMGTNKCASQVGMTAPGTRRHIYDTKLGTDKCDNSSMSLQMGYTQGANQSGQVFGLGRQIYDPKYCPQGTVADGAPSGTGDCPDPGEVPEYPPYYQEEAGY

SEQ ID NO: 11257 - protein, 298 aa, Homo sapiens
  Payload ID: 2214
  Gene Symbol: CNN2
  Gene Name: calponin 2
  ENSP ID: ENSP00000457968
MSSTQFNKGPSYGLSAEVKNRLLSKYDPQKEAELRTWIEGLTGLSIGPDFQKGLKDGTILCTLMNKLQPGSVPKINRSMQNWHQLENLSNFIKAMVSYGMNPVDLFEANDLFESGNMTQAKTKGLQSGVDIGVKYSEKQERNFDDATMKAGQCVIGLQMGTNKCASQSGMTAYGTRRHLYDPKNHILPPMDHSTISLQMGTNKCASQVGMTAPGTRRHIYDTKLGTDKCDNSSMSLQMGYTQGANQSGQVFGLGRQIYDPKYCPQGTVADGAPSGTGDCPDPGEVPEYPPYYQEEAGY

SEQ ID NO: 11258 - protein, 218 aa, Homo sapiens
  Payload ID: 2214
  Gene Symbol: CNN2
  Gene Name: calponin 2
  ENSP ID: ENSP00000458137
LSIGPDFQKGLKDGTILCTLMNKLQPGSVPKINRSMQNWHQLENLSNFIKAMVSYGMNPVDLFEANDLFESGNMTQVQVSLLALAGKAKTKGLQSGVDIGVKYSEKQERNFDDATMKAGQCVIGLQMGTNKCASQSGMTAYGTRRHLYDPKNHILPPMDHSTISLQMGTNKCASQDLTLLSRLECSGTISAHCNLCLPGSRDSPSCLSLPSSWDYRWA

SEQ ID NO: 11259 - protein, 148 aa, Homo sapiens
  Payload ID: 2214
  Gene Symbol: CNN2
  Gene Name: calponin 2
  ENSP ID: ENSP00000468577
MSSTQFNKGPSYGLSAEVKNRLLSKYDPQKEAELRTWIEGLTGLSIGPDFQKGLKDGTILCTLMNKLQPGSVPKINRSMQNWHQLENLSNFIKAMVSYGMNPVDLFEANDLFESGNMTQVQVSLLALAGKVRPREGQPPAQSHTARWM

SEQ ID NO: 11260 - protein, 103 aa, Homo sapiens
  Payload ID: 2214
  Gene Symbol: CNN2
  Gene Name: calponin 2
  ENSP ID: ENSP00000475175
  MOD_RES (1)..(1): Any amino acid
XSYGLSAEVKNRMGTNKCASQSGMTAYGTRRHLYDPKNHILPPMDHSTISLQMGTNKCASQVGLARVPPTPLPAPLHPVVSAPPWGHLQLLSPLSVSAPSLDH

SEQ ID NO: 11261 - protein, 66 aa, Homo sapiens
  Payload ID: 2214
  Gene Symbol: CNN2
  Gene Name: calponin 2
  ENSP ID: ENSP00000479188
MNKLQPGSVPKINRSMQNWHQLENLSNFIKAMVSYGMNPVDLFEANDLFESGNMTQVQVSLLALAG

SEQ ID NO: 11262 - protein, 191 aa, Homo sapiens
  Payload ID: 2214
  Gene Symbol: CNN2
  Gene Name: calponin 2
  ENSP ID: ENSP00000484533
MNKLQPGSVPKINRSMQNWHQLENLSNFIKAMVSYGMNPVDLFEANDLFESGNMTQVQVSLLALAGKAKTKGLQSGVDIGVKYSEKQERNFDDATMKAGQCVIGLQMGTNKCASQSGMTAYGTRRHLYDPKNHILPPMDHSTISLQMGTNKCASQVGMTAPGTRRHIYDTKLGTDKCDNSSMSLQMGYTQG

SEQ ID NO: 11263 - protein, 179 aa, Homo sapiens
  Payload ID: 2214
  Gene Symbol: CNN2
  Gene Name: calponin 2
  ENSP ID: ENSP00000484749
MSSTQFNKGPSYGLSAEVKNRLLSKYDPQKEAELRTWIEGLTGLSIGPDFQKGLKDGTILCTLMNKLQPGSVPKINRSMQNWHQLENLSNFIKAMVSYGMNPVDLFEANDLFESGNMTQVQAKTKGLQSGVDIGVKYSEKQERNFDDATMKAGQCVIGLQMGTNKCASQSGMTAYGTRR

SEQ ID NO: 11264 - protein, 329 aa, Homo sapiens
  Payload ID: 2215
  Gene Symbol: CNN3
  Gene Name: calponin 3, acidic
  Uniprot ID: Q15417
  ENSP ID: ENSP00000359225
MTHFNKGPSYGLSAEVKNKIASKYDHQAEEDLRNWIEEVTGMSIGPNFQLGLKDGIILCELINKLQPGSVKKVNESSLNWPQLENIGNFIKAIQAYGMKPHDIFEANDLFENGNMTQVQTTLVALAGLAKTKGFHTTIDIGVKYAEKQTRRFDEGKLKAGQSVIGLQMGTNKCASQAGMTAYGTRRHLYDPKMQTDKPFDQTTISLQMGTNKGASQAGMLAPGTRRDIYDQKLTLQPVDNSTISLQMGTNKVASQKGMSVYGLGRQVYDPKYCAAPTEPVIHNGSQGTGTNGSEISDSDYQAEYPDEYHGEYQDDYPRDYQYSDQGIDY

SEQ ID NO: 11265 - protein, 283 aa, Homo sapiens
  Payload ID: 2215
  Gene Symbol: CNN3
  Gene Name: calponin 3, acidic
  Uniprot ID: Q15417
  ENSP ID: ENSP00000377752
MTHFNKGPSYGLSAEVKNKIASKYDHQAEEDLRNWIEEVTGMSIGPNFQLGLKDGIILCELINKLQPGSVKKVNESSLNWPQAKTKGFHTTIDIGVKYAEKQTRRFDEGKLKAGQSVIGLQMGTNKCASQAGMTAYGTRRHLYDPKMQTDKPFDQTTISLQMGTNKGASQAGMLAPGTRRDIYDQKLTLQPVDNSTISLQMGTNKVASQKGMSVYGLGRQVYDPKYCAAPTEPVIHNGSQGTGTNGSEISDSDYQAEYPDEYHGEYQDDYPRDYQYSDQGIDY

SEQ ID NO: 11266 - protein, 185 aa, Homo sapiens
  Payload ID: 2215
  Gene Symbol: CNN3
  Gene Name: calponin 3, acidic
  ENSP ID: ENSP00000401452
MSIGPNFQLGLKDGIILCELINKLQPGSVKKVNESSLNWPQLENIGNFIKAIQAYGMKPHDIFEANDLFENGNMTQVQTTLVALAGLAKTKGFHTTIDIGVKYAEKQTRRFDEGKLKAGQSVIGLQMGTNKCASQAGMTAYGTRRHLYDPKMQTDKPFDQTTISLQMGTNKGASQAGMLAPGTRR

SEQ ID NO: 11267 - protein, 288 aa, Homo sapiens
  Payload ID: 2215
  Gene Symbol: CNN3
  Gene Name: calponin 3, acidic
  Uniprot ID: Q15417
  ENSP ID: ENSP00000440081
MSIGPNFQLGLKDGIILCELINKLQPGSVKKVNESSLNWPQLENIGNFIKAIQAYGMKPHDIFEANDLFENGNMTQVQTTLVALAGLAKTKGFHTTIDIGVKYAEKQTRRFDEGKLKAGQSVIGLQMGTNKCASQAGMTAYGTRRHLYDPKMQTDKPFDQTTISLQMGTNKGASQAGMLAPGTRRDIYDQKLTLQPVDNSTISLQMGTNKVASQKGMSVYGLGRQVYDPKYCAAPTEPVIHNGSQGTGTNGSEISDSDYQAEYPDEYHGEYQDDYPRDYQYSDQGIDY

SEQ ID NO: 11268 - protein, 417 aa, Homo sapiens
  Payload ID: 2216
  Gene Symbol: CALR
  Gene Name: calreticulin
  Uniprot ID: P27797
  ENSP ID: ENSP00000320866
MLLSVPLLLGLLGLAVAEPAVYFKEQFLDGDGWTSRWIESKHKSDFGKFVLSSGKFYGDEEKDKGLQTSQDARFYALSASFEPFSNKGQTLVVQFTVKHEQNIDCGGGYVKLFPNSLDQTDMHGDSEYNIMFGPDICGPGTKKVHVIFNYKGKNVLINKDIRCKDDEFTHLYTLIVRPDNTYEVKIDNSQVESGSLEDDWDFLPPKKIKDPDASKPEDWDERAKIDDPTDSKPEDWDKPEHIPDPDAKKPEDWDEEMDGEWEPPVIQNPEYKGEWKPRQIDNPDYKGTWIHPEIDNPEYSPDPSIYAYDNFGVLGLDLWQVKSGTIFDNFLITNDEAYAEEFGNETWGVTKAAEKQMKDKQDEEQRLKEEEEDKKRKEEEEAEDKEDDEDKDEDEEDEEDKEEDEEEDVPGQAKDEL

SEQ ID NO: 11269 - protein, 247 aa, Homo sapiens
  Payload ID: 2216
  Gene Symbol: CALR
  Gene Name: calreticulin
  ENSP ID: ENSP00000465105
MLLSVPLLLGLLGLAVAEPAVYFKEQFLDGDGWTSRWIESKHKSDFGKFVLSSGKFYGDEEKDKGPDICGPGTKKVHVIFNYKGKNVLINKDIRCKDDEFTHLYTLIVRPDNTYEVKIDNSQVESGSLEDDWDFLPPKKIKDPDASKPEDWDERAKIDDPTDSKPEDWDKPEHIPDPDAKKPEDWDEEMDGEWEPPVIQNPEYKGEWKPRQIDNPDYKGTWIHPEIDNPEYSPDPSIYAYDNFGVLG

SEQ ID NO: 11270 - protein, 163 aa, Homo sapiens
  Payload ID: 2216
  Gene Symbol: CALR
  Gene Name: calreticulin
  ENSP ID: ENSP00000465918
  MOD_RES (1)..(1): Any amino acid
XEDWDERAKIDDPTDSKPEDWDKPEHIPDPDAKKPEDWDEEMDGEWEPPVIQNPEYKGEWKPRQIDNPDYKGTWIHPEIDNPEYSPDPSIYAYDNFGVLGLDLWQVKSGTIFDNFLITNDEAYAEEFGNETWGVTKAAEKQMKDKQDEEQRPERSCRRAGRAK

SEQ ID NO: 11271 - protein, 13 aa, Homo sapiens
  Payload ID: 2216
  Gene Symbol: CALR
  Gene Name: calreticulin
  ENSP ID: ENSP00000466037
  MOD_RES (1)..(1): Any amino acid
XEEDVPGQAKDEL

SEQ ID NO: 11272 - protein, 384 aa, Homo sapiens
  Payload ID: 2217
  Gene Symbol: CALR3
  Gene Name: calreticulin 3
  Uniprot ID: Q96L12
  ENSP ID: ENSP00000269881
MARALVQLWAICMLRVALATVYFQEEFLDGEHWRNRWLQSTNDSRFGHFRLSSGKFYGHKEKDKGLQTTQNGRFYAISARFKPFSNKGKTLVIQYTVKHEQKMDCGGGYIKVFPADIDQKNLNGKSQYYIMFGPDICGFDIKKVHVILHFKNKYHENKKLIRCKVDGFTHLYTLILRPDLSYDVKIDGQSIESGSIEYDWNLTSLKKETSPAESKDWEQTKDNKAQDWEKHFLDASTSKQSDWNGDLDGDWPAPMLQKPPYQDGLKPEGIHKDVWLHRKMKNTDYLTQYDLSEFENIGAIGLELWQVRSGTIFDNFLITDDEEYADNFGKATWGETKGPEREMDAIQAKEEMKKAREEEEEELLSGKINRHEHYFNQFHRRNEL

SEQ ID NO: 11273 - protein, 142 aa, Homo sapiens
  Payload ID: 2217
  Gene Symbol: CALR3
  Gene Name: calreticulin 3
  ENSP ID: ENSP00000471533
  MOD_RES (1)..(1): Any amino acid
XLVQLWAICMLRVALATVYFQEEFLDGEHWRNRWLQSTNDSRFGHFRLSSGKFYGHKEKDKGPDICGFDIKKVHVILHFKNKYHENKKLIRCKVDGFTHLYTLILRPDLSYDVKIDGQSIESGSIEYDWNLTSLKKETSPAE

SEQ ID NO: 11274 - protein, 396 aa, Homo sapiens
  Payload ID: 2218
  Gene Symbol: CASQ1
  Gene Name: calsequestrin 1 (fast-twitch, skeletal muscle)
  Uniprot ID: P31415
  ENSP ID: ENSP00000357057
MSATDRMGPRAVPGLRLALLLLLVLGTPKSGVQGQEGLDFPEYDGVDRVINVNAKNYKNVFKKYEVLALLYHEPPEDDKASQRQFEMEELILELAAQVLEDKGVGFGLVDSEKDAAVAKKLGLTEVDSMYVFKGDEVIEYDGEFSADTIVEFLLDVLEDPVELIEGERELQAFENIEDEIKLIGYFKSKDSEHYKAFEDAAEEFHPYIPFFATFDSKVAKKLTLKLNEIDFYEAFMEEPVTIPDKPNSEEEIVNFVEEHRRSTLRKLKPESMYETWEDDMDGIHIVAFAEEADPDGFEFLETLKAVAQDNTENPDLSIIWIDPDDFPLLVPYWEKTFDIDLSAPQIGVVNVTDADSVWMEMDDEEDLPSAEELEDWLEDVLEGEINTEDDDDDDDD

SEQ ID NO: 11275 - protein, 117 aa, Homo sapiens
  Payload ID: 2218
  Gene Symbol: CASQ1
  Gene Name: calsequestrin 1 (fast-twitch, skeletal muscle)
  ENSP ID: ENSP00000418051
MDGIHIVAFAEEADPDGFEFLETLKAVAQDNTENPDLSIIWIDPDDFPLLVPYWEKTFDIDLSAPQIGVVNVTDADSVWMEMDDEEDLPSAEELEDWLEDVLEGEINTEDDDDDDDD

SEQ ID NO: 11276 - protein, 399 aa, Homo sapiens
  Payload ID: 2219
  Gene Symbol: CASQ2
  Gene Name: calsequestrin 2 (cardiac muscle)
  Uniprot ID: O14958
  ENSP ID: ENSP00000261448
MKRTHLFIVGIYFLSSCRAEEGLNFPTYDGKDRVVSLSEKNFKQVLKKYDLLCLYYHEPVSSDKVTQKQFQLKEIVLELVAQVLEHKAIGFVMVDAKKEAKLAKKLGFDEEGSLYILKGDRTIEFDGEFAADVLVEFLLDLIEDPVEIISSKLEVQAFERIEDYIKLIGFFKSEDSEYYKAFEEAAEHFQPYIKFFATFDKGVAKKLSLKMNEVDFYEPFMDEPIAIPNKPYTEEELVEFVKEHQRPTLRRLRPEEMFETWEDDLNGIHIVAFAEKSDPDGYEFLEILKQVARDNTDNPDLSILWIDPDDFPLLVAYWEKTFKIDLFRPQIGVVNVTDADSVWMEIPDDDDLPTAEELEDWIEDVLSGKINTEDDDEDDDDDDNSDEEDNDDSDDDDDE

SEQ ID NO: 11277 - protein, 971 aa, Homo sapiens
  Payload ID: 2220
  Gene Symbol: CLSTN1
  Gene Name: calsyntenin 1
  Uniprot ID: O94985
  ENSP ID: ENSP00000354997
MLRRPAPALAPAARLLLAGLLCGGGVWAARVNKHKPWLEPTYHGIVTENDNTVLLDPPLIALDKDAPLRFAGEICGFKIHGQNVPFDAVVVDKSTGEGVIRSKEKLDCELQKDYSFTIQAYDCGKGPDGTNVKKSHKATVHIQVNDVNEYAPVFKEKSYKATVIEGKQYDSILRVEAVDADCSPQFSQICSYEIITPDVPFTVDKDGYIKNTEKLNYGKEHQYKLTVTAYDCGKKRATEDVLVKISIKPTCTPGWQGWNNRIEYEPGTGALAVFPNIHLETCDEPVASVQATVELETSHIGKGCDRDTYSEKSLHRLCGAAAGTAELLPSPSGSLNWTMGLPTDNGHDSDQVFEFNGTQAVRIPDGVVSVSPKEPFTISVWMRHGPFGRKKETILCSSDKTDMNRHHYSLYVHGCRLIFLFRQDPSEEKKYRPAEFHWKLNQVCDEEWHHYVLNVEFPSVTLYVDGTSHEPFSVTEDYPLHPSKIETQLVVGACWQEFSGVENDNETEPVTVASAGGDLHMTQFFRGNLAGLTLRSGKLADKKVIDCLYTCKEGLDLQVLEDSGRGVQIQAHPSQLVLTLEGEDLGELDKAMQHISYLNSRQFPTPGIRRLKITSTIKCFNEATCISVPPVDGYVMVLQPEEPKISLSGVHHFARAASEFESSEGVFLFPELRIISTITREVEPEGDGAEDPTVQESLVSEEIVHDLDTCEVTVEGEELNHEQESLEVDMARLQQKGIEVSSSELGMTFTGVDTMASYEEVLHLLRYRNWHARSLLDRKFKLICSELNGRYISNEFKVEVNVIHTANPMEHANHMAAQPQFVHPEHRSFVDLSGHNLANPHPFAVVPSTATVVIVVCVSFLVFMIILGVFRIRAAHRRTMRDQDTGKENEMDWDDSALTITVNPMETYEDQHSSEEEEEEEEEEESEDGEEEDDITSAESESSEEEEGEQGDPQNATRQQQLEWDDSTLSY

SEQ ID NO: 11278 - protein, 981 aa, Homo sapiens
  Payload ID: 2220
  Gene Symbol: CLSTN1
  Gene Name: calsyntenin 1
  Uniprot ID: O94985
  ENSP ID: ENSP00000366513
MLRRPAPALAPAARLLLAGLLCGGGVWAARVNKHKPWLEPTYHGIVTENDNTVLLDPPLIALDKDAPLRFAESFEVTVTKEGEICGFKIHGQNVPFDAVVVDKSTGEGVIRSKEKLDCELQKDYSFTIQAYDCGKGPDGTNVKKSHKATVHIQVNDVNEYAPVFKEKSYKATVIEGKQYDSILRVEAVDADCSPQFSQICSYEIITPDVPFTVDKDGYIKNTEKLNYGKEHQYKLTVTAYDCGKKRATEDVLVKISIKPTCTPGWQGWNNRIEYEPGTGALAVFPNIHLETCDEPVASVQATVELETSHIGKGCDRDTYSEKSLHRLCGAAAGTAELLPSPSGSLNWTMGLPTDNGHDSDQVFEFNGTQAVRIPDGVVSVSPKEPFTISVWMRHGPFGRKKETILCSSDKTDMNRHHYSLYVHGCRLIFLFRQDPSEEKKYRPAEFHWKLNQVCDEEWHHYVLNVEFPSVTLYVDGTSHEPFSVTEDYPLHPSKIETQLVVGACWQEFSGVENDNETEPVTVASAGGDLHMTQFFRGNLAGLTLRSGKLADKKVIDCLYTCKEGLDLQVLEDSGRGVQIQAHPSQLVLTLEGEDLGELDKAMQHISYLNSRQFPTPGIRRLKITSTIKCFNEATCISVPPVDGYVMVLQPEEPKISLSGVHHFARAASEFESSEGVFLFPELRIISTITREVEPEGDGAEDPTVQESLVSEEIVHDLDTCEVTVEGEELNHEQESLEVDMARLQQKGIEVSSSELGMTFTGVDTMASYEEVLHLLRYRNWHARSLLDRKFKLICSELNGRYISNEFKVEVNVIHTANPMEHANHMAAQPQFVHPEHRSFVDLSGHNLANPHPFAVVPSTATVVIVVCVSFLVFMIILGVFRIRAAHRRTMRDQDTGKENEMDWDDSALTITVNPMETYEDQHSSEEEEEEEEEEESEDGEEEDDITSAESESSEEEEGEQGDPQNATRQQQLEWDDSTLSY

SEQ ID NO: 11279 - protein, 782 aa, Homo sapiens
  Payload ID: 2220
  Gene Symbol: CLSTN1
  Gene Name: calsyntenin 1
  ENSP ID: ENSP00000401934
SILRVEAVDADCSPQFSQICSYEIITPDVPFTVDKDGYIKNTEKLNYGKEHQYKLTVTAYDCGKKRATEDVLVKISIKPTCTPGWQGWNNRIEYEPGTGALAVFPNIHLETCDEPVASVQATVELETSHIGKGCDRDTYSEKSLHRLCGAAAGTAELLPSPSGSLNWTMGLPTDNGHDSDQVFEFNGTQAVRIPDGVVSVSPKEPFTISVWMRHGPFGRKKETILCSSDKTDMNRHHYSLYVHGCRLIFLFRQDPSEEKKYRPAEFHWKLNQVCDEEWHHYVLNVEFPSVTLYVDGTSHEPFSVTEDYPLHPSKIETQLVVGACWQGGDLHMTQFFRGNLAGLTLRSGKLADKKVIDCLYTCKEGLDLQVLEDSGRGVQIQAHPSQLVLTLEGEDLGELDKAMQHISYLNSRQFPTPGIRRLKITSTIKCFNEATCISVPPVDGYVMVLQPEEPKISLSGVHHFARAASEFESSEGVFLFPELRIISTITREVEPEGDGAEDPTVQESLVSEEIVHDLDTCEVTVEGEELNHEQESLEVDMARLQQKGIEVSSSELGMTFTGVDTMASYEEVLHLLRYRNWHARSLLDRKFKLICSELNGRYISNEFKVEVNVIHTANPMEHANHMAAQPQFVHPEHRSFVDLSGHNLANPHPFAVVPSTATVVIVVCVSFLVFMIILGVFRIRAAHRRTMRDQDTGKENEMDWDDSALTITVNPMETYEDQHSSEEEEEEEEEEESEDGEEEDDITSAESESSEEEEGEQGDPQNATRQQQLEWDDSTLSY

SEQ ID NO: 11280 - protein, 955 aa, Homo sapiens
  Payload ID: 2221
  Gene Symbol: CLSTN2
  Gene Name: calsyntenin 2
  Uniprot ID: Q9H4D0
  ENSP ID: ENSP00000402460
MLPGRLCWVPLLLALGVGSGSGGGGDSRQRRLLAAKVNKHKPWIETSYHGVITENNDTVILDPPLVALDKDAPVPFAGEICAFKIHGQELPFEAVVLNKTSGEGRLRAKSPIDCELQKEYTFIIQAYDCGAGPHETAWKKSHKAVVHIQVKDVNEFAPTFKEPAYKAVVTEGKIYDSILQVEAIDEDCSPQYSQICNYEIVTTDVPFAIDRNGNIRNTEKLSYDKQHQYEILVTAYDCGQKPAAQDTLVQVDVKPVCKPGWQDWTKRIEYQPGSGSMPLFPSIHLETCDGAVSSLQIVTELQTNYIGKGCDRETYSEKSLQKLCGASSGIIDLLPSPSAATNWTAGLLVDSSEMIFKFDGRQGAKVPDGIVPKNLTDQFTITMWMKHGPSPGVRAEKETILCNSDKTEMNRHHYALYVHNCRLVFLLRKDFDQADTFRPAEFHWKLDQICDKEWHYYVINVEFPVVTLYMDGATYEPYLVTNDWPIHPSHIAMQLTVGACWQGGEVTKPQFAQFFHGSLASLTIRPGKMESQKVISCLQACKEGLDINSLESLGQGIKYHFNPSQSILVMEGDDIGNINRALQKVSYINSRQFPTAGVRRLKVSSKVQCFGEDVCISIPEVDAYVMVLQAIEPRITLRGTDHFWRPAAQFESARGVTLFPDIKIVSTFAKTEAPGDVKTTDPKSEVLEEMLHNLDFCDILVIGGDLDPRQECLELNHSELHQRHLDATNSTAGYSIYGVGSMSRYEQVLHHIRYRNWRPASLEARRFRIKCSELNGRYTSNEFNLEVSILHEDQVSDKEHVNHLIVQPPFLQSVHHPESRSSIQHSSVVPSIATVVIIISVCMLVFVVAMGVYRVRIAHQHFIQETEAAKESEMDWDDSALTITVNPMEKHEGPGHGEDETEGEEEEEAEEEMSSSSGSDDSEEEEEEEGMGRGRHGQNGARQAQLEWDDSTLPY

SEQ ID NO: 11281 - protein, 891 aa, Homo sapiens
  Payload ID: 2221
  Gene Symbol: CLSTN2
  Gene Name: calsyntenin 2
  ENSP ID: ENSP00000478883
LASQDSHSLFPSAGEICAFKIHGQELPFEAVVLNKTSGEGRLRAKSPIDCELQKEYTFIIQAYDCGAGPHETAWKKSHKAVVHIQVKDVNEFAPTFKEPAYKAVVTEGKIYDSILQVEAIDEDCSPQYSQICNYEIVTTDVPFAIDRNGNIRNTEKLSYDKQHQYEILVTAYDCGQKPAAQDTLVQVDVKPVCKPGWQDWTKRIEYQPGSGSMPLFPSIHLETCDGAVSSLQIVTELQTNYIGKGCDRETYSEKSLQKLCGASSGIIDLLPSPSAATNWTAGLLVDSSEMIFKFDGRQGAKVPDGIVPKNLTDQFTITMWMKHGPSPGVRAEKETILCNSDKTEMNRHHYALYVHNCRLVFLLRKDFDQADTFRPAEFHWKLDQICDKEWHYYVINVEFPVVTLYMDGATYEPYLVTNDWPIHPSHIAMQLTVGACWQGGEVTKPQFAQFFHGSLASLTIRPGKMESQKVISCLQACKEGLDINSLESLGQGIKYHFNPSQSILVMEGDDIGNINRALQKVSYINSRQFPTAGVRRLKVSSKVQCFGEDVCISIPEVDAYVMVLQAIEPRITLRGTDHFWRPAAQFESARGVTLFPDIKIVSTFAKTEAPGDVKTTDPKSEVLEEMLHNLDFCDILVIGGDLDPRQECLELNHSELHQRHLDATNSTAGYSIYGVGSMSRYEQVLHHIRYRNWRPASLEARRFRIKCSELNGRYTSNEFNLEVSILHEDQVSDKEHVNHLIVQPPFLQSVHHPESRSSIQHSSVVPSIATVVIIISVCMLVFVVAMGVYRVRIAHQHFIQETEAAKESEMDWDDSALTITVNPMEKHEGPGHGEDETEGEEEEEAEEEMSSSSGSDDSEEEEEEEGMGRGRHGQNGARQAQLEWDDSTLPY

SEQ ID NO: 11282 - protein, 956 aa, Homo sapiens
  Payload ID: 2222
  Gene Symbol: CLSTN3
  Gene Name: calsyntenin 3
  Uniprot ID: Q9BQT9
  ENSP ID: ENSP00000266546
MTLLLLPLLLASLLASCSCNKANKHKPWIEAEYQGIVMENDNTVLLNPPLFALDKDAPLRYAGEICGFRLHGSGVPFEAVILDKATGEGLIRAKEPVDCEAQKEHTFTIQAYDCGEGPDGANTKKSHKATVHVRVNDVNEFAPVFVERLYRAAVTEGKLYDRILRVEAIDGDCSPQYSQICYYEILTPNTPFLIDNDGNIENTEKLQYSGERLYKFTVTAYDCGKKRAADDAEVEIQVKPTCKPSWQGWNKRIEYAPGAGSLALFPGIRLETCDEPLWNIQATIELQTSHVAKGCDRDNYSERALRKLCGAATGEVDLLPMPGPNANWTAGLSVHYSQDSSLIYWFNGTQAVQVPLGGPSGLGSGPQDSLSDHFTLSFWMKHGVTPNKGKKEEETIVCNTVQNEDGFSHYSLTVHGCRIAFLYWPLLESARPVKFLWKLEQVCDDEWHHYALNLEFPTVTLYTDGISFDPALIHDNGLIHPPRREPALMIGACWTEEKNKEKEKGDNSTDTTQGDPLSIHHYFHGYLAGFSVRSGRLESREVIECLYACREGLDYRDFESLGKGMKVHVNPSQSLLTLEGDDVETFNHALQHVAYMNTLRFATPGVRPLRLTTAVKCFSEESCVSIPEVEGYVVVLQPDAPQILLSGTAHFARPAVDFEGTNGVPLFPDLQITCSISHQVEAKKDESWQGTVTDTRMSDEIVHNLDGCEISLVGDDLDPERESLLLDTTSLQQRGLELTNTSAYLTIAGVESITVYEEILRQARYRLRHGAALYTRKFRLSCSEMNGRYSSNEFIVEVNVLHSMNRVAHPSHVLSSQQFLHRGHQPPPEMAGHSLASSHRNSMIPSAATLIIVVCVGFLVLMVVLGLVRIHSLHRRVSGAGGPPGASSDPKDPDLFWDDSALTIIVNPMESYQNRQSCVTGAVGGQQEDEDSSDSEVADSPSSDERRIIETPPHRY

SEQ ID NO: 11283 - protein, 968 aa, Homo sapiens
  Payload ID: 2222
  Gene Symbol: CLSTN3
  Gene Name: calsyntenin 3
  Uniprot ID: Q9BQT9
  ENSP ID: ENSP00000440679
MVLGCELSGSTRVVVGVEALLTGASSPLPGVGPANKHKPWIEAEYQGIVMENDNTVLLNPPLFALDKDAPLRYAGEICGFRLHGSGVPFEAVILDKATGEGLIRAKEPVDCEAQKEHTFTIQAYDCGEGPDGANTKKSHKATVHVRVNDVNEFAPVFVERLYRAAVTEGKLYDRILRVEAIDGDCSPQYSQICYYEILTPNTPFLIDNDGNIENTEKLQYSGERLYKFTVTAYDCGKKRAADDAEVEIQVKPTCKPSWQGWNKRIEYAPGAGSLALFPGIRLETCDEPLWNIQATIELQTSHVAKGCDRDNYSERALRKLCGAATGEVDLLPMPGPNANWTAGLSVHYSQDSSLIYWFNGTQAVQVPLGGPSGLGSGPQDSLSDHFTLSFWMKHGVTPNKGKKEEETIVCNTVQNEDGFSHYSLTVHGCRIAFLYWPLLESARPVKFLWKLEQVCDDEWHHYALNLEFPTVTLYTDGISFDPALIHDNGLIHPPRREPALMIGACWTEEKNKEKEKGDNSTDTTQGDPLSIHHYFHGYLAGFSVRSGRLESREVIECLYACREGLDYRDFESLGKGMKVHVNPSQSLLTLEGDDVETFNHALQHVAYMNTLRFATPGVRPLRLTTAVKCFSEESCVSIPEVEGYVVVLQPDAPQILLSGTAHFARPAVDFEGTNGVPLFPDLQITCSISHQVEAKKDESWQGTVTDTRMSDEIVHNLDGCEISLVGDDLDPERESLLLDTTSLQQRGLELTNTSAYLTIAGVESITVYEEILRQARYRLRHGAALYTRKFRLSCSEMNGRYSSNEFIVEVNVLHSMNRVAHPSHVLSSQQFLHRGHQPPPEMAGHSLASSHRNSMIPSAATLIIVVCVGFLVLMVVLGLVRIHSLHRRVSGAGGPPGASSDPKDPDLFWDDSALTIIVNPMESYQNRQSCVTGAVGGQQEDEDSSDSEVADSPSSDERRIIETPPHRY

SEQ ID NO: 11284 - protein, 142 aa, Homo sapiens
  Payload ID: 2222
  Gene Symbol: CLSTN3
  Gene Name: calsyntenin 3
  ENSP ID: ENSP00000442612
MENDNTVLLNPPLFALDKDAPLRYAGEICGFRLHGSGVPFEAVILDKATGEGLIRAKEPVDCEAQKEHTFTIQAYDCGEGPDGANTKKSHKATVHVRVNDVNEFAPVFVERLYRAAVTEGKLYDRILRVEAIDGDCSPQYSQ

SEQ ID NO: 11285 - protein, 176 aa, Homo sapiens
  Payload ID: 2222
  Gene Symbol: CLSTN3
  Gene Name: calsyntenin 3
  ENSP ID: ENSP00000442801
MVVITNKHKPWIEAEYQGIVMENDNTVLLNPPLFALDKDAPLRYAGEICGFRLHGSGVPFEAVILDKATGEGLIRAKEPVDCEAQKEHTFTIQAYDCGEGPDGANTKKSHKATVHVRVNDVNEFAPVFVERLYRAAVTEGKLYDRILRVEAIDGDCSPQYSQICYYEILTPNTPFL

SEQ ID NO: 11286 - protein, 129 aa, Homo sapiens
  Payload ID: 2222
  Gene Symbol: CLSTN3
  Gene Name: calsyntenin 3
  ENSP ID: ENSP00000443468
MENDNTVLLNPPLFALDKDAPLRYAGEICGFRLHGSGVPFEAVILDKATGEGLIRAKEPVDCEAQKEHTFTIQAYDCGEGPDGANTKKSHKATVHVRVNDVNEFAPVFVERLYRAAVTEGKLYDRILRV

SEQ ID NO: 11287 - protein, 154 aa, Homo sapiens
  Payload ID: 2222
  Gene Symbol: CLSTN3
  Gene Name: calsyntenin 3
  ENSP ID: ENSP00000443490
MENDNTVLLNPPLFALDKDAPLRYAGEICGFRLHGSGVPFEAVILDKATGEGLIRAKEPVDCEAQKEHTFTIQAYDCGEGPDGANTKKSHKATVHVRVNDVNEFAPVFVERLYRAAVTEGKLYDRILRVEAIDGDCSPQYSQICYYEILTPNTP

SEQ ID NO: 11288 - protein, 134 aa, Homo sapiens
  Payload ID: 2222
  Gene Symbol: CLSTN3
  Gene Name: calsyntenin 3
  ENSP ID: ENSP00000443959
MTLLLLPLLLASLLASCSCNKANKHKPWIEAEYQGIVMENDNTVLLNPPLFALDKDAPLRYAGEICGFRLHGSGVPFEAVILDKATGEGLIRAKEPVDCEAQKEHTFTIQAYDCGEGPDGANTKKSHKATVHVR

SEQ ID NO: 11289 - protein, 315 aa, Homo sapiens
  Payload ID: 2223
  Gene Symbol: CALU
  Gene Name: calumenin
  Uniprot ID: O43852
  ENSP ID: ENSP00000249364
MDLRQFLMCLSLCTAFALSKPTEKKDRVHHEPQLSDKVHNDAQSFDYDHDAFLGAEEAKTFDQLTPEESKERLGKIVSKIDGDKDGFVTVDELKDWIKFAQKRWIYEDVERQWKGHDLNEDGLVSWEEYKNATYGYVLDDPDPDDGFNYKQMMVRDERRFKMADKDGDLIATKEEFTAFLHPEEYDYMKDIVVQETMEDIDKNADGFIDLEEYIGDMYSHDGNTDEPEWVKTEREQFVEFRDKNRDGKMDKEETKDWILPSDYDHAEAEARHLVYESDQNKDGKLTKEEIVDKYDLFVGSQATDFGEALVRHDEF

SEQ ID NO: 11290 - protein, 315 aa, Homo sapiens
  Payload ID: 2223
  Gene Symbol: CALU
  Gene Name: calumenin
  Uniprot ID: O43852
  ENSP ID: ENSP00000408838
MDLRQFLMCLSLCTAFALSKPTEKKDRVHHEPQLSDKVHNDAQSFDYDHDAFLGAEEAKTFDQLTPEESKERLGMIVDKIDADKDGFVTEGELKSWIKHAQKKYIYDNVENQWQEFDMNQDGLISWDEYRNVTYGTYLDDPDPDDGFNYKQMMVRDERRFKMADKDGDLIATKEEFTAFLHPEEYDYMKDIVVQETMEDIDKNADGFIDLEEYIGDMYSHDGNTDEPEWVKTEREQFVEFRDKNRDGKMDKEETKDWILPSDYDHAEAEARHLVYESDQNKDGKLTKEEIVDKYDLFVGSQATDFGEALVRHDEF

SEQ ID NO: 11291 - protein, 147 aa, Homo sapiens
  Payload ID: 2223
  Gene Symbol: CALU
  Gene Name: calumenin
  ENSP ID: ENSP00000417973
  MOD_RES (1)..(1): Any amino acid
XIATKEEFTAFLHPEEYDYMKDIVVQETMEDIDKNADGFIDLEEYIGDMYSHDGNTDEPEWVKTEREQFVEFRDKNRDGKMDKEETKDWILPSDYDHAEAEARHLVYESDQNKDGKLTKEEIVDKYDLFVGSQATDFGEALVRHDEF

SEQ ID NO: 11292 - protein, 323 aa, Homo sapiens
  Payload ID: 2223
  Gene Symbol: CALU
  Gene Name: calumenin
  Uniprot ID: O43852
  ENSP ID: ENSP00000420381
MKETDLIIMDLRQFLMCLSLCTAFALSKPTEKKDRVHHEPQLSDKVHNDAQSFDYDHDAFLGAEEAKTFDQLTPEESKERLGKIVSKIDGDKDGFVTVDELKDWIKFAQKRWIYEDVERQWKGHDLNEDGLVSWEEYKNATYGYVLDDPDPDDGFNYKQMMVRDERRFKMADKDGDLIATKEEFTAFLHPEEYDYMKDIVVQETMEDIDKNADGFIDLEEYIGDMYSHDGNTDEPEWVKTEREQFVEFRDKNRDGKMDKEETKDWILPSDYDHAEAEARHLVYESDQNKDGKLTKEEIVDKYDLFVGSQATDFGEALVRHDEF

SEQ ID NO: 11293 - protein, 323 aa, Homo sapiens
  Payload ID: 2223
  Gene Symbol: CALU
  Gene Name: calumenin
  Uniprot ID: O43852
  ENSP ID: ENSP00000438248
MKETDLIIMDLRQFLMCLSLCTAFALSKPTEKKDRVHHEPQLSDKVHNDAQSFDYDHDAFLGAEEAKTFDQLTPEESKERLGMIVDKIDADKDGFVTEGELKSWIKHAQKKYIYDNVENQWQEFDMNQDGLISWDEYRNVTYGTYLDDPDPDDGFNYKQMMVRDERRFKMADKDGDLIATKEEFTAFLHPEEYDYMKDIVVQETMEDIDKNADGFIDLEEYIGDMYSHDGNTDEPEWVKTEREQFVEFRDKNRDGKMDKEETKDWILPSDYDHAEAEARHLVYESDQNKDGKLTKEEIVDKYDLFVGSQATDFGEALVRHDEF

SEQ ID NO: 11294 - protein, 224 aa, Homo sapiens
  Payload ID: 2223
  Gene Symbol: CALU
  Gene Name: calumenin
  Uniprot ID: O43852
  ENSP ID: ENSP00000442110
MDLRQFLMCLSLCTAFALSKPTEKKDRVHHEPQLSDKVHNDAQSFDYDHDAFLGAEEAKTFDQLTPEESKERLGKIVSKIDGDKDGFVTVDELKDWIKFAQKRWIYEDVERQWKGHDLNEDGLVSWEEYKNATYGYVLDDPDPDDGFNYKQMMVRDERRFKMADKDGDLIATKEEFTAFLHPEEYDYMKDIVVQETMEDIDKNADGFIDLEEYIGWQAYQGGDR

SEQ ID NO: 11295 - protein, 473 aa, Homo sapiens
  Payload ID: 2224
  Gene Symbol: CAMKV
  Gene Name: CaM kinase-like vesicle-associated
  Uniprot ID: Q8NCB2
  ENSP ID: ENSP00000296471
MPFGCVTLGDKKNYNQPSEVTDRYDLGQVIKTEEFCEIFRAKDKTTGKLHTCKKFQKRDGRKVRKAAKNEIGILKMVKHPNILQLVDVFVTRKEYFIFLELATGREVFDWILDQGYYSERDTSNVVRQVLEAVAYLHSLKIVHRNLKLENLVYYNRLKNSKIVISDFHLAKLENGLIKEPCGTPEYLGNPPFYEEVEEDDYENHDKNLFRKILAGDYEFDSPYWDDISQAAKDLVTRLMEVEQDQRITAEEAISHEWISGNAASDKNIKDGVCAQIEKNFARAKWKKAVRVTTLMKRLRAPEQSSTAAAQSASATDTATPGAAGGATAAAASGATSAPEGDAARAAKSDNVAPADRSATPATDGSATPATDGSVTPATDGSITPATDGSVTPATDRSATPATDGRATPATEESTVPTTQSSAMLATKAAATPEPAMAQPDSTAPEGATGQAPPSSKGEEAAGYAQESQREEAS

SEQ ID NO: 11296 - protein, 434 aa, Homo sapiens
  Payload ID: 2224
  Gene Symbol: CAMKV
  Gene Name: CaM kinase-like vesicle-associated
  ENSP ID: ENSP00000417614
MPFGCVTLGDKKNYNQPSEVTDRYDLGQVIKTEEFCEIFRAKDKTTGKLHTCKKFQKRDGRKVRKAAKNEIGILKMVKHPNILQLVDVFVTRKEYFIFLELATGREVFDWILDQGYYSERDTSNVVRQVLEAVAYLHSLKIVHRNLKLENLVYYNRLKNSKIVISDFHLAKLENGLIKEPCGTPEYLAPEVVGRQRYGRPVDCWAIGVIMYILLSGNPPFYEEVEEDDYENHDKNLFRKILAGDYEFDSPYWDDISQAAKDLVTRLMEVEQDQRITAEEAISHEWISGNAASDKNIKDGVCAQIEKNFARAKWKTVVPPQPQMEVPPQPLMAVSPQPPMEASLQPLMGVSPQPLTGALLQPLMGEPHQPQKRALCPPPKAVPCWPPRQLPPLSRLWPSRTAQPQRAPQARLHPLVKGKRLLVMPRSLKGRRPAE

SEQ ID NO: 11297 - protein, 470 aa, Homo sapiens
  Payload ID: 2224
  Gene Symbol: CAMKV
  Gene Name: CaM kinase-like vesicle-associated
  Uniprot ID: Q8NCB2
  ENSP ID: ENSP00000418809
MPFGCVTLGDKKNYNQPSEVTDRYDLGQVIKTEEFCEIFRAKDKTTGKLHTCKKFQKRDGRKVRKAAKNEIGILKMVKHPNILQLVDVFVTRKEYFIFLELATGREVFDWILDQGYYSERDTSNVVRQVLEAVAYLHSLKIVHRNLKLENLVYYNRLKNSKIVISDFHLAKLENGLIKEPCGTPEYLAPEVVGRQRYGRPVDCWAIGVIMYILLSGNPPFYEEVEEDDYENHDKNLFRKILAGDYEFDSPYWDDISQAAKDLVTRLMEVEQDQRITAEEAISHEWISGNAASDKNIKDGVCAQIEKNFARAKWKKAVRVTTLMKRLRAPEQSSTAAAQSASATDTATPGAADRSATPATDGSATPATDGSVTPATDGSITPATDGSVTPATDRSATPATDGRATPATEESTVPTTQSSAMLATKAAATPEPAMAQPDSTAPEGATGQAPPSSKGEEAAGYAQESQREEAS

SEQ ID NO: 11298 - protein, 501 aa, Homo sapiens
  Payload ID: 2224
  Gene Symbol: CAMKV
  Gene Name: CaM kinase-like vesicle-associated
  Uniprot ID: Q8NCB2
  ENSP ID: ENSP00000419195
MPFGCVTLGDKKNYNQPSEVTDRYDLGQVIKTEEFCEIFRAKDKTTGKLHTCKKFQKRDGRKVRKAAKNEIGILKMVKHPNILQLVDVFVTRKEYFIFLELATGREVFDWILDQGYYSERDTSNVVRQVLEAVAYLHSLKIVHRNLKLENLVYYNRLKNSKIVISDFHLAKLENGLIKEPCGTPEYLAPEVVGRQRYGRPVDCWAIGVIMYILLSGNPPFYEEVEEDDYENHDKNLFRKILAGDYEFDSPYWDDISQAAKDLVTRLMEVEQDQRITAEEAISHEWISGNAASDKNIKDGVCAQIEKNFARAKWKKAVRVTTLMKRLRAPEQSSTAAAQSASATDTATPGAAGGATAAAASGATSAPEGDAARAAKSDNVAPADRSATPATDGSATPATDGSVTPATDGSITPATDGSVTPATDRSATPATDGRATPATEESTVPTTQSSAMLATKAAATPEPAMAQPDSTAPEGATGQAPPSSKGEEAAGYAQESQREEAS

SEQ ID NO: 11299 - protein, 123 aa, Homo sapiens
  Payload ID: 2224
  Gene Symbol: CAMKV
  Gene Name: CaM kinase-like vesicle-associated
  ENSP ID: ENSP00000420000
MPFGCVTLGDKKNYNQPSEVFDWILDQGYYSERDTSNVVRQVLEAVAYLHSLKIVHRNLKLENLVYYNRLKNSKIVISDFHLAKLENGLIKEPCGTPDPRGGRPAAVWTPCGLLGHWSHHVHP

SEQ ID NO: 11300 - protein, 426 aa, Homo sapiens
  Payload ID: 2224
  Gene Symbol: CAMKV
  Gene Name: CaM kinase-like vesicle-associated
  ENSP ID: ENSP00000420053
MVKHPNILQLVDVFVTRKEYFIFLELATGREVFDWILDQGYYSERDTSNVVRQVLEAVAYLHSLKIVHRNLKLENLVYYNRLKNSKIVISDFHLAKLENGLIKEPCGTPEYLAPEVVGRQRYGRPVDCWAIGVIMYILLSGNPPFYEEVEEDDYENHDKNLFRKILAGDYEFDSPYWDDISQAAKDLVTRLMEVEQDQRITAEEAISHEWISGNAASDKNIKDGVCAQIEKNFARAKWKKAVRVTTLMKRLRAPEQSSTAAAQSASATDTATPGAAGGATAAAASGATSAPEGDAARAAKSDNVAPADRSATPATDGSATPATDGSVTPATDGSITPATDGSVTPATDRSATPATDGRATPATEESTVPTTQSSAMLATKAAATPEPAMAQPDSTAPEGATGQAPPSSKGEEAAGYAQESQREEAS

SEQ ID NO: 11301 - protein, 94 aa, Homo sapiens
  Payload ID: 2224
  Gene Symbol: CAMKV
  Gene Name: CaM kinase-like vesicle-associated
  ENSP ID: ENSP00000420139
MPFGCVTLGDKKNYNQPSEVTDRYDLGQVIKTEEFCEIFRAKDKTTGKLHTCKKFQKRDGRKGEASQHPTAGGCVCDPQGVLYLPGAGHGEGGV

SEQ ID NO: 11302 - protein, 427 aa, Homo sapiens
  Payload ID: 2224
  Gene Symbol: CAMKV
  Gene Name: CaM kinase-like vesicle-associated
  ENSP ID: ENSP00000420724
MPFGCVTLGDKKNYNQPSEVTDRYDLGQVIKTEEFCEIFRAKDKTTGKLHTCKKFQKRDGRKVRKAAKNEIGILKMVKHPNILQLVDVFVTRKEYFIFLELNLKLENLVYYNRLKNSKIVISDFHLAKLENGLIKEPCGTPEYLAPEVVGRQRYGRPVDCWAIGVIMYILLSGNPPFYEEVEEDDYENHDKNLFRKILAGDYEFDSPYWDDISQAAKDLVTRLMEVEQDQRITAEEAISHEWISGNAASDKNIKDGVCAQIEKNFARAKWKKAVRVTTLMKRLRAPEQSSTAAAQSASATDTATPGAADRSATPATDGSATPATDGSVTPATDGSITPATDGSVTPATDRSATPATDGRATPATEESTVPTTQSSAMLATKAAATPEPAMAQPDSTAPEGATGQAPPSSKGEEAAGYAQESQREEAS

SEQ ID NO: 11303 - protein, 143 aa, Homo sapiens
  Payload ID: 2224
  Gene Symbol: CAMKV
  Gene Name: CaM kinase-like vesicle-associated
  ENSP ID: ENSP00000420766
MPFGCVTLGDKKNYNQPSEVTDRYDLGQVIKTEEFCEIFRAKDKTTGKLHTCKKFQKRDGRKVRKAAKNEIGILKMVKHPNILQLVDVFVTRKEYFIFLELATTRSETQATWYGKSWRPWPICTHSRSCTGISSWRTWFTTTG

SEQ ID NO: 11304 - protein, 473 aa, Homo sapiens; identical to SEQ ID NO: 11295
  Payload ID: 2224
  Gene Symbol: CAMKV
  Gene Name: CaM kinase-like vesicle-associated
  Uniprot ID: Q8NCB2
  ENSP ID: ENSP00000484045

SEQ ID NO: 11305 - protein, 327 aa, Homo sapiens
  Payload ID: 2225
  Gene Symbol: CREB1
  Gene Name: cAMP responsive element binding protein 1
  Uniprot ID: P16220
  ENSP ID: ENSP00000236995
MTMESGAENQQSGDAAVTEAENQQMTVQAQPQIATLAQVSMPAAHATSSAPTVTLVQLPNGQTVQVHGVIQAAQPSVIQSPQVQTVQISTIAESEDSQESVDSVTDSQKRREILSRRPSYRKILNDLSSDAPGVPRIEEEKSEEETSAPAITTVTVPTPIYQTSSGQYIAITQGGAIQLANNGTDGVQGLQTLTMTNAAATQPGTTILQYAQTTDGQQILVPSNQVVVQAASGDVQTYQIRTAPTSTIAPGVVMASSPALPTQPAEEAARKREVRLMKNREAARECRRKKKEYVKCLENRVAVLENQNKTLIEELKALKDLYCHKSD

SEQ ID NO: 11306 - protein, 341 aa, Homo sapiens
  Payload ID: 2225
  Gene Symbol: CREB1
  Gene Name: cAMP responsive element binding protein 1
  Uniprot ID: P16220
  ENSP ID: ENSP00000387699
MTMESGAENQQSGDAAVTEAENQQMTVQAQPQIATLAQVSMPAAHATSSAPTVTLVQLPNGQTVQVHGVIQAAQPSVIQSPQVQTVQSSCKDLKRLFSGTQISTIAESEDSQESVDSVTDSQKRREILSRRPSYRKILNDLSSDAPGVPRIEEEKSEEETSAPAITTVTVPTPIYQTSSGQYIAITQGGAIQLANNGTDGVQGLQTLTMTNAAATQPGTTILQYAQTTDGQQILVPSNQVVVQAASGDVQTYQIRTAPTSTIAPGVVMASSPALPTQPAEEAARKREVRLMKNREAARECRRKKKEYVKCLENRVAVLENQNKTLIEELKALKDLYCHKSD

SEQ ID NO: 11307 - protein, 131 aa, Homo sapiens
  Payload ID: 2225
  Gene Symbol: CREB1
  Gene Name: cAMP responsive element binding protein 1
  ENSP ID: ENSP00000391125
MPAAHATSSAPTVTLVQLPNGQTVQVHGVIQAAQPSVIQSPQVQTVQSSCKDLKRLFSGTQISTIAESEDSQESVDSVTDSQKRREILSRRPSYRKILNDLSSDAPGVPRIEEEKSEEETSAPAITTVTVP

SEQ ID NO: 11308 - protein, 132 aa, Homo sapiens
  Payload ID: 2225
  Gene Symbol: CREB1
  Gene Name: cAMP responsive element binding protein 1
  ENSP ID: ENSP00000392428
MTMESGAENQQSGDAAVTEAENQQMTVQAQPQIATLAQVSMPAAHATSSAPTVTLVQLPNGQTVQVHGVIQAAQPSVIQSPQVQTVQSSCKDLKRLFSGTQISTIAESEDSQESVDSVTDSQKRREILSRRP

SEQ ID NO: 11309 - protein, 140 aa, Homo sapiens
  Payload ID: 2225
  Gene Symbol: CREB1
  Gene Name: cAMP responsive element binding protein 1
  ENSP ID: ENSP00000401803
GGAIQLANNGTDGVQGLQTLTMTNAAATQPGTTILQYAQTTDGQQILVPSNQVVVQAASGDVQTYQIRTAPTSTIAPGVVMASSPALPTQPAEEAARKREVRLMKNRYKYCIYLDCYVLSVSSHSAGCVSLHLLVIGSLH

SEQ ID NO: 11310 - protein, 170 aa, Homo sapiens
  Payload ID: 2225
  Gene Symbol: CREB1
  Gene Name: cAMP responsive element binding protein 1
  ENSP ID: ENSP00000403678
MPAAHATSSAPTVTLVQLPNGQTVQVHGVIQAAQPSVIQSPQVQTVQISTIAESEDSQESVDSVTDSQKRREILSRRPSYRKILNDLSSDAPGVPRIEEEKSEEETSAPAITTVTVPTPIYQTSSGQYTASGDVQTYQIRTAPTSTIAPGVVMASSPALPTQPAEEAARK

SEQ ID NO: 11311 - protein, 79 aa, Homo sapiens
  Payload ID: 2225
  Gene Symbol: CREB1
  Gene Name: cAMP responsive element binding protein 1
  ENSP ID: ENSP00000404890
MTMESGAENQQSGDAAVTEAENQQMTVQAQPQIATLAQVSMPAAHATSSAPTVTLVQLPNGQTVQVHGVIQAAQPSVIQ

SEQ ID NO: 11312 - protein, 327 aa, Homo sapiens; identical to SEQ ID NO: 11305
  Payload ID: 2225
  Gene Symbol: CREB1
  Gene Name: cAMP responsive element binding protein 1
  Uniprot ID: P16220
  ENSP ID: ENSP00000405539

SEQ ID NO: 11313 - protein, 251 aa, Homo sapiens
  Payload ID: 2225
  Gene Symbol: CREB1
  Gene Name: cAMP responsive element binding protein 1
  ENSP ID: ENSP00000405711
MPAAHATSSAPTVTLVQLPNGQTVQVHGVIQAAQPSVIQSPQVQTVQISTIAESEDSQESVDSVTDSQKRREILSRRPSYRKILNDLSSDAPGVPRIEEEKSEEETSAPAITTVTVPTPIYQTSSGQYIAITQGGAIQLANNGTDGVQGLQTLTMTNAAATQPGTTILQYAQTTDGQQILVPSNQVVVQAASGDVQTYQIRTAPTSTIAPGVVMASSPALPTQPAEEAARKREVRLMKNREAARECRRKKK

SEQ ID NO: 11314 - protein, 182 aa, Homo sapiens
  Payload ID: 2225
  Gene Symbol: CREB1
  Gene Name: cAMP responsive element binding protein 1
  ENSP ID: ENSP00000407227
MTMESGAENQQSGDAAVTEAENQQMTVQAQPQIATLAQVSMPAAHATSSAPTVTLVQLPNGQTVQVHGVIQAAQPSVIQSPQVQTVQSSCKDLKRLFSGTQISTIAESEDSQESVDSVTDSQKRREILSRRPSYRKILNDLSSDAPGVPRIEEEKSEEETSAPAITTVTVPTPIYQTSSGQY

SEQ ID NO: 11315 - protein, 181 aa, Homo sapiens
  Payload ID: 2225
  Gene Symbol: CREB1
  Gene Name: cAMP responsive element binding protein 1
  ENSP ID: ENSP00000412016
  MOD_RES (1)..(1): Any amino acid
XVIQAAQPSVIQSPQVQTVQSSCKDLKRLFSGTQISTIAESEDSQESVDSVTDSQKRREILSRRPSYRKILNDLSSDAPGVPRIEEEKSEEETSAPAITTVTVPTPIYQTSSGQYIAITQGGAIQLANNGTDGVQGLQTLTMTNAAATQPGTTILQYAQTTDGQQILVPSNQVVVQGTQKL

SEQ ID NO: 11316 - protein, 371 aa, Homo sapiens
  Payload ID: 2226
  Gene Symbol: CREB3
  Gene Name: cAMP responsive element binding protein 3
  Uniprot ID: O43889
  ENSP ID: ENSP00000342136
MELELDAGDQDLLAFLLEESGDLGTAPDEAVRAPLDWALPLSEVPSDWEVDDLLCSLLSPPASLNILSSSNPCLVHHDHTYSLPRETVSMDLESESCRKEGTQMTPQHMEELAEQEIARLVLTDEEKSLLEKEGLILPETLPLTKTEEQILKRVRRKIRNKRSAQESRRKKKVYVGGLESRVLKYTAQNMELQNKVQLLEEQNLSLLDQLRKLQAMVIEISNKTSSSSTCILVLLVSFCLLLVPAMYSSDTRGSLPAEHGVLSRQLRALPSEDPYQLELPALQSEVPKDSTHQWLDGSDCVLQAPGNTSCLLHYMPQAPSAEPPLEWPFPDLFSEPLCRGPILPLQANLTRKGGWLPTGSPSVILQDRYSG

SEQ ID NO: 11317 - protein, 394 aa, Homo sapiens
  Payload ID: 2226
  Gene Symbol: CREB3
  Gene Name: cAMP responsive element binding protein 3
  ENSP ID: ENSP00000484327
MELELDAGDQDLLAFLLEESGDLGTAPDEAVRAPLDWALPLSEVPSDWEVDDLLCSLLSPPASLNILSSSNPCLVHHDHTYSLPRETVSMDLGESEISLGRTGFMGLAIHTFPFAESESCRKEGTQMTPQHMEELAEQEIARLVLTDEEKSLLEKEGLILPETLPLTKTEEQILKRVRRKIRNKRSAQESRRKKKVYVGGLESRVLKYTAQNMELQNKVQLLEEQNLSLLDQLRKLQAMVIEISNKTSSSSTCILVLLVSFCLLLVPAMYSSDTRGSLPAEHGVLSRQLRALPSEDPYQLELPALQSEVPKDSTHQWLDGSDCVLQAPGNTSCLLHYMPQAPSAEPPLEWPFPDLFSEPLCRGPILPLQANLTRKGGWLPTGSPSVILQDRYSG

SEQ ID NO: 11318 - protein, 105 aa, Homo sapiens
  Payload ID: 2227
  Gene Symbol: CREB3L1
  Gene Name: cAMP responsive element binding protein 3-like 1
  ENSP ID: ENSP00000431677
MEDFSNDLFSSFFDDPVLDEKSPLLDMELDSPTPGIQAEHSYSLSGDSAPQSPLVPIKMEDTTQDAEHGAWALGHKLCSIMVKQEQSPELPVDPLAAPSAMAAAA

SEQ ID NO: 11319 - protein, 123 aa, Homo sapiens
  Payload ID: 2227
  Gene Symbol: CREB3L1
  Gene Name: cAMP responsive element binding protein 3-like 1
  ENSP ID: ENSP00000436574
ISTSPLLTAPHKLQGTSGPLLLTEEEKRTLIAEGYPIPTKLPLTKAEEKALKRVRRKIKNKISAQESRRKKKEYVECLEKKVETFTSENNELWKKVETLENANSFSSGIQPLLCSLIGLENPT

SEQ ID NO: 11320 - protein, 519 aa, Homo sapiens
  Payload ID: 2227
  Gene Symbol: CREB3L1
  Gene Name: cAMP responsive element binding protein 3-like 1
  Uniprot ID: Q96BA8
  ENSP ID: ENSP00000481956
MDAVLEPFPADRLFPGSSFLDLGDLNESDFLNNAHFPEHLDHFTENMEDFSNDLFSSFFDDPVLDEKSPLLDMELDSPTPGIQAEHSYSLSGDSAPQSPLVPIKMEDTTQDAEHGAWALGHKLCSIMVKQEQSPELPVDPLAAPSAMAAAAAMATTPLLGLSPLSRLPIPHQAPGEMTQLPVIKAEPLEVNQFLKVTPEDLVQMPPTPPSSHGSDSDGSQSPRSLPPSSPVRPMARSSTAISTSPLLTAPHKLQGTSGPLLLTEEEKRTLIAEGYPIPTKLPLTKAEEKALKRVRRKIKNKISAQESRRKKKEYVECLEKKVETFTSENNELWKKVETLENANRTLLQQLQKLQTLVTNKISRPYKMAATQTGTCLMVAALCFVLVLGSLVPCLPEFSSGSQTVKEDPLAADGVYTASQMPSRSLLFYDDGAGLWEDGRSTLLPMEPPDGWEINPGGPAEQRPRDHLQHDHLDSTHETTKYLSEAWPKDGGNGTSPDFSHSKEWFHDRDLGPNTTIKLS

SEQ ID NO: 11321 - protein, 520 aa, Homo sapiens
  Payload ID: 2228
  Gene Symbol: CREB3L2
  Gene Name: cAMP responsive element binding protein 3-like 2
  Uniprot ID: Q70SY1
  ENSP ID: ENSP00000329140
MEVLESGEQGVLQWDRKLSELSEPGDGEALMYHTHFSELLDEFSQNVLGQLLNDPFLSEKSVSMEVEPSPTSPAPLIQAEHSYSLCEEPRAQSPFTHITTSDSFNDDEVESEKWYLSTDFPSTSIKTEPVTDEPPPGLVPSVTLTITAISTPLEKEEPPLEMNTGVDSSCQTIIPKIKLEPHEVDQFLNFSPKEAPVDHLHLPPTPPSSHGSDSEGSLSPNPRLHPFSLPQTHSPSRAAPRAPSALSSSPLLTAPHKLQGSGPLVLTEEEKRTLIAEGYPIPTKLPLSKSEEKALKKIRRKIKNKISAQESRRKKKEYMDSLEKKVESCSTENLELRKKVEVLENTNRTLLQQLQKLQTLVMGKVSRTCKLAGTQTGTCLMVVVLCFAVAFGSFFQGYGPYPSATKMALPSQHSLQEPYTASVVRSRNLLIYEEHSPPEESSSPGSAGELGGWDRGSSLLRVSGLESRPDVDLPHFIISNETSLEKSVLLELQQHLVSAKLEGNETLKVVELDRRVNTTF

SEQ ID NO: 11322 - protein, 185 aa, Homo sapiens
  Payload ID: 2228
  Gene Symbol: CREB3L2
  Gene Name: cAMP responsive element binding protein 3-like 2
  ENSP ID: ENSP00000388917
MEVEPSPTSPAPLIQAEHSYSLCEEPRAQSPFTHITTSDSFNDDEVESEKWYLSTDFPSTSIKTEPVTDEPPPGLVPSVTLTITAISTPLEKEEPPLEMNTGVDSSCQTIIPKIKLEPHEVDQFLNFSPKEGLSALPVSLWVMDMVSGSTEREYGERAGMSLYHRCCSWLYEIALFLKNKNFASK

SEQ ID NO: 11323 - protein, 239 aa, Homo sapiens
  Payload ID: 2228
  Gene Symbol: CREB3L2
  Gene Name: cAMP responsive element binding protein 3-like 2
  ENSP ID: ENSP00000402889
NLPRRPRRLSSRLSTATPCARSLGPSRPSPTLPPVTASMTICYINSKWMYGPPSLCLGFASYEYCIFNPRLFEKNLLVSGPAWFKTRVVQGPTAYVFFSYEVESEKWYLSTDFPSTSIKTEPVTDEPPPGLVPSVTLTITAISTPLEKEEPPLEMNTGVDSSCQTIIPKIKLEPHEVDQFLNFSPKEGLSALPVSLWVMDMVSGSTEREYGERAGMSLYHRCCSWLYEIALFLKNKNFA

SEQ ID NO: 11324 - protein, 460 aa, Homo sapiens
  Payload ID: 2228
  Gene Symbol: CREB3L2
  Gene Name: cAMP responsive element binding protein 3-like 2
  Uniprot ID: Q70SY1
  ENSP ID: ENSP00000403550
MEVLESGEQGVLQWDRKLSELSEPGDGEALMYHTHFSELLDEFSQNVLGQLLNDPFLSEKSVSMEVEPSPTSPAPLIQAEHSYSLCEEPRAQSPFTHITTSDSFNDDEVESEKWYLSTDFPSTSIKTEPVTDEPPPGLVPSVTLTITAISTPLEKEEPPLEMNTGVDSSCQTIIPKIKLEPHEVDQFLNFSPKEAPVDHLHLPPTPPSSHGSDSEGSLSPNPRLHPFSLPQTHSPSRAAPRAPSALSSSPLLTAPHKLQGSGPLVLTEEEKRTLIAEGYPIPTKLPLSKSEEKALKKIRRKIKNKISAQESRRKKKEYMDSLEKKVESCSTENLELRKKVEVLENTNRTLLQQLQKLQTLVMGKVSRTCKLAGTQTGTCLMVVVLCFAVAFGSFFQGYGPYPSATKMALPSQHSLQEPYTASVGKTACGKLGRVLFYFPRAGFLSLPKGIFCESPMFKKW

SEQ ID NO: 11325 - protein, 248 aa, Homo sapiens
  Payload ID: 2228
  Gene Symbol: CREB3L2
  Gene Name: cAMP responsive element binding protein 3-like 2
  Uniprot ID: Q70SY1
  ENSP ID: ENSP00000410314
MEVLESGEQGVLQWDRKLSELSEPGDGEALMYHTHFSELLDEFSQNVLGQLLNDPFLSEKSVSMEVEPSPTSPAPLIQAEHSYSLCEEPRAQSPFTHITTSDSFNDDEVESEKWYLSTDFPSTSIKTEPVTDEPPPGLVPSVTLTITAISTPLEKEEPPLEMNTGVDSSCQTIIPKIKLEPHEVDQFLNFSPKEGLSALPVSLWVMDMVSGSTEREYGERAGMSLYHRCCSWLYEIALFLKNKNFASK

SEQ ID NO: 11326 - protein, 150 aa, Homo sapiens
  Payload ID: 2228
  Gene Symbol: CREB3L2
  Gene Name: cAMP responsive element binding protein 3-like 2
  ENSP ID: ENSP00000478432
MEVLESGEQGVLQWDRKLSELSEPGDGEALMYHTHFSELLDEFSQNVLGQLLNDPFLSEKSVSMEVEPSPTSPAPLIQAEHSYSLCEEPRAQSPFTHITTSDSFNDDEVESEKWYLSTDFPSTSICHSDHHSHLHPVGKGGTSSGNEHWG

SEQ ID NO: 11327 - protein, 175 aa, Homo sapiens [sequence omitted]

SEQ ID NO: 11328 - protein, 461 aa, Homo sapiens
  Payload ID: 2229
  Gene Symbol: CREB3L3
  Gene Name: cAMP responsive element binding protein 3-like 3
  Uniprot ID: Q68CJ9
  ENSP ID: ENSP00000078445
MNTDLAAGKMASAACSMDPIDSFELLDLLFDRQDGILRHVELGEGWGHVKDQQVLPNPDSDDFLSSILGSGDSLPSSPLWSPEGSDSGISEDLPSDPQDTPPRSGPATSPAGCHPAQPGKGPCLSYHPGNSCSTTTPGPVIQVPEASVTIDLEMWSPGGRICAEKPADPVDLSPRCNLTVKDLLLSGSSGDLQQHHLGASYLLRPGAGHCQELVLTEDEKKLLAKEGITLPTQLPLTKYEERVLKKIRRKIRNKQSAQESRKKKKEYIDGLETRMSACTAQNQELQRKVLHLEKQNLSLLEQLKKLQAIVVQSTSKSAQTGTCVAVLLLSFALIILPSISPFGPNKTESPGDFAPVRVFSRTLHNDAASRVAADAVPGSEAPGPRPEADTTREESPGSPGADWGFQDTANLTNSTEELDNATLVLRNATEGLGQVALLDWVAPGPSTGSGRAGLEAAGDEL

SEQ ID NO: 11329 - protein, 460 aa, Homo sapiens
  Payload ID: 2229
  Gene Symbol: CREB3L3
  Gene Name: cAMP responsive element binding protein 3-like 3
  Uniprot ID: Q68CJ9
  ENSP ID: ENSP00000469355
MNTDLAAGKMASAACSMDPIDSFELLDLLFDRQDGILRHVELGEGWGHVKDQVLPNPDSDDFLSSILGSGDSLPSSPLWSPEGSDSGISEDLPSDPQDTPPRSGPATSPAGCHPAQPGKGPCLSYHPGNSCSTTTPGPVIQVPEASVTIDLEMWSPGGRICAEKPADPVDLSPRCNLTVKDLLLSGSSGDLQQHHLGASYLLRPGAGHCQELVLTEDEKKLLAKEGITLPTQLPLTKYEERVLKKIRRKIRNKQSAQESRKKKKEYIDGLETRMSACTAQNQELQRKVLHLEKQNLSLLEQLKKLQAIVVQSTSKSAQTGTCVAVLLLSFALIILPSISPFGPNKTESPGDFAPVRVFSRTLHNDAASRVAADAVPGSEAPGPRPEADTTREESPGSPGADWGFQDTANLTNSTEELDNATLVLRNATEGLGQVALLDWVAPGPSTGSGRAGLEAAGDEL

SEQ ID NO: 11330 - protein, 337 aa, Homo sapiens
  Payload ID: 2229
  Gene Symbol: CREB3L3
  Gene Name: cAMP responsive element binding protein 3-like 3
  Uniprot ID: Q68CJ9
  ENSP ID: ENSP00000470119
MNTDLAAGKMASAACSMDPIDSFELLDLLFDRQDGILRHVELGEGWGHVKDQQVLPNPDSDDFLSSILGSGDSLPSSPLWSPEGSDSGISEDLPSDPQDTPPRSGPATSPAGCHPAQPGKGPCLSYHPGNSCSTTTPGPVIQVPEASVTIDLEMWSPGGRICAEKPADPVDLSPRCNLTVKDLLLSGSSGDLQQHHLGASYLLRPGAGHCQELVLTEDEKKLLAKEGITLPTQLPLTKDVSLHCSESGVTEESLASREAKPVPLGATEETPGHCGAVHQQVSPDRHLCRSPVAVLCPHHPPLHQPFWPQQNREPWGLCACTSVLQNFAQRCCLPRGC

SEQ ID NO: 11331 - protein, 459 aa, Homo sapiens
  Payload ID: 2229
  Gene Symbol: CREB3L3
  Gene Name: cAMP responsive element binding protein 3-like 3
  Uniprot ID: Q68CJ9
  ENSP ID: ENSP00000472399
MNTDLAAGKMASAACSMDPIDSFELLDLLFDRQDGILRHVELGEGWGHVKDQQVLPNPDSDDFLSSILGSGDSLPSSPLWSPEGSDSGISEDLPSDPQDTPPRSGPATSPAGCHPAQPGKGPCLSYHPGNSCSTTTPGPVIQVPEASVTIDLEMWSPGGRICAEKPADPVDLSPRCNLTVKDLLLSGSSGDLHHLGASYLLRPGAGHCQELVLTEDEKKLLAKEGITLPTQLPLTKYEERVLKKIRRKIRNKQSAQESRKKKKEYIDGLETRMSACTAQNQELQRKVLHLEKQNLSLLEQLKKLQAIVVQSTSKSAQTGTCVAVLLLSFALIILPSISPFGPNKTESPGDFAPVRVFSRTLHNDAASRVAADAVPGSEAPGPRPEADTTREESPGSPGADWGFQDTANLTNSTEELDNATLVLRNATEGLGQVALLDWVAPGPSTGSGRAGLEAAGDEL

SEQ ID NO: 11332 - protein, 395 aa, Homo sapiens
  Payload ID: 2230
  Gene Symbol: CREB3L4
  Gene Name: cAMP responsive element binding protein 3-like 4
  Uniprot ID: Q8TEY5
  ENSP ID: ENSP00000271889
MDLGIPDLLDAWLEPPEDIFSTGSVLELGLHCPPPEVPVTRLQEQGLQGWKSGGDRGCGLQESEPEDFLKLFIDPNEVYCSEASPGSDSGISEDPCHPDSPPAPRATSSPMLYEVVYEAGALERMQGETGPNVGLISIQLDQWSPAFMVPDSCMVSELPFDAHAHILPRAGTVAPVPCTTLLPCQTLFLTDEEKRLLGQEGVSLPSHLPLTKAEERVLKKVRRKIRNKQSAQDSRRRKKEYIDGLESRVAACSAQNQELQKKVQELERHNISLVAQLRQLQTLIAQTSNKAAQTSTCVLILLFSLALIILPSFSPFQSRPEAGSEDYQPHGVTSRNILTHKDVTENLETQVVESRLREPPGAKDANGSTRTLLEKMGGKPRPSGRIRSVLHADEM

SEQ ID NO: 11333 - protein, 375 aa, Homo sapiens
  Payload ID: 2230
  Gene Symbol: CREB3L4
  Gene Name: cAMP responsive element binding protein 3-like 4
  Uniprot ID: Q8TEY5
  ENSP ID: ENSP00000357589
MDLGIPDLLDAWLEPPEDIFSTGSVLELGLHCPPPEVPGLQESEPEDFLKLFIDPNEVYCSEASPGSDSGISEDPCHPDSPPAPRATSSPMLYEVVYEAGALERMQGETGPNVGLISIQLDQWSPAFMVPDSCMVSELPFDAHAHILPRAGTVAPVPCTTLLPCQTLFLTDEEKRLLGQEGVSLPSHLPLTKAEERVLKKVRRKIRNKQSAQDSRRRKKEYIDGLESRVAACSAQNQELQKKVQELERHNISLVAQLRQLQTLIAQTSNKAAQTSTCVLILLFSLALIILPSFSPFQSRPEAGSEDYQPHGVTSRNILTHKDVTENLETQVVESRLREPPGAKDANGSTRTLLEKMGGKPRPSGRIRSVLHADEM

SEQ ID NO: 11334 - protein, 217 aa, Homo sapiens
  Payload ID: 2230
  Gene Symbol: CREB3L4
  Gene Name: cAMP responsive element binding protein 3-like 4
  ENSP ID: ENSP00000357590
MDLGIPDLLDAWLEPPEDIFSTGSVLELGLHCPPPEVPVTRLQEQGLQGWKSGGDRGCGLQESEPEDFLKLFIDPNEVYCSEASPGSDSGISEDPCHPDSPPAPRATSSPMLYEVVYEAGALERMQGETGPNVGLISIQLDQWSPAFMVPDSCMVSELPFDAHAHILPRAGTVAPVPCTTLLPCQTLFLTDEEKRLLGQEGVSLPSHLPLTKVTCFP

SEQ ID NO: 11335 - protein, 395 aa, Homo sapiens; identical to SEQ ID NO: 11332
  Payload ID: 2230
  Gene Symbol: CREB3L4
  Gene Name: cAMP responsive element binding protein 3-like 4
  Uniprot ID: Q8TEY5
  ENSP ID: ENSP00000357592

SEQ ID NO: 11336 - protein, 395 aa, Homo sapiens; identical to SEQ ID NO: 11332
  Payload ID: 2230
  Gene Symbol: CREB3L4
  Gene Name: cAMP responsive element binding protein 3-like 4
  Uniprot ID: Q8TEY5
  ENSP ID: ENSP00000357596

SEQ ID NO: 11337 - protein, 228 aa, Homo sapiens
  Payload ID: 2230
  Gene Symbol: CREB3L4
  Gene Name: cAMP responsive element binding protein 3-like 4
  ENSP ID: ENSP00000391847
MDLGIPDLLDAWLEPPEDIFSTGSVLELGLHCPPPEVPGLQESEPEDFLKLFIDPNEVYCSEASPGSDSGISEDPCHPDSPPAPRATSSPMLYEVVYEAGALERMQGETGPNVGLISIQLDQWSPAFMVPDSCMVSELPFDAHAHILPRAGTVAPVPCTTLLPCQTLFLTDEEKRLLGQEGVSLPSHLPLTKAEERVLKKVRRKIRNKQSAQDSRRRKKEYIDGLESR

SEQ ID NO: 11338 - protein, 182 aa, Homo sapiens
  Payload ID: 2230
  Gene Symbol: CREB3L4
  Gene Name: cAMP responsive element binding protein 3-like 4
  ENSP ID: ENSP00000402308
MDLGIPDLLDAWLEPPEDIFSTGSVLELGLHCPPPEVPVTRLQEQGLQGWKSGGDRGCGLQESEPEDFLKLFIDPNEVYCSEASPGSDSGISEDPCHPDSPPAPRATSSPMLYEVVYEAGALERMQGETGPNVGLISIQLDQWSPAFMVPDSCMVSELPFDAHAHILPRAGTVAPVPCTTLV

SEQ ID NO: 11339 - protein, 508 aa, Homo sapiens
  Payload ID: 2231
  Gene Symbol: CREB5
  Gene Name: cAMP responsive element binding protein 5
  Uniprot ID: Q02930
  ENSP ID: ENSP00000350359
MIYEESKMNLEQERPFVCSAPGCSQRFPTEDHLMIHRHKHEMTLKFPSIKTDNMLSDQTPTPTRFLKNCEEVGLFSELDCSLEHEFRKAQEEESSKRNISMHNAVGGAMTGPGTHQLSSARLPNHDTNVVIQQAMPSPQSSSVITQAPSTNRQIGPVPGSLSSLLHLHNRQRQPMPASMPGTLPNPTMPGSSAVLMPMERQMSVNSSIMGMQGPNLSNPCASPQVQPMHSEAKMRLKAALTHHPAAMSNGNMNTMGHMMEMMGSRQDQTPHHHMHSHPHQHQTLPPHHPYPHQHQHPAHHPHPQPHHQQNHPHHHSHSHLHAHPAHHQTSPHPPLHTGNQAQVSPATQQMQPTQTIQPPQPTGGRRRRVVDEDPDERRRKFLERNRAAATRCRQKRKVWVMSLEKKAEELTQTNMQLQNEVSMLKNEVAQLKQLLLTHKDCPITAMQKESQGYLSPESSPPASPVPACSQQQVIQHNTITTSSSVSEVVGSSTLSQLTTHRTDLNPIL

SEQ ID NO: 11340 - protein, 369 aa, Homo sapiens
  Payload ID: 2231
  Gene Symbol: CREB5
  Gene Name: cAMP responsive element binding protein 5
  Uniprot ID: Q02930
  ENSP ID: ENSP00000379592
MFCTSGGNSASVMSMRPVPGSLSSLLHLHNRQRQPMPASMPGTLPNPTMPGSSAVLMPMERQMSVNSSIMGMQGPNLSNPCASPQVQPMHSEAKMRLKAALTHHPAAMSNGNMNTMGHMMEMMGSRQDQTPHHHMHSHPHQHQTLPPHHPYPHQHQHPAHHPHPQPHHQQNHPHHHSHSHLHAHPAHHQTSPHPPLHTGNQAQVSPATQQMQPTQTIQPPQPTGGRRRRVVDEDPDERRRKFLERNRAAATRCRQKRKVWVMSLEKKAEELTQTNMQLQNEVSMLKNEVAQLKQLLLTHKDCPITAMQKESQGYLSPESSPPASPVPACSQQQVIQHNTITTSSSVSEVVGSSTLSQLTTHRTDLNPIL

SEQ ID NO: 11341 - protein, 475 aa, Homo sapiens
  Payload ID: 2231
  Gene Symbol: CREB5
  Gene Name: cAMP responsive element binding protein 5
  Uniprot ID: Q02930
  ENSP ID: ENSP00000379593
MIHRHKHEMTLKFPSIKTDNMLSDQTPTPTRFLKNCEEVGLFSELDCSLEHEFRKAQEEESSKRNISMHNAVGGAMTGPGTHQLSSARLPNHDTNVVIQQAMPSPQSSSVITQAPSTNRQIGPVPGSLSSLLHLHNRQRQPMPASMPGTLPNPTMPGSSAVLMPMERQMSVNSSIMGMQGPNLSNPCASPQVQPMHSEAKMRLKAALTHHPAAMSNGNMNTMGHMMEMMGSRQDQTPHHHMHSHPHQHQTLPPHHPYPHQHQHPAHHPHPQPHHQQNHPHHHSHSHLHAHPAHHQTSPHPPLHTGNQAQVSPATQQMQPTQTIQPPQPTGGRRRRVVDEDPDERRRKFLERNRAAATRCRQKRKVWVMSLEKKAEELTQTNMQLQNEVSMLKNEVAQLKQLLLTHKDCPITAMQKESQGYLSPESSPPASPVPACSQQQVIQHNTITTSSSVSEVVGSSTLSQLTTHRTDLNPIL

SEQ ID NO: 11342 - protein, 501 aa, Homo sapiens
  Payload ID: 2231
  Gene Symbol: CREB5
  Gene Name: cAMP responsive element binding protein 5
  Uniprot ID: Q02930
  ENSP ID: ENSP00000379594
MNLEQERPFVCSAPGCSQRFPTEDHLMIHRHKHEMTLKFPSIKTDNMLSDQTPTPTRFLKNCEEVGLFSELDCSLEHEFRKAQEEESSKRNISMHNAVGGAMTGPGTHQLSSARLPNHDTNVVIQQAMPSPQSSSVITQAPSTNRQIGPVPGSLSSLLHLHNRQRQPMPASMPGTLPNPTMPGSSAVLMPMERQMSVNSSIMGMQGPNLSNPCASPQVQPMHSEAKMRLKAALTHHPAAMSNGNMNTMGHMMEMMGSRQDQTPHHHMHSHPHQHQTLPPHHPYPHQHQHPAHHPHPQPHHQQNHPHHHSHSHLHAHPAHHQTSPHPPLHTGNQAQVSPATQQMQPTQTIQPPQPTGGRRRRVVDEDPDERRRKFLERNRAAATRCRQKRKVWVMSLEKKAEELTQTNMQLQNEVSMLKNEVAQLKQLLLTHKDCPITAMQKESQGYLSPESSPPASPVPACSQQQVIQHNTITTSSSVSEVVGSSTLSQLTTHRTDLNPIL

SEQ ID NO: 11343 - protein, 475 aa, Homo sapiens; identical to SEQ ID NO: 11341
  Payload ID: 2231
  Gene Symbol: CREB5
  Gene Name: cAMP responsive element binding protein 5
  Uniprot ID: Q02930
  ENSP ID: ENSP00000387197

SEQ ID NO: 11344 - protein, 115 aa, Homo sapiens
  Payload ID: 2231
  Gene Symbol: CREB5
  Gene Name: cAMP responsive element binding protein 5
  ENSP ID: ENSP00000394088
MNLEQERPFVCSAPGCSQRFPTEDHLMIHRHKHEMTLKFPSIKTDNMLSDQTPTPTRFLKNCEEVGLFSELDCSLEHEFRKAQEEESSKRNISMHNAVGGAMTGPGTHQLSSARL

SEQ ID NO: 11345 - protein, 211 aa, Homo sapiens
  Payload ID: 2231
  Gene Symbol: CREB5
  Gene Name: cAMP responsive element binding protein 5
  ENSP ID: ENSP00000394979
MPASMPGTLPNPTMPGSSAVLMPMERQMSVNSSIMGMQGPNLSNPCASPQVQPMHSEAKMRLKAALTHHPAAMSNGNMNTMGHMMEMMGSRQDQTPHHHMHSHPHQHQTLPPHHPYPHQHQHPAHHPHPQPHHQQNHPHHHSHSHLHAHPAHHQTSPHPPLHTGNQAQVSPATQQMQPTQTIQPPQPTGGRRRRVVDEDPDERRRKFLERN

SEQ ID NO: 11346 - protein, 39 aa, Homo sapiens
  Payload ID: 2231
  Gene Symbol: CREB5
  Gene Name: cAMP responsive element binding protein 5
  ENSP ID: ENSP00000440429
LQNEVSMLKNEVAQLKQLLLTHKDCPITAMQKESQGYLN

SEQ ID NO: 11347 - protein, 120 aa, Homo sapiens
  Payload ID: 2232
  Gene Symbol: CREBL2
  Gene Name: cAMP responsive element binding protein-like 2
  Uniprot ID: O60519
  ENSP ID: ENSP00000228865
MDDSKVVGGKVKKPGKRGRKPAKIDLKAKLERSRQSARECRARKKLRYQYLEELVSSRERAICALREELEMYKQWCMAMDQGKIPSEIKALLTGEEQNKSQQNSSRHTKAGKTDANSNSW

SEQ ID NO: 11348 - protein, 300 aa, Homo sapiens
  Payload ID: 2233
  Gene Symbol: CREM
  Gene Name: cAMP responsive element modulator
  Uniprot ID: Q03060
  ENSP ID: ENSP00000265372
MSKCARKKYIKTNPRQMTMETVESQHDGSITASLTESKSAHVQTQTGQNSIPALAQVAAIAETDESAESEGVIDSHKRREILSRRPSYRKILNELSSDVPGVPKIEEERSEEEGTPPSIATMAVPTSIYQTSTGQYIAIAQGGTIQISNPGSDGVQGLQALTMTNSGAPPPGATIVQYAAQSADGTQQFFVPGSQVVVQAATGDMPTYQIRAPTAALPQGVVMAASPGSLHSPQQLAEEATRKRELRLMKNREAAKECRRRKKEYVKCLESRVAVLEVQNKKLIEELETLKDICSPKTDY

SEQ ID NO: 11349 - protein, 299 aa, Homo sapiens
  Payload ID: 2233
  Gene Symbol: CREM
  Gene Name: cAMP responsive element modulator
  Uniprot ID: Q03060
  ENSP ID: ENSP00000337138
MSKCARKKYIKTNPRQMTMETVESQHDGSITASLTESKSAHVQTQTGQNSIPALAQVAAIAETDESAESEGVIDSHKRREILSRRPSYRKILNELSSDVPGVPKIEEERSEEEGTPPSIATMAVPTSIYQTSTGQYIAIAQGGTIQISNPGSDGVQGLQALTMTNSGAPPPGATIVQYAAQSADGTQQFFVPGSQVVVQAATGDMPTYQIRAPTAALPQGVVMAASPGSLHSPQQLAEEATRKRELRLMKNREAARECRRKKKEYVKCLENRVAVLENQNKTLIEELKALKDLYCHKVE

SEQ ID NO: 11350 - protein, 245 aa, Homo sapiens
  Payload ID: 2233
  Gene Symbol: CREM
  Gene Name: cAMP responsive element modulator
  Uniprot ID: Q03060
  ENSP ID: ENSP00000341875
MVAAIAETDESAESEGVIDSHKRREILSRRPSYRKILNELSSDVPGVPKIEEERSEEEGTPPSIATMAVPTSIYQTSTGQYIAIAQGGTIQISNPGSDGVQGLQALTMTNSGAPPPGATIVQYAAQSADGTQQFFVPGSQVVVQAATGDMPTYQIRAPTAALPQGVVMAASPGSLHSPQQLAEEATRKRELRLMKNREAAKECRRRKKEYVKCLESRVAVLEVQNKKLIEELETLKDICSPKTDY

SEQ ID NO: 11351 - protein, 95 aa, Homo sapiens
  Payload ID: 2233
  Gene Symbol: CREM
  Gene Name: cAMP responsive element modulator
  ENSP ID: ENSP00000344365
MPTYQIRAPTAALPQGVVMAASPGSLHSPQQLAEEATRKRELRLMKNREAARECRRKKKEYVKCLENRVAVLENQNKTLIEELKALKDLYCHKVE

SEQ ID NO: 11352 - protein, 221 aa, Homo sapiens
  Payload ID: 2233
  Gene Symbol: CREM
  Gene Name: cAMP responsive element modulator
  Uniprot ID: Q03060
  ENSP ID: ENSP00000345384
MTMETVESQHDGSITASLTESKSAHVQTQTGQNSIPALAQVAAIAETDESAESEGVIDSHKRREILSRRPSYRKILNELSSDVPGVPKIEEERSEEEGTPPSIATMAVPTSIYQTSTGQYTATGDMPTYQIRAPTAALPQGVVMAASPGSLHSPQQLAEEATRKRELRLMKNREAAKECRRRKKEYVKCLESRVAVLEVQNKKLIEELETLKDICSPKTDY

SEQ ID NO: 11353 - protein, 248 aa, Homo sapiens
  Payload ID: 2233
  Gene Symbol: CREM
  Gene Name: cAMP responsive element modulator
  Uniprot ID: Q03060
  ENSP ID: ENSP00000346804
MSKCARKKYIKTNPRQMTMETVESQHDGSITASLTESKSAHVQTQTGQNSIPALAQVAAIAETDESAESEGVIDSHKRREILSRRPSYRKILNELSSDVPGVPKIEEERSEEEGTPPSIATMAVPTSIYQTSTGQYNEETELAPSHMAAATGDMPTYQIRAPTAALPQGVVMAASPGSLHSPQQLAEEATRKRELRLMKNREAARECRRKKKEYVKCLENRVAVLENQNKTLIEELKALKDLYCHKVE

SEQ ID NO: 11354 - protein, 108 aa, Homo sapiens
  Payload ID: 2233
  Gene Symbol: CREM
  Gene Name: cAMP responsive element modulator
  Uniprot ID: Q03060
  ENSP ID: ENSP00000349387
MAVTGDDTAATGDMPTYQIRAPTAALPQGVVMAASPGSLHSPQQLAEEATRKRELRLMKNREAARECRRKKKEYVKCLENRVAVLENQNKTLIEELKALKDLYCHKVE

SEQ ID NO: 11355 - protein, 270 aa, Homo sapiens
  Payload ID: 2233
  Gene Symbol: CREM
  Gene Name: cAMP responsive element modulator
  Uniprot ID: Q03060
  ENSP ID: ENSP00000354593
MWWHQHNLCFRRPIEEDYSSGDVEEKVAAIAETDESAESEGVIDSHKRREILSRRPSYRKILNELSSDVPGVPKIEEERSEEEGTPPSIATMAVPTSIYQTSTGQYIAIAQGGTIQISNPGSDGVQGLQALTMTNSGAPPPGATIVQYAAQSADGTQQFFVPGSQVVVQAATGDMPTYQIRAPTAALPQGVVMAASPGSLHSPQQLAEEATRKRELRLMKNREAAKECRRRKKEYVKCLESRVAVLEVQNKKLIEELETLKDICSPKTDY

SEQ ID NO: 11356 - protein, 269 aa, Homo sapiens
  Payload ID: 2233
  Gene Symbol: CREM
  Gene Name: cAMP responsive element modulator
  ENSP ID: ENSP00000363853
MTMETVESQHDGSITASLTESKSAHVQTQTGQNSIPALAQVSVAGSGTRRGSPAVTLVQLPSGQTIHVQGVIQTPQPWVIQSSEIHTVQVAAIAETDESAESEGVIDSHKRREILSRRPSYRKILNELSSDVPGVPKIEEERSEEEGTPPSIATMAVPTSIYQTSTGQYTATGDMPTYQIRAPTAALPQGVVMAASPGSLHSPQQLAEEATRKRELRLMKNREAARECRRKKKEYVKCLENRVAVLENQNKTLIEELKALKDLYCHKVE

SEQ ID NO: 11357 - protein, 137 aa, Homo sapiens
  Payload ID: 2233
  Gene Symbol: CREM
  Gene Name: cAMP responsive element modulator
  Uniprot ID: Q03060
  ENSP ID: ENSP00000363858
MTMETVESQHDGSITASLTESKSAHVQTQTGQNSIPALAQVAAIAETDESAESEGVIDSHKRREILSRRPSYRKILNELSSDVPGVPKIEEERSEEEGTPPSIATMAVPTSIYQTSTGQYSMYAAIRYDTVLALSLL

SEQ ID NO: 11358 - protein, 221 aa, Homo sapiens; identical to SEQ ID NO: 11352
  Payload ID: 2233
  Gene Symbol: CREM
  Gene Name: cAMP responsive element modulator
  Uniprot ID: Q03060
  ENSP ID: ENSP00000363860

SEQ ID NO: 11359 - protein, 236 aa, Homo sapiens
  Payload ID: 2233
  Gene Symbol: CREM
  Gene Name: cAMP responsive element modulator
  Uniprot ID: Q03060
  ENSP ID: ENSP00000363866
MSKCARKKYIKTNPRQMTMETVESQHDGSITASLTESKSAHVQTQTGQNSIPALAQVAAIAETDESAESEGVIDSHKRREILSRRPSYRKILNELSSDVPGVPKIEEERSEEEGTPPSIATMAVPTSIYQTSTGQYTATGDMPTYQIRAPTAALPQGVVMAASPGSLHSPQQLAEEATRKRELRLMKNREAARECRRKKKEYVKCLENRVAVLENQNKTLIEELKALKDLYCHKVE

SEQ ID NO: 11360 - protein, 282 aa, Homo sapiens
  Payload ID: 2233
  Gene Symbol: CREM
  Gene Name: cAMP responsive element modulator
  Uniprot ID: Q03060
  ENSP ID: ENSP00000379225
MWWHQHNLCFRRPIEEDYSSGDVEEKVAAIAETDESAESEGVIDSHKRREILSRRPSYRKILNELSSDVPGVPKIEEERSEEEGTPPSIATMAVPTSIYQTSTGQYIAIAQGGTIQISNPGSDGVQGLQALTMTNSGAPPPGATIVQYAAQSADGTQQFFVPGSQVVVQDEETELAPSHMAAATGDMPTYQIRAPTAALPQGVVMAASPGSLHSPQQLAEEATRKRELRLMKNREAAKECRRRKKEYVKCLESRVAVLEVQNKKLIEELETLKDICSPKTDY

SEQ ID NO: 11361 - protein, 345 aa, Homo sapiens
  Payload ID: 2233
  Gene Symbol: CREM
  Gene Name: cAMP responsive element modulator
  ENSP ID: ENSP00000393538
MTMETVESQHDGSITASLTESKSAHVQTQTGQNSIPALAQVSVAGSGTRRGSPAVTLVQLPSGQTIHVQGVIQTPQPWVIQSSEIHTVQVAAIAETDESAESEGVIDSHKRREILSRRPSYRKILNELSSDVPGVPKIEEERSEEEGTPPSIATMAVPTSIYQTSTGQYIAIAQGGTIQISNPGSDGVQGLQALTMTNSGAPPPGATIVQYAAQSADGTQQFFVPGSQVVVQDEETELAPSHMAAATGDMPTYQIRAPTAALPQGVVMAASPGSLHSPQQLAEEATRKRELRLMKNREAAKECRRRKKEYVKCLESRVAVLEVQNKKLIEELETLKDICSPKTDY

SEQ ID NO: 11362 - protein, 156 aa, Homo sapiens
  Payload ID: 2233
  Gene Symbol: CREM
  Gene Name: cAMP responsive element modulator
  ENSP ID: ENSP00000403938
MSKCARKKYIKTNPRQMTMETVESQHDGSITASLTESKSAHVQTQTGQNSIPALAQVAAIAETDESAESEGVIDSHKRREILSRRPSYRKILNELSSDVPGVPKIEEERSEEEGTPPSIATMAVPTSIYQTSTGQYIAIAQGGTIQISNPGSDGVQ

SEQ ID NO: 11363 - protein, 248 aa, Homo sapiens; identical to SEQ ID NO: 11353
  Payload ID: 2233
  Gene Symbol: CREM
  Gene Name: cAMP responsive element modulator
  Uniprot ID: Q03060
  ENSP ID: ENSP00000409220

SEQ ID NO: 11364 - protein, 62 aa, Homo sapiens
  Payload ID: 2233
  Gene Symbol: CREM
  Gene Name: cAMP responsive element modulator
  ENSP ID: ENSP00000417058
MTMETVESQHDGSITASLTESKSAHVQTQTGQNSIPALAQLPLVTCQLTRSELLLLLCHREW

SEQ ID NO: 11365 - protein, 78 aa, Homo sapiens
  Payload ID: 2233
  Gene Symbol: CREM
  Gene Name: cAMP responsive element modulator
  ENSP ID: ENSP00000417130
MAVPTSIYQTSTGQYIAIAQGGTIQISNPGSDGVQGLQALTMTNSGAPPPGATIVQYAAQSADGTQQFFVPGSQVVVQ

SEQ ID NO: 11366 - protein, 219 aa, Homo sapiens
  Payload ID: 2233
  Gene Symbol: CREM
  Gene Name: cAMP responsive element modulator
  ENSP ID: ENSP00000417165
MWWHQHNLCFRRPIEEDYSSGDVEEKVAAIAETDESAESEGVIDSHKRREILSRRPSYRKILNELSSDVPGVPKIEEERSEEEGTPPSIATMAVPTSIYQTSTGQYNEETELAPSHMAAATGDMPTYQIRAPTAALPQGVVMAASPGSLHSPQQLAEEATRKRELRLMKNREAAKECRRRKKEYVKCLESRVAVLEVQNKKLIEELETLKDICSPKTDY

SEQ ID NO: 11367 - protein, 113 aa, Homo sapiens
  Payload ID: 2233
  Gene Symbol: CREM
  Gene Name: cAMP responsive element modulator
  Uniprot ID: Q03060
  ENSP ID: ENSP00000417327
MNRTQELSGQLSAATGDMPTYQIRAPTAALPQGVVMAASPGSLHSPQQLAEEATRKRELRLMKNREAAKECRRRKKEYVKCLESRVAVLEVQNKKLIEELETLKDICSPKTDY

SEQ ID NO: 11368 - protein, 115 aa, Homo sapiens
  Payload ID: 2233
  Gene Symbol: CREM
  Gene Name: cAMP responsive element modulator
  ENSP ID: ENSP00000417399
MAVPTSIYQTSTGQYIAIAQGGTIQISNPGSDGVQGLQALTMTNSGAPPPGATIVQYAAQSADGTQQFFVPGSQVVVQAATGDMPTYQIRAPTAALPQGVVMAASPGSLHSPQQL

SEQ ID NO: 11369 - protein, 109 aa, Homo sapiens
  Payload ID: 2233
  Gene Symbol: CREM
  Gene Name: cAMP responsive element modulator
  Uniprot ID: Q03060
  ENSP ID: ENSP00000417460
MAVTGDDTAATGDMPTYQIRAPTAALPQGVVMAASPGSLHSPQQLAEEATRKRELRLMKNREAAKECRRRKKEYVKCLESRVAVLEVQNKKLIEELETLKDICSPKTDY

SEQ ID NO: 11370 - protein, 112 aa, Homo sapiens
  Payload ID: 2233
  Gene Symbol: CREM
  Gene Name: cAMP responsive element modulator
  Uniprot ID: Q03060
  ENSP ID: ENSP00000417562
MNRTQELSGQLSAATGDMPTYQIRAPTAALPQGVVMAASPGSLHSPQQLAEEATRKRELRLMKNREAARECRRKKKEYVKCLENRVAVLENQNKTLIEELKALKDLYCHKVE

SEQ ID NO: 11371 - protein, 121 aa, Homo sapiens
  Payload ID: 2233
  Gene Symbol: CREM
  Gene Name: cAMP responsive element modulator
  Uniprot ID: Q03060
  ENSP ID: ENSP00000417807
MAVTGDDTDEETELAPSHMAAATGDMPTYQIRAPTAALPQGVVMAASPGSLHSPQQLAEEATRKRELRLMKNREAAKECRRRKKEYVKCLESRVAVLEVQNKKLIEELETLKDICSPKTDY

SEQ ID NO: 11372 - protein, 138 aa, Homo sapiens
  Payload ID: 2233
  Gene Symbol: CREM
  Gene Name: cAMP responsive element modulator
  Uniprot ID: Q03060
  ENSP ID: ENSP00000418336
MTNSGAPPPGATIVQYAAQSADGTQQFFVPGSQVVVQAATGDMPTYQIRAPTAALPQGVVMAASPGSLHSPQQLAEEATRKRELRLMKNREAAKECRRRKKEYVKCLESRVAVLEVQNKKLIEELETLKDICSPKTDY

SEQ ID NO: 11373 - protein, 53 aa, Homo sapiens
  Payload ID: 2233
  Gene Symbol: CREM
  Gene Name: cAMP responsive element modulator
  ENSP ID: ENSP00000418450
  MOD_RES (1)..(1): Any amino acid
XDGSITASLTESKSAHVQTQTGQNSIPALAQLPLVTCQLTRSELLLLLCHREW

SEQ ID NO: 11374 - protein, 186 aa, Homo sapiens
  Payload ID: 2233
  Gene Symbol: CREM
  Gene Name: cAMP responsive element modulator
  ENSP ID: ENSP00000418798
MTMETVESQHDGSITASLTESKSAHVQTQTGQNSIPALAQVAAIAETDESAESEGVIDSHKRREILSRRPSYRKILNELSSDVPGVPKIEEERSEEEGTPPSIATMAVPTSIYQTSTGQYTATGDMPTYQIRAPTAALPQGVVMAASPGSLHSPQQLAEEATRKRELRLMKNREAAKECRRRKKEY

SEQ ID NO: 11375 - protein, 96 aa, Homo sapiens
  Payload ID: 2233
  Gene Symbol: CREM
  Gene Name: cAMP responsive element modulator
  ENSP ID: ENSP00000419018
MPTYQIRAPTAALPQGVVMAASPGSLHSPQQLAEEATRKRELRLMKNREAAKECRRRKKEYVKCLESRVAVLEVQNKKLIEELETLKDICSPKTDY

SEQ ID NO: 11376 - protein, 102 aa, Homo sapiens
  Payload ID: 2233
  Gene Symbol: CREM
  Gene Name: cAMP responsive element modulator
  Uniprot ID: Q03060
  ENSP ID: ENSP00000419075
MAAATGDMPTYQIRAPTAALPQGVVMAASPGSLHSPQQLAEEATRKRELRLMKNREAARECRRKKKEYVKCLENRVAVLENQNKTLIEELKALKDLYCHKVE

SEQ ID NO: 11377 - protein, 193 aa, Homo sapiens
  Payload ID: 2233
  Gene Symbol: CREM
  Gene Name: cAMP responsive element modulator
  ENSP ID: ENSP00000419684
VAAIAETDESAESEGVIDSHKRREILSRRPSYRKILNELSSDVPGVPKIEEERSEEEGTPPSIATMAVPTSIYQTSTGQYNEETELAPSHMAAATGDMPTYQIRAPTAALPQGVVMAASPGSLHSPQQLAEEATRKRELRLMKNREAAKECRRRKKEYVKCLESRVAVLEVQNKKLIEELETLKDICSPKTDY

SEQ ID NO: 11378 - protein, 125 aa, Homo sapiens
  Payload ID: 2233
  Gene Symbol: CREM
  Gene Name: cAMP responsive element modulator
  Uniprot ID: Q03060
  ENSP ID: ENSP00000419810
MNRTQELSGQLSDEETELAPSHMAAATGDMPTYQIRAPTAALPQGVVMAASPGSLHSPQQLAEEATRKRELRLMKNREAAKECRRRKKEYVKCLESRVAVLEVQNKKLIEELETLKDICSPKTDY

SEQ ID NO: 11379 - protein, 137 aa, Homo sapiens; identical to SEQ ID NO: 11357
  Payload ID: 2233
  Gene Symbol: CREM
  Gene Name: cAMP responsive element modulator
  Uniprot ID: Q03060
  ENSP ID: ENSP00000419924

SEQ ID NO: 11380 - protein, 95 aa, Homo sapiens; identical to SEQ ID NO: 11351
  Payload ID: 2233
  Gene Symbol: CREM
  Gene Name: cAMP responsive element modulator
  ENSP ID: ENSP00000420437

SEQ ID NO: 11381 - protein, 46 aa, Homo sapiens
  Payload ID: 2233
  Gene Symbol: CREM
  Gene Name: cAMP responsive element modulator
  ENSP ID: ENSP00000420453
MTMETVESQHDGSITASLTESKSAHVQTQTGQNSIPALAQKILYYR

SEQ ID NO: 11382 - protein, 312 aa, Homo sapiens
  Payload ID: 2233
  Gene Symbol: CREM
  Gene Name: cAMP responsive element modulator
  Uniprot ID: Q03060
  ENSP ID: ENSP00000420511
MSKCARKKYIKTNPRQMTMETVESQHDGSITASLTESKSAHVQTQTGQNSIPALAQVAAIAETDESAESEGVIDSHKRREILSRRPSYRKILNELSSDVPGVPKIEEERSEEEGTPPSIATMAVPTSIYQTSTGQYIAIAQGGTIQISNPGSDGVQGLQALTMTNSGAPPPGATIVQYAAQSADGTQQFFVPGSQVVVQDEETELAPSHMAAATGDMPTYQIRAPTAALPQGVVMAASPGSLHSPQQLAEEATRKRELRLMKNREAAKECRRRKKEYVKCLESRVAVLEVQNKKLIEELETLKDICSPKTDY

SEQ ID NO: 11383 - protein, 120 aa, Homo sapiens
  Payload ID: 2233
  Gene Symbol: CREM
  Gene Name: cAMP responsive element modulator
  Uniprot ID: Q03060
  ENSP ID: ENSP00000420681
MAVTGDDTDEETELAPSHMAAATGDMPTYQIRAPTAALPQGVVMAASPGSLHSPQQLAEEATRKRELRLMKNREAARECRRKKKEYVKCLENRVAVLENQNKTLIEELKALKDLYCHKVE

SEQ ID NO: 11384 - protein, 59 aa, Homo sapiens
  Payload ID: 2233
  Gene Symbol: CREM
  Gene Name: cAMP responsive element modulator
  ENSP ID: ENSP00000473519
MTMETVESQHDGSITASLTESKSAHVQTQTGQNSIPALAQCTMCKESLGIKQPWHAIGD

SEQ ID NO: 11385 - protein, 112 aa, Homo sapiens
  Payload ID: 2234
  Gene Symbol: ARPP19
  Gene Name: cAMP-regulated phosphoprotein, 19kDa
  Uniprot ID: P56211
  ENSP ID: ENSP00000249822
MSAEVPEAASAEEQKEMEDKVTSPEKAEEAKLKARYPHLGQKPGGSDFLRKRLQKGQKYFDSGDYNMAKAKMKNKQLPTAAPDKTEVTGDHIPTPQDLPQRKPSLVASKLAG

SEQ ID NO: 11386 - protein, 96 aa, Homo sapiens
  Payload ID: 2234
  Gene Symbol: ARPP19
  Gene Name: cAMP-regulated phosphoprotein, 19kDa
  Uniprot ID: P56211
  ENSP ID: ENSP00000454234
MEDKVTSPEKAEEAKLKARYPHLGQKPGGSDFLRKRLQKGQKYFDSGDYNMAKAKMKNKQLPTAAPDKTEVTGDHIPTPQDLPQRKPSLVASKLAG

SEQ ID NO: 11387 - protein, 112 aa, Homo sapiens; identical to SEQ ID NO: 11385
  Payload ID: 2234
  Gene Symbol: ARPP19
  Gene Name: cAMP-regulated phosphoprotein, 19kDa
  Uniprot ID: P56211
  ENSP ID: ENSP00000454297

SEQ ID NO: 11388 - protein, 131 aa, Homo sapiens
  Payload ID: 2234
  Gene Symbol: ARPP19
  Gene Name: cAMP-regulated phosphoprotein, 19kDa
  ENSP ID: ENSP00000454341
MSAEVPEAASAEEQKSEHNMLPWSLQPSIPNSLEEMEDKVTSPEKAEEAKLKARYPHLGQKPGGSDFLRKRLQKGQKYFDSGDYNMAKAKMKNKQLPTAAPDKTEVTGDHIPTPQDLPQRKPSLVASKLAG

SEQ ID NO: 11389 - protein, 131 aa, Homo sapiens; identical to SEQ ID NO: 11388
  Payload ID: 2234
  Gene Symbol: ARPP19
  Gene Name: cAMP-regulated phosphoprotein, 19kDa
  ENSP ID: ENSP00000454612

SEQ ID NO: 11390 - protein, 112 aa, Homo sapiens; identical to SEQ ID NO: 11385
  Payload ID: 2234
  Gene Symbol: ARPP19
  Gene Name: cAMP-regulated phosphoprotein, 19kDa
  Uniprot ID: P56211
  ENSP ID: ENSP00000455151

SEQ ID NO: 11391 - protein, 71 aa, Homo sapiens
  Payload ID: 2234
  Gene Symbol: ARPP19
  Gene Name: cAMP-regulated phosphoprotein, 19kDa
  ENSP ID: ENSP00000455610
MSAEVPEAASAEEQKQKYFDSGDYNMAKAKMKNKQLPTAAPDKTEVTGDHIPTPQDLPQRKPSLVASKLAG

SEQ ID NO: 11392 - protein, 112 aa, Homo sapiens; identical to SEQ ID NO: 11385
  Payload ID: 2234
  Gene Symbol: ARPP19
  Gene Name: cAMP-regulated phosphoprotein, 19kDa
  Uniprot ID: P56211
  ENSP ID: ENSP00000455625

SEQ ID NO: 11393 - protein, 96 aa, Homo sapiens; identical to SEQ ID NO: 11386
  Payload ID: 2234
  Gene Symbol: ARPP19
  Gene Name: cAMP-regulated phosphoprotein, 19kDa
  Uniprot ID: P56211
  ENSP ID: ENSP00000455986

SEQ ID NO: 11394 - protein, 72 aa, Homo sapiens
  Payload ID: 2234
  Gene Symbol: ARPP19
  Gene Name: cAMP-regulated phosphoprotein, 19kDa
  ENSP ID: ENSP00000457123
MEDKVTSPEKAEEAKLKARYPHLGQKPGGSDFLRKRLQKGQKYFDSGDYNMAKAKMKNKQLPTAAPDKTEVT

SEQ ID NO: 11395 - protein, 96 aa, Homo sapiens; identical to SEQ ID NO: 11386
  Payload ID: 2234
  Gene Symbol: ARPP19
  Gene Name: cAMP-regulated phosphoprotein, 19kDa
  Uniprot ID: P56211
  ENSP ID: ENSP00000457631

SEQ ID NO: 11396 - protein, 96 aa, Homo sapiens; identical to SEQ ID NO: 11386
  Payload ID: 2234
  Gene Symbol: ARPP19
  Gene Name: cAMP-regulated phosphoprotein, 19kDa
  Uniprot ID: P56211
  ENSP ID: ENSP00000457805

SEQ ID NO: 11397 - protein, 812 aa, Homo sapiens
  Payload ID: 2235
  Gene Symbol: ARPP21
  Gene Name: cAMP-regulated phosphoprotein, 21kDa
  Uniprot ID: Q9UBL0
  ENSP ID: ENSP00000187397
MSEQGDLNQAIAEEGGTEQETATPENGIVKSESLDEEEKLELQRRLEAQNQERRKSKSGAGKGKLTRSLAVCEESSARPGGESLQDQESIHLQLSSFSSLQEEDKSRKDDSEREKEKDKNKDKTSEKPKIRMLSKDCSQEYTDSTGIDLHEFLINTLKNNSRDRMILLKMEQEIIDFIADNNNHYKKFPQMSSYQRMLVHRVAAYFGLDHNVDQTGKSVIINKTSSTRIPEQRFCEHLKDEKGEESQKRFILKRDNSSIDKEDNQQNRMHPFRDDRRSKSIEEREEEYQRVRERIFAHDSVCSQESLFVENSRLLEDSNICNETYKKRQLFRGNRDGSGRTSGSRQSSSENELKWSDHQRAWSSTDSDSSNRNLKPAMTKTASFGGITVLTRGDSTSSTRSTGKLSKAGSESSSSAGSSGSLSRTHPPLQSTPLVSGVAAGSPGCVPYPENGIGGQVAPSSTSYILLPLEAATGIPPGSILLNPHTGQPFVNPDGTPAIYNPPTSQQPLRSAMVGQSQQQPPQQQPSPQPQQQVQPPQPQMAGPLVTQRDDVATQFGQMTLSRQSSGETPEPPSGPVYPSSLMPQPAQQPSYVIASTGQQLPTGGFSGSGPPISQQVLQPPPSPQGFVQQPPPAQMPVYYYPSGQYPTSTTQQYRPMAPVQYNAQRSQQMPQAAQQAGYQPVLSGQQGFQGLIGVQQPPQSQNVINNQQGTPVQSVMVSYPTMSSYQVPMTQGSQGLPQQSYQQPIMLPNQAGQGSLPATGMPVYCNVTPPTPQNNLRLIGPHCPSSTVPVMSASCRTNCASMSNAGWQVKF

SEQ ID NO: 11398 - protein, 89 aa, Homo sapiens
  Payload ID: 2235
  Gene Symbol: ARPP21
  Gene Name: cAMP-regulated phosphoprotein, 21kDa
  Uniprot ID: Q9UBL0
  ENSP ID: ENSP00000379741
MSEQGDLNQAIAEEGGTEQETATPENGIVKSESLDEEEKLELQRRLEAQNQERRKSKSGAGKGKLTRSLAVCEESSARPGGESLQDQTL

SEQ ID NO: 11399 - protein, 89 aa, Homo sapiens; identical to SEQ ID NO: 11398
  Payload ID: 2235
  Gene Symbol: ARPP21
  Gene Name: cAMP-regulated phosphoprotein, 21kDa
  Uniprot ID: Q9UBL0
  ENSP ID: ENSP00000379742

SEQ ID NO: 11400 - protein, 89 aa, Homo sapiens; identical to SEQ ID NO: 11398
  Payload ID: 2235
  Gene Symbol: ARPP21
  Gene Name: cAMP-regulated phosphoprotein, 21kDa
  Uniprot ID: Q9UBL0
  ENSP ID: ENSP00000389754

SEQ ID NO: 11401 - protein, 89 aa, Homo sapiens; identical to SEQ ID NO: 11398
  Payload ID: 2235
  Gene Symbol: ARPP21
  Gene Name: cAMP-regulated phosphoprotein, 21kDa
  Uniprot ID: Q9UBL0
  ENSP ID: ENSP00000390151

SEQ ID NO: 11402 - protein, 98 aa, Homo sapiens
  Payload ID: 2235
  Gene Symbol: ARPP21
  Gene Name: cAMP-regulated phosphoprotein, 21kDa
  ENSP ID: ENSP00000390169
MSEQGDLNQAIAEEGGTEQETATPENGIVKSESLDEEEKLELQRRLEAQNQERRKSKSGAGKGKLTRSLAVCEESSARPGGESLQDQESIHLQLSSFS

SEQ ID NO: 11403 - protein, 124 aa, Homo sapiens
  Payload ID: 2235
  Gene Symbol: ARPP21
  Gene Name: cAMP-regulated phosphoprotein, 21kDa
  ENSP ID: ENSP00000396116
  MOD_RES (1)..(1): Any amino acid
XCRDRMILLKMEQEIIDFIADNNNHYKKFPQMSSYQRMLVHRVAAYFGLDHNVDQTGKSVIINKTSSTRIQFAPRKAFLWKTGATEMAQGEHLGVDRAAQKMNSSGLTTKGPGAAQTPTVPTAI

SEQ ID NO: 11404 - protein, 96 aa, Homo sapiens
  Payload ID: 2235
  Gene Symbol: ARPP21
  Gene Name: cAMP-regulated phosphoprotein, 21kDa
  ENSP ID: ENSP00000396324
MSEQGDLNQAIAEEGGTEQETATPENGIVKSESLDEEEKLELQRRLEAQNQERRKSKSGAGKGKLTRSLAVCEESSARPGGESLQDQVYPLAIIIN

SEQ ID NO: 11405 - protein, 89 aa, Homo sapiens; identical to SEQ ID NO: 11398
  Payload ID: 2235
  Gene Symbol: ARPP21
  Gene Name: cAMP-regulated phosphoprotein, 21kDa
  Uniprot ID: Q9UBL0
  ENSP ID: ENSP00000397720

SEQ ID NO: 11406 - protein, 32 aa, Homo sapiens
  Payload ID: 2235
  Gene Symbol: ARPP21
  Gene Name: cAMP-regulated phosphoprotein, 21kDa
  ENSP ID: ENSP00000398598
MSEQGDLNQAIAEEGGTEQETATPENGIVKSE

SEQ ID NO: 11407 - protein, 145 aa, Homo sapiens
  Payload ID: 2235
  Gene Symbol: ARPP21
  Gene Name: cAMP-regulated phosphoprotein, 21kDa
  ENSP ID: ENSP00000399482
  MOD_RES (1)..(1): Any amino acid
XQEYTDSTGIDLHEFLINTLKNNSRDRMILLKMEQEIIDFIADNNNHYKKFPQMSSYQRMLVHRVAAYFGLDHNVDQTGKSVIINKTSSTRIPEQRFCEHLKDEKGEESQKRFILKRDNSSIDKEDNQLCPSVVHKLSWIINTDR

SEQ ID NO: 11408 - protein, 89 aa, Homo sapiens; identical to SEQ ID NO: 11398
  Payload ID: 2235
  Gene Symbol: ARPP21
  Gene Name: cAMP-regulated phosphoprotein, 21kDa
  Uniprot ID: Q9UBL0
  ENSP ID: ENSP00000401602

SEQ ID NO: 11409 - protein, 793 aa, Homo sapiens
  Payload ID: 2235
  Gene Symbol: ARPP21
  Gene Name: cAMP-regulated phosphoprotein, 21kDa
  Uniprot ID: Q9UBL0
  ENSP ID: ENSP00000405276
MSEQGDLNQAIAEEGGTEQETATPENGIVKSESLDEEEKLELQRRLEAQNQERRKSKSGAGKGKLTRSLAVCEESSARPGGESLQDQESIHLQLSSFSSLQEEDKSRKDDSEREKEKDKNKDKTSEKPKIRMLSKDCSQEYTDSTGIDLHEFLINTLKNNSRDRMILLKMEQEIIDFIADNNNHYKKFPQMSSYQRMLVHRVAAYFGLDHNVDQTGKSVIINKTSSTRIPEQRFCEHLKDEKGEESQKRFILKRDNSSIDKEDNQSVCSQESLFVENRGNRDGSGRTSGSRQSSSENELKWSDHQRAWSSTDSDSSNRNLKPAMTKTASFGGITVLTRGDSTSSTRSTGKLSKAGSESSSSAGSSGSLSRTHPPLQSTPLVSGVAAGSPGCVPYPENGIGGQVAPSSTSYILLPLEAATGIPPGSILLNPHTGQPFVNPDGTPAIYNPPTSQQPLRSAMVGQSQQQPPQQQPSPQPQQQVQPPQPQMAGPLVTQSVQGLQASSQSVQYPAVSFPPQHLLPVSPTQHFPMRDDVATQFGQMTLSRQSSGETPEPPSGPVYPSSLMPQPAQQPSYVIASTGQQLPTGGFSGSGPPISQQVLQPPPSPQGFVQQPPPAQMPVYYYPSGQYPTSTTQQYRPMAPVQYNAQRSQQMPQAAQQAGYQPVLSGQQGFQGLIGVQQPPQSQNVINNQQGTPVQSVMVSYPTMSSYQVPMTQGSQGLPQQSYQQPIMLPNQAGQGSLPATGMPVYCNVTPPTPQNNLRLIGPHCPSSTVPVMSASCRTNCASMSNAGWQVKF

SEQ ID NO: 11410 - protein, 89 aa, Homo sapiens; identical to SEQ ID NO: 11398
  Payload ID: 2235
  Gene Symbol: ARPP21
  Gene Name: cAMP-regulated phosphoprotein, 21kDa
  Uniprot ID: Q9UBL0
  ENSP ID: ENSP00000406964

SEQ ID NO: 11411 - protein, 261 aa, Homo sapiens
  Payload ID: 2235
  Gene Symbol: ARPP21
  Gene Name: cAMP-regulated phosphoprotein, 21kDa
  ENSP ID: ENSP00000408271
  MOD_RES (1)..(1): Any amino acid
XFCRDRMILLKMEQEIIDFIADNNNHYKKFPQMSSYQRMLVHRVAAYFGLDHNVDQTGKSVIINKTSSTRIQFAPRKAFLWKTVGSWKTVTYAMRPIRKDSSFGWGNRDGSGRTSGSRQSSSENELKWSDHQRAWSSTDSDSSNRNLKPAMTKTASFGGITVLTRGDSTSSTRSTGKLSKAGSESSSSAGSSGSLSRTHPPLQSTPLVSGVAAGSPGCVPYPENGIGGQVAPSSTSYILLPLEAATGIPPGSILLNPHTGE

SEQ ID NO: 11412 - protein, 94 aa, Homo sapiens
  Payload ID: 2235
  Gene Symbol: ARPP21
  Gene Name: cAMP-regulated phosphoprotein, 21kDa
  ENSP ID: ENSP00000409331
MSEQGDLNQAIAEEGGTEQETATPENGIVKSESLDEEEKLELQRRLEAQNQERRKSKSGAGKGKLTRSLAVCEESSARPGGESLQDQESIHLQL

SEQ ID NO: 11413 - protein, 54 aa, Homo sapiens
  Payload ID: 2235
  Gene Symbol: ARPP21
  Gene Name: cAMP-regulated phosphoprotein, 21kDa
  ENSP ID: ENSP00000409808
MSEQGDLNQAIAEEGGTEQETATPENGIVKSESLDEEEKLELQRRLEAQNQERR

SEQ ID NO: 11414 - protein, 89 aa, Homo sapiens; identical to SEQ ID NO: 11398
  Payload ID: 2235
  Gene Symbol: ARPP21
  Gene Name: cAMP-regulated phosphoprotein, 21kDa
  Uniprot ID: Q9UBL0
  ENSP ID: ENSP00000410171

SEQ ID NO: 11415 - protein, 104 aa, Homo sapiens
  Payload ID: 2235
  Gene Symbol: ARPP21
  Gene Name: cAMP-regulated phosphoprotein, 21kDa
  ENSP ID: ENSP00000411644
MSEQGDLNQAIAEEGGTEQETATPENGIVKSESLDEEEKLELQRRLEAQNQERRKSKSGAGKGKLTRSLAVCEESSARPGGESLQDQESIHLQLSSFSSLQEED

SEQ ID NO: 11416 - protein, 241 aa, Homo sapiens
  Payload ID: 2235
  Gene Symbol: ARPP21
  Gene Name: cAMP-regulated phosphoprotein, 21kDa
  ENSP ID: ENSP00000412233
GSRQSSSENELKWSDHQRAWSSTDSDSSNRNLKPAMTKTASFGGITVLTRGDSTSSTRSTGKLSKAGSESSSSAGSSGSLSRTHPPLQSTPLVSGVAAGSPGCVPYPENGIGGQVAPSSTSYILLPLEAATGIPPGSILLNPHTALCESRWNSCNIQPTHQSAAPAKRHGGAVPTAATTAAALPAAPTAGPATAATDGRPSGHSVCPGAAGFLPVSAISSSLFSSPAPPTCVSNAALSHER

SEQ ID NO: 11417 - protein, 813 aa, Homo sapiens
  Payload ID: 2235
  Gene Symbol: ARPP21
  Gene Name: cAMP-regulated phosphoprotein, 21kDa
  Uniprot ID: Q9UBL0
  ENSP ID: ENSP00000412326
MSEQGDLNQAIAEEGGTEQETATPENGIVKSESLDEEEKLELQRRLEAQNQERRKSKSGAGKGKLTRSLAVCEESSARPGGESLQDQESIHLQLSSFSSLQEEDKSRKDDSEREKEKDKNKDKTSEKPKIRMLSKDCSQEYTDSTGIDLHEFLINTLKNNSRDRMILLKMEQEIIDFIADNNNHYKKFPQMSSYQRMLVHRVAAYFGLDHNVDQTGKSVIINKTSSTRIPEQRFCEHLKDEKGEESQKRFILKRDNSSIDKEDNQSVCSQESLFVENSRLLEDSNICNETYKKRQLFRGNRDGSGRTSGSRQSSSENELKWSDHQRAWSSTDSDSSNRNLKPAMTKTASFGGITVLTRGDSTSSTRSTGKLSKAGSESSSSAGSSGSLSRTHPPLQSTPLVSGVAAGSPGCVPYPENGIGGQVAPSSTSYILLPLEAATGIPPGSILLNPHTGQPFVNPDGTPAIYNPPTSQQPLRSAMVGQSQQQPPQQQPSPQPQQQVQPPQPQMAGPLVTQSVQGLQASSQSVQYPAVSFPPQHLLPVSPTQHFPMRDDVATQFGQMTLSRQSSGETPEPPSGPVYPSSLMPQPAQQPSYVIASTGQQLPTGGFSGSGPPISQQVLQPPPSPQGFVQQPPPAQMPVYYYPSGQYPTSTTQQYRPMAPVQYNAQRSQQMPQAAQQAGYQPVLSGQQGFQGLIGVQQPPQSQNVINNQQGTPVQSVMVSYPTMSSYQVPMTQGSQGLPQQSYQQPIMLPNQAGQGSLPATGMPVYCNVTPPTPQNNLRLIGPHCPSSTVPVMSASCRTNCASMSNAGWQVKF

SEQ ID NO: 11418 - protein, 101 aa, Homo sapiens
  Payload ID: 2235
  Gene Symbol: ARPP21
  Gene Name: cAMP-regulated phosphoprotein, 21kDa
  ENSP ID: ENSP00000412341
MSEQGDLNQAIAEEGGTEQETATPENGIVKSESLDEEEKLELQRRLEAQNQERRKSKSGAGKGKLTRSLAVCEESSARPGGESLQDQVYPLAIIINCMNGI

SEQ ID NO: 11419 - protein, 89 aa, Homo sapiens; identical to SEQ ID NO: 11398
  Payload ID: 2235
  Gene Symbol: ARPP21
  Gene Name: cAMP-regulated phosphoprotein, 21kDa
  Uniprot ID: Q9UBL0
  ENSP ID: ENSP00000412411

SEQ ID NO: 11420 - protein, 43 aa, Homo sapiens
  Payload ID: 2235
  Gene Symbol: ARPP21
  Gene Name: cAMP-regulated phosphoprotein, 21kDa
  ENSP ID: ENSP00000413005
MSEQGDLNQAIAEEGGTEQETATPENGIVKSESLDEEEKLELQ

SEQ ID NO: 11421 - protein, 98 aa, Homo sapiens
  Payload ID: 2235
  Gene Symbol: ARPP21
  Gene Name: cAMP-regulated phosphoprotein, 21kDa
  ENSP ID: ENSP00000415134
MSEQGDLNQAIAEEGGTEQETATPENGIVKSESLDEEEKLELQRRLEAQNQERRKSKSGAGKGKLTRSLAVCEESSARPGGESLQDQIAAKNTRILQA

SEQ ID NO: 11422 - protein, 89 aa, Homo sapiens; identical to SEQ ID NO: 11398
  Payload ID: 2235
  Gene Symbol: ARPP21
  Gene Name: cAMP-regulated phosphoprotein, 21kDa
  Uniprot ID: Q9UBL0
  ENSP ID: ENSP00000417838

SEQ ID NO: 11423 - protein, 641 aa, Homo sapiens
  Payload ID: 2236
  Gene Symbol: CAGE1
  Gene Name: cancer antigen 1
  Uniprot ID: Q8TC20
  ENSP ID: ENSP00000296742
MTEKPEFQSQVYNYAKDNNIKQDSFKEENPMETSVSANTDQLGNEYFRQPPPRSPPLIHCSGEMLKFTEKSLAKSIAKESALNPSQPPSFLCKTAVPSKEIQNYGEIPEMSVSYEKEVTAEGVERPEIVSTWSSAGISWRSEACRENCEMPDWEQSAESLQPVQEDMALNEVLQKLKHTNRKQEVRIQELQCSNLYLEKRVKELQMKITKQQVFIDVINKLKENVEELIEDKYKIILEKNDTKKTLQNLEEVLANTQKHLQESRNDKEMLQLQFKKIKANYVCLQERYMTEMQQKNKSVSQYLEMDKTLSKKEEEVERLQQLKKELEKATASALDLLKREKEAQEQEFLSLQEEFQKLEKENLEERQKLKSRLEKLLTQVRNLQFMSENERTKNIKLQQQINEVKNENAKLKQQVARSEEQNYVPKFETAQLKDQLEEVLKSDITKDTKTTHSNLLPDCSPCEERLNPADIKRASQLASKMHSLLALMVGLLTCQDIINSDAEHFKESEKVSDIMLQKLKSLHLKKKTLDKEVIDCDSDEAKSIRDVPTLLGAKLDKYHSLNEELDFLVTSYEEIIECADQRLAISHSQIAHLEERNKHLEDLIRKPREKARKPRSKSLENHPKSMTMMPALFKENRNDLD

SEQ ID NO: 11424 - protein, 824 aa, Homo sapiens
  Payload ID: 2236
  Gene Symbol: CAGE1
  Gene Name: cancer antigen 1
  Uniprot ID: Q8TC20
  ENSP ID: ENSP00000338107
MNKDYQKFWSSPSDPVHFEVDTSHEKVESMSESDTMNVSNLSQGVMLSHSPICMETTGTTCDLPQNEIKNFERENEYESTLCEDAYGTLDNLLNDNNIENYSTNALIQPVDTISISSLRQFETVCKFHWVEAFDDEMTEKPEFQSQVYNYAKDNNIKQDSFKEENPMETSVSANTDQLGNEYFRQPPPRSPPLIHCSGEMLKFTEKSLAKSIAKESALNPSQPPSFLCKTAVPSKEIQNYGEIPEMSVSYEKEVTAEGVERPEIVSTWSSAGISWRSEACRENCEMPDWEQSAESLQPVQEDMALNEVLQKLKHTNRKQEVRIQELQCSNLYLEKRVKELQMKITKQQVFIDVINKLKENVEELIEDKYKIILEKNDTKKTLQNLEEVLANTQKHLQESRNDKEMLQLQFKKIKANYVCLQERYMTEMQQKNKSVSQYLEMDKTLSKKEEEVERLQQLKKELEKATASALDLLKREKEAQEQEFLSLQEEFQKLEKENLEERQKLKSRLEKLLTQVRNLQFMSENERTKNIKLQQQINEVKNENAKLKQQVARSEEQNYVPKFETAQLKDQLEEVLKSDITKDTKTTHSNLLPDCSPCEERLNPADIKRASQLASKMHSLLALMVGLLTCQDIINSDAEHFKESEKVSDIMLQKLKSLHLKKKTLDKELLKHKDRITTFRELIAKEKAFQDHAIKVIDCDSDEAKSIRDVPTLLGAKLDKYHSLNEELDFLVTSYEEIIECADQRLAISHSQIAHLEERNKHLEDLIRKPREKARKPRSKSLENHPKSMTMLAYNLYIFIGYRLGAVADACNPSTLGGRGGWIT

SEQ ID NO: 11425 - protein, 817 aa, Homo sapiens
  Payload ID: 2236
  Gene Symbol: CAGE1
  Gene Name: cancer antigen 1
  ENSP ID: ENSP00000369250
MNKDYQKFWSSPSDPVHFEVDTSHEKVESMSESDTMNVSNLSQGVMLSHSPICMETTGTTCDLPQNEIKNFERENEYESTLCEDAYGTLDNLLNDNNIENYSTNALIQPVDTISISSLRQFETVCKFHWVEAFDDEMTEKPEFQSQVYNYAKDNNIKQDSFKEENPMETSVSANTDQLGNEYFRQPPPRSPPLIHCSGEMLKFTEKSLAKSIAKESALNPSQPPSFLCKTAVPSKEIQNYGEIPEMSVSYEKEVTAEGVERPEIVSTWSSAGISWRSEACRENCEMPDWEQSAESLQPVQEDMALNEVLQKLKHTNRKQEVRIQELQCSNLYLEKRVKELQMKITKQQVFIDVINKLKENVEELIEDKYKIILEKNDTKKTLQNLEEVLANTQKHLQESRNDKEMLQLQFKKIKANYVCLQERYMTEMQQKNKSVSQYLEMDKTLSKKEEEVERLQQLKKELEKATASALDLLKREKEAQEQEFLSLQEEFQKLEKENLEERQKLKSRLEKLLTQVRNLQFMSENERTKNIKLQQQINEVKNENAKLKQQVARSEEQNYVPKFETAQLKDQLEEVLKSDITKDTKTTHSNLLPDCSPCEERLNPADIKRASQLASKMHSLLALMVGLLTCQDIINSDAEHFKESEKLLKHKDRITTFRELIAKEKAFQDHAIKVIDCDSDEAKSIRDVPTLLGAKLDKYHSLNEELDFLITKLGHLLESKENHCNRLIEENDKYQRHLGNLIKKVTSYEEIIECADQRLAISHSQIAHLEERNKHLEDLIRKPREKARKPRSKSLENHPKSMTMMPALFKENRNDLD

SEQ ID NO: 11426 - protein, 700 aa, Homo sapiens
  Payload ID: 2236
  Gene Symbol: CAGE1
  Gene Name: cancer antigen 1
  Uniprot ID: Q8TC20
  ENSP ID: ENSP00000390644
MNKDYQKFWSSPSDPVHFEVDTSHEKVESMSESDTMNVSNLSQGVMLSHSPICMETTGTTCDLPQNEIKNFERENEYESTLCEDAYGTLDNLLNDNNIENYSTNALIQPVDTISISSLRQFETVCKFHWVEAFDDEMTEKPEFQSQVYNYAKDNNIKQDSFKEENPMETSVSANTDQLGNEYFRQPPPRSPPLIHCSGEMLKFTEKSLAKSIAKESALNPSQPPSFLCKTAVPSKEIQNYGEIPEMSVSYEKEVTAEGVERPEIVSTWSSAGISWRSEACRENCEMPDWEQSAESLQPVQEDMALNEVLQKLKHTNRKQEVRIQELQCSNLYLEKRVKELQMKITKQQVFIDVINKLKENVEELIEDKYKIILEKNDTKKTLQNLEEVLANTQKHLQESRNDKEMLQLQFKKIKANYVCLQERYMTEMQQKNKSVSQYLEMDKTLSKKEEEVERLQQLKKELEKATASALDLLKREKEAQEQEFLSLQEEFQKLEKENLEERQKLKSRLEKLLTQVRNLQFMSENERTKNIKLQQQINEVKNENAKLKQQVARSEEQNYVPKFETAQLKDQLEEVLKSDITKDTKTTHSNLLPDCSPCEERLNPADIKRASQLASKMHSLLALMVGLLTCQDIINSDAEHFKESEKVSDIMLQKLKSLHLKKKTLDKELLKHKDRITTFRELIAKEKAFQDHAIKVFQGV

SEQ ID NO: 11427 - protein, 242 aa, Homo sapiens
  Payload ID: 2236
  Gene Symbol: CAGE1
  Gene Name: cancer antigen 1
  ENSP ID: ENSP00000391746
MNKDYQKFWSSPSDPVHFEVDTSHEKVESMSESDTMNVSNLSQGVMLSHSPICMETTGTTCDLPQNEIKNFERENEYESTLCEDAYGTLDNLLNDNNIENYSTNALIQPVDTISISSLRQFETVCKFHWVEAFDDEMTEKPEFQSQVYNYAKDNNIKQDSFKEENPMETSVSANTDQLGNEYFRQPPPRSPPLIHCSGEMLKFTEKSLAKSIAKESALNPSQPPSFLYCSSFKRNTELWGDS

SEQ ID NO: 11428 - protein, 558 aa, Homo sapiens
  Payload ID: 2236
  Gene Symbol: CAGE1
  Gene Name: cancer antigen 1
  ENSP ID: ENSP00000423789
MDPGKVFYCSTVMNKDYQKFWSSPSDPVHFEVDTSHEKVESMSESDTMNVSNLSQGVMLSHSPICMETTGTTCDLPQNEIKNFERENEYESTLCEDAYGTLDNLLNDNNIENYSTNALIQPVDTISISSLRQFETVCKFHWVEAFDDEMTEKPEFQSQVYNYAKDNNIKQDSFKEENPMETSVSANTDQLGNEYFRQPPPRSPPLIHCSGEMLKFTEKSLAKSIAKESALNPSQPPSFLCKTAVPSKEIQNYGEIPEMSVSYEKEVTAEGVERPEIVSTWSSAGISWRSEACRENCEMPDWEQSAESLQPVQEDMALNEVLQKLKHTNRKQEVRIQELQCSNLYLEKRVKELQMKITKQQVFIDVINKLKENVEELIEDKYKIILEKNDTKKTLQNLEEVLANTQKHLQESRNDKEMLQLQFKKIKANYVCLQERYMTEMQQKNKSVSQYLEMDKTLSKKEEEVERLQQLKKELEKATASALDLLKREKEAQEQEFLSLQEEFQKLEKENLEERQKLKSRLEKLLTQVRNLQFMSENERTKNIKLQQQINEVKNENAK

SEQ ID NO: 11429 - protein, 839 aa, Homo sapiens
  Payload ID: 2236
  Gene Symbol: CAGE1
  Gene Name: cancer antigen 1
  Uniprot ID: Q8TC20
  ENSP ID: ENSP00000425493
MNKDYQKFWSSPSDPVHFEVDTSHEKVESMSESDTMNVSNLSQGVMLSHSPICMETTGTTCDLPQNEIKNFERENEYESTLCEDAYGTLDNLLNDNNIENYSTNALIQPVDTISISSLRQFETVCKFHWVEAFDDEMTEKPEFQSQVYNYAKDNNIKQDSFKEENPMETSVSANTDQLGNEYFRQPPPRSPPLIHCSGEMLKFTEKSLAKSIAKESALNPSQPPSFLCKTAVPSKEIQNYGEIPEMSVSYEKEVTAEGVERPEIVSTWSSAGISWRSEACRENCEMPDWEQSAESLQPVQEDMALNEVLQKLKHTNRKQEVRIQELQCSNLYLEKRVKELQMKITKQQVFIDVINKLKENVEELIEDKYKIILEKNDTKKTLQNLEEVLANTQKHLQESRNDKEMLQLQFKKIKANYVCLQERYMTEMQQKNKSVSQYLEMDKTLSKKEEEVERLQQLKKELEKATASALDLLKREKEAQEQEFLSLQEEFQKLEKENLEERQKLKSRLEKLLTQVRNLQFMSENERTKNIKLQQQINEVKNENAKLKQQVARSEEQNYVPKFETAQLKDQLEEVLKSDITKDTKTTHSNLLPDCSPCEERLNPADIKRASQLASKMHSLLALMVGLLTCQDIINSDAEHFKESEKVSDIMLQKLKSLHLKKKTLDKELLKHKDRITTFRELIAKEKAFQDHAIKVIDCDSDEAKSIRDVPTLLGAKLDKYHSLNEELDFLITKLGHLLESKENHCNRLIEENDKYQRHLGNLIKKVTSYEEIIECADQRLAISHSQIAHLEERNKHLEDLIRKPREKARKPRSKSLENHPKSMTMMPALFKENRNDLD

SEQ ID NO: 11430 - protein, 777 aa, Homo sapiens
  Payload ID: 2236
  Gene Symbol: CAGE1
  Gene Name: cancer antigen 1
  Uniprot ID: Q8TC20
  ENSP ID: ENSP00000427583
MNKDYQKFWSSPSDPVHFEVDTSHEKVESMSESDTMNVSNLSQGVMLSHSPICMETTGTTCDLPQNEIKNFERENEYESTLCEDAYGTLDNLLNDNNIENYSTNALIQPVDTISISSLRQFETVCKFHWVEAFDDEMTEKPEFQSQVYNYAKDNNIKQDSFKEENPMETSVSANTDQLGNEYFRQPPPRSPPLIHCSGEMLKFTEKSLAKSIAKESALNPSQPPSFLCKTAVPSKEIQNYGEIPEMSVSYEKEVTAEGVERPEIVSTWSSAGISWRSEACRENCEMPDWEQSAESLQPVQEDMALNEVLQKLKHTNRKQEVRIQELQCSNLYLEKRVKELQMKITKQQVFIDVINKLKENVEELIEDKYKIILEKNDTKKTLQNLEEVLANTQKHLQESRNDKEMLQLQFKKIKANYVCLQERYMTEMQQKNKSVSQYLEMDKTLSKKEEEVERLQQLKKELEKATASALDLLKREKEAQEQEFLSLQEEFQKLEKENLEERQKLKSRLEKLLTQVRNLQFMSENERTKNIKLQQQINEVKNENAKLKQQVARSEEQNYVPKFETAQLKDQLEEVLKSDITKDTKTTHSNLLPDCSPCEERLNPADIKRASQLASKMHSLLALMVGLLTCQDIINSDAEHFKESEKVSDIMLQKLKSLHLKKKTLDKEVIDCDSDEAKSIRDVPTLLGAKLDKYHSLNEELDFLVTSYEEIIECADQRLAISHSQIAHLEERNKHLEDLIRKPREKARKPRSKSLENHPKSMTMMPALFKENRNDLD

SEQ ID NO: 11431 - protein, 716 aa, Homo sapiens
  Payload ID: 2237
  Gene Symbol: CASC1
  Gene Name: cancer susceptibility candidate 1
  Uniprot ID: Q6TDU7
  ENSP ID: ENSP00000313141
MSGSKKKKVTKAERLKLLQEEEERRLKEEEEARLKYEKEEMERLEIQRIEKEKWHRLEAKDLERRNEELEELYLLERCFPEAEKLKQETKLLSQWKHYIQCDGSPDPSVAQEMNTFISLWKEKTNETFEEVIEKSKVVLNLIEKLKFILLETPPCDLQDKNIIQYQESILQLQELLHLKFGVATEILLKQASTLADLDSGNMEKVIKDENVTLYVWANLKKNPRHRSVRFSETQIGFEIPRILATSDIAVRLLHTHYDHVSALHPVSTPSKEYTSAVTELVKDDVKNVEKAISKEVEEESKQQERGSHLIQEEEIKVEEEQGDIEVKMSSAEEESEAIKCEREMKVLSETVSAAQLLLVENSSEKPDFFEDNVVDLCQFTTLGGVYHLDILELPPQCKPVKGWMIVEILKEGLQKYTYPPETTEEFETENAFPPIEVTLEVHENVIFFEDPVVVRWDAEGKHWRTDGISNVSYKPKERLVTFSLDTFGPVTLIQDAHINMPYQSWELRPLDVNKVLLTVTTVFTEIQIQIKENLCMLSSIKLKDKKHISILEGTWMTPIPFIIALKEAGLNIFPTRHSHFYVIINNKVPLVEVKAYRQMALLSSAFAFGWSKWNLLCNSTKVVFKVREHLTEACTENPNWALLMFSGDRAQRLKIKEESEAFSEALKEETEFHSTLYHMVKDFASEEAMEKVRSSNCQFVNSVCHMLLSTRLLSYS

SEQ ID NO: 11432 - protein, 690 aa, Homo sapiens
  Payload ID: 2237
  Gene Symbol: CASC1
  Gene Name: cancer susceptibility candidate 1
  Uniprot ID: Q6TDU7
  ENSP ID: ENSP00000346126
MRQTGGGATTDSASPVLNNVIKSQSYFTAKRVGLGNNSYLGVGRPSSQQWLSLPGPGGQGPKAKKSGSKKKKVTKAERLKLLQEEEERRLKEEEEARLKYEKEEMERLEIQRIEKEKWHRLEAKDLERRNEELEELYLLERCFPEAEKLKQETKLLSQWKHYIQCDGSPDPSVAQEMNTFISLWKEKTNETFEEVIEKSKVVLNLIEKLKFILLETPPCDLQDKNIIQYQESILQLQELLHLKFGVATEILLKQASTLADLDSGNMEKVIKDENVTLYVWANLKKNPRHRSVRFSETQIGFEIPRILATSDIAVRLLHTHYDHVSALHPVSTPSKEYTSAVTELVKDDVKNVEKAISKEVEEESKQQERGSHLIQEEEIKVEEEQGDIEVKMSSAEEESEAIKCEREMKVLSETVSAAQLLLVENSSEKPDFFEDNVVDLCQFTTLGGVYHLDILELPPQCKPVKGWMIVEILKEGLQKYTYPPETTEEFETENAFPPIEVTLEVHENVIFFEDPVVVRWDAEGKHWRTDGISNVSYKPKERLVTFSLDTFGPVTLIQDAHINMPYQSWELRPLDVNKVLLTVTTVFTEIQIQIKENLCMLSSIKLKDKKHISILEGTWMTPIPFIIALKEAGLNIFPTRHSHFYVIINNKVPLVEVKAYRQMALLSSAFAFGWSKWNLLCNSTKVVFKW

SEQ ID NO: 11433 - protein, 722 aa, Homo sapiens
  Payload ID: 2237
  Gene Symbol: CASC1
  Gene Name: cancer susceptibility candidate 1
  ENSP ID: ENSP00000379310
MGPKAKKSGSKKKKVTKAERLKLLQEEEERRLKEEEEARLKYEKEEMERLEIQRIEKEKWHRLEAKDLERRNEELEELYLLERCFPEAEKLKQETKLLSQWKHYIQCDGSPDPSVAQEMNTFISLWKEKTNETFEEVIEKSKVVLNLIEKLKFILLETPPCDLQDKNIIQYQESILQLQELLHLKFGVATEILLKQASTLADLDSGNMEKVIKDENVTLYVWANLKKNPRHRSVRFSETQIGFEIPRILATSDIAVRLLHTHYDHVSALHPVSTPSKEYTSAVTELVKDDVKNVEKAISKEVEEESKQQERGSHLIQEEEIKVEEEQGDIEVKMSSAEEESEAIKCEREMKVLSETVSAAQLLLVENSSEKPDFFEDNVVDLCQFTTLGGVYHLDILELPPQCKPVKGWMIVEILKEGLQKYTYPPETTEEFETENAFPPIEVTLEVHENVIFFEDPVVVRWDAEGKHWRTDGISNVSYKPKERLVTFSLDTFGPVTLIQDAHINMPYQSWELRPLDVNKVLLTVTTVFTEIQIQIKENLCMLSSIKLKDKKHISILEGTWMTPIPFIIALKEAGLNIFPTRHSHFYVIINNKVPLVEVKAYRQMALLSSAFAFGWSKWNLLCNSTKVVFKVREHLTEACTENPNWALLMFSGDRAQRLKIKEESEAFSEALKEETEFHSTLYHMVKDFASEEAMEKVRSSNCQFVNSVCHMLLSTRLLSYS

SEQ ID NO: 11434 - protein, 676 aa, Homo sapiens
  Payload ID: 2237
  Gene Symbol: CASC1
  Gene Name: cancer susceptibility candidate 1
  Uniprot ID: Q6TDU7
  ENSP ID: ENSP00000379313
MERLEIQRIEKEKWHRLEAKDLERRNEELEELYLLERCFPEAEKLKQETKLLSQWKHYIQCDGSPDPSVAQEMNTFISLWKEKTNETFEEVIEKSKVVLNLIEKLKFILLETPPCDLQDKNIIQYQESILQLQELLHLKFGVATEILLKQASTLADLDSGNMEKVIKDENVTLYVWANLKKNPRHRSVRFSETQIGFEIPRILATSDIAVRLLHTHYDHVSALHPVSTPSKEYTSAVTELVKDDVKNVEKAISKEVEEESKQQERGSHLIQEEEIKVEEEQGDIEVKMSSAEEESEAIKCEREMKVLSETVSAAQLLLVENSSEKPDFFEDNVVDLCQFTTLGGVYHLDILELPPQCKPVKGWMIVEILKEGLQKYTYPPETTEEFETENAFPPIEVTLEVHENVIFFEDPVVVRWDAEGKHWRTDGISNVSYKPKERLVTFSLDTFGPVTLIQDAHINMPYQSWELRPLDVNKVLLTVTTVFTEIQIQIKENLCMLSSIKLKDKKHISILEGTWMTPIPFIIALKEAGLNIFPTRHSHFYVIINNKVPLVEVKAYRQMALLSSAFAFGWSKWNLLCNSTKVVFKVREHLTEACTENPNWALLMFSGDRAQRLKIKEESEAFSEALKEETEFHSTLYHMVKDFASEEAMEKVRSSNCQFVNSVCHMLLSTRLLSYS

SEQ ID NO: 11435 - protein, 657 aa, Homo sapiens
  Payload ID: 2237
  Gene Symbol: CASC1
  Gene Name: cancer susceptibility candidate 1
  Uniprot ID: Q6TDU7
  ENSP ID: ENSP00000437373
MDLERRNEELEELYLLERCFPEAEKLKQETKLLSQWKHYIQCDGSPDPSVAQEMNTFISLWKEKTNETFEEVIEKSKVVLNLIEKLKFILLETPPCDLQDKNIIQYQESILQLQELLHLKFGVATEILLKQASTLADLDSGNMEKVIKDENVTLYVWANLKKNPRHRSVRFSETQIGFEIPRILATSDIAVRLLHTHYDHVSALHPVSTPSKEYTSAVTELVKDDVKNVEKAISKEVEEESKQQERGSHLIQEEEIKVEEEQGDIEVKMSSAEEESEAIKCEREMKVLSETVSAAQLLLVENSSEKPDFFEDNVVDLCQFTTLGGVYHLDILELPPQCKPVKGWMIVEILKEGLQKYTYPPETTEEFETENAFPPIEVTLEVHENVIFFEDPVVVRWDAEGKHWRTDGISNVSYKPKERLVTFSLDTFGPVTLIQDAHINMPYQSWELRPLDVNKVLLTVTTVFTEIQIQIKENLCMLSSIKLKDKKHISILEGTWMTPIPFIIALKEAGLNIFPTRHSHFYVIINNKVPLVEVKAYRQMALLSSAFAFGWSKWNLLCNSTKVVFKVREHLTEACTENPNWALLMFSGDRAQRLKIKEESEAFSEALKEETEFHSTLYHMVKDFASEEAMEKVRSSNCQFVNSVCHMLLSTRLLSYS

SEQ ID NO: 11436 - protein, 35 aa, Homo sapiens
  Payload ID: 2237
  Gene Symbol: CASC1
  Gene Name: cancer susceptibility candidate 1
  ENSP ID: ENSP00000450703
MSGSKKKKVTKAERLKLLQEEEERRLKEEGSRKEK

SEQ ID NO: 11437 - protein, 45 aa, Homo sapiens
  Payload ID: 2237
  Gene Symbol: CASC1
  Gene Name: cancer susceptibility candidate 1
  ENSP ID: ENSP00000451011
MSGSKKKKVTKAERLKLLQEEEERRLKEEVTVLKKGELTLFSYLP

SEQ ID NO: 11438 - protein, 92 aa, Homo sapiens
  Payload ID: 2237
  Gene Symbol: CASC1
  Gene Name: cancer susceptibility candidate 1
  ENSP ID: ENSP00000451232
MERLEIQRIEKEKWHRLEAKDLERRNEELEELYLLERCFPEAEKLKQETKLLSQWKHYIQCDGSPDPSVAQEMNTFISLWKEKTNETFEEVI

SEQ ID NO: 11439 - protein, 548 aa, Homo sapiens
  Payload ID: 2237
  Gene Symbol: CASC1
  Gene Name: cancer susceptibility candidate 1
  ENSP ID: ENSP00000451813
  MOD_RES (1)..(1): Any amino acid
XEARLKYEKEEMERLEIQRIEKEKWHRLEAKDLERRNEELEELYLLERCFPEAEKLKQETKLLSQWKHYIQCDGSPDPSVAQEMNTFISLWKEKTNETFEEVIEKSKVVLNLIEKLKFILLETPPCDLQDKNIIQYQESILQLQELLHLKFGVATEILLKSSAEEESEAIKCEREMKVLSETVSAAQLLLVENSSEKPDFFEDNVVDLCQFTTLGGVYHLDILELPPQCKPVKGWMIVEILKEGLQKYTYPPETTEEFETENAFPPIEVTLEVHENVIFFEDPVVVRWDAEGKHWRTDGISNVSYKPKERLVTFSLDTFGPVTLIQDAHINMPYQSWELRPLDVNKVLLTVTTVFTEIQIQIKENLCMLSSIKLKDKKHISILEGTWMTPIPFIIALKEAGLNIFPTRHSHFYVIINNKVPLVEVKAYRQMALLSSAFAFGWSKWNLLCNSTKVVFKVREHLTEACTENPNWALLMFSGDRAQRLKIKEESEAFSEALKEETEFHSTLYHMVKDFASEEAMEKVRSSNCQFVNSVCHMLLSTRLLSYS

SEQ ID NO: 11440 - protein, 136 aa, Homo sapiens
  Payload ID: 2238
  Gene Symbol: CASC10
  Gene Name: cancer susceptibility candidate 10
  Uniprot ID: Q5T4H9
  ENSP ID: ENSP00000366317
MQSREPSGWRTAERRRGWRCRGVPTPSGDRGPGAARPAARGGAGETTGQQRPLQVPGASAAAARTRLLRWHHRVPSPRATRSPGSIRRTSPCSGGPDRPERPECADACCYLLDPFTLPLIQDFFRGCAASDFDRRD

SEQ ID NO: 11441 - protein, 703 aa, Homo sapiens
  Payload ID: 2239
  Gene Symbol: CASC3
  Gene Name: cancer susceptibility candidate 3
  Uniprot ID: O15234
  ENSP ID: ENSP00000264645
MADRRRQRASQDTEDEESGASGSDSGGSPLRGGGSCSGSAGGGGSGSLPSQRGGRTGALHLRRVESGGAKSAEESECESEDGIEGDAVLSDYESAEDSEGEEGEYSEEENSKVELKSEANDAVNSSTKEEKGEEKPDTKSTVTGERQSGDGQESTEPVENKVGKKGPKHLDDDEDRKNPAYIPRKGLFFEHDLRGQTQEEEVRPKGRQRKLWKDEGRWEHDKFREDEQAPKSRQELIALYGYDIRSAHNPDDIKPRRIRKPRYGSPPQRDPNWNGERLNKSHRHQGLGGTLPPRTFINRNAAGTGRMSAPRNYSRSGGFKEGRAGFRPVEAGGQHGGRSGETVKHEISYRSRRLEQTSVRDPSPEADAPVLGSPEKEEAASEPPAAAPDAAPPPPDRPIEKKSYSRARRTRTKVGDAVKLAEEVPPPPEGLIPAPPVPETTPTPPTKTGTWEAPVDSSTSGLEQDVAQLNIAEQNWSPGQPSFLQPRELRGMPNHIHMGAGPPPQFNRMEEMGVQGGRAKRYSSQRQRPVPEPPAPPVHISIMEGHYYDPLQFQGPIYTHGDSPAPLPPQGMLVQPGMNLPHPGLHPHQTPAPLPNPGLYPPPVSMSPGQPPPQQLLAPTYFSAPGVMNFGNPSYPYAPGALPPPPPPHLYPNTQAPSQVYGGVTYYNPAQQQVQPKPSPPRRTPQPVTIKPPPPEVVSRGSS

SEQ ID NO: 11442 - protein, 223 aa, Homo sapiens
  Payload ID: 2239
  Gene Symbol: CASC3
  Gene Name: cancer susceptibility candidate 3
  ENSP ID: ENSP00000462713
  MOD_RES (1)..(1): Any amino acid
XLKSEANDAVNSSTKEEKGEEKPDTKSTVTGERQSGDGQESTEPVENKVGKKGPKHLDDDEDRKNPAYIPRKGLFFEHDLRGQTQEEEVRPKGRQRKLWKDEGRWEHDKFREDEQAPKSRQELIALYGYDIRSAHNPDDIKPRRIRKPRYGSPPQRDPNWNGERLNKSHRHQGLGGTLPPRTFINRNAAGPLRRNPIPGQEELEPKLEMQSSLQRRCPLLLKD

SEQ ID NO: 11443 - protein, 129 aa, Homo sapiens
  Payload ID: 2239
  Gene Symbol: CASC3
  Gene Name: cancer susceptibility candidate 3
  ENSP ID: ENSP00000464626
  MOD_RES (1)..(1): Any amino acid
XARRTRTKVGDAVKLAEEVPPPPEGLIPAPPVPETTPTPPTKTGTWEAPVDSSTSGLEQDVAQLNIAEQNWSPGQPSFLQPRELRGMPNHIHMGAGPPPQFNRMEEMLTLQISIKYLPCTKCFSTPKGR

SEQ ID NO: 11444 - protein, 66 aa, Homo sapiens
  Payload ID: 2239
  Gene Symbol: CASC3
  Gene Name: cancer susceptibility candidate 3
  ENSP ID: ENSP00000467654
MSSAFFQESEDGIEGDAVLSDYESAEDSEGEEGEYSEEENSKVELKSEANDAVNSSTKEEKGEEKP

SEQ ID NO: 11445 - protein, 436 aa, Homo sapiens [sequence omitted]

SEQ ID NO: 11446 - protein, 380 aa, Homo sapiens
  Payload ID: 2240
  Gene Symbol: CASC4
  Gene Name: cancer susceptibility candidate 4
  Uniprot ID: Q6P4E1
  ENSP ID: ENSP00000335063
MVGFGANRRAGRLPSLVLVVLLVVIVVLAFNYWSISSRHVLLQEEVAELQGQVQRTEVARGRLEKRNSDLLLLVDTHKKQIDQKEADYGRLSSRLQAREGLGKRCEDDKVKLQNNISYQMADIHHLKEQLAELRQEFLRQEDQLQDYRKNNTYLVKRLEYESFQCGQQMKELRAQHEENIKKLADQFLEEQKQETQKIQSNDGKELDINNQVVPKNIPKVAENVADKNEEPSSNHIPHGKEQIKRGGDAGMPGIEENDLAKVDDLPPALRKPPISVSQHESHQAISHLPTGQPLSPNMPPDSHINHNGNPGTSKQNPSSPLQRLIPGSNLDSEPRIQTDILKQATKDRVSDFHKLKQNDEERELQMDPADYGKQHFNDVL

SEQ ID NO: 11447 - protein, 24 aa, Homo sapiens
  Payload ID: 2240
  Gene Symbol: CASC4
  Gene Name: cancer susceptibility candidate 4
  ENSP ID: ENSP00000452833
QDDEERELQMDPADYGKQHFNDVL

SEQ ID NO: 11448 - protein, 161 aa, Homo sapiens
  Payload ID: 2240
  Gene Symbol: CASC4
  Gene Name: cancer susceptibility candidate 4
  ENSP ID: ENSP00000453465
  MOD_RES (1)..(1): Any amino acid
XETQKIQSNDGKELDINNQVVPKNIPKVAENVADKNEEPSSNHIPHGKALRKPPISVSQHESHQAISHLPTGQPLSPNMPPDSHINHNGNPGTSKQNPSSPLQRLIPGSNLDSEPRIQTDILKQATKDRVSDFHKLKQNDEERELQMDPADYGKQHFNDVL

SEQ ID NO: 11449 - protein, 112 aa, Homo sapiens
  Payload ID: 2240
  Gene Symbol: CASC4
  Gene Name: cancer susceptibility candidate 4
  ENSP ID: ENSP00000453703
MADIHHLKEQLAELRQEFLRQEDQLQDYRKNNTYLVKRLEYESFQCGQQMKELRAQHEENIKKLADQFLEEQKQETQKIQSNDGKELDINNQVVPKNIPKVAENVADKNEEP

SEQ ID NO: 11450 - protein, 177 aa, Homo sapiens
  Payload ID: 2240
  Gene Symbol: CASC4
  Gene Name: cancer susceptibility candidate 4
  Uniprot ID: Q6P4E1
  ENSP ID: ENSP00000453720
MVGFGANRRAGRLPSLVLVVLLVVIVVLAFNYWSISSRHVLLQEEVAELQGQVQRTEVARGRLEKRNSDLLLLVDTHKKQIDQKEADYGRLSSRLQAREGLGKRCEDDKVKLQNNISYQMADIHHLKEQLAELRQEFLRQEDQLQDYRKNNTYLVKRLEYESKRPKRFNQMMERNWI

SEQ ID NO: 11451 - protein, 82 aa, Homo sapiens
  Payload ID: 2240
  Gene Symbol: CASC4
  Gene Name: cancer susceptibility candidate 4
  ENSP ID: ENSP00000453850
  MOD_RES (1)..(1): Any amino acid
XRPRLQLLEHLLPPRPASGGGGRAAGPGPAHRSGPRAAGKAQFGPLAVGGHAQETDRPEGGRLRPPQQPAAGQRGPREEMRG

SEQ ID NO: 11452 - protein, 2342 aa, Homo sapiens
  Payload ID: 2241
  Gene Symbol: CASC5
  Gene Name: cancer susceptibility candidate 5
  Uniprot ID: Q8NG31
  ENSP ID: ENSP00000335463
MDGVSSEANEENDNIERPVRRRHSSILKPPRSPLQDLRGGNERVQESNALRNKKNSRRVSFADTIKVFQTESHMKIVRKSEMEGCSAMVPSQLQLLPPGFKRFSCLSLPETETGENLLLIQNKKLEDNYCEITGMNTLLSAPIHTQMQQKEFSIIEHTRERKHANDQTVIFSDENQMDLTSSHTVMITKGLLDNPISEKSTKIDTTSFLANLKLHTEDSRMKKEVNFSVDQNTSSENKIDFNDFIKRLKTGKCSAFPDVPDKENFEIPIYSKEPNSASSTHQMHVSLKEDENNSNITRLFREKDDGMNFTQCHTANIQTLIPTSSETNSRESKGNDITIYGNDFMDLTFNHTLQILPATGNFSEIENQTQNAMDVTTGYGTKASGNKTVFKSKQNTAFQDLSINSADKIHITRSHIMGAETHIVSQTCNQDARILAMTPESIYSNPSIQGCKTVFYSSCNDAMEMTKCLSNMREEKNLLKHDSNYAKMYCNPDAMSSLTEKTIYSGEENMDITKSHTVAIDNQIFKQDQSNVQIAAAPTPEKEMMLQNLMTTSEDGKMNVNCNSVPHVSKERIQQSLSNPLSISLTDRKTELLSGENMDLTESHTSNLGSQVPLAAYNLAPESTSESHSQSKSSSDECEEITKSRNEPFQRSDIIAKNSLTDTWNKDKDWVLKILPYLDKDSPQSADCNQEIATSHNIVYCGGVLDKQITNRNTVSWEQSLFSTTKPLFSSGQFSMKNHDTAISSHTVKSVLGQNSKLAEPLRKSLSNPTPDYCHDKMIICSEEEQNMDLTKSHTVVIGFGPSELQELGKTNLEHTTGQLTTMNRQIAVKVEKCGKSPIEKSGVLKSNCIMDVLEDESVQKPKFPKEKQNVKIWGRKSVGGPKIDKTIVFSEDDKNDMDITKSYTIEINHRPLLEKRDCHLVPLAGTSETILYTCRQDDMEITRSHTTALECKTVSPDEITTRPMDKTVVFVDNHVELEMTESHTVFIDYQEKERTDRPNFELSQRKSLGTPTVICTPTEESVFFPGNGESDRLVANDSQLTPLEEWSNNRGPVEVADNMELSKSATCKNIKDVQSPGFLNEPLSSKSQRRKSLKLKNDKTIVFSENHKNDMDITQSCMVEIDNESALEDKEDFHLAGASKTILYSCGQDDMEITRSHTTALECKTLLPNEIAIRPMDKTVLFTDNYSDLEVTDSHTVFIDCQATEKILEENPKFGIGKGKNLGVSFPKDNSCVQEIAEKQALAVGNKIVLHTEQKQQLFAATNRTTNEIIKFHSAAMDEKVIGKVVDQACTLEKAQVESCQLNNRDRRNVDFTSSHATAVCGSSDNYSCLPNVISCTDNLEGSAMLLCDKDEEKANYCPVQNDLAYANDFASEYYLESEGQPLSAPCPLLEKEEVIQTSTKGQLDCVITLHKDQDLIKDPRNLLANQTLVYSQDLGEMTKLNSKRVSFKLPKDQMKVYVDDIYVIPQPHFSTDQPPLPKKGQSSINKEEVILSKAGNKSLNIIENSSAPICENKPKILNSEEWFAAACKKELKENIQTTNYNTALDFHSNSDVTKQVIQTHVNAGEAPDPVITSNVPCFHSIKPNLNNLNGKTGEFLAFQTVHLPPLPEQLLELGNKAHNDMHIVQATEIHNINIISSNAKDSRDEENKKSHNGAETTSLPPKTVFKDKVRRCSLGIFLPRLPNKRNCSVTGIDDLEQIPADTTDINHLETQPVSSKDSGIGSVAGKLNLSPSQYINEENLPVYPDEINSSDSINIETEEKALIETYQKEISPYENKMGKTCNSQKRTWVQEEEDIHKEKKIRKNEIKFSDTTQDREIFDHHTEEDIDKSANSVLIKNLSRTPSSCSSSLDSIKADGTSLDFSTYRSSQMESQFLRDTICEESLREKLQDGRITIREFFILLQVHILIQKPRQSNLPGNFTVNTPPTPEDLMLSQYVYRPKIQIYREDCEARRQKIEELKLSASNQDKLLVDINKNLWEKMRHCSDKELKAFGIYLNKIKSCFTKMTKVFTHQGKVALYGKLVQSAQNEREKLQIKIDEMDKILKKIDNCLTEMETETKNLEDEEKNNPVEEWDSEMRAAEKELEQLKTEEEELQRNLLELEVQKEQTLAQIDFMQKQRNRTEELLDQLSLSEWDVVEWSDDQAVFTFVYDTIQLTITFEESVVGFPFLDKRYRKIVDVNFQSLLDEDQAPPSSLLVHKLIFQYVEEKESWKKTCTTQHQLPKMLEEFSLVVHHCRLLGEEIEYLKRWGPNYNLMNIDINNNELRLLFSSSAAFAKFEITLFLSAYYPSVPLPSTIQNHVGNTSQDDIATILSKVPLENNYLKNVVKQIYQDLFQDCHFYH

SEQ ID NO: 11453 - protein, 2316 aa, Homo sapiens
  Payload ID: 2241
  Gene Symbol: CASC5
  Gene Name: cancer susceptibility candidate 5
  Uniprot ID: Q8NG31
  ENSP ID: ENSP00000382576
MDGVSSEANEENDNIERPVRRRHSSILKPPRSPLQDLRGGNERVQESNALRNKKNSRRVSFADTIKVFQTESHMKIVRKSEMEETETGENLLLIQNKKLEDNYCEITGMNTLLSAPIHTQMQQKEFSIIEHTRERKHANDQTVIFSDENQMDLTSSHTVMITKGLLDNPISEKSTKIDTTSFLANLKLHTEDSRMKKEVNFSVDQNTSSENKIDFNDFIKRLKTGKCSAFPDVPDKENFEIPIYSKEPNSASSTHQMHVSLKEDENNSNITRLFREKDDGMNFTQCHTANIQTLIPTSSETNSRESKGNDITIYGNDFMDLTFNHTLQILPATGNFSEIENQTQNAMDVTTGYGTKASGNKTVFKSKQNTAFQDLSINSADKIHITRSHIMGAETHIVSQTCNQDARILAMTPESIYSNPSIQGCKTVFYSSCNDAMEMTKCLSNMREEKNLLKHDSNYAKMYCNPDAMSSLTEKTIYSGEENMDITKSHTVAIDNQIFKQDQSNVQIAAAPTPEKEMMLQNLMTTSEDGKMNVNCNSVPHVSKERIQQSLSNPLSISLTDRKTELLSGENMDLTESHTSNLGSQVPLAAYNLAPESTSESHSQSKSSSDECEEITKSRNEPFQRSDIIAKNSLTDTWNKDKDWVLKILPYLDKDSPQSADCNQEIATSHNIVYCGGVLDKQITNRNTVSWEQSLFSTTKPLFSSGQFSMKNHDTAISSHTVKSVLGQNSKLAEPLRKSLSNPTPDYCHDKMIICSEEEQNMDLTKSHTVVIGFGPSELQELGKTNLEHTTGQLTTMNRQIAVKVEKCGKSPIEKSGVLKSNCIMDVLEDESVQKPKFPKEKQNVKIWGRKSVGGPKIDKTIVFSEDDKNDMDITKSYTIEINHRPLLEKRDCHLVPLAGTSETILYTCRQDDMEITRSHTTALECKTVSPDEITTRPMDKTVVFVDNHVELEMTESHTVFIDYQEKERTDRPNFELSQRKSLGTPTVICTPTEESVFFPGNGESDRLVANDSQLTPLEEWSNNRGPVEVADNMELSKSATCKNIKDVQSPGFLNEPLSSKSQRRKSLKLKNDKTIVFSENHKNDMDITQSCMVEIDNESALEDKEDFHLAGASKTILYSCGQDDMEITRSHTTALECKTLLPNEIAIRPMDKTVLFTDNYSDLEVTDSHTVFIDCQATEKILEENPKFGIGKGKNLGVSFPKDNSCVQEIAEKQALAVGNKIVLHTEQKQQLFAATNRTTNEIIKFHSAAMDEKVIGKVVDQACTLEKAQVESCQLNNRDRRNVDFTSSHATAVCGSSDNYSCLPNVISCTDNLEGSAMLLCDKDEEKANYCPVQNDLAYANDFASEYYLESEGQPLSAPCPLLEKEEVIQTSTKGQLDCVITLHKDQDLIKDPRNLLANQTLVYSQDLGEMTKLNSKRVSFKLPKDQMKVYVDDIYVIPQPHFSTDQPPLPKKGQSSINKEEVILSKAGNKSLNIIENSSAPICENKPKILNSEEWFAAACKKELKENIQTTNYNTALDFHSNSDVTKQVIQTHVNAGEAPDPVITSNVPCFHSIKPNLNNLNGKTGEFLAFQTVHLPPLPEQLLELGNKAHNDMHIVQATEIHNINIISSNAKDSRDEENKKSHNGAETTSLPPKTVFKDKVRRCSLGIFLPRLPNKRNCSVTGIDDLEQIPADTTDINHLETQPVSSKDSGIGSVAGKLNLSPSQYINEENLPVYPDEINSSDSINIETEEKALIETYQKEISPYENKMGKTCNSQKRTWVQEEEDIHKEKKIRKNEIKFSDTTQDREIFDHHTEEDIDKSANSVLIKNLSRTPSSCSSSLDSIKADGTSLDFSTYRSSQMESQFLRDTICEESLREKLQDGRITIREFFILLQVHILIQKPRQSNLPGNFTVNTPPTPEDLMLSQYVYRPKIQIYREDCEARRQKIEELKLSASNQDKLLVDINKNLWEKMRHCSDKELKAFGIYLNKIKSCFTKMTKVFTHQGKVALYGKLVQSAQNEREKLQIKIDEMDKILKKIDNCLTEMETETKNLEDEEKNNPVEEWDSEMRAAEKELEQLKTEEEELQRNLLELEVQKEQTLAQIDFMQKQRNRTEELLDQLSLSEWDVVEWSDDQAVFTFVYDTIQLTITFEESVVGFPFLDKRYRKIVDVNFQSLLDEDQAPPSSLLVHKLIFQYVEEKESWKKTCTTQHQLPKMLEEFSLVVHHCRLLGEEIEYLKRWGPNYNLMNIDINNNELRLLFSSSAAFAKFEITLFLSAYYPSVPLPSTIQNHVGNTSQDDIATILSKVPLENNYLKNVVKQIYQDLFQDCHFYH

SEQ ID NO: 11454 - protein, 1361 aa, Homo sapiens
  Payload ID: 2241
  Gene Symbol: CASC5
  Gene Name: cancer susceptibility candidate 5
  ENSP ID: ENSP00000432565
  MOD_RES (1)..(1): Any amino acid
XSHTVFIDYQEKERTDRPNFELSQRKSLGTPTVICTPTEESVFFPGNGESDRLVANDSQLTPLEEWSNNRGPVEVADNMELSKSATCKNIKDVQSPGFLNEPLSSKSQRRKSLKLKNDKTIVFSENHKNDMDITQSCMVEIDNESALEDKEDFHLAGASKTILYSCGQDDMEITRSHTTALECKTLLPNEIAIRPMDKTVLFTDNYSDLEVTDSHTVFIDCQATEKILEENPKFGIGKGKNLGVSFPKDNSCVQEIAEKQALAVGNKIVLHTEQKQQLFAATNRTTNEIIKFHSAAMDEKVIGKVVDQACTLEKAQVESCQLNNRDRRNVDFTSSHATAVCGSSDNYSCLPNVISCTDNLEGSAMLLCDKDEEKANYCPVQNDLAYANDFASEYYLESEGQPLSAPCPLLEKEEVIQTSTKGQLDCVITLHKDQDLIKDPRNLLANQTLVYSQDLGEMTKLNSKRVSFKLPKDQMKVYVDDIYVIPQPHFSTDQPPLPKKGQSSINKEEVILSKAGNKSLNIIENSSAPICENKPKILNSEEWFAAACKKELKENIQTTNYNTALDFHSNSDVTKQVIQTHVNAGEAPDPVITSNVPCFHSIKPNLNNLNGKTGEFLAFQTVHLPPLPEQLLELGNKAHNDMHIVQATEIHNINIISSNAKDSRDEENKKSHNGAETTSLPPKTVFKDKVRRCSLGIFLPRLPNKRNCSVTGIDDLEQIPADTTDINHLETQPVSSKDSGIGSVAGKLNLSPSQYINEENLPVYPDEINSSDSINIETEEKALIETYQKEISPYENKMGKTCNSQKRTWVQEEEDIHKEKKIRKNEIKFSDTTQDREIFDHHTEEDIDKSANSVLIKNLSRTPSSCSSSLDSIKADGTSLDFSTYRSSQMESQFLRDTICEESLREKLQDGRITIREFFILLQVHILIQKPRQSNLPGNFTVNTPPTPEDLMLSQYVYRPKIQIYREDCEARRQKIEELKLSASNQDKLLVDINKNLWEKMRHCSDKELKAFGIYLNKIKSCFTKMTKVFTHQGKVALYGKLVQSAQNEREKLQIKIDEMDKILKKIDNCLTEMETETKNLEDEEKNNPVEEWDSEMRAAEKELEQLKTEEEELQRNLLELEVQKEQTLAQIDFMQKQRNRTEELLDQLSLSEWDVVEWSDDQAVFTFVYDTIQLTITFEESVVGFPFLDKRYRKIVDVNFQSLLDEDQAPPSSLLVHKLIFQYVEEKESWKKTCTTQHQLPKMLEEFSLVVHHCRLLGEEIEYLKRWGPNYNLMNIDINNNELRLLFSSSAAFAKFEITLFLSAYYPSVPLPSTIQNHVGNTSQDDIATILSKVPLENNYLKNVVKQIYQDLFQDCHFYH

SEQ ID NO: 11455 - protein, 1746 aa, Homo sapiens
  Payload ID: 2241
  Gene Symbol: CASC5
  Gene Name: cancer susceptibility candidate 5
  ENSP ID: ENSP00000432654
MDGVSSEANEENDNIERPVRRRHSSILKPPRSPLQDLRGGNERVQESNALRNKKNSRRVSFADTIKVFQTESHMKIVRKSEMEETETGENLLLIQNKKLEDNYCEITGMNTLLSAPIHTQMQQKEFSIIEHTRERKHANDQTVIFSDENQMDLTSSHTVMITKGLLDNPISEKSTKIDTTSFLANLKLHTEDSRMKKEVNFSVDQNTSSENKIDFNDFIKRLKTGKCSAFPDVPDKENFEIPIYSKEPNSASSTHQMHVSLKEDENNSNITRLFREKDDGMNFTQCHTANIQTLIPTSSETNSRESKGNDITIYGNDFMDLTFNHTLQILPATGNFSEIENQTQNAMDVTTGYGTKASGNKTVFKSKQNTAFQDLSINSADKIHITRSHIMGAETHIVSQTCNQDARILAMTPESIYSNPSIQGCKTVFYSSCNDAMEMTKCLSNMREEKNLLKHDSNYAKMYCNPDAMSSLTEKTIYSGEENMDITKSHTVAIDNQIFKQDQSNVQIAAAPTPEKEMMLQNLMTTSEDGKMNVNCNSVPHVSKERIQQSLSNPLSISLTDRKTELLSGENMDLTESHTSNLGSQVPLAAYNLAPESTSESHSQSKSSSDECEEITKSRNEPFQRSDIIAKNSLTDTWNKDKDWVLKILPYLDKDSPQSADCNQEIATSHNIVYCGGVLDKQITNRNTVSWEQSLFSTTKPLFSSGQFSMKNHDTAISSHTVKSVLGQNSKLAEPLRKSLSNPTPDYCHDKMIICSEEEQNMDLTKSHTVVIGFGPSELQELGKTNLEHTTGQLTTMNRQIAVKVEKCGKSPIEKSGVLKSNCIMDVLEDESVQKPKFPKEKQNVKIWGRKSVGGPKIDKTIVFSEDDKNDMDITKSYTIEINHRPLLEKRDCHLVPLAGTSETILYTCRQDDMEITRSHTTALECKTVSPDEITTRPMDKTVVFVDNHVELEMTESHTVFIDYQEKERTDRPNFELSQRKSLGTPTVICTPTEESVFFPGNGESDRLVANDSQLTPLEEWSNNRGPVEVADNMELSKSATCKNIKDVQSPGFLNEPLSSKSQRRKSLKLKNDKTIVFSENHKNDMDITQSCMVEIDNESALEDKEDFHLAGASKTILYSCGQDDMEITRSHTTALECKTLLPNEIAIRPMDKTVLFTDNYSDLEVTDSHTVFIDCQATEKILEENPKFGIGKGKNLGVSFPKDNSCVQEIAEKQALAVGNKIVLHTEQKQQLFAATNRTTNEIIKFHSAAMDEKVIGKVVDQACTLEKAQVESCQLNNRDRRNVDFTSSHATAVCGSSDNYSCLPNVISCTDNLEGSAMLLCDKDEEKANYCPVQNDLAYANDFASEYYLESEGQPLSAPCPLLEKEEVIQTSTKGQLDCVITLHKDQDLIKDPRNLLANQTLVYSQDLGEMTKLNSKRVSFKLPKDQMKVYVDDIYVIPQPHFSTDQPPLPKKGQSSINKEEVILSKAGNKSLNIIENSSAPICENKPKILNSEEWFAAACKKELKENIQTTNYNTALDFHSNSDVTKQVIQTHVNAGEAPDPVITSNVPCFHSIKPNLNNLNGKTGEFLAFQTVHLPPLPEQLLELGNKAHNDMHIVQATEIHNINIISSNAKDSRDEENKKSHNGAETTSLPPKTVFKDKVRRCSLGIFLPRLPNKRNCSVTGIDDLEQIPADTTDINHLETQPVSSKDSGIGSVAGKLNLSPSQYINEENLPVYPDEINSSDSINIETEEKNVGTRRRRYS

SEQ ID NO: 11456 - protein, 193 aa, Homo sapiens
  Payload ID: 2241
  Gene Symbol: CASC5
  Gene Name: cancer susceptibility candidate 5
  ENSP ID: ENSP00000436851
  MOD_RES (1)..(1): Any amino acid
XDHHTEEDIDKSANSVLIKNLSRTPSSCSSSLDSIKADGTSLDFSTYRSSQMESQFLRDTICEESLREFTVNTPPTPEDLMLSQYVYRPKIQIYREDCEARRQKIEELKLSASNQDKLLVDINKNLWEKMRHCSDKELKAFGIYLNKIKSCFTKMTKVFTHQGKVALYGKLVQSAQNEREKLQIKIDEMDKIL

SEQ ID NO: 11457 - protein, 80 aa, Homo sapiens
  Payload ID: 2241
  Gene Symbol: CASC5
  Gene Name: cancer susceptibility candidate 5
  ENSP ID: ENSP00000453857
MDGVSSEANEENDNIERPVRRRHSSILKPPRSPLQDLRGPHLDTETPTEQSPRQFYCKHTTYSRRPDVKSICLPTQDTDL

SEQ ID NO: 11458 - protein, 10 aa, Homo sapiens
  Payload ID: 2241
  Gene Symbol: CASC5
  Gene Name: cancer susceptibility candidate 5
  ENSP ID: ENSP00000454002
MKIVRKSEME

SEQ ID NO: 11459 - protein, 7 aa, Homo sapiens
  Payload ID: 2241
  Gene Symbol: CASC5
  Gene Name: cancer susceptibility candidate 5
  ENSP ID: ENSP00000454087
MKIVRKS

SEQ ID NO: 11460 - protein, 180 aa, Homo sapiens
  Payload ID: 2242
  Gene Symbol: CTAG1A
  Gene Name: cancer/testis antigen 1A
  Uniprot ID: P78358
  ENSP ID: ENSP00000469441
MQAEGRGTGGSTGDADGPGGPGIPDGPGGNAGGPGEAGATGGRGPRGAGAARASGPGGGAPRGPHGGAASGLNGCCRCGARGPESRLLEFYLAMPFATPMEAELARRSLAQDAPPLPVPGVLLKEFTVSGNILTIRLTAADHRQLQLSISSCLQQLSLLMWITQCFLPVFLAQPPSGQRR

SEQ ID NO: 11461 - protein, 210 aa, Homo sapiens
  Payload ID: 2242
  Gene Symbol: CTAG1A
  Gene Name: cancer/testis antigen 1A
  ENSP ID: ENSP00000472220
MQAEGRGTGGSTGDADGPGGPGIPDGPGGNAGGPGEAGATGGRGPRGAGAARASGPGGGAPRGPHGGAASGLNGCCRCGARGPESRLLEFYLAMPFATPMEAELARRSLAQDAPPLPVPGVLLKEFTVSGNILTMSVQDQDRDGAGWRSVAGWGLGSAYPHGQAARNLGTPQHRVSEQRPGTPGPPPPEGAQGDGCRGVAFNVMFSAPHI

SEQ ID NO: 11462 - protein, 180 aa, Homo sapiens; identical to SEQ ID NO: 11460
  Payload ID: 2243
  Gene Symbol: CTAG1B
  Gene Name: cancer/testis antigen 1B
  Uniprot ID: P78358
  ENSP ID: ENSP00000332602

SEQ ID NO: 11463 - protein, 168 aa, Homo sapiens
  Payload ID: 2243
  Gene Symbol: CTAG1B
  Gene Name: cancer/testis antigen 1B
  Uniprot ID: P78358
  ENSP ID: ENSP00000352953
MQAEGRGTGGSTGDADGPGGPGIPDGPGGNAGGPGEAGATGGRGPRGAGAARASGPGGGAPRGPHGGAASGLNGCCRCGARGPESRLLEFYLAMPFATPMEAELARRSLAQDAPPLPVPGVLLKEFTVSGNILTMSVQDQDRDGAWVGGGHSVAGWGLGSAYTPRSGC

SEQ ID NO: 11464 - protein, 210 aa, Homo sapiens; identical to SEQ ID NO: 11461
  Payload ID: 2243
  Gene Symbol: CTAG1B
  Gene Name: cancer/testis antigen 1B
  ENSP ID: ENSP00000469269

SEQ ID NO: 11465 - protein, 210 aa, Homo sapiens
  Payload ID: 2244
  Gene Symbol: CTAG2
  Gene Name: cancer/testis antigen 2
  Uniprot ID: O75638
  ENSP ID: ENSP00000247306
MQAEGRGTGGSTGDADGPGGPGIPDGPGGNAGGPGEAGATGGRGPRGAGAARASGPRGGAPRGPHGGAASAQDGRCPCGARRPDSRLLELHITMPFSSPMEAELVRRILSRDAAPLPRPGAVLKDFTVSGNLLFMSVRDQDREGAGRMRVVGWGLGSASPEGQKARDLRTPKHKVSEQRPGTPGPPPPEGAQGDGCRGVAFNVMFSAPHI

SEQ ID NO: 11466 - protein, 180 aa, Homo sapiens
  Payload ID: 2244
  Gene Symbol: CTAG2
  Gene Name: cancer/testis antigen 2
  Uniprot ID: O75638
  ENSP ID: ENSP00000358598
MQAEGRGTGGSTGDADGPGGPGIPDGPGGNAGGPGEAGATGGRGPRGAGAARASGPRGGAPRGPHGGAASAQDGRCPCGARRPDSRLLELHITMPFSSPMEAELVRRILSRDAAPLPRPGAVLKDFTVSGNLLFIRLTAADHRQLQLSISSCLQQLSLLMWITQCFLPVFLAQAPSGQRR

SEQ ID NO: 11467 - protein, 264 aa, Homo sapiens
  Payload ID: 2245
  Gene Symbol: CT55
  Gene Name: cancer/testis antigen 55
  Uniprot ID: Q8WUE5
  ENSP ID: ENSP00000276241
MLRLLRLALAFYGRTADPAERQGPQQQGLPQGDTQLTTVQGVVTSFCGDYGMIDESIYFSSDVVTGNVPLKVGQKVNVVVEEDKPHYGLRAIKVDVVPRHLYGAGPSDSGTRVLIGCVTSINEDNIYISNSIYFSIAIVSEDFVPYKGDLLEVEYSTEPGISNIKATSVKPIRCIHTEEVCITSVHGRNGVIDYTIFFTLDSVKLPDGYVPQVDDIVNVVMVESIQFCFIWRAISITPVHKSSSGFQDDGGLGRPKRERRSQSI

SEQ ID NO: 11468 - protein, 242 aa, Homo sapiens
  Payload ID: 2245
  Gene Symbol: CT55
  Gene Name: cancer/testis antigen 55
  Uniprot ID: Q8WUE5
  ENSP ID: ENSP00000343893
MLRLLRLALAFYGRTADPAERQGPQQQGLPQGDTQLTTVQGVVTSFCGDYGMIDESIYFSSDVVTGNVPLKVGQKVNVVVEEDKPHYGLRAIKVDVVPRHLYGAGPSDSGTRVLIGCVTSINEDNIYISNSIYFSIAIVSEDFVPYKGDLLEVEYSTEPGISNIKATSVKPIRCIHTEEVCITSVHGRNGVIDYTIFFTLDSVKLPDGYVPQVDDIVNVVMVESIQFCFIWRAISITPVHKS

SEQ ID NO: 11469 - protein, 136 aa, Homo sapiens
  Payload ID: 2246
  Gene Symbol: CT62
  Gene Name: cancer/testis antigen 62
  Uniprot ID: P0C5K7
  ENSP ID: ENSP00000399356
MMHTTSYRRLSPPHLTDQPSAYSHTHRTFSHFSCGSQPAAQRLHVELWNADLQSEFLCPCLGLTLYLTCNPQLGKRKFCSHSSEDMSKMVSRRNVKDSHEVSGSLQATLQVISFSFPFLLHTCSHPLSHPTSGQRR

SEQ ID NO: 11470 - protein, 97 aa, Homo sapiens
  Payload ID: 2246
  Gene Symbol: CT62
  Gene Name: cancer/testis antigen 62
  ENSP ID: ENSP00000455569
MMHTTSYRRLSPPHLTDQPSAYSHTHRTFSHFSCGSQPAAQRLHVELWNADLQSEFLCPCLGLTLYLTCNPQLGKRKFCSHSSEDMSKMVSRRNVKD

SEQ ID NO: 11471 - protein, 77 aa, Homo sapiens
  Payload ID: 2246
  Gene Symbol: CT62
  Gene Name: cancer/testis antigen 62
  ENSP ID: ENSP00000456091
MMHTTSYRRLSPPHLTDQPSAYSHTHRTFSHFSCGSQPAAQRLHVVRAPKSLRNEWLTAESNLLGVQGMWNWNKSNV

SEQ ID NO: 11472 - protein, 103 aa, Homo sapiens
  Payload ID: 2246
  Gene Symbol: CT62
  Gene Name: cancer/testis antigen 62
  ENSP ID: ENSP00000477026
  MOD_RES (1)..(1): Any amino acid
XELWNADLQSEFLCPCLGLTLYLTCNPQLGKRKFCSHSSEDMSKMVSRRNVKDSHEVSGSLQATLQPRGITRIRGCFSLGHADRRRRRGWQPPVHSLPFFFRR

SEQ ID NO: 11473 - protein, 113 aa, Homo sapiens
  Payload ID: 2247
  Gene Symbol: CT83
  Gene Name: cancer/testis antigen 83
  Uniprot ID: Q5H943
  ENSP ID: ENSP00000360961
MNFYLLLASSILCALIVFWKYRRFQRNTGEMSSNSTALALVRPSSSGLINSNTDNNLAVYDLSRDILNNFPHSIARQKRILVNLSMVENKLVELEHTLLSKGFRGASPHRKST

SEQ ID NO: 11474 - protein, 189 aa, Homo sapiens
  Payload ID: 2248
  Gene Symbol: CT45A1
  Gene Name: cancer/testis antigen family 45, member A1
  Uniprot ID: Q5HYN5
  ENSP ID: ENSP00000470185
MTDKTEKVAVDPETVFKRPRECDSPSYQKRQRMALLARKQGAGDSLIAGSAMSKAKKLMTGHAIPPSQLDSQIDDFTGFSKDRMMQKPGSNAPVGGNVTSSFSGDDLECRETASSPKSQREINADIKRKLVKELRCVGQKYEKIFEMLEGVQGPTAVRKRFFESIIKEAARCMRRDFVKHLKKKLKRMI

SEQ ID NO: 11475 - protein, 189 aa, Homo sapiens; identical to SEQ ID NO: 11474
  Payload ID: 2248
  Gene Symbol: CT45A1
  Gene Name: cancer/testis antigen family 45, member A1
  Uniprot ID: Q5HYN5
  ENSP ID: ENSP00000472303

SEQ ID NO: 11476 - protein, 189 aa, Homo sapiens
  Payload ID: 2249
  Gene Symbol: CT45A10
  Gene Name: cancer/testis antigen family 45, member A10
  Uniprot ID: P0DMU9
  ENSP ID: ENSP00000481558
MTDKTEKVAVDPETVFKRPRECDSPSYQKRQRMALLARKQGAGDSLIAGSAMSKEKKLMTGHAIPPSQLDSQIDDFTGFSKDGMMQKPGSNAPVGGNVTSNFSGDDLECRGIASSPKSQQEINADIKCQVVKEIRCLGRKYEKIFEMLEGVQGPTAVRKRFFESIIKEAARCMRRDFVKHLKKKLKRMI

SEQ ID NO: 11477 - protein, 189 aa, Homo sapiens; identical to SEQ ID NO: 11476
  Payload ID: 2249
  Gene Symbol: CT45A10
  Gene Name: cancer/testis antigen family 45, member A10
  Uniprot ID: P0DMU9
  ENSP ID: ENSP00000484601

SEQ ID NO: 11478 - protein, 189 aa, Homo sapiens
  Payload ID: 2250
  Gene Symbol: CT45A2
  Gene Name: cancer/testis antigen family 45, member A2
  Uniprot ID: Q5DJT8
  ENSP ID: ENSP00000474632
MTDKTEKVAVDPETVFKRPRECDSPSYQKRQRMALLARKQGAGDSLIAGSAMSKEKKLMTGHAIPPSQLDSQIDDFTGFSKDRMMQKPGSNAPVGGNVTSSFSGDDLECRETAFSPKSQQEINADIKRQLVKELRCVGQKYEKIFEMLEGVQGPTAVRKRFFESIIKEAARCMRRDFVKHLKKKLKRMI

SEQ ID NO: 11479 - protein, 189 aa, Homo sapiens; identical to SEQ ID NO: 11478
  Payload ID: 2250
  Gene Symbol: CT45A2
  Gene Name: cancer/testis antigen family 45, member A2
  Uniprot ID: Q5DJT8
  ENSP ID: ENSP00000483619

SEQ ID NO: 11480 - protein, 189 aa, Homo sapiens
  Payload ID: 2251
  Gene Symbol: CT45A3
  Gene Name: cancer/testis antigen family 45, member A3
  Uniprot ID: Q8NHU0
  ENSP ID: ENSP00000471418
MTDKTEKVAVDPETVFKRPRECDSPSYQKRQRMALLARKQGAGDSLIAGSAMSKEKKLMTGHAIPPSQLDSQIDDFTGFSKDRMMQKPGSNAPVGGNVTSSFSGDDLECRETASSPKSQREINADIKRKLVKELRCVGQKYEKIFEMLEGVQGPTAVRKRFFESIIKEAARCMRRDFVKHLKKKLKRMI

SEQ ID NO: 11481 - protein, 189 aa, Homo sapiens; identical to SEQ ID NO: 11480
  Payload ID: 2251
  Gene Symbol: CT45A3
  Gene Name: cancer/testis antigen family 45, member A3
  Uniprot ID: Q8NHU0
  ENSP ID: ENSP00000471571

SEQ ID NO: 11482 - protein, 189 aa, Homo sapiens
  Payload ID: 2252
  Gene Symbol: CT45A5
  Gene Name: cancer/testis antigen family 45, member A5
  Uniprot ID: P0DMU8
  ENSP ID: ENSP00000427342
MTDKTEKVAVDPETVFKRPRECDSPSYQKRQRMALLARKQGAGDSLIAGSAMSKEKKLMTGHAIPPSQLDSQIDDFTGFSKDGMMQKPGSNAPVGGNVTSSFSGDDLECRETASSPKSQREINADIKRKLVKELRCVGQKYEKIFEMLEGVQGPTAVRKRFFESIIKEAARCMRRDFVKHLKKKLKRMI

SEQ ID NO: 11483 - protein, 189 aa, Homo sapiens; identical to SEQ ID NO: 11482
  Payload ID: 2252
  Gene Symbol: CT45A5
  Gene Name: cancer/testis antigen family 45, member A5
  Uniprot ID: P0DMU8
  ENSP ID: ENSP00000483658

SEQ ID NO: 11484 - protein, 189 aa, Homo sapiens; identical to SEQ ID NO: 11482
  Payload ID: 2253
  Gene Symbol: CT45A6
  Gene Name: cancer/testis antigen family 45, member A6
  Uniprot ID: P0DMU7
  ENSP ID: ENSP00000479608

SEQ ID NO: 11485 - protein, 189 aa, Homo sapiens; identical to SEQ ID NO: 11482
  Payload ID: 2253
  Gene Symbol: CT45A6
  Gene Name: cancer/testis antigen family 45, member A6
  Uniprot ID: P0DMU7
  ENSP ID: ENSP00000483910

SEQ ID NO: 11486 - protein, 189 aa, Homo sapiens; identical to SEQ ID NO: 11482
  Payload ID: 2254
  Gene Symbol: CT45A7
  Gene Name: cancer/testis antigen family 45, member A7
  Uniprot ID: P0DMV0
  ENSP ID: ENSP00000480765

SEQ ID NO: 11487 - protein, 189 aa, Homo sapiens; identical to SEQ ID NO: 11482
  Payload ID: 2254
  Gene Symbol: CT45A7
  Gene Name: cancer/testis antigen family 45, member A7
  Uniprot ID: P0DMV0
  ENSP ID: ENSP00000482241

SEQ ID NO: 11488 - protein, 189 aa, Homo sapiens; identical to SEQ ID NO: 11478
  Payload ID: 2255
  Gene Symbol: CT45A8
  Gene Name: cancer/testis antigen family 45, member A8
  Uniprot ID: P0DMV1
  ENSP ID: ENSP00000480644

SEQ ID NO: 11489 - protein, 189 aa, Homo sapiens; identical to SEQ ID NO: 11478
  Payload ID: 2255
  Gene Symbol: CT45A8
  Gene Name: cancer/testis antigen family 45, member A8
  Uniprot ID: P0DMV1
  ENSP ID: ENSP00000481184

SEQ ID NO: 11490 - protein, 189 aa, Homo sapiens; identical to SEQ ID NO: 11478
  Payload ID: 2256
  Gene Symbol: CT45A9
  Gene Name: cancer/testis antigen family 45, member A9
  Uniprot ID: P0DMV2
  ENSP ID: ENSP00000475060

SEQ ID NO: 11491 - protein, 189 aa, Homo sapiens; identical to SEQ ID NO: 11478
  Payload ID: 2256
  Gene Symbol: CT45A9
  Gene Name: cancer/testis antigen family 45, member A9
  Uniprot ID: P0DMV2
  ENSP ID: ENSP00000483637

SEQ ID NO: 11492 - protein, 288 aa, Homo sapiens
  Payload ID: 2257
  Gene Symbol: CT47A1
  Gene Name: cancer/testis antigen family 47, member A1
  Uniprot ID: Q5JQC4
  ENSP ID: ENSP00000393315
MSATGDRHPTQGDQEAPVSQEGAQAEAAGAGNQEGGDSGPDSSDVVPAAEVVGVAGPVEGLGEEEGEQAAGLAAVPRGGSAEEDSDIGPATEEEEEEEGNEAANFDLAVVARRYPASGIHFVLLDMVHSLLHRLSHNDHILIENRQLSRLMVGPHAAARNLWGNLPPLLLPQRLGAGAAARAGEGLGLIQEAASVPEPAVPADLAEMAREPAEEAAEEKLSEEATEEPDAEEPATEEPTAQEATAPEEVTKSQPEKWDEEAQDAAGEEEKEQEKEKDAENKVKNSKGT

SEQ ID NO: 11493 - protein, 288 aa, Homo sapiens; identical to SEQ ID NO: 11492
  Payload ID: 2258
  Gene Symbol: CT47A10
  Gene Name: cancer/testis antigen family 47, member A10
  Uniprot ID: Q5JQC4
  ENSP ID: ENSP00000411909

SEQ ID NO: 11494 - protein, 288 aa, Homo sapiens; identical to SEQ ID NO: 11492
  Payload ID: 2259
  Gene Symbol: CT47A11
  Gene Name: cancer/testis antigen family 47, member A11
  Uniprot ID: Q5JQC4
  ENSP ID: ENSP00000410400

SEQ ID NO: 11495 - protein, 288 aa, Homo sapiens; identical to SEQ ID NO: 11492
  Payload ID: 2260
  Gene Symbol: CT47A12
  Gene Name: cancer/testis antigen family 47, member A12
  Uniprot ID: Q5JQC4
  ENSP ID: ENSP00000391318

SEQ ID NO: 11496 - protein, 288 aa, Homo sapiens; identical to SEQ ID NO: 11492
  Payload ID: 2261
  Gene Symbol: CT47A2
  Gene Name: cancer/testis antigen family 47, member A2
  Uniprot ID: Q5JQC4
  ENSP ID: ENSP00000414253

SEQ ID NO: 11497 - protein, 288 aa, Homo sapiens; identical to SEQ ID NO: 11492
  Payload ID: 2262
  Gene Symbol: CT47A3
  Gene Name: cancer/testis antigen family 47, member A3
  Uniprot ID: Q5JQC4
  ENSP ID: ENSP00000398559

SEQ ID NO: 11498 - protein, 288 aa, Homo sapiens; identical to SEQ ID NO: 11492
  Payload ID: 2263
  Gene Symbol: CT47A4
  Gene Name: cancer/testis antigen family 47, member A4
  Uniprot ID: Q5JQC4
  ENSP ID: ENSP00000389513

SEQ ID NO: 11499 - protein, 288 aa, Homo sapiens; identical to SEQ ID NO: 11492
  Payload ID: 2264
  Gene Symbol: CT47A5
  Gene Name: cancer/testis antigen family 47, member A5
  Uniprot ID: Q5JQC4
  ENSP ID: ENSP00000390070

SEQ ID NO: 11500 - protein, 288 aa, Homo sapiens; identical to SEQ ID NO: 11492
  Payload ID: 2264
  Gene Symbol: CT47A5
  Gene Name: cancer/testis antigen family 47, member A5
  Uniprot ID: Q5JQC4
  ENSP ID: ENSP00000414509

SEQ ID NO: 11501 - protein, 288 aa, Homo sapiens; identical to SEQ ID NO: 11492
  Payload ID: 2265
  Gene Symbol: CT47A6
  Gene Name: cancer/testis antigen family 47, member A6
  Uniprot ID: Q5JQC4
  ENSP ID: ENSP00000399711

SEQ ID NO: 11502 - protein, 288 aa, Homo sapiens; identical to SEQ ID NO: 11492
  Payload ID: 2265
  Gene Symbol: CT47A6
  Gene Name: cancer/testis antigen family 47, member A6
  Uniprot ID: Q5JQC4
  ENSP ID: ENSP00000478317

SEQ ID NO: 11503 - protein, 288 aa, Homo sapiens; identical to SEQ ID NO: 11492
  Payload ID: 2266
  Gene Symbol: CT47A7
  Gene Name: cancer/testis antigen family 47, member A7
  Uniprot ID: Q5JQC4
  ENSP ID: ENSP00000392283

SEQ ID NO: 11504 - protein, 288 aa, Homo sapiens; identical to SEQ ID NO: 11492
  Payload ID: 2267
  Gene Symbol: CT47A8
  Gene Name: cancer/testis antigen family 47, member A8
  Uniprot ID: Q5JQC4
  ENSP ID: ENSP00000400046

SEQ ID NO: 11505 - protein, 288 aa, Homo sapiens; identical to SEQ ID NO: 11492
  Payload ID: 2267
  Gene Symbol: CT47A8
  Gene Name: cancer/testis antigen family 47, member A8
  Uniprot ID: Q5JQC4
  ENSP ID: ENSP00000487301

SEQ ID NO: 11506 - protein, 288 aa, Homo sapiens; identical to SEQ ID NO: 11492
  Payload ID: 2268
  Gene Symbol: CT47A9
  Gene Name: cancer/testis antigen family 47, member A9
  Uniprot ID: Q5JQC4
  ENSP ID: ENSP00000408204

SEQ ID NO: 11507 - protein, 299 aa, Homo sapiens
  Payload ID: 2269
  Gene Symbol: CT47B1
  Gene Name: cancer/testis antigen family 47, member B1
  Uniprot ID: P0C2W7
  ENSP ID: ENSP00000360360
MSATGDRHPTQGDQEAPVSQEGAQAEAAGAGNQEGGDSGPDSSDMVPAAEVVGVAGPVEGLGEEEGEQAAGLAAVPQGGSAEEDSDIGPATEEEEEEEEGNEAANFDLAVATRRYPAAGIGFVFLYLVHSLLRRLYHNDHIQIANRHLSRLMVGPHAAVPNLWDNPPLLLLSQRLGAGAAAPEGEGLGLIQEAASVQEAASVPEPAVPADLAEMAREPAEEAADEKPPEEAAEEKLTEEATEEPAAEEPTSEEAVAPEEVTKSQPEKWDEEAQDAAGEEEKEQEKEKDVENKVKNSKGT

SEQ ID NO: 11508 - protein, 36 aa, Homo sapiens
  Payload ID: 2270
  Gene Symbol: CNR1
  Gene Name: cannabinoid receptor 1 (brain)
  ENSP ID: ENSP00000355418
MKSILDGLADTTFRTITTDLLYVGSNDIQYEDIKGE

SEQ ID NO: 11509 - protein, 472 aa, Homo sapiens
  Payload ID: 2270
  Gene Symbol: CNR1
  Gene Name: cannabinoid receptor 1 (brain)
  Uniprot ID: P21554
  ENSP ID: ENSP00000358511
MKSILDGLADTTFRTITTDLLYVGSNDIQYEDIKGDMASKLGYFPQKFPLTSFRGSPFQEKMTAGDNPQLVPADQVNITEFYNKSLSSFKENEENIQCGENFMDIECFMVLNPSQQLAIAVLSLTLGTFTVLENLLVLCVILHSRSLRCRPSYHFIGSLAVADLLGSVIFVYSFIDFHVFHRKDSRNVFLFKLGGVTASFTASVGSLFLTAIDRYISIHRPLAYKRIVTRPKAVVAFCLMWTIAIVIAVLPLLGWNCEKLQSVCSDIFPHIDETYLMFWIGVTSVLLLFIVYAYMYILWKAHSHAVRMIQRGTQKSIIIHTSEDGKVQVTRPDQARMDIRLAKTLVLILVVLIICWGPLLAIMVYDVFGKMNKLIKTVFAFCSMLCLLNSTVNPIIYALRSKDLRHAFRSMFPSCEGTAQPLDNSMGDSDCLHKHANNAASVHRAAESCIKSTVKIAKVTMSVSTDTSAEAL

SEQ ID NO: 11510 - protein, 472 aa, Homo sapiens; identical to SEQ ID NO: 11509
  Payload ID: 2270
  Gene Symbol: CNR1
  Gene Name: cannabinoid receptor 1 (brain)
  Uniprot ID: P21554
  ENSP ID: ENSP00000358513

SEQ ID NO: 11511 - protein, 472 aa, Homo sapiens; identical to SEQ ID NO: 11509
  Payload ID: 2270
  Gene Symbol: CNR1
  Gene Name: cannabinoid receptor 1 (brain)
  Uniprot ID: P21554
  ENSP ID: ENSP00000412192

SEQ ID NO: 11512 - protein, 439 aa, Homo sapiens
  Payload ID: 2270
  Gene Symbol: CNR1
  Gene Name: cannabinoid receptor 1 (brain)
  Uniprot ID: P21554
  ENSP ID: ENSP00000420188
MKSILDGLADTTFRTITTDLLGSPFQEKMTAGDNPQLVPADQVNITEFYNKSLSSFKENEENIQCGENFMDIECFMVLNPSQQLAIAVLSLTLGTFTVLENLLVLCVILHSRSLRCRPSYHFIGSLAVADLLGSVIFVYSFIDFHVFHRKDSRNVFLFKLGGVTASFTASVGSLFLTAIDRYISIHRPLAYKRIVTRPKAVVAFCLMWTIAIVIAVLPLLGWNCEKLQSVCSDIFPHIDETYLMFWIGVTSVLLLFIVYAYMYILWKAHSHAVRMIQRGTQKSIIIHTSEDGKVQVTRPDQARMDIRLAKTLVLILVVLIICWGPLLAIMVYDVFGKMNKLIKTVFAFCSMLCLLNSTVNPIIYALRSKDLRHAFRSMFPSCEGTAQPLDNSMGDSDCLHKHANNAASVHRAAESCIKSTVKIAKVTMSVSTDTSAEAL

SEQ ID NO: 11513 - protein, 78 aa, Homo sapiens
  Payload ID: 2270
  Gene Symbol: CNR1
  Gene Name: cannabinoid receptor 1 (brain)
  ENSP ID: ENSP00000446702
MKSILDGLADTTFRTITTDLLYVGSNDIQYEDIKGDMASKLGYFPQKFPLTSFRGSPFQEKMTAGDNPQLVPADQVNI

SEQ ID NO: 11514 - protein, 472 aa, Homo sapiens; identical to SEQ ID NO: 11509
  Payload ID: 2270
  Gene Symbol: CNR1
  Gene Name: cannabinoid receptor 1 (brain)
  Uniprot ID: P21554
  ENSP ID: ENSP00000446819

SEQ ID NO: 11515 - protein, 360 aa, Homo sapiens
  Payload ID: 2271
  Gene Symbol: CNR2
  Gene Name: cannabinoid receptor 2 (macrophage)
  Uniprot ID: P34972
  ENSP ID: ENSP00000363596
MEECWVTEIANGSKDGLDSNPMKDYMILSGPQKTAVAVLCTLLGLLSALENVAVLYLILSSHQLRRKPSYLFIGSLAGADFLASVVFACSFVNFHVFHGVDSKAVFLLKIGSVTMTFTASVGSLLLTAIDRYLCLRYPPSYKALLTRGRALVTLGIMWVLSALVSYLPLMGWTCCPRPCSELFPLIPNDYLLSWLLFIAFLFSGIIYTYGHVLWKAHQHVASLSGHQDRQVPGMARMRLDVRLAKTLGLVLAVLLICWFPVLALMAHSLATTLSDQVKKAFAFCSMLCLINSMVNPVIYALRSGEIRSSAHHCLAHWKKCVRGLGSEAKEEAPRSSVTETEADGKITPWPDSRDLDLSDC

SEQ ID NO: 11516 - protein, 164 aa, Homo sapiens
  Payload ID: 2272
  Gene Symbol: CNRIP1
  Gene Name: cannabinoid receptor interacting protein 1
  Uniprot ID: Q96F85
  ENSP ID: ENSP00000263655
MGDLPGLVRLSIALRIQPNDGPVFYKVDGQRFGQNRTIKLLTGSSYKVEVKIKPSTLQVENISIGGVLVPLELKSKEPDGDRVVYTGTYDTEGVTPTKSGERQPIQITMPFTDIGTFETVWQVKFYNYHKRDHCQWGSPFSVIEYECKPNETRSLMWVNKESFL

SEQ ID NO: 11517 - protein, 137 aa, Homo sapiens
  Payload ID: 2272
  Gene Symbol: CNRIP1
  Gene Name: cannabinoid receptor interacting protein 1
  ENSP ID: ENSP00000386544
MGDLPGLVRLSIALRIQPNDGPVFYKVDGQRFGQNRTIKLLTGSSYKVEVKIKPSTLQVENISIGGVLVPLELKSKEPDGDRVVYTGTYDTEGVTPTKSGERQPIQITMPVRLACGYRSMVPWKMETTEKKTITISL

SEQ ID NO: 11518 - protein, 128 aa, Homo sapiens
  Payload ID: 2272
  Gene Symbol: CNRIP1
  Gene Name: cannabinoid receptor interacting protein 1
  Uniprot ID: Q96F85
  ENSP ID: ENSP00000386883
MGDLPGLVRLSIALRIQPNDGPVFYKVDGQRFGQNRTIKLLTGSSYKVEVKIKPSTLQVENISIGGVLVPLELKSKEPDGDRVVYTGTYDTEGVTPTKSGERQPIQITMPECLEQRPQEISLTYECEE

SEQ ID NO: 11519 - protein, 92 aa, Homo sapiens
  Payload ID: 2273
  Gene Symbol: CNPY1
  Gene Name: canopy FGF signaling regulator 1
  Uniprot ID: Q3B7I2
  ENSP ID: ENSP00000317439
MNDYKLEEDPVTKERTFKRFAPRKGDKIYQEFKKLYFYSDAYRPLKFACETIIEEYEDEISSLIAQETHYLADKLCSEKSDLCETSANHTEL

SEQ ID NO: 11520 - protein, 92 aa, Homo sapiens; identical to SEQ ID NO: 11519
  Payload ID: 2273
  Gene Symbol: CNPY1
  Gene Name: canopy FGF signaling regulator 1
  Uniprot ID: Q3B7I2
  ENSP ID: ENSP00000384514

SEQ ID NO: 11521 - protein, 182 aa, Homo sapiens
  Payload ID: 2274
  Gene Symbol: CNPY2
  Gene Name: canopy FGF signaling regulator 2
  Uniprot ID: Q9Y2B0
  ENSP ID: ENSP00000273308
MKGWGWLALLLGALLGTAWARRSQDLHCGACRALVDELEWEIAQVDPKKTIQMGSFRINPDGSQSVVEVPYARSEAHLTELLEEICDRMKEYGEQIDPSTHRKNYVRVVGRNGESSELDLQGIRIDSDISGTLKFACESIVEEYEDELIEFFSREADNVKDKLCSKRTDLCDHALHISHDEL

SEQ ID NO: 11522 - protein, 102 aa, Homo sapiens
  Payload ID: 2274
  Gene Symbol: CNPY2
  Gene Name: canopy FGF signaling regulator 2
  ENSP ID: ENSP00000446784
MGSFRINPDGSQSVVEVPYARSEAHLTELLEEICDRMKEYGEQIDPSTHRKNYVRVVGRNGESSELDLQGIRIDSDISGTLKFACESIVEEYEDELIEFFSR

SEQ ID NO: 11523 - protein, 80 aa, Homo sapiens
  Payload ID: 2274
  Gene Symbol: CNPY2
  Gene Name: canopy FGF signaling regulator 2
  ENSP ID: ENSP00000448333
KNYVRVVGRNGESSELDLQGIRIDSDISGTLKFACESIVEEYEDELIEFFSREADNVKDKLCSKRTDLCDHALHISHDEL

SEQ ID NO: 11524 - protein, 168 aa, Homo sapiens
  Payload ID: 2274
  Gene Symbol: CNPY2
  Gene Name: canopy FGF signaling regulator 2
  ENSP ID: ENSP00000448809
MKGWGWLALLLGALLGTAWARRSQDLHCGACRALVDELEWEIAQVDPKKTIQMGSFRINPDGSQSVVEVPYARSEAHLTELLEEICDRMKEYGEQIDPSTHRKNYVRVVGRNGESSELDLQGIRIDSDISGTLKFACESIVEEYEDELIEFFSREADNVKDKLCSKRT

SEQ ID NO: 11525 - protein, 41 aa, Homo sapiens
  Payload ID: 2274
  Gene Symbol: CNPY2
  Gene Name: canopy FGF signaling regulator 2
  ENSP ID: ENSP00000449444
  MOD_RES (1)..(1): Any amino acid
XACRALVDELEWEIAQVDPKKTIQMGSFRINPDGSQSVVER

SEQ ID NO: 11526 - protein, 278 aa, Homo sapiens [sequence omitted]

SEQ ID NO: 11527 - protein, 143 aa, Homo sapiens
  Payload ID: 2275
  Gene Symbol: CNPY3
  Gene Name: canopy FGF signaling regulator 3
  ENSP ID: ENSP00000377698
MDSMPEPASRCLLLLPLLLLLLLLLPAPELGPSQAGAEENDWVRLPSKCEVCKYVAVELKSAFEETGKTKEVIGTGYGILDQKASGVKYTKSDLRLIEVTETICKRLLIIACTRRGPAAIDLPRACQRPLRHYTTWYTKGSRW

SEQ ID NO: 11528 - protein, 248 aa, Homo sapiens
  Payload ID: 2276
  Gene Symbol: CNPY4
  Gene Name: canopy FGF signaling regulator 4
  Uniprot ID: Q8N129
  ENSP ID: ENSP00000262932
MGPVRLGILLFLFLAVHEAWAGMLKEEDDDTERLPSKCEVCKLLSTELQAELSRTGRSREVLELGQVLDTGKRKRHVPYSVSETRLEEALENLCERILDYSVHAERKGSLRYAKGQSQTMATLKGLVQKGVKVDLGIPLELWDEPSVEVTYLKKQCETMLEEFEDIVGDWYFHHQEQPLQNFLCEGHVLPAAETACLQETWTGKEITDGEEKTEGEEEQEEEEEEEEEEGGDKMTKTGSHPKLDREDL

SEQ ID NO: 11529 - protein, 36 aa, Homo sapiens
  Payload ID: 2276
  Gene Symbol: CNPY4
  Gene Name: canopy FGF signaling regulator 4
  ENSP ID: ENSP00000488362
MATLKGLVQKGVKVDLGIPLELWDEPSVEVTYLKKQ

SEQ ID NO: 11530 - protein, 118 aa, Homo sapiens
  Payload ID: 2276
  Gene Symbol: CNPY4
  Gene Name: canopy FGF signaling regulator 4
  ENSP ID: ENSP00000488873
  MOD_RES (1)..(1): Any amino acid
XCKLLSTELQAELSRTGRSREVLELGQVLDTGKRKRHVPYSVSETRLEEALENLCERILDYSVHAERKGSLRYAKGQSQTMATLKGLVQKGVKVDLGIPLELWDEPSVEVTYLKKQSG

SEQ ID NO: 11531 - protein, 835 aa, Homo sapiens
  Payload ID: 2277
  Gene Symbol: CMTR1
  Gene Name: cap methyltransferase 1
  Uniprot ID: Q8N1G2
  ENSP ID: ENSP00000362550
MKRRTDPECTAPIKKQKKRVAELALSLSSTSDDEPPSSVSHGAKASTTSLSGSDSETEGKQHSSDSFDDAFKADSLVEGTSSRYSMYNSVSQKLMAKMGFREGEGLGKYSQGRKDIVEASSQKGRRGLGLTLRGFDQELNVDWRDEPEPSACEQVSWFPECTTEIPDTQEMSDWMVVGKRKMIIEDETEFCGEELLHSVLQCKSVFDVLDGEEMRRARTRANPYEMIRGVFFLNRAAMKMANMDFVFDRMFTNPRDSYGKPLVKDREAELLYFADVCAGPGGFSEYVLWRKKWHAKGFGMTLKGPNDFKLEDFYSASSELFEPYYGEGGIDGDGDITRPENISAFRNFVLDNTDRKGVHFLMADGGFSVEGQENLQEILSKQLLLCQFLMALSIVRTGGHFICKTFDLFTPFSVGLVYLLYCCFERVCLFKPITSRPANSERYVVCKGLKVGIDDVRDYLFAVNIKLNQLRNTDSDVNLVVPLEVIKGDHEFTDYMIRSNESHCSLQIKALAKIHAFVQDTTLSEPRQAEIRKECLRLWGIPDQARVAPSSSDPKSKFFELIQGTEIDIFSYKPTLLTSKTLEKIRPVFDYRCMVSGSEQKFLIGLGKSQIYTWDGRQSDRWIKLDLKTELPRDTLLSVEIVHELKGEGKAQRKISAIHILDVLVLNGTDVREQHFNQRIQLAEKFVKAVSKPSRPDMNPIRVKEVYRLEEMEKIFVRLEMKIIKGSSGTPKLSYTGRDDRHFVPMGLYIVRTVNEPWTMGFSKSFKKKFFYNKKTKDSTFDLPADSIAPFHICYYGRLFWEWGDGIRVHDSQKPQDQDKLSKEDVLSFIQMHRA

SEQ ID NO: 11532 - protein, 156 aa, Homo sapiens
  Payload ID: 2277
  Gene Symbol: CMTR1
  Gene Name: cap methyltransferase 1
  ENSP ID: ENSP00000393893
  MOD_RES (1)..(1): Any amino acid
XGKAQRKISAIHILDVLVLNGTDVREQHFNQRIQLAEKFVKAVSKPSRPDMNPIRVKEVYRLEEMEKIFVRLEMKIIKGSSGTPKLSYTGRDDRHFVPMGLYIVRTVNEPWTMGFSKSFKKKFFYNKKTKDSTFDLPADSIAPFHLPSLACLSKMD

SEQ ID NO: 11533 - protein, 372 aa, Homo sapiens
  Payload ID: 2277
  Gene Symbol: CMTR1
  Gene Name: cap methyltransferase 1
  ENSP ID: ENSP00000414233
MKRRTDPECTAPIKKQKKRVAELALSLSSTSDDEPPSSVSHGAKASTTSLSGSDSETEGKQHSSDSFDDAFKADSLVEGTSSRYSMYNSVSQKLMAKMGFREGEGLGKYSQGRKDIVEASSQKGRRGLGLTLRGFDQELNVDWRDEPEPSACEQVSWFPECTTEIPDTQEMSDWMVVGKRKMIIEDETEFCGEELLHSVLQCKKPLVKDREAELLYFADVCAGPGGFSEYVLWRKKWHAKGFGMTLKGPNDFKLEDFYSASSELFEPYYGEGGIDGDGDITRPENISAFRNFVLDNTDRKGVHFLMADGGFSVEGQENLQEILSKQLLLCQFLMALSIVRTGGHFICKTFDLFTPFSVGLVYLLYCCFERVC

SEQ ID NO: 11534 - protein, 113 aa, Homo sapiens
  Payload ID: 2277
  Gene Symbol: CMTR1
  Gene Name: cap methyltransferase 1
  ENSP ID: ENSP00000432114
  MOD_RES (1)..(1): Any amino acid
XGSEQKFLIGLGKSQIYTWDGRQSDRWIKLDLKTELPRDTLLSVEIVHELKGEGKAQRKISAIHILDVLVLNGTDVREQHFNQRSDLGPRVGRVGVGQGSLGGQRPPEVWPLI

SEQ ID NO: 11535 - protein, 770 aa, Homo sapiens
  Payload ID: 2278
  Gene Symbol: CMTR2
  Gene Name: cap methyltransferase 2
  Uniprot ID: Q8IYT2
  ENSP ID: ENSP00000337512
MSKCRKTPVQQLASPASFSPDILADIFELFAKNFSYGKPLNNEWQLPDPSEIFTCDHTELNAFLDLKNSLNEVKNLLSDKKLDEWHEHTAFTNKAGKIISHVRKSVNAELCTQAWCKFHEILCSFPLIPQEAFQNGKLNSLHLCEAPGAFIASLNHYLKSHRFPCHWSWVANTLNPYHEANDDLMMIMDDRLIANTLHWWYFGPDNTGDIMTLKFLTGLQNFISSMATVHLVTADGSFDCQGNPGEQEALVSSLHYCEVVTALTTLGNGGSFVLKMFTMFEHCSINLMYLLNCCFDQVHVFKPATSKAGNSEVYVVCLHYKGREAIHPLLSKMTLNFGTEMKRKALFPHHVIPDSFLKRHEECCVFFHKYQLETISENIRLFECMGKAEQEKLNNLRDCAIQYFMQKFQLKHLSRNNWLVKKSSIGCSTNTKWFGQRNKYFKTYNERKMLEALSWKDKVAKGYFNSWAEEHGVYHPGQSSILEGTASNLECHLWHILEGKKLPKVKCSPFCNGEILKTLNEAIEKSLGGAFNLDSKFRPKQQYSCSCHVFSEELIFSELCSLTECLQDEQVVVPSNQIKCLLVGFSTLRNIKMHIPLEVRLLESAELTTFSCSLLHDGDPTYQRLFLDCLLHSLRELHTGDVMILPVLSCFTRFMAGLIFVLHSCFRFITFVCPTSSDPLRTCAVLLCVGYQDLPNPVFRYLQSVNELLSTLLNSDSPQQVLQFVPMEVLLKGALLDFLWDLNAAIAKRHLHFIIQREREEIINSLQLQN

SEQ ID NO: 11536 - protein, 770 aa, Homo sapiens; identical to SEQ ID NO: 11535
  Payload ID: 2278
  Gene Symbol: CMTR2
  Gene Name: cap methyltransferase 2
  Uniprot ID: Q8IYT2
  ENSP ID: ENSP00000411148

SEQ ID NO: 11537 - protein, 105 aa, Homo sapiens
  Payload ID: 2278
  Gene Symbol: CMTR2
  Gene Name: cap methyltransferase 2
  ENSP ID: ENSP00000455080
MSKCRKTPVQQLASPASFSPDILADIFELFAKNFSYGKPLNNEWQLPDPSEIFTCDHTELNAFLDLKNSLNEVKNLLSDKKLDEWHEHTAFTNKAGKIISHVRKS

SEQ ID NO: 11538 - protein, 158 aa, Homo sapiens
  Payload ID: 2278
  Gene Symbol: CMTR2
  Gene Name: cap methyltransferase 2
  ENSP ID: ENSP00000456036
MSKCRKTPVQQLASPASFSPDILADIFELFAKNFSYGKPLNNEWQLPDPSEIFTCDHTELNAFLDLKNSLNEVKNLLSDKKLDEWHEHTAFTNKAGKIISHVRKSVNAELCTQAWCKFHEILCSFPLIPQEAFQNGKLNSLHLCEAPGAFIASLNHYL

SEQ ID NO: 11539 - protein, 132 aa, Homo sapiens
  Payload ID: 2278
  Gene Symbol: CMTR2
  Gene Name: cap methyltransferase 2
  ENSP ID: ENSP00000456476
MSKCRKTPVQQLASPASFSPDILADIFELFAKNFSYGKPLNNEWQLPDPSEIFTCDHTELNAFLDLKNSLNEVKNLLSDKKLDEWHEHTAFTNKAGKIISHVRKSVNAELCTQAWCKFHEILCSFPLIPQEA

SEQ ID NO: 11540 - protein, 159 aa, Homo sapiens
  Payload ID: 2278
  Gene Symbol: CMTR2
  Gene Name: cap methyltransferase 2
  ENSP ID: ENSP00000457399
MSKCRKTPVQQLASPASFSPDILADIFELFAKNFSYGKPLNNEWQLPDPSEIFTCDHTELNAFLDLKNSLNEVKNLLSDKKLDEWHEHTAFTNKAGKIISHVRKSVNAELCTQAWCKFHEILCSFPLIPQEAFQNGKLNSLHLCEAPGAFIASLNHYLK

SEQ ID NO: 11541 - protein, 90 aa, Homo sapiens
  Payload ID: 2278
  Gene Symbol: CMTR2
  Gene Name: cap methyltransferase 2
  ENSP ID: ENSP00000457679
MSKCRKTPVQQLASPASFSPDILADIFELFAKNFSYGKPLNNEWQLPDPSEIFTCDHTELNAFLDLKNSLNEVKNLLSDKKLDEWHEHTA

SEQ ID NO: 11542 - protein, 340 aa, Homo sapiens
  Payload ID: 2278
  Gene Symbol: CMTR2
  Gene Name: cap methyltransferase 2
  ENSP ID: ENSP00000481621
MSKCRKTPVQQLASPASFSPDILADIFELFAKNFSYGKPLNNEWQLPDPSEIFTCDHTELNAFLDLKNSLNEVKNLLSDKKLDEWHEHTAFTNKAGKIISHVRKSVNAELCTQAWCKFHEILCSFPLIPQEAFQNGKLNSLHLCEAPGAFIASLNHYLKSHRFPCHWSWVANTLNPYHEANDDLMMIMDDRLIANTLHWWYFGPDNTGDIMTLKFLTGLQNFISSMATVHLVTADGSFDCQGNPGEQEALVSSLHYCEVVTALTTLGNGGSFVLKMFTMFEHCSINLMYLLNCCFDQVHVFKPATSKAGNSEVYVVCLHYKGREAIHPLLSKMTLNLGLK

SEQ ID NO: 11543 - protein, 770 aa, Homo sapiens
  Payload ID: 2278
  Gene Symbol: CMTR2
  Gene Name: Cap methyltransferase 2
  ENSP ID: ENSP00000489435
MSKCRKTPVQQLASPASFSPDILADIFELFAKNFSYGKPLNNEWQLPDPSEIFTCDHTEFNAFLDLKNSLNEVKNLLSDKKLDEWHEHTAFTNKAGKIISHVRKSVNAELCTQAWCKFHEILCSFPLIPQEAFQNGKLNSLHLCEAPGAFIASLNHYLKSHRFPCHWSWVANTLNPYHEANDDLMMIMDDRLIANTLHWWYFGPDNTGDIMTLKFLTGLQNFISSMATVHLVTADGSFDCQGNPGEQEALVSSLHYCEVVTALTTLGNGGSFVLKMFTMFEHCSINLMYLLNCCFDQVHVFKPATSKAGNSEVYVVCLHYKGREAIHPLLSKMTLNFGTEMKRKALFPHHVIPDSFLKRHEECCVFFHKYQLETISENIRLFECMGKAEQEKLNNLRDCAIQYFMQKFQLKHLSRNNWLVKKSSIGCSTNTKWFGQRNKYFKTYNERKMLEALSWKDKVAKGYFNSWAEEHGVYHPGQSSILEGTASNLECHLWHILEGKKLPKVKCSPFCNGEILKTLNEAIEKSLGGAFNLDSKFRPKQQYSCSCHVFSEELIFSELCSLTECLQDEQVVVPSNQIKCLLVGFSTLRNIKMHIPLEVRLLESAELKTFSCSLLHDGDPTYQRLFLDCLLHSLRELHTGDVMILPVLSCFTRFMAGLIFVLHSCFRFITFVCPTSSDPLRTCAVLLCVGYQDLPNPVFRYLQSVNELLSTLLNSDSPQQVLQFVPMEVLLKGALLDFLWDLNAAIAKRHLHFIIQREREEIINSLQLQN

SEQ ID NO: 11544 - protein, 474 aa, Homo sapiens
  Payload ID: 2279
  Gene Symbol: CAP1
  Gene Name: CAP, adenylate cyclase-associated protein 1 (yeast)
  Uniprot ID: Q01518
  ENSP ID: ENSP00000344832
MADMQNLVERLERAVGRLEAVSHTSDMHRGYADSPSKGAAPYVQAFDSLLAGPVAEYLKISKEIGGDVQKHAEMVHTGLKLERALLVTASQCQQPAENKLSDLLAPISEQIKEVITFREKNRGSKLFNHLSAVSESIQALGWVAMAPKPGPYVKEMNDAAMFYTNRVLKEYKDVDKKHVDWVKAYLSIWTELQAYIKEFHTTGLAWSKTGPVAKELSGLPSGPSAGSCPPPPPPCPPPPPVSTISCSYESASRSSLFAQINQGESITHALKHVSDDMKTHKNPALKAQSGPVRSGPKPFSAPKPQTSPSPKRATKKEPAVLELEGKKWRVENQENVSNLVIEDTELKQVAYIYKCVNTTLQIKGKINSITVDNCKKLGLVFDDVVGIVEIINSKDVKVQVMGKVPTISINKTDGCHAYLSKNSLDCEIVSAKSSEMNVLIPTEGGDFNEFPVPEQFKTLWNGQKLVTTVTEIAG

SEQ ID NO: 11545 - protein, 475 aa, Homo sapiens
  Payload ID: 2279
  Gene Symbol: CAP1
  Gene Name: CAP, adenylate cyclase-associated protein 1 (yeast)
  Uniprot ID: Q01518
  ENSP ID: ENSP00000361878
MADMQNLVERLERAVGRLEAVSHTSDMHRGYADSPSKAGAAPYVQAFDSLLAGPVAEYLKISKEIGGDVQKHAEMVHTGLKLERALLVTASQCQQPAENKLSDLLAPISEQIKEVITFREKNRGSKLFNHLSAVSESIQALGWVAMAPKPGPYVKEMNDAAMFYTNRVLKEYKDVDKKHVDWVKAYLSIWTELQAYIKEFHTTGLAWSKTGPVAKELSGLPSGPSAGSCPPPPPPCPPPPPVSTISCSYESASRSSLFAQINQGESITHALKHVSDDMKTHKNPALKAQSGPVRSGPKPFSAPKPQTSPSPKRATKKEPAVLELEGKKWRVENQENVSNLVIEDTELKQVAYIYKCVNTTLQIKGKINSITVDNCKKLGLVFDDVVGIVEIINSKDVKVQVMGKVPTISINKTDGCHAYLSKNSLDCEIVSAKSSEMNVLIPTEGGDFNEFPVPEQFKTLWNGQKLVTTVTEIAG

SEQ ID NO: 11546 - protein, 475 aa, Homo sapiens; identical to SEQ ID NO: 11545
  Payload ID: 2279
  Gene Symbol: CAP1
  Gene Name: CAP, adenylate cyclase-associated protein 1 (yeast)
  Uniprot ID: Q01518
  ENSP ID: ENSP00000361883

SEQ ID NO: 11547 - protein, 474 aa, Homo sapiens; identical to SEQ ID NO: 11544
  Payload ID: 2279
  Gene Symbol: CAP1
  Gene Name: CAP, adenylate cyclase-associated protein 1 (yeast)
  Uniprot ID: Q01518
  ENSP ID: ENSP00000361884

SEQ ID NO: 11548 - protein, 474 aa, Homo sapiens; identical to SEQ ID NO: 11544
  Payload ID: 2279
  Gene Symbol: CAP1
  Gene Name: CAP, adenylate cyclase-associated protein 1 (yeast)
  Uniprot ID: Q01518
  ENSP ID: ENSP00000361888

SEQ ID NO: 11549 - protein, 475 aa, Homo sapiens; identical to SEQ ID NO: 11545
  Payload ID: 2279
  Gene Symbol: CAP1
  Gene Name: CAP, adenylate cyclase-associated protein 1 (yeast)
  Uniprot ID: Q01518
  ENSP ID: ENSP00000361891

SEQ ID NO: 11550 - protein, 58 aa, Homo sapiens
  Payload ID: 2279
  Gene Symbol: CAP1
  Gene Name: CAP, adenylate cyclase-associated protein 1 (yeast)
  ENSP ID: ENSP00000389974
MADMQNLVERLERAVGRLEAVSHTSDMHRGYADSPSKAGAAPYVQAFDSLLAGPVAEY

SEQ ID NO: 11551 - protein, 174 aa, Homo sapiens
  Payload ID: 2279
  Gene Symbol: CAP1
  Gene Name: CAP, adenylate cyclase-associated protein 1 (yeast)
  ENSP ID: ENSP00000398475
MADMQNLVERLERAVGRLEAVSHTSDMHRGYADSPSKAGAAPYVQAFDSLLAGPVAEYLKISKEIGGDVQKHAEMVHTGLKLERALLVTASQCQQPAENKLSDLLAPISEQIKEVITFREKNRGSKLFNHLSAVSESIQALGWVAMAPKPGPYVKEMNDAAMFYTNRVLKEYKD

SEQ ID NO: 11552 - protein, 145 aa, Homo sapiens
  Payload ID: 2279
  Gene Symbol: CAP1
  Gene Name: CAP, adenylate cyclase-associated protein 1 (yeast)
  ENSP ID: ENSP00000398877
MADMQNLVERLERAVGRLEAVSHTSDMHRGYADSPSKAGAAPYVQAYIKEFHTTGLAWSKTGPVAKELSGLPSGPSAGSCPPPPPPCPPPPPVSTISCSYESASRSSLFAQINQGESITHALKHVSDDMKTHKNPALKAQSGPVR

SEQ ID NO: 11553 - protein, 176 aa, Homo sapiens
  Payload ID: 2279
  Gene Symbol: CAP1
  Gene Name: CAP, adenylate cyclase-associated protein 1 (yeast)
  ENSP ID: ENSP00000400943
MADMQNLVERLERAVGRLEAVSHTSDMHRGYADSPSKAGAAPYVQAFDSLLAGPVAEYLKISKEIGGDVQKHAEMVHTGLKLERALLVTASQCQQPAENKLSDLLAPISEQIKEVITFREKNRGSKLFNHLSAVSESIQALGWVAMAPKPGPYVKEMNDAAMFYTNRVLKEYKDVD

SEQ ID NO: 11554 - protein, 203 aa, Homo sapiens
  Payload ID: 2279
  Gene Symbol: CAP1
  Gene Name: CAP, adenylate cyclase-associated protein 1 (yeast)
  ENSP ID: ENSP00000403198
MADMQNLVERLERAVGRLEAVSHTSDMHRGYADSPSKAGAAPYVQAFDSLLAGPVAEYLKISKEIGGDVQKHAEMVHTGLKLERALLVTASQCQQPAENKLSDLLAPISEQIKEVITFREKNRGSKLFNHLSAVSESIQALGWVAMAPKPGPYVKEMNDAAMFYTNRVLKEYKDVDKKHVDWVKAYLSIWTELQAYIKEFHTT

SEQ ID NO: 11555 - protein, 208 aa, Homo sapiens
  Payload ID: 2279
  Gene Symbol: CAP1
  Gene Name: CAP, adenylate cyclase-associated protein 1 (yeast)
  ENSP ID: ENSP00000408561
MADMQNLVERLERAVGRLEAVSHTSDMHRGYADSPSKAGAAPYVQAFDSLLAGPVAEYLKISKEIGGDVQKHAEMVHTGLKLERALLVTASQCQQPAENKLSDLLAPISEQIKEVITFREKNRGSKLFNHLSAVSESIQALGWVAMAPKPGPYVKEMNDAAMFYTNRVLKEYKDVDKKHVDWVKAYLSIWTELQAYIKEFHTTGLAWS

SEQ ID NO: 11556 - protein, 179 aa, Homo sapiens
  Payload ID: 2279
  Gene Symbol: CAP1
  Gene Name: CAP, adenylate cyclase-associated protein 1 (yeast)
  ENSP ID: ENSP00000410586
MADMQNLVERLERAVGRLEAVSHTSDMHRGYADSPSKAGAAPYVQAFDSLLAGPVAEYLKISKEIGGDVQKHAEMVHTGLKLERALLVTASQCQQPAENKLSDLLAPISEQIKEVITFREKNRGSKLFNHLSAVSESIQALGWVAMAPKPGPYVKEMNDAAMFYTNRVLKEYKDVDKKH

SEQ ID NO: 11557 - protein, 262 aa, Homo sapiens
  Payload ID: 2279
  Gene Symbol: CAP1
  Gene Name: CAP, adenylate cyclase-associated protein 1 (yeast)
  ENSP ID: ENSP00000412859
MADMQNLVERLERAVGRLEAVSHTSDMHRGYADSPSKGAAPYVQAFDSLLAGPVAEYLKISKEIGGDVQKHAEMVHTGLKLERALLVTASQCQQPAENKLSDLLAPISEQIKEVITFREKNRGSKLFNHLSAVSESIQALGWVAMAPKPGPYVKEMNDAAMFYTNRVLKEYKDVDKKHVDWVKAYLSIWTELQAYIKEFHTTGLAWSKTGPVAKELSGLPSGPSAGSCPPPPPPCPPPPPVSTISCSYESASRSSLFAQINQ

SEQ ID NO: 11558 - protein, 201 aa, Homo sapiens
  Payload ID: 2279
  Gene Symbol: CAP1
  Gene Name: CAP, adenylate cyclase-associated protein 1 (yeast)
  ENSP ID: ENSP00000413383
MADMQNLVERLERAVGRLEAVSHTSDMHRGYADSPSKAGAAPYVQAFDSLLAGPVAEYLKISKEIGGDVQKHAEMVHTGLKLERALLVTASQCQQPAENKLSDLLAPISEQIKEVITFREKNRGSKLFNHLSAVSESIQALGWVAMAPKPGPYVKEMNDAAMFYTNRVLKEYKDVDKKHVDWVKAYLSIWTELQAYIKEFH

SEQ ID NO: 11559 - protein, 215 aa, Homo sapiens
  Payload ID: 2279
  Gene Symbol: CAP1
  Gene Name: CAP, adenylate cyclase-associated protein 1 (yeast)
  ENSP ID: ENSP00000413656
MADMQNLVERLERAVGRLEAVSHTSDMHRGYADSPSKAGAAPYVQAFDSLLAGPVAEYLKISKEIGGDVQKHAEMVHTGLKLERALLVTASQCQQPAENKLSDLLAPISEQIKEVITFREKNRGSKLFNHLSAVSESIQALGWVAMAPKPGPYVKEMNDAAMFYTNRVLKEYKDVDKKHVDWVKAYLSIWTELQAYIKEFHTTGLAWSKTGPVAK

SEQ ID NO: 11560 - protein, 477 aa, Homo sapiens
  Payload ID: 2280
  Gene Symbol: CAP2
  Gene Name: CAP, adenylate cyclase-associated protein, 2 (yeast)
  Uniprot ID: P40123
  ENSP ID: ENSP00000229922
MANMQGLVERLERAVSRLESLSAESHRPPGNCGEVNGVIAGVAPSVEAFDKLMDSMVAEFLKNSRILAGDVETHAEMVHSAFQAQRAFLLMASQYQQPHENDVAALLKPISEKIQEIQTFRERNRGSNMFNHLSAVSESIPALGWIAVSPKPGPYVKEMNDAATFYTNRVLKDYKHSDLRHVDWVKSYLNIWSELQAYIKEHHTTGLTWSKTGPVASTVSAFSVLSSGPGLPPPPPPLPPPGPPPLFENEGKKEESSPSRSALFAQLNQGEAITKGLRHVTDDQKTYKNPSLRAQGGQTQSPTKSHTPSPTSPKSYPSQKHAPVLELEGKKWRVEYQEDRNDLVISETELKQVAYIFKCEKSTIQIKGKVNSIIIDNCKKLGLVFDNVVGIVEVINSQDIQIQVMGRVPTISINKTEGCHIYLSEDALDCEIVSAKSSEMNILIPQDGDYREFPIPEQFKTAWDGSKLITEPAEIMA

SEQ ID NO: 11561 - protein, 451 aa, Homo sapiens
  Payload ID: 2280
  Gene Symbol: CAP2
  Gene Name: CAP, adenylate cyclase-associated protein, 2 (yeast)
  ENSP ID: ENSP00000368275
MANMQGLVERLERAVSRLESLSAESHRPPGNCGEVNGVIAGVAPSVEAFDKLMDSMVAEFLKNSRILAGDVETHNDVAALLKPISEKIQEIQTFRERNRGSNMFNHLSAVSESIPALGWIAVSPKPGPYVKEMNDAATFYTNRVLKDYKHSDLRHVDWVKSYLNIWSELQAYIKEHHTTGLTWSKTGPVASTVSAFSVLSSGPGLPPPPPPLPPPGPPPLFENEGKKEESSPSRSALFAQLNQGEAITKGLRHVTDDQKTYKNPSLRAQGGQTQSPTKSHTPSPTSPKSYPSQKHAPVLELEGKKWRVEYQEDRNDLVISETELKQVAYIFKCEKSTIQIKGKVNSIIIDNCKKLGLVFDNVVGIVEVINSQDIQIQVMGRVPTISINKTEGCHIYLSEDALDCEIVSAKSSEMNILIPQDGDYREFPIPEQFKTAWDGSKLITEPAEIMA

SEQ ID NO: 11562 - protein, 217 aa, Homo sapiens
  Payload ID: 2280
  Gene Symbol: CAP2
  Gene Name: CAP, adenylate cyclase-associated protein, 2 (yeast)
  Uniprot ID: P40123
  ENSP ID: ENSP00000417208
MANMQGLVERLERAVSRLESLSAESHRPPGNCGEVNGVIAGVAPSVEAFDKLMDSMVAEFLKNSRILAGDVETHEYQEDRNDLVISETELKQVAYIFKCEKSTIQIKGKVNSIIIDNCKKLGLVFDNVVGIVEVINSQDIQIQVMGRVPTISINKTEGCHIYLSEDALDCEIVSAKSSEMNILIPQDGDYREFPIPEQFKTAWDGSKLITEPAEIMA

SEQ ID NO: 11563 - protein, 365 aa, Homo sapiens
  Payload ID: 2280
  Gene Symbol: CAP2
  Gene Name: CAP, adenylate cyclase-associated protein, 2 (yeast)
  ENSP ID: ENSP00000417705
MANMQGLVERLERAVSRLESLSAESHRPPGNCGEVNGVIAGVAPSVEAFDKLMDSMVAEFLKNSRILAGDVETHAEMVHSAFQAQRAFLLMASQYQQPHEGPVASTVSAFSVLSSGPGLPPPPPPLPPPGPPPLFENEGKKEESSPSRSALFAQLNQGEAITKGLRHVTDDQKTYKNPSLRAQGGQTQSPTKSHTPSPTSPKSYPSQKHAPVLELEGKKWRVEYQEDRNDLVISETELKQVAYIFKCEKSTIQIKGKVNSIIIDNCKKLGLVFDNVVGIVEVINSQDIQIQVMGRVPTISINKTEGCHIYLSEDALDCEIVSAKSSEMNILIPQDGDYREFPIPEQFKTAWDGSKLITEPAEIMA

SEQ ID NO: 11564 - protein, 413 aa, Homo sapiens
  Payload ID: 2280
  Gene Symbol: CAP2
  Gene Name: CAP, adenylate cyclase-associated protein, 2 (yeast)
  Uniprot ID: P40123
  ENSP ID: ENSP00000418604
MANMQGLVERLERAVSRLESLSAESHRPPGNCGEVNGVIAGVAPSVEAFDKLMDSMVAEFLKNSRILAGDVETHAEMVHSAFQAQRAFLLMASQYQQPHENDVAALLKPISEKIQEIQTFRERNRGSNMFNHLSAVSESIPALGWIAVGPVASTVSAFSVLSSGPGLPPPPPPLPPPGPPPLFENEGKKEESSPSRSALFAQLNQGEAITKGLRHVTDDQKTYKNPSLRAQGGQTQSPTKSHTPSPTSPKSYPSQKHAPVLELEGKKWRVEYQEDRNDLVISETELKQVAYIFKCEKSTIQIKGKVNSIIIDNCKKLGLVFDNVVGIVEVINSQDIQIQVMGRVPTISINKTEGCHIYLSEDALDCEIVSAKSSEMNILIPQDGDYREFPIPEQFKTAWDGSKLITEPAEIMA

SEQ ID NO: 11565 - protein, 104 aa, Homo sapiens
  Payload ID: 2280
  Gene Symbol: CAP2
  Gene Name: CAP, adenylate cyclase-associated protein, 2 (yeast)
  ENSP ID: ENSP00000419906
MANMQGLVERLERAVSRLESLSAESHRPPGNCGEVNGVIAGVAPSVEAFDKLMDSMVAEFLKNSRILAGDVETHAEMVHSAFQAQRAFLLMASQYQQPHEANKF

SEQ ID NO: 11566 - protein, 194 aa, Homo sapiens
  Payload ID: 2280
  Gene Symbol: CAP2
  Gene Name: CAP, adenylate cyclase-associated protein, 2 (yeast)
  ENSP ID: ENSP00000420615
MANMQGLVERLERAVSRLESLSAESHRPPGNCGEVNGVIAGVAPSVEAFDKLMDSMVAEFLKNSRILAGDVETHNDVAALLKPISEKIQEIQTFRERNRGSNMFNHLSAVSESIPALGWIAVSPKPGPYVKEMNDAATFYTNRVLKDYKHSDLRHVDWVKSYLNIWSELQAYIKEHHTTGLTWSKTNEKRRRQR

SEQ ID NO: 11567 - protein, 394 aa, Homo sapiens
  Payload ID: 2280
  Gene Symbol: CAP2
  Gene Name: CAP, adenylate cyclase-associated protein, 2 (yeast)
  ENSP ID: ENSP00000482279
MANMQGLVERLERAVSRLESLSAESHRPPGNCGEVNGVIAGVAPSVEAFDKLMDSMVAEFLKNSRILAGDVETHAEMVHSAFQAQRAFLLMASQYQQPHENDVAALLKPISEKIQEIQTFRERNRGSNMFNHLSAVSESIPALGWIAVSPKPPPLPPPGPPPLFENEGKKEESSPSRSALFAQLNQGEAITKGLRHVTDDQKTYKNPSLRAQGGQTQSPTKSHTPSPTSPKSYPSQKHAPVLELEGKKWRVEYQEDRNDLVISETELKQVAYIFKCEKSTIQIKGKVNSIIIDNCKKLGLVFDNVVGIVEVINSQDIQIQVMGRVPTISINKTEGCHIYLSEDALDCEIVSAKSSEMNILIPQDGDYREFPIPEQFKTAWDGSKLITEPAEIMA

SEQ ID NO: 11568 - protein, 394 aa, Homo sapiens
  Payload ID: 2280
  Gene Symbol: CAP2
  Gene Name: CAP, adenylate cyclase-associated protein, 2 (yeast)
  ENSP ID: ENSP00000483435
MANMQGLVERLERAVSRLESLSAESHRPPGNCGEVNGVIAGVAPSVEAFDKLMDSMVAEFLKNSRILAGDVETHAEMVHSAFQAQRAFLLMASQYQQPHENDVAALLKPISEKIQEIQTFRERNRGSNMFNHLSAVSESIPALGWIAVPPPPPPLPPPGPPPLFENEGKKEESSPSRSALFAQLNQGEAITKGLRHVTDDQKTYKNPSLRAQGGQTQSPTKSHTPSPTSPKSYPSQKHAPVLELEGKKWRVEYQEDRNDLVISETELKQVAYIFKCEKSTIQIKGKVNSIIIDNCKKLGLVFDNVVGIVEVINSQDIQIQVMGRVPTISINKTEGCHIYLSEDALDCEIVSAKSSEMNILIPQDGDYREFPIPEQFKTAWDGSKLITEPAEIMA

SEQ ID NO: 11569 - protein, 1427 aa, Homo sapiens
  Payload ID: 2281
  Gene Symbol: CLIP1
  Gene Name: CAP-GLY domain containing linker protein 1
  Uniprot ID: P30622
  ENSP ID: ENSP00000303585
MSMLKPSGLKAPTKILKPGSTALKTPTAVVAPVEKTISSEKASSTPSSETQEEFVDDFRVGERVWVNGNKPGFIQFLGETQFAPGQWAGIVLDEPIGKNDGSVAGVRYFQCEPLKGIFTRPSKLTRKVQAEDEANGLQTTPASRATSPLCTSTASMVSSSPSTPSNIPQKPSQPAAKEPSATPPISNLTKTASESISNLSEAGSIKKGERELKIGDRVLVGGTKAGVVRFLGETDFAKGEWCGVELDEPLGKNDGAVAGTRYFQCQPKYGLFAPVHKVTKIGFPSTTPAKAKANAVRRVMATTSASLKRSPSASSLSSMSSVASSVSSRPSRTGLLTETSSRYARKISGTTALQEALKEKQQHIEQLLAERDLERAEVAKATSHVGEIEQELALARDGHDQHVLELEAKMDQLRTMVEAADREKVELLNQLEEEKRKVEDLQFRVEEESITKGDLETQTKLEHARIKELEQSLLFEKTKADKLQRELEDTRVATVSEKSRIMELEKDLALRVQEVAELRRRLESNKPAGDVDMSLSLLQEISSLQEKLEVTRTDHQREITSLKEHFGAREETHQKEIKALYTATEKLSKENESLKSKLEHANKENSDVIALWKSKLETAIASHQQAMEELKVSFSKGLGTETAEFAELKTQIEKMRLDYQHEIENLQNQQDSERAAHAKEMEALRAKLMKVIKEKENSLEAIRSKLDKAEDQHLVEMEDTLNKLQEAEIKVKELEVLQAKCNEQTKVIDNFTSQLKATEEKLLDLDALRKASSEGKSEMKKLRQQLEAAEKQIKHLEIEKNAESSKASSITRELQGRELKLTNLQENLSEVSQVKETLEKELQILKEKFAEASEEAVSVQRSMQETVNKLHQKEEQFNMLSSDLEKLRENLADMEAKFREKDEREEQLIKAKEKLENDIAEIMKMSGDNSSQLTKMNDELRLKERDVEELQLKLTKANENASFLQKSIEDMTVKAEQSQQEAAKKHEEEKKELERKLSDLEKKMETSHNQCQELKARYERATSETKTKHEEILQNLQKTLLDTEDKLKGAREENSGLLQELEELRKQADKAKAAQTAEDAMQIMEQMTKEKTETLASLEDTKQTNAKLQNELDTLKENNLKNVEELNKSKELLTVENQKMEEFRKEIETLKQAAAQKSQQLSALQEENVKLAEELGRSRDEVTSHQKLEEERSVLNNQLLEMKKRESKFIKDADEEKASLQKSISITSALLTEKDAELEKLRNEVTVLRGENASAKSLHSVVQTLESDKVKLELKVKNLELQLKENKRQLSSSSGNTDTQADEDERAQESQIDFLNSVIVDLQRKNQDLKMKVEMMSEAALNGNGDDLNNYDSDDQEKQSKKKPRLFCDICDCFDLHDTEDCPTQAQMSEDPPHSTHHGSRGEERPYCEICEMFGHWATNCNDDETF

SEQ ID NO: 11570 - protein, 1427 aa, Homo sapiens; identical to SEQ ID NO: 11569
  Payload ID: 2281
  Gene Symbol: CLIP1
  Gene Name: CAP-GLY domain containing linker protein 1
  Uniprot ID: P30622
  ENSP ID: ENSP00000351665

SEQ ID NO: 11571 - protein, 1316 aa, Homo sapiens
  Payload ID: 2281
  Gene Symbol: CLIP1
  Gene Name: CAP-GLY domain containing linker protein 1
  ENSP ID: ENSP00000355314
MSMLKPSGLKAPTKILKPGSTALKTPTAVVAPVEKTISSEKASSTPSSETQEEFVDDFRVGERVWVNGNKPGFIQFLGETQFAPGQWAGIVLDEPIGKNDGSVAGVRYFQCEPLKGIFTRPSKLTRKVQAEDEANGLQTTPASRATSPLCTSTASMVSSSPSTPSNIPQKPSQPAAKEPSATPPISNLTKTASESISNLSEAGSIKKGERELKIGDRVLVGGTKAGVVRFLGETDFAKGEWCGVELDEPLGKNDGAVAGTRYFQCQPKYGLFAPVHKVTKIGFPSTTPAKAKANAVRRVMATTSASLKRSPSASSLSSMSSVASSVSSRPSRTGLLTETSSRYARKISGTTALQEALKEKQQHIEQLLAERDLERAEVAKATSHVGEIEQELALARDGHDQHVLELEAKMDQLRTMVEAADREKVELLNQLEEEKRKVEDLQFRVEEESITKGDLEVATVSEKSRIMELEKDLALRVQEVAELRRRLESNKPAGDVDMSLSLLQEISSLQEKLEVTRTDHQREITSLKEHFGAREETHQKEIKALYTATEKLSKENESLKSKLEHANKENSDVIALWKSKLETAIASHQQAMEELKVSFSKGLGTETAEFAELKTQIEKMRLDYQHEIENLQNQQDSERAAHAKEMEALRAKLMKVIKEKENSLEAIRSKLDKAEDQHLVEMEDTLNKLQEAEIKASSITRELQGRELKLTNLQENLSEVSQVKETLEKELQILKEKFAEASEEAVSVQRSMQETVNKLHQKEEQFNMLSSDLEKLRENLADMEAKFREKDEREEQLIKAKEKLENDIAEIMKMSGDNSSQLTKMNDELRLKERDVEELQLKLTKANENASFLQKSIEDMTVKAEQSQQEAAKKHEEEKKELERKLSDLEKKMETSHNQCQELKARYERATSETKTKHEEILQNLQKTLLDTEDKLKGAREENSGLLQELEELRKQADKAKAAQTAEDAMQIMEQMTKEKTETLASLEDTKQTNAKLQNELDTLKENNLKNVEELNKSKELLTVENQKMEEFRKEIETLKQAAAQKSQQLSALQEENVKLAEELGRSRDEVTSHQKLEEERSVLNNQLLEMKKRESKFIKDADEEKASLQKSISITSALLTEKDAELEKLRNEVTVLRGENASAKSLHSVVQTLESDKVKLELKVKNLELQLKENKRQLSSSSGNTDTQADEDERAQESQIDFLNSVIVDLQRKNQDLKMKVEMMSEAALNGNGDDLNNYDSDDQEKQSKKKPRLFCDICDCFDLHDTEDCPTQAQMSEDPPHSTHHGSRGEERPYCEICEMFGHWATNCNDDETF

SEQ ID NO: 11572 - protein, 117 aa, Homo sapiens
  Payload ID: 2281
  Gene Symbol: CLIP1
  Gene Name: CAP-GLY domain containing linker protein 1
  ENSP ID: ENSP00000437617
MIDFLNSVIVDLQRKNQDLKMKVEMMSEAALNGNGDDLNNYDSDDQEKQSKKKPRLFCDICDCFDLHDTEDCPTQAQMSEDPPHSTHHGSRGEERPYCEICEMFGHWATNCNDDETF

SEQ ID NO: 11573 - protein, 803 aa, Homo sapiens
  Payload ID: 2281
  Gene Symbol: CLIP1
  Gene Name: CAP-GLY domain containing linker protein 1
  ENSP ID: ENSP00000437786
MSMLKPSGLKAPTKILKPGSTALKTPTAVVAPVEKTISSEKASSTPSSETQEEFVDDFRVGERVWVNGNKPGFIQFLGETQFAPGQWAGIVLDEPIGKNDGSVAGVRYFQCEPLKGIFTRPSKLTRKVQAEDEANGLQTTPASRATSPLCTSTASMVSSSPSTPSNIPQKPSQPAAKEPSATPPISNLTKTASESISNLSEAGSIKKGERELKIGDRVLVGGTKAGVVRFLGETDFAKGEWCGVELDEPLGKNDGAVAGTRYFQCQPKYGLFAPVHKVTKIGFPSTTPAKAKANAVRRVMATTSASLKRSPSASSLSSMSSVASSVSSRPSRTGLHVLELEAKMDQLRTMVEAADREKVELLNQLEEEKRKVEDLQFRVEEESITKGDLETQTKLEHARIKELEQSLLFEKTKADKLQRELEDTRVATVSEKSRIMELEKDLALRVQEVAELRRRLESNKPAGDVDMSLSLLQEISSLQEKLEVTRTDHQREITSLKEHFGAREETHQKEIKALYTATEKLSKENESLKSKLEHANKENSDVIALWKSKLETAIASHQQAMEELKVSFSKGLGTETAEFAELKTQIEKMRLDYQHEIENLQNQQDSERAAHAKEMEALRAKLMKVIKEKENSLEAIRSKLDKAEDQHLVEMEDTLNKLQEAEIKASSITRELQGRELKLTNLQENLSEVSQVKETLEKELQILKEKFAEASEEAVSVQRSMQETVNKLHQKEEQFNMLSSDLEKLRENLADMEAKFREKDEREEQLIKAKEKLENDIAEIMKMSGDNSSQLTKMNDELRLKER

SEQ ID NO: 11574 - protein, 1013 aa, Homo sapiens
  Payload ID: 2281
  Gene Symbol: CLIP1
  Gene Name: CAP-GLY domain containing linker protein 1
  ENSP ID: ENSP00000438743
MATTSASLKRSPSASSLSSMSSVASSVSSRPSRTGLLTETSSRYARKISGTTALQEALKEKQQHIEQLLAERDLERAEVAKATSHVGEIEQELALARDGHDQHVLELEAKMDQLRTMVEAADREKVELLNQLEEEKRKVEDLQFRVEEESITKGDLETQTKLEHARIKELEQSLLFEKTKADKLQRELEDTRVATVSEKSRIMELEKDLALRVQEVAELRRRLESNKPAGDVDMSLSLLQEISSLQEKLEVTRTDHQREITSLKEHFGAREETHQKEIKALYTATEKLSKENESLKSKLEHANKENSDVIALWKSKLETAIASHQQAMEELKVSFSKGLGTETAEFAELKTQIEKMRLDYQHEIENLQNQQDSERAAHAKEMEALRAKLMKVIKEKENSLEAIRSKLDKAEDQHLVEMEDTLNKLQEAEIKKEKFAEASEEAVSVQRSMQETVNKLHQKEEQFNMLSSDLEKLRENLADMEAKFREKDEREEQLIKAKEKLENDIAEIMKMSGDNSSQLTKMNDELRLKERDVEELQLKLTKANENASFLQKSIEDMTVKAEQSQQEAAKKHEEEKKELERKLSDLEKKMETSHNQCQELKARYERATSETKTKHEEILQNLQKTLLDTEDKLKGAREENSGLLQELEELRKQADKAKAAQTAEDAMQIMEQMTKEKTETLASLEDTKQTNAKLQNELDTLKENNLKNVEELNKSKELLTVENQKMEEFRKEIETLKQAAAQKSQQLSALQEENVKLAEELGRSRDEVTSHQKLEEERSVLNNQLLEMKKRESKFIKDADEEKASLQKSISITSALLTEKDAELEKLRNEVTVLRGENASAKSLHSVVQTLESDKVKLELKVKNLELQLKENKRQLSSSSGNTDTQADEDERAQESQIDFLNSVIVDLQRKNQDLKMKVEMMSEAALNGNGDDLNNYDSDDQEKQSKKKPRLFCDICDCFDLHDTEDCPTQAQMSEDPPHSTHHGSRGEERPYCEICEMFGHWATNCNDDETF

SEQ ID NO: 11575 - protein, 1438 aa, Homo sapiens
  Payload ID: 2281
  Gene Symbol: CLIP1
  Gene Name: CAP-GLY domain containing linker protein 1
  Uniprot ID: P30622
  ENSP ID: ENSP00000439093
MSMLKPSGLKAPTKILKPGSTALKTPTAVVAPVEKTISSEKASSTPSSETQEEFVDDFRVGERVWVNGNKPGFIQFLGETQFAPGQWAGIVLDEPIGKNDGSVAGVRYFQCEPLKGIFTRPSKLTRKVQAEDEANGLQTTPASRATSPLCTSTASMVSSSPSTPSNIPQKPSQPAAKEPSATPPISNLTKTASESISNLSEAGSIKKGERELKIGDRVLVGGTKAGVVRFLGETDFAKGEWCGVELDEPLGKNDGAVAGTRYFQCQPKYGLFAPVHKVTKIGFPSTTPAKAKANAVRRVMATTSASLKRSPSASSLSSMSSVASSVSSRPSRTGLLTETSSRYARKISGTTALQEALKEKQQHIEQLLAERDLERAEVAKATSHVGEIEQELALARDGHDQHVLELEAKMDQLRTMVEAADREKVELLNQLEEEKRKVEDLQFRVEEESITKGDLEQKSQISEDPENTQTKLEHARIKELEQSLLFEKTKADKLQRELEDTRVATVSEKSRIMELEKDLALRVQEVAELRRRLESNKPAGDVDMSLSLLQEISSLQEKLEVTRTDHQREITSLKEHFGAREETHQKEIKALYTATEKLSKENESLKSKLEHANKENSDVIALWKSKLETAIASHQQAMEELKVSFSKGLGTETAEFAELKTQIEKMRLDYQHEIENLQNQQDSERAAHAKEMEALRAKLMKVIKEKENSLEAIRSKLDKAEDQHLVEMEDTLNKLQEAEIKVKELEVLQAKCNEQTKVIDNFTSQLKATEEKLLDLDALRKASSEGKSEMKKLRQQLEAAEKQIKHLEIEKNAESSKASSITRELQGRELKLTNLQENLSEVSQVKETLEKELQILKEKFAEASEEAVSVQRSMQETVNKLHQKEEQFNMLSSDLEKLRENLADMEAKFREKDEREEQLIKAKEKLENDIAEIMKMSGDNSSQLTKMNDELRLKERDVEELQLKLTKANENASFLQKSIEDMTVKAEQSQQEAAKKHEEEKKELERKLSDLEKKMETSHNQCQELKARYERATSETKTKHEEILQNLQKTLLDTEDKLKGAREENSGLLQELEELRKQADKAKAAQTAEDAMQIMEQMTKEKTETLASLEDTKQTNAKLQNELDTLKENNLKNVEELNKSKELLTVENQKMEEFRKEIETLKQAAAQKSQQLSALQEENVKLAEELGRSRDEVTSHQKLEEERSVLNNQLLEMKKRESKFIKDADEEKASLQKSISITSALLTEKDAELEKLRNEVTVLRGENASAKSLHSVVQTLESDKVKLELKVKNLELQLKENKRQLSSSSGNTDTQADEDERAQESQIDFLNSVIVDLQRKNQDLKMKVEMMSEAALNGNGDDLNNYDSDDQEKQSKKKPRLFCDICDCFDLHDTEDCPTQAQMSEDPPHSTHHGSRGEERPYCEICEMFGHWATNCNDDETF

SEQ ID NO: 11576 - protein, 108 aa, Homo sapiens
  Payload ID: 2281
  Gene Symbol: CLIP1
  Gene Name: CAP-GLY domain containing linker protein 1
  ENSP ID: ENSP00000439472
MSMLKPSGLKAPTKILKPGSTALKTPTAVVAPVEKTISSEKASSTPSSETQEEFVDDFRVGERVWVNGNKPGFIQFLGETQFAPGQWAGIVLDEPIGKNDGSVAGVRY

SEQ ID NO: 11577 - protein, 428 aa, Homo sapiens
  Payload ID: 2281
  Gene Symbol: CLIP1
  Gene Name: CAP-GLY domain containing linker protein 1
  ENSP ID: ENSP00000441409
MSMLKPSGLKAPTKILKPGSTALKTPTAVVAPVEKTISSEKASSTPSSETQEEFVDDFRVGERVWVNGNKPGFIQFLGETQFAPGQWAGIVLDEPIGKNDGSVAGVRYFQCEPLKGIFTRPSKLTRKVQAEDEANGLQTTPASRATSPLCTSTASMVSSSPSTPSNIPQKPSQPAAKEPSATPPISNLTKTASESISNLSEAGSIKKGERELKIGDRVLVGGTKAGVVRFLGETDFAKGEWCGVELDEPLGKNDGAVAGTRYFQCQPKYGLFAPVHKVTKIGFPSTTPAKAKANAVRRVMATTSASLKRSPSASSLSSMSSVASSVSSRPSRTGLHVLELEAKMDQLRTMVEAADREKVELLNQLEEEKRKVEDLQFRVEEESITKGDLEQKSQISEDPENVRGHLTVWIFPLLTKIDHRLKCLLIYS

SEQ ID NO: 11578 - protein, 83 aa, Homo sapiens
  Payload ID: 2281
  Gene Symbol: CLIP1
  Gene Name: CAP-GLY domain containing linker protein 1
  ENSP ID: ENSP00000445387
MSMLKPSGLKAPTKILKPGSTALKTPTAVVAPVEKTISSEKASSTPSSETQEEFVDDFRVGERVWVNGNKPGFIQFLGETQFA

SEQ ID NO: 11579 - protein, 1392 aa, Homo sapiens
  Payload ID: 2281
  Gene Symbol: CLIP1
  Gene Name: CAP-GLY domain containing linker protein 1
  Uniprot ID: P30622
  ENSP ID: ENSP00000445531
MSMLKPSGLKAPTKILKPGSTALKTPTAVVAPVEKTISSEKASSTPSSETQEEFVDDFRVGERVWVNGNKPGFIQFLGETQFAPGQWAGIVLDEPIGKNDGSVAGVRYFQCEPLKGIFTRPSKLTRKVQAEDEANGLQTTPASRATSPLCTSTASMVSSSPSTPSNIPQKPSQPAAKEPSATPPISNLTKTASESISNLSEAGSIKKGERELKIGDRVLVGGTKAGVVRFLGETDFAKGEWCGVELDEPLGKNDGAVAGTRYFQCQPKYGLFAPVHKVTKIGFPSTTPAKAKANAVRRVMATTSASLKRSPSASSLSSMSSVASSVSSRPSRTGLLTETSSRYARKISGTTALQEALKEKQQHIEQLLAERDLERAEVAKATSHVGEIEQELALARDGHDQHVLELEAKMDQLRTMVEAADREKVELLNQLEEEKRKVEDLQFRVEEESITKGDLEVATVSEKSRIMELEKDLALRVQEVAELRRRLESNKPAGDVDMSLSLLQEISSLQEKLEVTRTDHQREITSLKEHFGAREETHQKEIKALYTATEKLSKENESLKSKLEHANKENSDVIALWKSKLETAIASHQQAMEELKVSFSKGLGTETAEFAELKTQIEKMRLDYQHEIENLQNQQDSERAAHAKEMEALRAKLMKVIKEKENSLEAIRSKLDKAEDQHLVEMEDTLNKLQEAEIKVKELEVLQAKCNEQTKVIDNFTSQLKATEEKLLDLDALRKASSEGKSEMKKLRQQLEAAEKQIKHLEIEKNAESSKASSITRELQGRELKLTNLQENLSEVSQVKETLEKELQILKEKFAEASEEAVSVQRSMQETVNKLHQKEEQFNMLSSDLEKLRENLADMEAKFREKDEREEQLIKAKEKLENDIAEIMKMSGDNSSQLTKMNDELRLKERDVEELQLKLTKANENASFLQKSIEDMTVKAEQSQQEAAKKHEEEKKELERKLSDLEKKMETSHNQCQELKARYERATSETKTKHEEILQNLQKTLLDTEDKLKGAREENSGLLQELEELRKQADKAKAAQTAEDAMQIMEQMTKEKTETLASLEDTKQTNAKLQNELDTLKENNLKNVEELNKSKELLTVENQKMEEFRKEIETLKQAAAQKSQQLSALQEENVKLAEELGRSRDEVTSHQKLEEERSVLNNQLLEMKKRESKFIKDADEEKASLQKSISITSALLTEKDAELEKLRNEVTVLRGENASAKSLHSVVQTLESDKVKLELKVKNLELQLKENKRQLSSSSGNTDTQADEDERAQESQIDFLNSVIVDLQRKNQDLKMKVEMMSEAALNGNGDDLNNYDSDDQEKQSKKKPRLFCDICDCFDLHDTEDCPTQAQMSEDPPHSTHHGSRGEERPYCEICEMFGHWATNCNDDETF

SEQ ID NO: 11580 - protein, 350 aa, Homo sapiens
  Payload ID: 2281
  Gene Symbol: CLIP1
  Gene Name: CAP-GLY domain containing linker protein 1
  ENSP ID: ENSP00000446379
MSMLKPSGLKAPTKILKPGSTALKTPTAVVAPVEKTISSEKASSTPSSETQEEFVDDFRVGERVWVNGNKPGFIQFLGETQFAPGQWAGIVLDEPIGKNDGSVAGVRYFQCEPLKGIFTRPSKLTRKVQAEDEANGLQTTPASRATSPLCTSTASMVSSSPSTPSNIPQKPSQPAAKEPSATPPISNLTKTASESISNLSEAGSIKKGERELKIGDRVLVGGTKAGVVRFLGETDFAKGEWCGVELDEPLGKNDGAVAGTRYFQCQPKYGLFAPVHKVTKIGFPSTTPAKAKANAVRRVMATTSASLKRSPSASSLSSMSSVASSVSSRPSRTGLVRPLSHYLPPLPRQD

SEQ ID NO: 11581 - protein, 1438 aa, Homo sapiens; identical to SEQ ID NO: 11575
  Payload ID: 2281
  Gene Symbol: CLIP1
  Gene Name: CAP-GLY domain containing linker protein 1
  Uniprot ID: P30622
  ENSP ID: ENSP00000479322

SEQ ID NO: 11582 - protein, 1046 aa, Homo sapiens
  Payload ID: 2282
  Gene Symbol: CLIP2
  Gene Name: CAP-GLY domain containing linker protein 2
  Uniprot ID: Q9UDT6
  ENSP ID: ENSP00000223398
MQKPSGLKPPGRGGKHSSPMGRTSTGSASSSAAVAASSKEGSPLHKQSSGPSSSPAAAAAPEKPGPKAAEVGDDFLGDFVVGERVWVNGVKPGVVQYLGETQFAPGQWAGVVLDDPVGKNDGAVGGVRYFECPALQGIFTRPSKLTRQPTAEGSGSDAHSVESLTAQNLSLHSGTATPPLTSRVIPLRESVLNSSVKTGNESGSNLSDSGSVKRGEKDLRLGDRVLVGGTKTGVVRYVGETDFAKGEWCGVELDEPLGKNDGAVAGTRYFQCPPKFGLFAPIHKVIRIGFPSTSPAKAKKTKRMAMGVSALTHSPSSSSISSVSSVASSVGGRPSRSGLLTETSSRYARKISGTTALQEALKEKQQHIEQLLAERDLERAEVAKATSHICEVEKEIALLKAQHEQYVAEAEEKLQRARLLVESVRKEKVDLSNQLEEERRKVEDLQFRVEEESITKGDLETQTQLEHARIGELEQSLLLEKAQAERLLRELADNRLTTVAEKSRVLQLEEELTLRRGEIEELQQCLLHSGPPPPDHPDAAEILRLRERLLSASKEHQRESGVLRDKYEKALKAYQAEVDKLRAANEKYAQEVAGLKDKVQQATSENMGLMDNWKSKLDSLASDHQKSLEDLKATLNSGPGAQQKEIGELKAVMEGIKMEHQLELGNLQAKHDLETAMHVKEKEALREKLQEAQEELAGLQRHWRAQLEVQASQHRLELQEAQDQRRDAELRVHELEKLDVEYRGQAQAIEFLKEQISLAEKKMLDYERLQRAEAQGKQEVESLREKLLVAENRLQAVEALCSSQHTHMIESNDISEETIRTKETVEGLQDKLNKRDKEVTALTSQTEMLRAQVSALESKCKSGEKKVDALLKEKRRLEAELETVSRKTHDASGQLVLISQELLRKERSLNELRVLLLEANRHSPGPERDLSREVHKAEWRIKEQKLKDDIRGLREKLTGLDKEKSLSDQRRYSLIDRSSAPELLRLQHQLMSTEDALRDALDQAQQVEKLMEAMRSCPDKAQTIGNSGSANGIHQQDKAQKQEDKH

SEQ ID NO: 11583 - protein, 1011 aa, Homo sapiens
  Payload ID: 2282
  Gene Symbol: CLIP2
  Gene Name: CAP-GLY domain containing linker protein 2
  Uniprot ID: Q9UDT6
  ENSP ID: ENSP00000355151
MQKPSGLKPPGRGGKHSSPMGRTSTGSASSSAAVAASSKEGSPLHKQSSGPSSSPAAAAAPEKPGPKAAEVGDDFLGDFVVGERVWVNGVKPGVVQYLGETQFAPGQWAGVVLDDPVGKNDGAVGGVRYFECPALQGIFTRPSKLTRQPTAEGSGSDAHSVESLTAQNLSLHSGTATPPLTSRVIPLRESVLNSSVKTGNESGSNLSDSGSVKRGEKDLRLGDRVLVGGTKTGVVRYVGETDFAKGEWCGVELDEPLGKNDGAVAGTRYFQCPPKFGLFAPIHKVIRIGFPSTSPAKAKKTKRMAMGVSALTHSPSSSSISSVSSVASSVGGRPSRSGLLTETSSRYARKISGTTALQEALKEKQQHIEQLLAERDLERAEVAKATSHICEVEKEIALLKAQHEQYVAEAEEKLQRARLLVESVRKEKVDLSNQLEEERRKVEDLQFRVEEESITKGDLELTTVAEKSRVLQLEEELTLRRGEIEELQQCLLHSGPPPPDHPDAAEILRLRERLLSASKEHQRESGVLRDKYEKALKAYQAEVDKLRAANEKYAQEVAGLKDKVQQATSENMGLMDNWKSKLDSLASDHQKSLEDLKATLNSGPGAQQKEIGELKAVMEGIKMEHQLELGNLQAKHDLETAMHVKEKEALREKLQEAQEELAGLQRHWRAQLEVQASQHRLELQEAQDQRRDAELRVHELEKLDVEYRGQAQAIEFLKEQISLAEKKMLDYERLQRAEAQGKQEVESLREKLLVAENRLQAVEALCSSQHTHMIESNDISEETIRTKETVEGLQDKLNKRDKEVTALTSQTEMLRAQVSALESKCKSGEKKVDALLKEKRRLEAELETVSRKTHDASGQLVLISQELLRKERSLNELRVLLLEANRHSPGPERDLSREVHKAEWRIKEQKLKDDIRGLREKLTGLDKEKSLSDQRRYSLIDRSSAPELLRLQHQLMSTEDALRDALDQAQQVEKLMEAMRSCPDKAQTIGNSGSANGIHQQDKAQKQEDKH

SEQ ID NO: 11584 - protein, 1046 aa, Homo sapiens; identical to SEQ ID NO: 11582
  Payload ID: 2282
  Gene Symbol: CLIP2
  Gene Name: CAP-GLY domain containing linker protein 2
  Uniprot ID: Q9UDT6
  ENSP ID: ENSP00000378500

SEQ ID NO: 11585 - protein, 187 aa, Homo sapiens
  Payload ID: 2282
  Gene Symbol: CLIP2
  Gene Name: CAP-GLY domain containing linker protein 2
  ENSP ID: ENSP00000417597
  MOD_RES (1)..(1): Any amino acid
XYERLQRAEAQGKQEVESLREKLLVAENRLQAVEALCSSQHTHMIESNDISEETIRTKETVEGAVLASLYPLSRNILCRPAGQAEQEGQRGDSLDLPDRDAQGPTLESKCKSGEKKVDALLKEKRRLEAELETVSRKTHDASGQLVLISQELLRKERSLNELRVLLLEANRHSPGPERDLSREVHKA

SEQ ID NO: 11586 - protein, 28 aa, Homo sapiens
  Payload ID: 2282
  Gene Symbol: CLIP2
  Gene Name: CAP-GLY domain containing linker protein 2
  ENSP ID: ENSP00000419938
  MOD_RES (1)..(1): Any amino acid
XDALDQAQQVEKLMEAMRSCPDKAQDKH

SEQ ID NO: 11587 - protein, 547 aa, Homo sapiens
  Payload ID: 2283
  Gene Symbol: CLIP3
  Gene Name: CAP-GLY domain containing linker protein 3
  Uniprot ID: Q96DZ5
  ENSP ID: ENSP00000353732
MTKTDPAPMAPPPRGEEEEEEEEDEPVPEAPSPTQERRQKPVVHPSAPAPLPKDYAFTFFDPNDPACQEILFDPQTTIPELFAIVRQWVPQVQHKIDVIGNEILRRGCHVNDRDGLTDMTLLHYACKAGAHGVGDPAAAVRLSQQLLALGADVTLRSRWTNMNALHYAAYFDVPDLVRVLLKGARPRVVNSTCSDFNHGSALHIAASSLCLGAAKCLLEHGANPALRNRKGQVPAEVVPDPMDMSLDKAEAALVAKELRTLLEEAVPLSCALPKVTLPNYDNVPGNLMLSALGLRLGDRVLLDGQKTGTLRFCGTTEFASGQWVGVELDEPEGKNDGSVGGVRYFICPPKQGLFASVSKISKAVDAPPSSVTSTPRTPRMDFSRVTGKGRREHKGKKKTPSSPSLGSLQQRDGAKAEVGDQVLVAGQKQGIVRFYGKTDFAPGYWYGIELDQPTGKHDGSVFGVRYFTCPPRHGVFAPASRIQRIGGSTDSPGDSVGAKKVHQVTMTQPKRTFTTVRTPKDIASENSISRLLFCCWFPWMLRAEMQS

SEQ ID NO: 11588 - protein, 133 aa, Homo sapiens
  Payload ID: 2283
  Gene Symbol: CLIP3
  Gene Name: CAP-GLY domain containing linker protein 3
  ENSP ID: ENSP00000466026
MTKTDPAPMAPPPRGEEEEEEEEDEPVPEAPSPTQERRQKPVVHPSAPAPLPKDYAFTFFDPNDPACQEILFDPQTTIPELFAIVRQWVPQVQHKIDVIGNEILRRGCHVNDRDGLTDMTLLHYACKAGAHGV

SEQ ID NO: 11589 - protein, 547 aa, Homo sapiens; identical to SEQ ID NO: 11587
  Payload ID: 2283
  Gene Symbol: CLIP3
  Gene Name: CAP-GLY domain containing linker protein 3
  Uniprot ID: Q96DZ5
  ENSP ID: ENSP00000466832

SEQ ID NO: 11590 - protein, 133 aa, Homo sapiens; identical to SEQ ID NO: 11588
  Payload ID: 2283
  Gene Symbol: CLIP3
  Gene Name: CAP-GLY domain containing linker protein 3
  ENSP ID: ENSP00000468689

SEQ ID NO: 11591 - protein, 705 aa, Homo sapiens
  Payload ID: 2284
  Gene Symbol: CLIP4
  Gene Name: CAP-GLY domain containing linker protein family, member 4
  Uniprot ID: Q8N3C7
  ENSP ID: ENSP00000327009
MTIEDLPDFPLEGNPLFGRYPFIFSASDTPVIFSISAAPMPSDCEFSFFDPNDASCQEILFDPKTSVSELFAILRQWVPQVQQNIDIIGNEILKRGCNVNDRDGLTDMTLLHYTCKSGAHGIGDVETAVKFATQLIDLGADISLRSRWTNMNALHYAAYFDVPELIRVILKTSKPKDVDATCSDFNFGTALHIAAYNLCAGAVKCLLEQGANPAFRNDKGQIPADVVPDPVDMPLEMADAAATAKEIKQMLLDAVPLSCNISKAMLPNYDHVTGKAMLTSLGLKLGDRVVIAGQKVGTLRFCGTTEFASGQWAGIELDEPEGKNNGSVGKVQYFKCAPKYGIFAPLSKISKAKGRRKNITHTPSTKAAVPLIRSQKIDVAHVTSKVNTGLMTSKKDSASESTLSLPPGEELKTVTEKDVALLGSVSSCSSTSSLEHRQSYPKKQNAISSNKKTMSKSPSLSSRASAGLNSSATSTANNSRCEGELRLGERVLVVGQRLGTIRFFGTTNFAPGYWYGIELEKPHGKNDGSVGGVQYFSCSPRYGIFAPPSRVQRVTDSLDTLSEISSNKQNHSYPGFRRSFSTTSASSQKEINRRNAFSKSKAALRRSWSSTPTAGGIEGSVKLHEGSQVLLTSSNEMGTVRYVGPTDFASGIWLGLELRSAKGKNDGSVGDKRYFTCKPNHGVLVRPSRVTYRGINGSKLVDENC

SEQ ID NO: 11592 - protein, 599 aa, Homo sapiens
  Payload ID: 2284
  Gene Symbol: CLIP4
  Gene Name: CAP-GLY domain containing linker protein family, member 4
  Uniprot ID: Q8N3C7
  ENSP ID: ENSP00000384242
MTIEDLPDFPLEGNPLFGRYPFIFSASDTPVIFSISAAPMPSDCEFSFFDPNDASCQEILFDPKTSVSELFAILRQWVPQVQQNIDIIGNEILKRGCNVNDRDGLTDMTLLHYTCKSGAHGIGDVETAVKFATQLIDLGADISLRSRWTNMNALHYAAYFDVPELIRVILKTSKPKDVDATCSDFNFGTALHIAAYNLCAGAVKCLLEQGANPAFRNDKGQIPADVVPDPVDMPLEMADAAATAKEIKQMLLDAVPLSCNISKAMLPNYDHVTGKAMLTSLGLKLGDRVVIAGQKVGTLRFCGTTEFASGQWAGIELDEPEGKNNGSVGKVQYFKCAPKYGIFAPLSKISKAKGRRKNITHTPSTKAAVPLIRSQKIDVAHVTSKVNTGLMTSKKDSASESTLSLPPGEELKTVTEKDVALLGSVSSCSSTSSLEHRQSYPKKQNAISSNKKTMSKSPSLSSRASAGLNSSATSTANNSRCEGELRLGERVLVVGQRLGTIRFFGTTNFAPGYWYGIELEKPHGKNDGSVGGVQYFSCSPRYGIFAPPSRVQRVTDSLDTLSEISSNKQNHSYPGFRRSFSTTSASSQKEINRRNAFSK

SEQ ID NO: 11593 - protein, 571 aa, Homo sapiens
  Payload ID: 2284
  Gene Symbol: CLIP4
  Gene Name: CAP-GLY domain containing linker protein family, member 4
  ENSP ID: ENSP00000385148
MTLLHYTCKSGAHGIGDVETAVKFATQLIDLGADISLRSRWTNMNALHYAAYFDVPELIRVILKTSKPKDVDATCSDFNFGTALHIAAYNLCAGAVKCLLEQGANPAFRNDKGQIPADVVPDPVDMPLEMADAAATAKEIKQMLLDAVPLSCNISKAMLPNYDHVTGKAMLTSLGLKLGDRVVIAGQKVGTLRFCGTTEFASGQWAGIELDEPEGKNNGSVGKVQYFKCAPKYGIFAPLSKISKAKGRRKNITHTPSTKAAVPLIRSQKIDVAHVTSKVNTGLMTSKKDSASESTLSLPPGEELKTVTEKDVALLGSVSSCSSTSSLEHRQSYPKKQNAISSNKKTMSKSPSLSSRASAGLNSSATSTANNSRCEGELRLGERVLVVGQRLGTIRFFGTTNFAPGYWYGIELEKPHGKNDGSVGGVQYFSCSPRYGIFAPPSRVQRVTDSLDTLSEISSNKQNHSYPGFRRSFSTTSASSQKEINRRNAFSKSKAALRRSWSSTPTAGGIEGSVKLHEGSQVLLTSSNEMGTVSMFRITGMLVLLFHATTQEPSAAMKLAKSNCVFFRDSF

SEQ ID NO: 11594 - protein, 705 aa, Homo sapiens; identical to SEQ ID NO: 11591
  Payload ID: 2284
  Gene Symbol: CLIP4
  Gene Name: CAP-GLY domain containing linker protein family, member 4
  Uniprot ID: Q8N3C7
  ENSP ID: ENSP00000385594

SEQ ID NO: 11595 - protein, 93 aa, Homo sapiens
  Payload ID: 2284
  Gene Symbol: CLIP4
  Gene Name: CAP-GLY domain containing linker protein family, member 4
  ENSP ID: ENSP00000392296
MTLLHYTCKSGAHGIGDVETAVKFATQLIDLGADISLRSRWTNMNALHYAAYFDVPELIRVILKTSKPKDVDATCSDFNFGTALHIAAYNLCA

SEQ ID NO: 11596 - protein, 214 aa, Homo sapiens
  Payload ID: 2284
  Gene Symbol: CLIP4
  Gene Name: CAP-GLY domain containing linker protein family, member 4
  ENSP ID: ENSP00000393354
MTIEDLPDFPLEGNPLFGRYPFIFSASDTPVIFSISAAPMPSDCEFSFFDPNDASCQEILFDPKTSVSELFAILRQWVPQVQQNIDIIGNEILKRGCNVNDRDGLTDMTLLHYTCKSGAHGIGDVETAVKFATQLIDLGADISLRSRWTNMNALHYAAYFDVPELIRVILKTSKPKDVDATCSDFNFGTALHIAAYNLCAGAVKCLLEQGANPA

SEQ ID NO: 11597 - protein, 97 aa, Homo sapiens
  Payload ID: 2284
  Gene Symbol: CLIP4
  Gene Name: CAP-GLY domain containing linker protein family, member 4
  ENSP ID: ENSP00000399029
MTIEDLPDFPLEGNPLFGRYPFIFSASDTPVIFSISAAPMPSDCEFSFFDPNDASCQEILFDPKTSVSELFAILRQWVPQVQQNIDIIGNEVMWKQL

SEQ ID NO: 11598 - protein, 495 aa, Homo sapiens
  Payload ID: 2284
  Gene Symbol: CLIP4
  Gene Name: CAP-GLY domain containing linker protein family, member 4
  ENSP ID: ENSP00000414417
MTIEDLPDFPLEGNPLFGRYPFIFSASDTPVIFSISAAPMPSDCEFSFFDPNDASCQEILFDPKTSVSELFAILRQWVPQVQQNIDIIGNEILKRGCNVNDRDGLTDMTLLHYTCKSGAHGIGDVETAVKFATQLIDLGADISLRSRWTNMNALHYAAYFDVPELIRVILKTSKPKDVDATCSDFNFGTALHIAAYNLCAGAVKCLLEQGANPAFRNDKGQIPADVVPDPVDMPLEMADAAATAKEIKQMLLDAVPLSCNISKAMLPNYDHVTGKAMLTSLGLKLGDRVVIAGQKVGTLRFCGTTEFASGQWAGIELDEPEGKNNGSVGKVQYFKCAPKYGIFAPLSKISKAKGRRKNITHTPSTKAAVPLIRSQKIDVAHVTSKVNTGLMTSKKDSASESTLSLPPGEELKTVTEKDVALLGSVSSCSSTSSLEHRQSYPKKQNAISSNKKTMSKSPSLSSRASAGIYGFFNQAFLVFFILVCLFEFLSNIYSK

SEQ ID NO: 11599 - protein, 1606 aa, Homo sapiens
  Payload ID: 2285
  Gene Symbol: CIC
  Gene Name: capicua transcriptional repressor
  ENSP ID: ENSP00000160740
MYSAHRPLMPASSAASRGLGMFVWTNVEPRSVAVFPWHSLVPFLAPSQPDPSVQPSEAQQPASHPVASNQSKEPAESAAVAHERPPGGTGSADPERPPGATCPESPGPGPPHPLGVVESGKGPPPTTEEEASGPPGEPRLDSETESDHDDAFLSIMSPEIQLPLPPGKRRTQSLSALPKERDSSSEKDGRSPNKREKDHIRRPMNAFMIFSKRHRALVHQRHPNQDNRTVSKILGEWWYALGPKEKQKYHDLAFQVKEAHFKAHPDWKWCNKDRKKSSSEAKPTSLGLAGGHKETRERSMSETGTAAAPGVSSELLSVAAQTLLSSDTKAPGSSSCGAERLHTVGGPGSARPRAFSHSGVHSLDGGEVDSQALQELTQMVSGPASYSGPKPSTQYGAPGPFAAPGEGGALAATGRPPLLPTRASRSQRAASEDMTSDEERMVICEEEGDDDVIADDGFGTTDIDLKCKERVTDSESGDSSGEDPEGNKGFGRKVFSPVIRSSFTHCRPPLDPEPPGPPDPPVAFGKGYGSAPSSSASSPASSSASAATSFSLGSGTFKAQESGQGSTAGPLRPPPPGAGGPATPSKATRFLPMDPATFRRKRPESVGGLEPPGPSVIAAPPSGGGNILQTLVLPPNKEEQEGGGARVPSAPAPSLAYGAPAAPLSRPAATMVTNVVRPVSSTPVPIASKPFPTSGRAEASPNDTAGARTEMGTGSRVPGGSPLGVSLVYSDKKSAAATSPAPHLVAGPLLGTVGKAPATVTNLLVGTPGYGAPAPPAVQFIAQGAPGGGTTAGSGAGAGSGPNGPVPLGILQPGALGKAGGITQVQYILPTLPQQLQVAPAPAPAPGTKAAAPSGPAPTTSIRFTLPPGTSTNGKVLAATAPTPGIPILQSVPSAPPPKAQSVSPVQAPPPGGSAQLLPGKVLVPLAAPSMSVRGGGAGQPLPLVSPPFSVPVQNGAQPPSKIIQLTPVPVSTPSGLVPPLSPATLPGPTSQPQKVLLPSSTRITYVQSAGGHALPLGTSPASSQAGTVTSYGPTSSVALGFTSLGPSGPAFVQPLLSGQAPLLAPGQVGVSPVPSPQLPPACAAPGGPVITAFYSGSPAPTSSAPLAQPSQAPPSLVYTVATSTTPPAATILPKGPPAPATATPAPTSPFPSATGSMTYSLVAPKAQRPSPKAPQKVKAAIASIPVGSFEAGASGRPGPAPRQPLEPGPVREPTAPESELEGQPTPPAPPPLPETWTPTARSSPPLPPPAEERTSAKGPETMASKFPSSSSDWRVPGQGLENRGEPPTPPSPAPAPAVAPGGSSESSSGRAAGDTPERKEAAGTGKKVKVRPPPLKKTFDSVDNRVLSEVDFEERFAELPEFRPEEVLPSPTLQSLATSPRAILGSYRKKRKNSTDLDSAPEDPTSPKRKMRRRSSCSSEPNTPKSAKCEGDIFTFDRTGTEAEDVLGELEYDKVPYSSLRRTLDQRRALVMQLFQDHGFFPSAQATAAFQARYADIFPSKVCLQLKIREVRQKIMQAATPTEQPPGAEAPLPVPPPTGTAAAPAPTPSPAGGPDPTSPSSDSGTAQAAPPLPPPPESGPGQPGWEGAPQPSPPPPGPSTAATGR

SEQ ID NO: 11600 - protein, 309 aa, Homo sapiens
  Payload ID: 2285
  Gene Symbol: CIC
  Gene Name: capicua transcriptional repressor
  ENSP ID: ENSP00000458543
SSSSDWRVPGQGLENRGEPPTPPSPAPAPAVAPGGSSESSSGRAAGDTPERKEAAGTGKKVKVRPPPLKKTFDSVDKVLSEVDFEERFAELPEFRPEEVLPSPTLQSLATSPRAILGSYRKKRKNSTDLDSAPEDPTSPKRKMRRRSSCSSEPNTPKSAKCEGDIFTFDRTEAEDVLGELEYDKVPYSSLRRTLDQRRALVMQLFQDHGFFPSAQATAAFQARYADIFPSKVCLQLKIREVRQKIMQAATPTEQPPGAEAPLPVPPPTGTAAAPAPTPSPAGGPDPTSPSSDSGTAQAAPPLPPPPESG

SEQ ID NO: 11601 - protein, 1608 aa, Homo sapiens
  Payload ID: 2285
  Gene Symbol: CIC
  Gene Name: capicua transcriptional repressor
  Uniprot ID: Q96RK0
  ENSP ID: ENSP00000458663
MYSAHRPLMPASSAASRGLGMFVWTNVEPRSVAVFPWHSLVPFLAPSQPDPSVQPSEAQQPASHPVASNQSKEPAESAAVAHERPPGGTGSADPERPPGATCPESPGPGPPHPLGVVESGKGPPPTTEEEASGPPGEPRLDSETESDHDDAFLSIMSPEIQLPLPPGKRRTQSLSALPKERDSSSEKDGRSPNKREKDHIRRPMNAFMIFSKRHRALVHQRHPNQDNRTVSKILGEWWYALGPKEKQKYHDLAFQVKEAHFKAHPDWKWCNKDRKKSSSEAKPTSLGLAGGHKETRERSMSETGTAAAPGVSSELLSVAAQTLLSSDTKAPGSSSCGAERLHTVGGPGSARPRAFSHSGVHSLDGGEVDSQALQELTQMVSGPASYSGPKPSTQYGAPGPFAAPGEGGALAATGRPPLLPTRASRSQRAASEDMTSDEERMVICEEEGDDDVIADDGFGTTDIDLKCKERVTDSESGDSSGEDPEGNKGFGRKVFSPVIRSSFTHCRPPLDPEPPGPPDPPVAFGKGYGSAPSSSASSPASSSASAATSFSLGSGTFKAQESGQGSTAGPLRPPPPGAGGPATPSKATRFLPMDPATFRRKRPESVGGLEPPGPSVIAAPPSGGGNILQTLVLPPNKEEQEGGGARVPSAPAPSLAYGAPAAPLSRPAATMVTNVVRPVSSTPVPIASKPFPTSGRAEASPNDTAGARTEMGTGSRVPGGSPLGVSLVYSDKKSAAATSPAPHLVAGPLLGTVGKAPATVTNLLVGTPGYGAPAPPAVQFIAQGAPGGGTTAGSGAGAGSGPNGPVPLGILQPGALGKAGGITQVQYILPTLPQQLQVAPAPAPAPGTKAAAPSGPAPTTSIRFTLPPGTSTNGKVLAATAPTPGIPILQSVPSAPPPKAQSVSPVQAPPPGGSAQLLPGKVLVPLAAPSMSVRGGGAGQPLPLVSPPFSVPVQNGAQPPSKIIQLTPVPVSTPSGLVPPLSPATLPGPTSQPQKVLLPSSTRITYVQSAGGHALPLGTSPASSQAGTVTSYGPTSSVALGFTSLGPSGPAFVQPLLSAGQAPLLAPGQVGVSPVPSPQLPPACAAPGGPVITAFYSGSPAPTSSAPLAQPSQAPPSLVYTVATSTTPPAATILPKGPPAPATATPAPTSPFPSATAGSMTYSLVAPKAQRPSPKAPQKVKAAIASIPVGSFEAGASGRPGPAPRQPLEPGPVREPTAPESELEGQPTPPAPPPLPETWTPTARSSPPLPPPAEERTSAKGPETMASKFPSSSSDWRVPGQGLENRGEPPTPPSPAPAPAVAPGGSSESSSGRAAGDTPERKEAAGTGKKVKVRPPPLKKTFDSVDNRVLSEVDFEERFAELPEFRPEEVLPSPTLQSLATSPRAILGSYRKKRKNSTDLDSAPEDPTSPKRKMRRRSSCSSEPNTPKSAKCEGDIFTFDRTGTEAEDVLGELEYDKVPYSSLRRTLDQRRALVMQLFQDHGFFPSAQATAAFQARYADIFPSKVCLQLKIREVRQKIMQAATPTEQPPGAEAPLPVPPPTGTAAAPAPTPSPAGGPDPTSPSSDSGTAQAAPPLPPPPESGPGQPGWEGAPQPSPPPPGPSTAATGR

SEQ ID NO: 11602 - protein, 320 aa, Homo sapiens
  Payload ID: 2285
  Gene Symbol: CIC
  Gene Name: capicua transcriptional repressor
  ENSP ID: ENSP00000459011
  MOD_RES (1)..(1): Any amino acid
XEPPTPPSPAPAPAVAPGGSSESSSGRAAGDTPERKEAAGTGKKVKVRPPPLKKTFDSVDNRVLSEVDFEERFAELPEFRPEEVLPSPTLQSLATSPRAILGSYRKKRKNSTDLDSAPEDPTSPKRKMRRRSSCSSEPNTPKSAKCEGDIFTFDRTEAEDVLGELEYDKVPYSSLRRTLDQRRALVMQLFQDHGFFPSAQATAAFQARYADIFPSKVCLQLKIREVRQKIMQAATPTEQPPGAEAPLPVPPPTGTAAAPAPTPSPAGGPDPTSPSSDSGTAQAAPPLPPPPESGPGQPGWEGAPQPSPPPPGPSTAATGR

SEQ ID NO: 11603 - protein, 144 aa, Homo sapiens
  Payload ID: 2285
  Gene Symbol: CIC
  Gene Name: capicua transcriptional repressor
  ENSP ID: ENSP00000459704
MKPMKKACTGLSGPGSGSKSPPATRAKALRRRGAGEGDKPEEEDDEAQQPQPQSGPEEAEEGEEEEAERGPGAEGPPLELHPGDPAPGPAEDPKGDGEAGRWEPSLSRKTATFKSRAPKKKYVEEHGAGSSGVAGAPEERVRTP

SEQ ID NO: 11604 - protein, 2514 aa, Homo sapiens
  Payload ID: 2285
  Gene Symbol: CIC
  Gene Name: capicua transcriptional repressor
  ENSP ID: ENSP00000459719
MKPMKKACTGLSGPGSGSKSPPATRAKALRRRGAGEGDKPEEEDDEAQQPQPQSGPEEAEEGEEEEAERGPGAEGPPLELHPGDPAPGPAEDPKGDGEAGRWEPSLSRKTATFKSRAPKKKYVEEHGAGSSGVAGAPEERVRTPEEASGLGVPPRPPTSTRSSSTDTASEHSADLEDEPAEACGPGPWPPGSTSGSYDLRQLRSQRVLARRGDGLFLPAVVRQVRRSQDLGVQFPGDRALTFYEGVPGAGVDVVLDATPPPGALVVGTAVCTCVEPGVAAYREGVVVEVATKPAAYKVRLSPGPSSQPGLPGSLPQPPQPLHREPEEAVWVARSSLRLLRPPWEPETMLRKPPTGPEEEQAEPGATLPPCPAALDPKQPEDAEVSKISFGGNLGTHCEEGEEKHPPALGTPALLPLPPPQLLSPPPKSPAFVGPGRPGEQPSPCQEGSQGGSRSSSVASLEKGTAPAARARTPLTAAQQKYKKGDVVCTPSGIRKKFNGKQWRRLCSRDGCMKESQRRGYCSRHLSMRTKEMEGLADSGPGGAGRPAAVAAREGSTEFDWGDETSRDSEASSVAARGDSRPRLVAPADLSRFEFDECEAAVMLVSLGSSRSGTPSFSPVSTQSPFSPAPSPSPSPLFGFRPANFSPINASPVIQRTAVRSRHLSASTPKAGVLTPPDLGPHPPPPAPRERHSSGILPTFQTNLTFTVPISPGRRKTELLPHPGALGAPGAGGGGAAPDFPKSDSLDSGVDSVSHTPTPSTPAGFRAVSPAVPFSRSRQPSPLLLLPPPAGLTSDPGPSVRRVPAVQRDSPVIVRNPDVPLPSKFPGEVGTAGEVRAGGPGRGCRETPVPPGVASGKPGLPPPLPAPVPITVPPAAPTAVAQPMPAFGLASSPFQPVAFHPSPAALLPVLVPSSYTSHPAPKKEVIMGRPGTVWTNVEPRSVAVFPWHSLVPFLAPSQPDPSVQPSEAQQPASHPVASNQSKEPAESAAVAHERPPGGTGSADPERPPGATCPESPGPGPPHPLGVVESGKGPPPTTEEEASGPPGEPRLDSETESDHDDAFLSIMSPEIQLPLPPGKRRTQSLSALPKERDSSSEKDGRSPNKREKDHIRRPMNAFMIFSKRHRALVHQRHPNQDNRTVSKILGEWWYALGPKEKQKYHDLAFQVKEAHFKAHPDWKWCNKDRKKSSSEAKPTSLGLAGGHKETRERSMSETGTAAAPGVSSELLSVAAQTLLSSDTKAPGSSSCGAERLHTVGGPGSARPRAFSHSGVHSLDGGEVDSQALQELTQMVSGPASYSGPKPSTQYGAPGPFAAPGEGGALAATGRPPLLPTRASRSQRAASEDMTSDEERMVICEEEGDDDVIADDGFGTTDIDLKCKERVTDSESGDSSGEDPEGNKGFGRKVFSPVIRSSFTHCRPPLDPEPPGPPDPPVAFGKGYGSAPSSSASSPASSSASAATSFSLGSGTFKAQESGQGSTAGPLRPPPPGAGGPATPSKATRFLPMDPATFRRKRPESVGGLEPPGPSVIAAPPSGGGNILQTLVLPPNKEEQEGGGARVPSAPAPSLAYGAPAAPLSRPAATMVTNVVRPVSSTPVPIASKPFPTSGRAEASPNDTAGARTEMGTGSRVPGGSPLGVSLVYSDKKSAAATSPAPHLVAGPLLGTVGKAPATVTNLLVGTPGYGAPAPPAVQFIAQGAPGGGTTAGSGAGAGSGPNGPVPLGILQPGALGKAGGITQVQYILPTLPQQLQVAPAPAPAPGTKAAAPSGPAPTTSIRFTLPPGTSTNGKVLAATAPTPGIPILQSVPSAPPPKAQSVSPVQAPPPGGSAQLLPGKVLVPLAAPSMSVRGGGAGQPLPLVSPPFSVPVQNGAQPPSKIIQLTPVPVSTPSGLVPPLSPATLPGPTSQPQKVLLPSSTRITYVQSAGGHALPLGTSPASSQAGTVTSYGPTSSVALGFTSLGPSGPAFVQPLLSGQAPLLAPGQVGVSPVPSPQLPPACAAPGGPVITAFYSGSPAPTSSAPLAQPSQAPPSLVYTVATSTTPPAATILPKGPPAPATATPAPTSPFPSATGSMTYSLVAPKAQRPSPKAPQKVKAAIASIPVGSFEAGASGRPGPAPRQPLEPGPVREPTAPESELEGQPTPPAPPPLPETWTPTARSSPPLPPPAEERTSAKGPETMASKFPSSSSDWRVPGQGLENRGEPPTPPSPAPAPAVAPGGSSESSSGRAAGDTPERKEAAGTGKKVKVRPPPLKKTFDSVDKVLSEVDFEERFAELPEFRPEEVLPSPTLQSLATSPRAILGSYRKKRKNSTDLDSAPEDPTSPKRKMRRRSSCSSEPNTPKSAKCEGDIFTFDRTGTEAEDVLGELEYDKVPYSSLRRTLDQRRALVMQLFQDHGFFPSAQATAAFQARYADIFPSKVCLQLKIREVRQKIMQAATPTEQPPGAEAPLPVPPPTGTAAAPAPTPSPAGGPDPTSPSSDSGTAQAAPPLPPPPESGPGQPGWEGAPQPSPPPPGPSTAATGR

SEQ ID NO: 11605 - protein, 144 aa, Homo sapiens
  Payload ID: 2285
  Gene Symbol: CIC
  Gene Name: capicua transcriptional repressor
  ENSP ID: ENSP00000460230
PERKEAAGTGKKVKVRPPPLKKTFDSVDNRVLSEVDFEERFAELPEFRPEEVLPSPTLQSLATSPRAILGSYRKKRKNSTDLDSAPEDPTSPKRKMRRRSSCSSEPNTPKSAKCEGDIFTFDRTALPCCLCPAQVQKPRTCLGS

SEQ ID NO: 11606 - protein, 286 aa, Homo sapiens
  Payload ID: 2286
  Gene Symbol: CAPZA1
  Gene Name: capping protein (actin filament) muscle Z-line, alpha 1
  Uniprot ID: P52907
  ENSP ID: ENSP00000263168
MADFDDRVSDEEKVRIAAKFITHAPPGEFNEVFNDVRLLLNNDNLLREGAAHAFAQYNMDQFTPVKIEGYEDQVLITEHGDLGNSRFLDPRNKISFKFDHLRKEASDPQPEEADGGLKSWRESCDSALRAYVKDHYSNGFCTVYAKTIDGQQTIIACIESHQFQPKNFWNGRWRSEWKFTITPPTAQVVGVLKIQVHYYEDGNVQLVSHKDVQDSLTVSNEAQTAKEFIKIIENAENEYQTAISENYQTMSDTTFKALRRQLPVTRTKIDWNKILSYKIGKEMQNA

SEQ ID NO: 11607 - protein, 286 aa, Homo sapiens
  Payload ID: 2287
  Gene Symbol: CAPZA2
  Gene Name: capping protein (actin filament) muscle Z-line, alpha 2
  Uniprot ID: P47755
  ENSP ID: ENSP00000354947
MADLEEQLSDEEKVRIAAKFIIHAPPGEFNEVFNDVRLLLNNDNLLREGAAHAFAQYNLDQFTPVKIEGYEDQVLITEHGDLGNGKFLDPKNRICFKFDHLRKEATDPRPCEVENAVESWRTSVETALRAYVKEHYPNGVCTVYGKKIDGQQTIIACIESHQFQAKNFWNGRWRSEWKFTITPSTTQVVGILKIQVHYYEDGNVQLVSHKDIQDSLTVSNEVQTAKEFIKIVEAAENEYQTAISENYQTMSDTTFKALRRQLPVTRTKIDWNKILSYKIGKEMQNA

SEQ ID NO: 11608 - protein, 174 aa, Homo sapiens
  Payload ID: 2287
  Gene Symbol: CAPZA2
  Gene Name: capping protein (actin filament) muscle Z-line, alpha 2
  ENSP ID: ENSP00000395395
MADLEEQLSDEEKVRIAAKFIIHAPPGEFNEVFNDVRLLLNNDNLLREGAAHAFAQYNLDQFTPVKIEGYEDQVLITEHGDLGNGKFLDPKNRICFKFDHLRKEATDPRPCEVENAVESWRTSVETALRAYVKEHYPNGVCTVYGKKIDGQQTIIACIESHQFQAKNFCCCFYF

SEQ ID NO: 11609 - protein, 37 aa, Homo sapiens
  Payload ID: 2287
  Gene Symbol: CAPZA2
  Gene Name: capping protein (actin filament) muscle Z-line, alpha 2
  ENSP ID: ENSP00000408150
MADLEEQLSDEEKTKSVLHFEDFESRGPGKLANFFLK

SEQ ID NO: 11610 - protein, 34 aa, Homo sapiens
  Payload ID: 2287
  Gene Symbol: CAPZA2
  Gene Name: capping protein (actin filament) muscle Z-line, alpha 2
  ENSP ID: ENSP00000418262
MPLLENLMRFSMMFGYCLIMTIFSGKEQPMHLHS

SEQ ID NO: 11611 - protein, 146 aa, Homo sapiens
  Payload ID: 2287
  Gene Symbol: CAPZA2
  Gene Name: capping protein (actin filament) muscle Z-line, alpha 2
  ENSP ID: ENSP00000419484
MADLEEQLSDEEKVRIAAKFIIHAPPGEFNEVFNDVRLLLNNDNLLREGAAHAFAQYNLDQFTPVKIEGYEDQVLITEHGDLGNGKFLDPKNRICFKFDHLRKEATDPRPCEVENAVESWRTSVETALRAYVKEHYPNGVCTVSHQ

SEQ ID NO: 11612 - protein, 34 aa, Homo sapiens; identical to SEQ ID NO: 11610
  Payload ID: 2287
  Gene Symbol: CAPZA2
  Gene Name: capping protein (actin filament) muscle Z-line, alpha 2
  ENSP ID: ENSP00000420640

SEQ ID NO: 11613 - protein, 174 aa, Homo sapiens
  Payload ID: 2287
  Gene Symbol: CAPZA2
  Gene Name: capping protein (actin filament) muscle Z-line, alpha 2
  ENSP ID: ENSP00000485993
MIDVRYQIDNKKMVRIAAKFIIHAPPGEFNEVFNDVRLLLNNDNLLREGAAHAFAQYNLDQFTPVKIEGYEDQVLITEHGDLGNGKFLDPKNRICFKFDHLRKEATDPRPCEVENAVESWRTSVETALRAYVKEHYPNGVCTVYGKKIDGQQTIIACIESHQFQAKNFCCCFYF

SEQ ID NO: 11614 - protein, 299 aa, Homo sapiens
  Payload ID: 2288
  Gene Symbol: CAPZA3
  Gene Name: capping protein (actin filament) muscle Z-line, alpha 3
  Uniprot ID: Q96KX2
  ENSP ID: ENSP00000326238
MTLSVLSRKDKERVIRRLLLQAPPGEFVNAFDDLCLLIRDEKLMHHQGECAGHQHCQKYSVPLCIDGNPVLLSHHNVMGDYRFFDHQSKLSFKYDLLQNQLKDIQSHGIIQNEAEYLRVVLLCALKLYVNDHYPKGNCNMLRKTVKSKEYLIACIEDHNYETGECWNGLWKSKWIFQVNPFLTQVTGRIFVQAHFFRCVNLHIEISKDLKESLEIVNQAQLALSFARLVEEQENKFQAAVLEELQELSNEALRKILRRDLPVTRTLIDWHRILSDLNLVMYPKLGYVIYSRSVLCNWII

SEQ ID NO: 11615 - protein, 272 aa, Homo sapiens
  Payload ID: 2289
  Gene Symbol: CAPZB
  Gene Name: capping protein (actin filament) muscle Z-line, beta
  Uniprot ID: P47756
  ENSP ID: ENSP00000264202
MSDQQLDCALDLMRRLPPQQIEKNLSDLIDLVPSLCEDLLSSVDQPLKIARDKVVGKDYLLCDYNRDGDSYRSPWSNKYDPPLEDGAMPSARLRKLEVEANNAFDQYRDLYFEGGVSSVYLWDLDHGFAGVILIKKAGDGSKKIKGCWDSIHVVEVQEKSSGRTAHYKLTSTVMLWLQTNKSGSGTMNLGGSLTRQMEKDETVSDCSPHIANIGRLVEDMENKIRSTLNEIYFGKTKDIVNGLRSVQTFADKSKQEALKNDLVEALKRKQQC

SEQ ID NO: 11616 - protein, 260 aa, Homo sapiens
  Payload ID: 2289
  Gene Symbol: CAPZB
  Gene Name: capping protein (actin filament) muscle Z-line, beta
  ENSP ID: ENSP00000264203
MPRQFQDTGFSRPGLGQPRRCDPEPRKSDQQLDCALDLMRRLPPQQIEKNLSDLIDLVPSLCEDLLSSVDQPLKIARDKVVGKDYLLCDYNRDGDSYRSPWSNKYDPPLEDGAMPSARLRKLEVEANNAFDQYRDLYFEGGVSSVYLWDLDHGFAGVILIKKAGDGSKKIKGCWDSIHVVEVQEKSSGRTAHYKLTSTVMLWLQTNKSGSGTMNLGGSLTRQMEKDETVSDCSPHIANIGRLVEVCADFCRQIKTRSSEE

SEQ ID NO: 11617 - protein, 277 aa, Homo sapiens
  Payload ID: 2289
  Gene Symbol: CAPZB
  Gene Name: capping protein (actin filament) muscle Z-line, beta
  Uniprot ID: P47756
  ENSP ID: ENSP00000364284
MSDQQLDCALDLMRRLPPQQIEKNLSDLIDLVPSLCEDLLSSVDQPLKIARDKVVGKDYLLCDYNRDGDSYRSPWSNKYDPPLEDGAMPSARLRKLEVEANNAFDQYRDLYFEGGVSSVYLWDLDHGFAGVILIKKAGDGSKKIKGCWDSIHVVEVQEKSSGRTAHYKLTSTVMLWLQTNKSGSGTMNLGGSLTRQMEKDETVSDCSPHIANIGRLVEDMENKIRSTLNEIYFGKTKDIVNGLRSIDAIPDNQKFKQLQRELSQVLTQRQIYIQPDN

SEQ ID NO: 11618 - protein, 260 aa, Homo sapiens
  Payload ID: 2289
  Gene Symbol: CAPZB
  Gene Name: capping protein (actin filament) muscle Z-line, beta
  ENSP ID: ENSP00000364286
MRRLPPQQIEKNLSDLIDLVPSLCEDLLSSVDQPLKIARDKVVGKDYLLCDYNRDGDSYRSPWSNKYDPPLEDGAMPSARLRKLEVEANNAFDQYRDLYFEGGVSSVYLWDLDHGFAGVILIKKAGDGSKKIKGCWDSIHVVEVQEKSSGRTAHYKLTSTVMLWLQTNKSGSGTMNLGGSLTRQMEKDETVSDCSPHIANIGRLVEDMENKIRSTLNEIYFGKTKDIVNGLRSVQTFADKSKQEALKNDLVEALKRKQQC

SEQ ID NO: 11619 - protein, 301 aa, Homo sapiens
  Payload ID: 2289
  Gene Symbol: CAPZB
  Gene Name: capping protein (actin filament) muscle Z-line, beta
  ENSP ID: ENSP00000401010
MHPSRRSLPFPLNCQLARVGTADYGSPSDQSDQQLDCALDLMRRLPPQQIEKNLSDLIDLVPSLCEDLLSSVDQPLKIARDKVVGKDYLLCDYNRDGDSYRSPWSNKYDPPLEDGAMPSARLRKLEVEANNAFDQYRDLYFEGGVSSVYLWDLDHGFAGVILIKKAGDGSKKIKGCWDSIHVVEVQEKSSGRTAHYKLTSTVMLWLQTNKSGSGTMNLGGSLTRQMEKDETVSDCSPHIANIGRLVEDMENKIRSTLNEIYFGKTKDIVNGLRSVQTFADKSKQEALKNDLVEALKRKQQC

SEQ ID NO: 11620 - protein, 348 aa, Homo sapiens
  Payload ID: 2290
  Gene Symbol: CAPG
  Gene Name: capping protein (actin filament), gelsolin-like
  Uniprot ID: P40121
  ENSP ID: ENSP00000263867
MYTAIPQSGSPFPGSVQDPGLHVWRVEKLKPVPVAQENQGVFFSGDSYLVLHNGPEEVSHLHLWIGQQSSRDEQGACAVLAVHLNTLLGERPVQHREVQGNESDLFMSYFPRGLKYQEGGVESAFHKTSTGAPAAIKKLYQVKGKKNIRATERALNWDSFNTGDCFILDLGQNIFAWCGGKSNILERNKARDLALAIRDSERQGKAQVEIVTDGEEPAEMIQVLGPKPALKEGNPEEDLTADKANAQAAALYKVSDATGQMNLTKVADSSPFALELLISDDCFVLDNGLCGKIYIWKGRKANEKERQAALQVAEGFISRMQYAPNTQVEILPQGHESPIFKQFFKDWK

SEQ ID NO: 11621 - protein, 348 aa, Homo sapiens; identical to SEQ ID NO: 11620
  Payload ID: 2290
  Gene Symbol: CAPG
  Gene Name: capping protein (actin filament), gelsolin-like
  Uniprot ID: P40121
  ENSP ID: ENSP00000386315

SEQ ID NO: 11622 - protein, 218 aa, Homo sapiens
  Payload ID: 2290
  Gene Symbol: CAPG
  Gene Name: capping protein (actin filament), gelsolin-like
  ENSP ID: ENSP00000386596
MYTAIPQSGSPFPGSVQDPGLHVWRVEKLKPVPVAQENQGVFFSGDSYLVLHNGPEEVSHLHLWIGQQSSRDEQGACAVLAVHLNTLLGERPVQHREVQGNESDLFMSYFPRGLKYQEGGVESAFHKTSTGAPAAIKKLYQVKGKKNIRATERALNWDSFNTGDCFILDLGQNIFAWCGGKSNILERNKARDLALAIRDSERQGKAQVEIVTDGEEPA

SEQ ID NO: 11623 - protein, 348 aa, Homo sapiens; identical to SEQ ID NO: 11620
  Payload ID: 2290
  Gene Symbol: CAPG
  Gene Name: capping protein (actin filament), gelsolin-like
  Uniprot ID: P40121
  ENSP ID: ENSP00000386965

SEQ ID NO: 11624 - protein, 333 aa, Homo sapiens
  Payload ID: 2290
  Gene Symbol: CAPG
  Gene Name: capping protein (actin filament), gelsolin-like
  Uniprot ID: P40121
  ENSP ID: ENSP00000387063
MYTAIPQSGSPFPGSVQDPGLHVWRVEKLKPVPVAQENQGVFFSGDSYLVLHNGPEEVSHLHLWIGQQSSRDEQGACAVLAVHLNTLLGERPVQHREVQGNESDLFMSYFPRGLKYQEGGVESAFHKTSTGAPAAIKKLYQVKGKKNIRATERALNWDSFNTGDCFILDLGQNIFAWCGGKSNILERNKARDLALAIRDSERQGKAQVLGPKPALKEGNPEEDLTADKANAQAAALYKVSDATGQMNLTKVADSSPFALELLISDDCFVLDNGLCGKIYIWKGRKANEKERQAALQVAEGFISRMQYAPNTQVEILPQGHESPIFKQFFKDWK

SEQ ID NO: 11625 - protein, 253 aa, Homo sapiens
  Payload ID: 2290
  Gene Symbol: CAPG
  Gene Name: capping protein (actin filament), gelsolin-like
  ENSP ID: ENSP00000391923
MYTAIPQSGSPFPGSVQDPGLHVWRVEKLKPVPVAQENQGVFFSGDSYLVLHNGPEEVSHLHLWIGQQSSRDEQGACAVLAVHLNTLLGERPVQHREVQGNESDLFMSYFPRGLKYQEGGVESAFHKTSTGAPAAIKKLYQVKGKKNIRATERALNWDSFNTGDCFILDLGQNIFAWCGGKSNILERNKARDLALAIRDSERQGKAQVEIVTDGEEPAEMIQVLGPKPALKEGNPEEDLTADKANAQAAALYK

SEQ ID NO: 11626 - protein, 103 aa, Homo sapiens
  Payload ID: 2290
  Gene Symbol: CAPG
  Gene Name: capping protein (actin filament), gelsolin-like
  ENSP ID: ENSP00000397381
LTADKANAQAAALYKMNLTKVADSSPFALELLISDDCFVLDNGLCGKIYIWKGRKANEKERQAALQVAEGFISRMQYAPNTQVEILPQGHESPIFKQFFKDWK

SEQ ID NO: 11627 - protein, 253 aa, Homo sapiens; identical to SEQ ID NO: 11625
  Payload ID: 2290
  Gene Symbol: CAPG
  Gene Name: capping protein (actin filament), gelsolin-like
  ENSP ID: ENSP00000398232

SEQ ID NO: 11628 - protein, 253 aa, Homo sapiens; identical to SEQ ID NO: 11625
  Payload ID: 2290
  Gene Symbol: CAPG
  Gene Name: capping protein (actin filament), gelsolin-like
  ENSP ID: ENSP00000403330

SEQ ID NO: 11629 - protein, 1077 aa, Homo sapiens
  Payload ID: 2291
  Gene Symbol: CAPRIN2
  Gene Name: caprin family member 2
  Uniprot ID: Q6IMN6
  ENSP ID: ENSP00000298892
MEVQVSQASLGFELTSVEKSLREWSRLSREVIAWLCPSSPNFILNFPPPPSASSVSMVQLFSSPFGYQSPSGHSEEEREGNMKSAKPQVNHSQHGESQRALSPLQSTLSSAASPSQAYETYIENGLICLKHKIRNIEKKKLKLEDYKDRLKSGEHLNPDQLEAVEKYEEVLHNLEFAKELQKTFSGLSLDLLKAQKKAQRREHMLKLEAEKKKLRTILQVQYVLQNLTQEHVQKDFKGGLNGAVYLPSKELDYLIKFSKLTCPERNESLSVEDQMEQSSLYFWDLLEGSEKAVVGTTYKHLKDLLSKLLNSGYFESIPVPKNAKEKEVPLEEEMLIQSEKKTQLSKTESVKESESLMEFAQPEIQPQEFLNRRYMTEVDYSNKQGEEQPWEADYARKPNLPKRWDMLTEPDGQEKKQESFKSWEASGKHQEVSKPAVSLEQRKQDTSKLRSTLPEEQKKQEISKSKPSPSQWKQDTPKSKAGYVQEEQKKQETPKLWPVQLQKEQDPKKQTPKSWTPSMQSEQNTTKSWTTPMCEEQDSKQPETPKSWENNVESQKHSLTSQSQISPKSWGVATASLIPNDQLLPRKLNTEPKDVPKPVHQPVGSSSTLPKDPVLRKEKLQDLMTQIQGTCNFMQESVLDFDKPSSAIPTSQPPSATPGSPVASKEQNLSSQSDFLQEPLQATSSPVTCSSNACLVTTDQASSGSETEFMTSETPEVFNVNAPLPPRKEQEIKESPYSPGYNQSFTTASTQTPPQCQLPSIHVEQTVHSQETANYHPDGTIQVSNGSLAFYPAQTNVFPRPTQPFVNSRGSVRGCTRGGRLITNSYRSPGGYKGFDTYRGLPSISNGNYSQLQFQAREYSGAPYSQRDNFQQCYKRGGTSGGPRANSRAGWSDSSQVSSPERDNETFNSGDSGQGDSRSMTPVDVPVTNPAATILPVHVYPLPQQMRVAFSAARTSNLAPGTLDQPIVFDLLLNNLGETFDLQLGRFNCPVNGTYVFIFHMLKLAVNVPLYVNLMKNEEVLVSAYANDGAPDHETASNHAILQLFQGDQIWLRLHRGAIYGSSWKYSTFSGYLLYQD

SEQ ID NO: 11630 - protein, 905 aa, Homo sapiens
  Payload ID: 2291
  Gene Symbol: CAPRIN2
  Gene Name: caprin family member 2
  Uniprot ID: Q6IMN6
  ENSP ID: ENSP00000379150
MEVQVSQASLGFELTSVEKSLREWSRLSREVIAWLCPSSPNFILNFPPPPSASSVSMVQLFSSPFGYQSPSGHSEEEREGNMKSAKPQVNHSQHGESQRALSPLQSTLSSAASPSQAYETYIENGLICLKHKIRNIEKKKLKLEDYKDRLKSGEHLNPDQLEAVEKYEEVLHNLEFAKELQKTFSGLSLDLLKAQKKAQRREHMLKLEAEKKKLRTILQVQYVLQNLTQEHVQKDFKGGLNGAVYLPSKELDYLIKFSKLTCPERNESLSVEDQMEQSSLYFWDLLEGSEKAVVGTTYKHLKDLLSKLLNSGYFESIPVPKNAKEKEVPLEEEMLIQSEKKTQLSKTESVKESESLMEFAQPEIQPQEFLNRRYMTEVDYSNKQGEEQPWEADYARKPNLPKRWDMLTEPDGQEKKQESFKSWEASGKHQEVSKPAVSLEQRKQDTSKLRSTLPEEQKKQEISKSKPSPSQWKQDTPKSKAGYVQEEQKKQETPKLWPVQLQKEQDPKKQTPKSWTPSMQSEQNTTKSWTTPMCEEQDSKQPETPKSWENNVESQKHSLTSQSQISPKSWGVATASLIPNDQLLPRKLNTEPKDVPKPVHQPVGSSSTLPKDPVLRKEKLQDLMTQIQGTCNFMQESVLDFDKPSSAIPTSQPPSATPGSPVASKEQNLSSQSDFLQEPLQAAIPPGKQPSSLASPNPPMAKGSEQGFQSPPASSSSVTINTAPFQAMQTVFNVNAPLPPRKEQEIKESPYSPGYNQSFTTASTQTPPQCQLPSIHVEQTVHSQETAQTNVFPRPTQPFVNSRGSVRGCTRGGRLITNSYRSPGGYKGFDTYRGLPSISNGNYSQLQFQAREYSGAPYSQRDNFQQCYKRGGTSGGPRANSRANCFIMRNSLLLIKQQGGVILLR

SEQ ID NO: 11631 - protein, 960 aa, Homo sapiens
  Payload ID: 2291
  Gene Symbol: CAPRIN2
  Gene Name: caprin family member 2
  Uniprot ID: Q6IMN6
  ENSP ID: ENSP00000391479
MEVQVSQASLGFELTSVEKSLREWSRLSREVIAWLCPSSPNFILNFPPPPSASSVSMVQLFSSPFGYQSPSGHSEEEREGNMKSAKPQVNHSQHGESQRALSPLQSTLSSAASPSQAYETYIENGLICLKHKIRNIEKKKLKLEDYKDRLKSGEHLNPDQLEAVEKYEEVLHNLEFAKELQKTFSGLSLDLLKAQKKAQRREHMLKLEAEKKKLRTILQVQYVLQNLTQEHVQKDFKGGLNGAVYLPSKELDYLIKFSKLTCPERNESLSVEDQMEQSSLYFWDLLEGSEKAVVGTTYKHLKDLLSKLLNSGYFESIPVPKNAKEKEVPLEEEMLIQSEKKTQLSKTESVKESESLMEFAQPEIQPQEFLNRRYMTEVDYSNKQGEEQPWEADYARKPNLPKRWDMLTEPDGQEKKQESFKSWEASGKHQEVSKPAVSLEQRKQDTSKLRSTLPEEQKKQEISKSKPSPSQWKQDTPKSKAGYVQEEQKKQETPKLWPVQLQKEQDPKKQTPKSWTPSMQSEQNTTKSWTTPMCEEQDSKQPETPKSWENNVESQKHSLTSQSQISPKSWGVATASLIPNDQLLPRKLNTEPKDVPKPVHQPVGSSSTLPKDPVLRKEKLQDLMTQIQGTCNFMQESVLDFDKPSSAIPTSQPPSATPGSPVASKEQNLSSQSDFLQEPLQATSSPVTCSSNACLVTTDQASSGSETEFMTSETPEAAIPPGKQPSSLASPNPPMAKGSEQGFQSPPASSSSVTINTAPFQAMQTVFNVNAPLPPRKEQEIKESPYSPGYNQSFTTASTQTPPQCQLPSIHVEQTVHSQETANYHPDGTIQVSNGSLAFYPAQTNVFPRPTQPFVNSRGSVRGCTRGGRLITNSYRSPGGYKGFDTYRGLPSISNGNYSQLQFQAREYSGAPYSQRDNFQQCYKRGGTSGGPRANSRANCFIMRNSLLLIKQQGGVILLR

SEQ ID NO: 11632 - protein, 278 aa, Homo sapiens
  Payload ID: 2291
  Gene Symbol: CAPRIN2
  Gene Name: caprin family member 2
  Uniprot ID: Q6IMN6
  ENSP ID: ENSP00000403876
MEVQVSQASLGFELTSVEKSLREWSRLSREVIAWLCPSSPNFILNFPPPPSASSVSMVQLFSSPFGYQSPSGHSEEEREGNMKSAKPQVNHSQHGESQRALSPLQSTLSSAASPSQAYETYIENGLICLKHKIRNIEKKKLKLEDYKDRLKSGEHLNPDQLEAVEKYEEVLHNLEFAKELQKTFSGLSLDLLKAQKKAQRREHMLKLEAEKKKLRTILQVQYVLQNLTQEHVQKDFKGGLNGAVYLPSKELDYLIKFSKLTCPERNESLRQTLEGSTV

SEQ ID NO: 11633 - protein, 706 aa, Homo sapiens
  Payload ID: 2291
  Gene Symbol: CAPRIN2
  Gene Name: caprin family member 2
  ENSP ID: ENSP00000415407
IKFSKLTCPERNESLSVEDQMEQSSLYFWDLLEGSEKAVVGTTYKHLKDLLSKLLNSGYFESIPVPKNAKEKEVPLEEEMLIQSEKKTQLSKTESVKESESLMEFAQPEIQPQEFLNRRYMTEVDYSNKQGEEQPWEADYARKPNLPKRWDMLTEPDGQEKKQESFKSWEASGKHQEVSKPAVSLEQRKQDTSKLRSTLPEEQKKQEISKSKPSPSQWKQDTPKSKAGYVQEEQKKQETPKLWPVQLQKEQDPKKQTPKSWTPSMQSEQNTTKSWTTPMCEEQDSKQPETPKSWENNVESQKHSLTSQSQISPKSWGVATASLIPNDQLLPRKLNTEPKDVPKPVHQPVGSSSTLPKDPVLRKEKLQDLMTQIQGTCNFMQESVLDFDKPSSAIPTSQPPSATPGSPVASKEQNLSSQSDFLQEPLQATSSPVTCSSNACLVTTDQASSGSETEFMTSETPEAAIPPGKQPSSLASPNPPMAKGSEQGFQSPPASSSSVTINTAPFQAMQTVFNVNAPLPPRKEQEIKESPYSPGYNQSFTTASTQTPPQCQLPSIHVEQTVHSQETANYHPDGTIQVSNGSLAFYPAQTNVFPRPTQPFVNSRGSVRGCTRGGRLITNSYRSPGGYKGFDTYRGLPSISNGNYSQLQFQAREYSGAPYSQRCLETSEPLWLLGKARIISSSVISEEGHLVVHEQIREQGGVILLR

SEQ ID NO: 11634 - protein, 702 aa, Homo sapiens
  Payload ID: 2291
  Gene Symbol: CAPRIN2
  Gene Name: caprin family member 2
  ENSP ID: ENSP00000438010
MKSAKPQVNHSQHGESQRALSPLQSTLSSAASPSQAYETYIENGLICLKHKIRNIEKKKLKLEDYKDRLKSGEHLNPDQLEAVEKYEEVLHNLEFAKELQKTFSGLSLDLLKAQKKAQRREHMLKLEAEKKKLRTILQVQYVLQNLTQEHVQKDFKGGLNGAVYLPSKELDYLIKFSKLTCPERNESLSVEDQMEQSSLYFWDLLEGSEKAVVGTTYKHLKDLLSKLLNSGYFESIPVPKNAKEKEVPLEEEMLIQSEKKTQLSKTESVKESESLMEFAQPEIQPQEFLNRRYMTEVDYSNKQGEEQPWEADYARKPNLPKRWDMLTEPDGQEKKQESFKSWEASGKHQEVSKPAVSLEQRKQDTSKLRSTLPEEQKKQEISKSKPSPSQWKQDTPKSKAGYVQEEQKKQETPKLWPVQLQKEQDPKKQTPKSWTPSMQSEQNTTKSWTTPMCEEQDSKQPETPKSWENNVESQKHSLTSQSQISPKSWGVATASLIPNDQLLPRKLNTEPKDVPKPVHQPVGSSSTLPKDPVLRKEKLQDLMTQIQGTCNFMQESVLDFDKPSSAIPTSQPPSATPGSPVASKEQNLSSQSDFLQEPLQATSSPVTCSSNACLVTTDQASSGSETEFMTSETPEAAIPPGKQPSSLASPNPPMAKGSEQGFQSPPASSSSVTINTAPFQAMQTVFNVNAPLPPRKEQEIKE

SEQ ID NO: 11635 - protein, 68 aa, Homo sapiens
  Payload ID: 2291
  Gene Symbol: CAPRIN2
  Gene Name: caprin family member 2
  ENSP ID: ENSP00000440785
MLKLEAEKKKLRTILQVQYVLQNLTQEHVQKDFKGGLNGAVYLPSKELDYLIKFSKLTCPERNESLSV

SEQ ID NO: 11636 - protein, 119 aa, Homo sapiens
  Payload ID: 2291
  Gene Symbol: CAPRIN2
  Gene Name: caprin family member 2
  ENSP ID: ENSP00000441005
MKSAKPQVNHSQHGESQRALSPLQSTLSSAASPSQAYETYIENGLICLKHKIRNIEKKKLKLEDYKDRLKSGEHLNPDQLEAVEKYEEVLHNLEFAKELQKTFSGLSLDLLKAQKKAQR

SEQ ID NO: 11637 - protein, 126 aa, Homo sapiens
  Payload ID: 2291
  Gene Symbol: CAPRIN2
  Gene Name: caprin family member 2
  ENSP ID: ENSP00000442295
MKSAKPQVNHSQHGESQRALSPLQSTLSSAASPSQAYETYIENGLICLKHKIRNIEKKKLKLEDYKDRLKSGEHLNPDQLEAVEKYEEVLHNLEFAKELQKTFSGLSLDLLKAQKKAQRREHMLKL

SEQ ID NO: 11638 - protein, 174 aa, Homo sapiens
  Payload ID: 2291
  Gene Symbol: CAPRIN2
  Gene Name: caprin family member 2
  ENSP ID: ENSP00000443145
  MOD_RES (1)..(1): Any amino acid
XCPSSPNFILNFPPPPSASSVSMVQLFSSPFGYQSPSGHSEEEREGNMKSAKPQVNHSQHGESQRALSPLQSTLSSAASPSQAYETYIENGLICLKHKIRNIEKKKLKLEDYKDRLKSGEHLNPDQLEAVEKYEEVLHNLEFAKELQKTFSGLSLDVTTKSAKEGPEKGAHAKT

SEQ ID NO: 11639 - protein, 186 aa, Homo sapiens
  Payload ID: 2291
  Gene Symbol: CAPRIN2
  Gene Name: caprin family member 2
  ENSP ID: ENSP00000443353
MKSAKPQVNHSQHGESQRALSPLQSTLSSAASPSQAYETYIENGLICLKHKIRNIEKKKLKLEDYKDRLKSGEHLNPDQLEAVEKYEEVLHNLEFAKELQKTFSGLSLDLLKAQKKAQRREHMLKLEAEKKKLRTILQVQYVLQNLTQEHVQKDFKGGLNGAVYLPSKELDYLIKFSKLTCPERNE

SEQ ID NO: 11640 - protein, 84 aa, Homo sapiens
  Payload ID: 2291
  Gene Symbol: CAPRIN2
  Gene Name: caprin family member 2
  ENSP ID: ENSP00000444137
MLKLEAEKKKLRTILQVQYVLQNLTQEHVQKDFKGGLNGAVYLPSKELDYLIKFSKLTCPERNESLSVEDQMEQSSLYFWDLLE

SEQ ID NO: 11641 - protein, 135 aa, Homo sapiens
  Payload ID: 2291
  Gene Symbol: CAPRIN2
  Gene Name: caprin family member 2
  ENSP ID: ENSP00000449139
EDYKDRLKSGEHLNPDQLEAVEKYEEVLHNLEFAKELQKTFSGLSLDLLKAQKKAQRREHMLKLEAEKKKLRTILQVQYVLQNLTQEHVQKDFKGGLNGAVYLPSKELDYLIKFSKLTCPERNESLRQTLEGSTV

SEQ ID NO: 11642 - protein, 1500 aa, Homo sapiens
  Payload ID: 2292
  Gene Symbol: CPS1
  Gene Name: carbamoyl-phosphate synthase 1, mitochondrial
  Uniprot ID: P31327
  ENSP ID: ENSP00000233072
MTRILTAFKVVRTLKTGFGFTNVTAHQKWKFSRPGIRLLSVKAQTAHIVLEDGTKMKGYSFGHPSSVAGEVVFNTGLGGYPEAITDPAYKGQILTMANPIIGNGGAPDTTALDELGLSKYLESNGIKVSGLLVLDYSKDYNHWLATKSLGQWLQEEKVPAIYGVDTRMLTKIIRDKGTMLGKIEFEGQPVDFVDPNKQNLIAEVSTKDVKVYGKGNPTKVVAVDCGIKNNVIRLLVKRGAEVHLVPWNHDFTKMEYDGILIAGGPGNPALAEPLIQNVRKILESDRKEPLFGISTGNLITGLAAGAKTYKMSMANRGQNQPVLNITNKQAFITAQNHGYALDNTLPAGWKPLFVNVNDQTNEGIMHESKPFFAVQFHPEVTPGPIDTEYLFDSFFSLIKKGKATTITSVLPKPALVASRVEVSKVLILGSGGLSIGQAGEFDYSGSQAVKAMKEENVKTVLMNPNIASVQTNEVGLKQADTVYFLPITPQFVTEVIKAEQPDGLILGMGGQTALNCGVELFKRGVLKEYGVKVLGTSVESIMATEDRQLFSDKLNEINEKIAPSFAVESIEDALKAADTIGYPVMIRSAYALGGLGSGICPNRETLMDLSTKAFAMTNQILVEKSVTGWKEIEYEVVRDADDNCVTVCNMENVDAMGVHTGDSVVVAPAQTLSNAEFQMLRRTSINVVRHLGIVGECNIQFALHPTSMEYCIIEVNARLSRSSALASKATGYPLAFIAAKIALGIPLPEIKNVVSGKTSACFEPSLDYMVTKIPRWDLDRFHGTSSRIGSSMKSVGEVMAIGRTFEESFQKALRMCHPSIEGFTPRLPMNKEWPSNLDLRKELSEPSSTRIYAIAKAIDDNMSLDEIEKLTYIDKWFLYKMRDILNMEKTLKGLNSESMTEETLKRAKEIGFSDKQISKCLGLTEAQTRELRLKKNIHPWVKQIDTLAAEYPSVTNYLYVTYNGQEHDVNFDDHGMMVLGCGPYHIGSSVEFDWCAVSSIRTLRQLGKKTVVVNCNPETVSTDFDECDKLYFEELSLERILDIYHQEACGGCIISVGGQIPNNLAVPLYKNGVKIMGTSPLQIDRAEDRSIFSAVLDELKVAQAPWKAVNTLNEALEFAKSVDYPCLLRPSYVLSGSAMNVVFSEDEMKKFLEEATRVSQEHPVVLTKFVEGAREVEMDAVGKDGRVISHAISEHVEDAGVHSGDATLMLPTQTISQGAIEKVKDATRKIAKAFAISGPFNVQFLVKGNDVLVIECNLRASRSFPFVSKTLGVDFIDVATKVMIGENVDEKHLPTLDHPIIPADYVAIKAPMFSWPRLRDADPILRCEMASTGEVACFGEGIHTAFLKAMLSTGFKIPQKGILIGIQQSFRPRFLGVAEQLHNEGFKLFATEATSDWLNANNVPATPVAWPSQEGQNPSLSSIRKLIRDGSIDLVINLPNNNTKFVHDNYVIRRTAVDSGIPLLTNFQVTKLFAEAVQKSRKVDSKSLFHYRQYSAGKAA

SEQ ID NO: 11643 - protein, 121 aa, Homo sapiens
  Payload ID: 2292
  Gene Symbol: CPS1
  Gene Name: carbamoyl-phosphate synthase 1, mitochondrial
  ENSP ID: ENSP00000388496
MTRILTAFKVVRTLKTGFGFTNVTAHQKWKFSRPGIRLLSVKAQTAHIVLEDGTKMKGYSFGHPSSVAGEVVFNTGLGGYPEAITDPAYKGQILTMANPIIGNGGAPDTTALDELGLSKYL

SEQ ID NO: 11644 - protein, 1506 aa, Homo sapiens
  Payload ID: 2292
  Gene Symbol: CPS1
  Gene Name: carbamoyl-phosphate synthase 1, mitochondrial
  Uniprot ID: P31327
  ENSP ID: ENSP00000402608
MPQIIKMTRILTAFKVVRTLKTGFGFTNVTAHQKWKFSRPGIRLLSVKAQTAHIVLEDGTKMKGYSFGHPSSVAGEVVFNTGLGGYPEAITDPAYKGQILTMANPIIGNGGAPDTTALDELGLSKYLESNGIKVSGLLVLDYSKDYNHWLATKSLGQWLQEEKVPAIYGVDTRMLTKIIRDKGTMLGKIEFEGQPVDFVDPNKQNLIAEVSTKDVKVYGKGNPTKVVAVDCGIKNNVIRLLVKRGAEVHLVPWNHDFTKMEYDGILIAGGPGNPALAEPLIQNVRKILESDRKEPLFGISTGNLITGLAAGAKTYKMSMANRGQNQPVLNITNKQAFITAQNHGYALDNTLPAGWKPLFVNVNDQTNEGIMHESKPFFAVQFHPEVTPGPIDTEYLFDSFFSLIKKGKATTITSVLPKPALVASRVEVSKVLILGSGGLSIGQAGEFDYSGSQAVKAMKEENVKTVLMNPNIASVQTNEVGLKQADTVYFLPITPQFVTEVIKAEQPDGLILGMGGQTALNCGVELFKRGVLKEYGVKVLGTSVESIMATEDRQLFSDKLNEINEKIAPSFAVESIEDALKAADTIGYPVMIRSAYALGGLGSGICPNRETLMDLSTKAFAMTNQILVEKSVTGWKEIEYEVVRDADDNCVTVCNMENVDAMGVHTGDSVVVAPAQTLSNAEFQMLRRTSINVVRHLGIVGECNIQFALHPTSMEYCIIEVNARLSRSSALASKATGYPLAFIAAKIALGIPLPEIKNVVSGKTSACFEPSLDYMVTKIPRWDLDRFHGTSSRIGSSMKSVGEVMAIGRTFEESFQKALRMCHPSIEGFTPRLPMNKEWPSNLDLRKELSEPSSTRIYAIAKAIDDNMSLDEIEKLTYIDKWFLYKMRDILNMEKTLKGLNSESMTEETLKRAKEIGFSDKQISKCLGLTEAQTRELRLKKNIHPWVKQIDTLAAEYPSVTNYLYVTYNGQEHDVNFDDHGMMVLGCGPYHIGSSVEFDWCAVSSIRTLRQLGKKTVVVNCNPETVSTDFDECDKLYFEELSLERILDIYHQEACGGCIISVGGQIPNNLAVPLYKNGVKIMGTSPLQIDRAEDRSIFSAVLDELKVAQAPWKAVNTLNEALEFAKSVDYPCLLRPSYVLSGSAMNVVFSEDEMKKFLEEATRVSQEHPVVLTKFVEGAREVEMDAVGKDGRVISHAISEHVEDAGVHSGDATLMLPTQTISQGAIEKVKDATRKIAKAFAISGPFNVQFLVKGNDVLVIECNLRASRSFPFVSKTLGVDFIDVATKVMIGENVDEKHLPTLDHPIIPADYVAIKAPMFSWPRLRDADPILRCEMASTGEVACFGEGIHTAFLKAMLSTGFKIPQKGILIGIQQSFRPRFLGVAEQLHNEGFKLFATEATSDWLNANNVPATPVAWPSQEGQNPSLSSIRKLIRDGSIDLVINLPNNNTKFVHDNYVIRRTAVDSGIPLLTNFQVTKLFAEAVQKSRKVDSKSLFHYRQYSAGKAA

SEQ ID NO: 11645 - protein, 1049 aa, Homo sapiens
  Payload ID: 2292
  Gene Symbol: CPS1
  Gene Name: carbamoyl-phosphate synthase 1, mitochondrial
  Uniprot ID: P31327
  ENSP ID: ENSP00000406136
MKEENVKTVLMNPNIASVQTNEVGLKQADTVYFLPITPQFVTEVIKAEQPDGLILGMGGQTALNCGVELFKRGVLKEYGVKVLGTSVESIMATEDRQLFSDKLNEINEKIAPSFAVESIEDALKAADTIGYPVMIRSAYALGGLGSGICPNRETLMDLSTKAFAMTNQILVEKSVTGWKEIEYEVVRDADDNCVTVCNMENVDAMGVHTGDSVVVAPAQTLSNAEFQMLRRTSINVVRHLGIVGECNIQFALHPTSMEYCIIEVNARLSRSSALASKATGYPLAFIAAKIALGIPLPEIKNVVSGKTSACFEPSLDYMVTKIPRWDLDRFHGTSSRIGSSMKSVGEVMAIGRTFEESFQKALRMCHPSIEGFTPRLPMNKEWPSNLDLRKELSEPSSTRIYAIAKAIDDNMSLDEIEKLTYIDKWFLYKMRDILNMEKTLKGLNSESMTEETLKRAKEIGFSDKQISKCLGLTEAQTRELRLKKNIHPWVKQIDTLAAEYPSVTNYLYVTYNGQEHDVNFDDHGMMVLGCGPYHIGSSVEFDWCAVSSIRTLRQLGKKTVVVNCNPETVSTDFDECDKLYFEELSLERILDIYHQEACGGCIISVGGQIPNNLAVPLYKNGVKIMGTSPLQIDRAEDRSIFSAVLDELKVAQAPWKAVNTLNEALEFAKSVDYPCLLRPSYVLSGSAMNVVFSEDEMKKFLEEATRVSQEHPVVLTKFVEGAREVEMDAVGKDGRVISHAISEHVEDAGVHSGDATLMLPTQTISQGAIEKVKDATRKIAKAFAISGPFNVQFLVKGNDVLVIECNLRASRSFPFVSKTLGVDFIDVATKVMIGENVDEKHLPTLDHPIIPADYVAIKAPMFSWPRLRDADPILRCEMASTGEVACFGEGIHTAFLKAMLSTGFKIPQKGILIGIQQSFRPRFLGVAEQLHNEGFKLFATEATSDWLNANNVPATPVAWPSQEGQNPSLSSIRKLIRDGSIDLVINLPNNNTKFVHDNYVIRRTAVDSGIPLLTNFQVTKLFAEAVQKSRKVDSKSLFHYRQYSAGKAA

SEQ ID NO: 11646 - protein, 157 aa, Homo sapiens
  Payload ID: 2292
  Gene Symbol: CPS1
  Gene Name: carbamoyl-phosphate synthase 1, mitochondrial
  ENSP ID: ENSP00000430644
MPQIIKMTRILTAFKVVRTLKTGFGFTNVTAHQKWKFSRPGIRLLSVKAQTAHIVLEDGTKMKGYSFGHPSSVAGEVVFNTGLGGYPEAITDPAYKGQILTMANPIIGNGGAPDTTALDELGLSKYLESNGIKVSGLLVLDYSKDYNHWLATKSLGQ

SEQ ID NO: 11647 - protein, 121 aa, Homo sapiens; identical to SEQ ID NO: 11643
  Payload ID: 2292
  Gene Symbol: CPS1
  Gene Name: carbamoyl-phosphate synthase 1, mitochondrial
  ENSP ID: ENSP00000430697

SEQ ID NO: 11648 - protein, 513 aa, Homo sapiens [sequence omitted]

SEQ ID NO: 11649 - protein, 2225 aa, Homo sapiens
  Payload ID: 2293
  Gene Symbol: CAD
  Gene Name: carbamoyl-phosphate synthetase 2, aspartate transcarbamylase, and dihydroorotase
  Uniprot ID: P27708
  ENSP ID: ENSP00000264705
MAALVLEDGSVLRGQPFGAAVSTAGEVVFQTGMVGYPEALTDPSYKAQILVLTYPLIGNYGIPPDEMDEFGLCKWFESSGIHVAALVVGECCPTPSHWSATRTLHEWLQQHGIPGLQGVDTRELTKKLREQGSLLGKLVQNGTEPSSLPFLDPNARPLVPEVSIKTPRVFNTGGAPRILALDCGLKYNQIRCLCQRGAEVTVVPWDHALDSQEYEGLFLSNGPGDPASYPSVVSTLSRVLSEPNPRPVFGICLGHQLLALAIGAKTYKMRYGNRGHNQPCLLVGSGRCFLTSQNHGFAVETDSLPADWAPLFTNANDGSNEGIVHNSLPFFSVQFHPEHQAGPSDMELLFDIFLETVKEATAGNPGGQTVRERLTERLCPPGIPTPGSGLPPPRKVLILGSGGLSIGQAGEFDYSGSQAIKALKEENIQTLLINPNIATVQTSQGLADKVYFLPITPHYVTQVIRNERPDGVLLTFGGQTALNCGVELTKAGVLARYGVRVLGTPVETIELTEDRRAFAARMAEIGEHVAPSEAANSLEQAQAAAERLGYPVLVRAAFALGGLGSGFASNREELSALVAPAFAHTSQVLVDKSLKGWKEIEYEVVRDAYGNCVTVCNMENLDPLGIHTGESIVVAPSQTLNDREYQLLRQTAIKVTQHLGIVGECNVQYALNPESEQYYIIEVNARLSRSSALASKATGYPLAYVAAKLALGIPLPELRNSVTGGTAAFEPSVDYCVVKIPRWDLSKFLRVSTKIGSCMKSVGEVMGIGRSFEEAFQKALRMVDENCVGFDHTVKPVSDMELETPTDKRIFVVAAALWAGYSVDRLYELTRIDRWFLHRMKRIIAHAQLLEQHRGQPLPPDLLQQAKCLGFSDKQIALAVLSTELAVRKLRQELGICPAVKQIDTVAAEWPAQTNYLYLTYWGTTHDLTFRTPHVLVLGSGVYRIGSSVEFDWCAVGCIQQLRKMGYKTIMVNYNPETVSTDYDMCDRLYFDEISFEVVMDIYELENPEGVILSMGGQLPNNMAMALHRQQCRVLGTSPEAIDSAENRFKFSRLLDTIGISQPQWRELSDLESARQFCQTVGYPCVVRPSYVLSGAAMNVAYTDGDLERFLSSAAAVSKEHPVVISKFIQEAKEIDVDAVASDGVVAAIAISEHVENAGVHSGDATLVTPPQDITAKTLERIKAIVHAVGQELQVTGPFNLQLIAKDDQLKVIECNVRVSRSFPFVSKTLGVDLVALATRVIMGEEVEPVGLMTGSGVVGVKVPQFSFSRLAGADVVLGVEMTSTGEVAGFGESRCEAYLKAMLSTGFKIPKKNILLTIGSYKNKSELLPTVRLLESLGYSLYASLGTADFYTEHGVKVTAVDWHFEEAVDGECPPQRSILEQLAEKNFELVINLSMRGAGGRRLSSFVTKGYRTRRLAADFSVPLIIDIKCTKLFVEALGQIGPAPPLKVHVDCMTSQKLVRLPGLIDVHVHLREPGGTHKEDFASGTAAALAGGITMVCAMPNTRPPIIDAPALALAQKLAEAGARCDFALFLGASSENAGTLGTVAGSAAGLKLYLNETFSELRLDSVVQWMEHFETWPSHLPIVAHAEQQTVAAVLMVAQLTQRSVHICHVARKEEILLIKAAKARGLPVTCEVAPHHLFLSHDDLERLGPGKGEVRPELGSRQDVEALWENMAVIDCFASDHAPHTLEEKCGSRPPPGFPGLETMLPLLLTAVSEGRLSLDDLLQRLHHNPRRIFHLPPQEDTYVEVDLEHEWTIPSHMPFSKAHWTPFEGQKVKGTVRRVVLRGEVAYIDGQVLVPPGYGQDVRKWPQGAVPQLPPSAPATSEMTTTPERPRRGIPGLPDGRFHLPPRIHRASDPGLPAEEPKEKSSRKVAEPELMGTPDGTCYPPPPVPRQASPQNLGTPGLLHPQTSPLLHSLVGQHILSVQQFTKDQMSHLFNVAHTLRMMVQKERSLDILKGKVMASMFYEVSTRTSSSFAAAMARLGGAVLSFSEATSSVQKGESLADSVQTMSCYADVVVLRHPQPGAVELAAKHCRRPVINAGDGVGEHPTQALLDIFTIREELGTVNGMTITMVGDLKHGRTVHSLACLLTQYRVSLRYVAPPSLRMPPTVRAFVASRGTKQEEFESIEEALPDTDVLYMTRIQKERFGSTQEYEACFGQFILTPHIMTRAKKKMVVMHPMPRVNEISVEVDSDPRAAYFRQAENGMYIRMALLATVLGRF

SEQ ID NO: 11650 - protein, 2162 aa, Homo sapiens
  Payload ID: 2293
  Gene Symbol: CAD
  Gene Name: carbamoyl-phosphate synthetase 2, aspartate transcarbamylase, and dihydroorotase
  ENSP ID: ENSP00000384510
MAALVLEDGSVLRGQPFGAAVSTAGEVVFQTGMVGYPEALTDPSYKAQILVLTYPLIGNYGIPPDEMDEFGLCKWFESSGIHVAALVVGECCPTPSHWSATRTLHEWLQQHGIPGLQGVDTRELTKKLREQGSLLGKLVQNGTEPSSLPFLDPNARPLVPEVSIKTPRVFNTGGAPRILALDCGLKYNQIRCLCQRGAEVTVVPWDHALDSQEYEGLFLSNGPGDPASYPSVVSTLSRVLSEPNPRPVFGICLGHQLLALAIGAKTYKMRYGNRGHNQPCLLVGSGRCFLTSQNHGFAVETDSLPADWAPLFTNANDGSNEGIVHNSLPFFSVQFHPEHQAGPSDMELLFDIFLETVKEATAGNPGGQTVRERLTERLCPPGIPTPGSGLPPPRKVLILGSGGLSIGQAGEFDYSGSQAIKALKEENIQTLLINPNIATVQTSQGLADKVYFLPITPHYVTQVIRNERPDGVLLTFGGQTALNCGVELTKAGVLARYGVRVLGTPVETIELTEDRRAFAARMAEIGEHVAPSEAANSLEQAQAAAERLGYPVLVRAAFALGGLGSGFASNREELSALVAPAFAHTSQVLVDKSLKGWKEIEYEVVRDAYGNCVTYYIIEVNARLSRSSALASKATGYPLAYVAAKLALGIPLPELRNSVTGGTAAFEPSVDYCVVKIPRWDLSKFLRVSTKIGSCMKSVGEVMGIGRSFEEAFQKALRMVDENCVGFDHTVKPVSDMELETPTDKRIFVVAAALWAGYSVDRLYELTRIDRWFLHRMKRIIAHAQLLEQHRGQPLPPDLLQQAKCLGFSDKQIALAVLSTELAVRKLRQELGICPAVKQIDTVAAEWPAQTNYLYLTYWGTTHDLTFRTPHVLVLGSGVYRIGSSVEFDWCAVGCIQQLRKMGYKTIMVNYNPETVSTDYDMCDRLYFDEISFEVVMDIYELENPEGVILSMGGQLPNNMAMALHRQQCRVLGTSPEAIDSAENRFKFSRLLDTIGISQPQWRELSDLESARQFCQTVGYPCVVRPSYVLSGAAMNVAYTDGDLERFLSSAAAVSKEHPVVISKFIQEAKEIDVDAVASDGVVAAIAISEHVENAGVHSGDATLVTPPQDITAKTLERIKAIVHAVGQELQVTGPFNLQLIAKDDQLKVIECNVRVSRSFPFVSKTLGVDLVALATRVIMGEEVEPVGLMTGSGVVGVKVPQFSFSRLAGADVVLGVEMTSTGEVAGFGESRCEAYLKAMLSTGFKIPKKNILLTIGSYKNKSELLPTVRLLESLGYSLYASLGTADFYTEHGVKVTAVDWHFEEAVDGECPPQRSILEQLAEKNFELVINLSMRGAGGRRLSSFVTKGYRTRRLAADFSVPLIIDIKCTKLFVEALGQIGPAPPLKVHVDCMTSQKLVRLPGLIDVHVHLREPGGTHKEDFASGTAAALAGGITMVCAMPNTRPPIIDAPALALAQKLAEAGARCDFALFLGASSENAGTLGTVAGSAAGLKLYLNETFSELRLDSVVQWMEHFETWPSHLPIVAHAEQQTVAAVLMVAQLTQRSVHICHVARKEEILLIKAAKARGLPVTCEVAPHHLFLSHDDLERLGPGKGEVRPELGSRQDVEALWENMAVIDCFASDHAPHTLEEKCGSRPPPGFPGLETMLPLLLTAVSEGRLSLDDLLQRLHHNPRRIFHLPPQEDTYVEVDLEHEWTIPSHMPFSKAHWTPFEGQKVKGTVRRVVLRGEVAYIDGQVLVPPGYGQDVRKWPQGAVPQLPPSAPATSEMTTTPERPRRGIPGLPDGRFHLPPRIHRASDPGLPAEEPKEKSSRKVAEPELMGTPDGTCYPPPPVPRQASPQNLGTPGLLHPQTSPLLHSLVGQHILSVQQFTKDQMSHLFNVAHTLRMMVQKERSLDILKGKVMASMFYEVSTRTSSSFAAAMARLGGAVLSFSEATSSVQKGESLADSVQTMSCYADVVVLRHPQPGAVELAAKHCRRPVINAGDGVGEHPTQALLDIFTIREELGTVNGMTITMVGDLKHGRTVHSLACLLTQYRVSLRYVAPPSLRMPPTVRAFVASRGTKQEEFESIEEALPDTDVLYMTRIQKERFGSTQEYEACFGQFILTPHIMTRAKKKMVVMHPMPRVNEISVEVDSDPRAAYFRQAENGMYIRMALLATVLGRF

SEQ ID NO: 11651 - protein, 279 aa, Homo sapiens
  Payload ID: 2293
  Gene Symbol: CAD
  Gene Name: carbamoyl-phosphate synthetase 2, aspartate transcarbamylase, and dihydroorotase
  ENSP ID: ENSP00000388740
  MOD_RES (1)..(1): Any amino acid
XLLTAVSEGRLSLDDLLQRLHHNPRRIFHLPPQEDTYVEVDLEHEWTIPSHMPFSKAHWTPFEGQKVKGTVRRVVLRGEVAYIDGQVLVPPGYGQDVRKWPQGAVPQLPPSAPATSEMTTTPERPRRGIPGLPDGRFHLPPRIHRASDPGLPAVFLRPGAGIPRGSRAWAEEPKEKSSRKVAEPELMGTPDGTCYPPPPVPRQASPQNLGTPGLLHPQTSPLLHSLVGQHILSVQQFTKDQMSHLFNVAHTLRMMVQKERSLDILKGKVMASMFYEVST

SEQ ID NO: 11652 - protein, 293 aa, Homo sapiens
  Payload ID: 2293
  Gene Symbol: CAD
  Gene Name: carbamoyl-phosphate synthetase 2, aspartate transcarbamylase, and dihydroorotase
  ENSP ID: ENSP00000405416
  MOD_RES (1)..(1): Any amino acid
XASMFYEVSTRTSSSFAAAMARLGGAVLSFSEATSSVQKGESLADSVQTMSCYADVVVLRHPQPGAVELAAKHCRRPVINAGDGVGEHPTQALLDIFTIREELGTVNGMTITMVGDLKHGRTVHSLACLLTQYRVSLRYVAPPSLRMPPTVRAFVASRGTKQVRPSQPCLEAMEMWVGQSEPSAASTMALLTLQEEFESIEEALPDTDVLYMTRIQKERFGSTQEYEACFGQFILTPHIMTRAKKKMVVMHPMPRVNEISVEVDSDPRAAYFRQAENGMYIRMALLATVLGRF

SEQ ID NO: 11653 - protein, 269 aa, Homo sapiens
  Payload ID: 2293
  Gene Symbol: CAD
  Gene Name: carbamoyl-phosphate synthetase 2, aspartate transcarbamylase, and dihydroorotase
  ENSP ID: ENSP00000414742
  MOD_RES (1)..(1): Any amino acid
XVKVTAVDWHFEEAVDGECPPQRSILEQLAEKNFELVINLSMRGAGGRRLSSFVTKGYRTRRLAADFSVPLIIDIKCTKLFVELTAFHLQALGQIGPAPPLKVHVDCMTSQKLVRLPGLIDVHVHLREPGGTHKEDFASGTAAALAGGITMVCAMPNTRPPIIDAPALALAQKLAEAGARCDFALFLGASSENAGTLGTVAGSAAGLKLYLNETFSELRLDSVVQWMEHFETWPSHLPIVAHAEQQTVAAVLMVAQLTQRSVHICHVAR

SEQ ID NO: 11654 - protein, 352 aa, Homo sapiens
  Payload ID: 2294
  Gene Symbol: CHST11
  Gene Name: carbohydrate (chondroitin 4) sulfotransferase 11
  Uniprot ID: Q9NPF2
  ENSP ID: ENSP00000305725
MKPALLEVMRMNRICRMVLATCLGSFILVIFYFQSMLHPVMRRNPFGVDICCRKGSRSPLQELYNPIQLELSNTAVLHQMRRDQVTDTCRANSATSRKRRVLTPNDLKHLVVDEDHELIYCYVPKVACTNWKRLMMVLTGRGKYSDPMEIPANEAHVSANLKTLNQYSIPEINHRLKSYMKFLFVREPFERLVSAYRNKFTQKYNISFHKRYGTKIIKRQRKNATQEALRKGDDVKFEEFVAYLIDPHTQREEPFNEHWQTVYSLCHPCHIHYDLVGKYETLEEDSNYVLQLAGVGSYLKFPTYAKSTRTTDEMTTEFFQNISSEHQTQLYEVYKLDFLMFNYSVPSYLKLE

SEQ ID NO: 11655 - protein, 72 aa, Homo sapiens
  Payload ID: 2294
  Gene Symbol: CHST11
  Gene Name: carbohydrate (chondroitin 4) sulfotransferase 11
  ENSP ID: ENSP00000448678
MKPALLEVMRMNRICRMVLATCLGSFILVIFYFQIMRRNPFGVDICCRKGSRSPLQELYNPIQVSFKHSVSM

SEQ ID NO: 11656 - protein, 77 aa, Homo sapiens
  Payload ID: 2294
  Gene Symbol: CHST11
  Gene Name: carbohydrate (chondroitin 4) sulfotransferase 11
  ENSP ID: ENSP00000449093
MKPALLEVMRMNRICRMVLATCLGSFILVIFYFQSMLHPVMRRNPFGVDICCRKGSRSPLQELYNPIQVSFKHSVSM

SEQ ID NO: 11657 - protein, 158 aa, Homo sapiens
  Payload ID: 2294
  Gene Symbol: CHST11
  Gene Name: carbohydrate (chondroitin 4) sulfotransferase 11
  ENSP ID: ENSP00000449095
MRRNPFGVDICCRKGSRSPLQELYNPIQLELSNTAVLHQMRRDQVTDTCRANSATSRKRRVLTPNDLKHLVVDEDHELIYCYVPKVACTNWKRLMMVLTGRGKYSDPMEIPANEAHVSANLKTLNQYSIPEINHRLKSYMKFLFVREPFERLVSAYRN

SEQ ID NO: 11658 - protein, 347 aa, Homo sapiens
  Payload ID: 2294
  Gene Symbol: CHST11
  Gene Name: carbohydrate (chondroitin 4) sulfotransferase 11
  Uniprot ID: Q9NPF2
  ENSP ID: ENSP00000450004
MKPALLEVMRMNRICRMVLATCLGSFILVIFYFQIMRRNPFGVDICCRKGSRSPLQELYNPIQLELSNTAVLHQMRRDQVTDTCRANSATSRKRRVLTPNDLKHLVVDEDHELIYCYVPKVACTNWKRLMMVLTGRGKYSDPMEIPANEAHVSANLKTLNQYSIPEINHRLKSYMKFLFVREPFERLVSAYRNKFTQKYNISFHKRYGTKIIKRQRKNATQEALRKGDDVKFEEFVAYLIDPHTQREEPFNEHWQTVYSLCHPCHIHYDLVGKYETLEEDSNYVLQLAGVGSYLKFPTYAKSTRTTDEMTTEFFQNISSEHQTQLYEVYKLDFLMFNYSVPSYLKLE

SEQ ID NO: 11659 - protein, 414 aa, Homo sapiens
  Payload ID: 2295
  Gene Symbol: CHST12
  Gene Name: carbohydrate (chondroitin 4) sulfotransferase 12
  Uniprot ID: Q9NRB3
  ENSP ID: ENSP00000258711
MTKARLFRLWLVLGSVFMILLIIVYWDSAGAAHFYLHTSFSRPHTGPPLPTPGPDRDRELTADSDVDEFLDKFLSAGVKQSDLPRKETEQPPAPGSMEESVRGYDWSPRDARRSPDQGRQQAERRSVLRGFCANSSLAFPTKERAFDDIPNSELSHLIVDDRHGAIYCYVPKVACTNWKRVMIVLSGSLLHRGAPYRDPLRIPREHVHNASAHLTFNKFWRRYGKLSRHLMKVKLKKYTKFLFVRDPFVRLISAFRSKFELENEEFYRKFAVPMLRLYANHTSLPASAREAFRAGLKVSFANFIQYLLDPHTEKLAPFNEHWRQVYRLCHPCQIDYDFVGKLETLDEDAAQLLQLLQVDRQLRFPPSYRNRTASSWEEDWFAKIPLAWRQQLYKLYEADFVLFGYPKPENLLRD

SEQ ID NO: 11660 - protein, 245 aa, Homo sapiens
  Payload ID: 2295
  Gene Symbol: CHST12
  Gene Name: carbohydrate (chondroitin 4) sulfotransferase 12
  ENSP ID: ENSP00000411207
MTKARLFRLWLVLGSVFMILLIIVYWDSAGAAHFYLHTSFSRPHTGPPLPTPGPDRDRELTADSDVDEFLDKFLSAGVKQSDLPRKETEQPPAPGSMEESVRGYDWSPRDARRSPDQGRQQAERRSVLRGFCANSSLAFPTKERAFDDIPNSELSHLIVDDRHGAIYCYVPKVACTNWKRVMIVLSGSLLHRGAPYRDPLRIPREHVHNASAHLTFNKFWRRYGKLSRHLMKVKLKKYTKFLFVR

SEQ ID NO: 11661 - protein, 414 aa, Homo sapiens; identical to SEQ ID NO: 11659
  Payload ID: 2295
  Gene Symbol: CHST12
  Gene Name: carbohydrate (chondroitin 4) sulfotransferase 12
  Uniprot ID: Q9NRB3
  ENSP ID: ENSP00000481912

SEQ ID NO: 11662 - protein, 341 aa, Homo sapiens
  Payload ID: 2296
  Gene Symbol: CHST13
  Gene Name: carbohydrate (chondroitin 4) sulfotransferase 13
  Uniprot ID: Q8NET6
  ENSP ID: ENSP00000317404
MGRRCCRRRVLAAACLGAALLLLCAAPRSLRPAFGNRALGSSWLGGEKRSPLQKLYDLDQDPRSTLAKVHRQRRDLLNSACSRHSRRQRLLQPEDLRHVLVDDAHGLLYCYVPKVACTNWKRVLLALSGQARGDPRAISAQEAHAPGRLPSLADFSPAEINRRLRAYLAFLFVREPFERLASAYRNKLARPYSAAFQRRYGARIVQRLRPRALPDARARGHDVRFAEFLAYLLDPRTRREEPFNEHWERAHALCHPCRLRYDVVGKFETLAEDAAFVLGLAGASDLSFPGPPRPRGAAASRDLAARLFRDISPFYQRRLFDLYKMDFLLFNYSAPSYLRLL

SEQ ID NO: 11663 - protein, 225 aa, Homo sapiens [sequence omitted]

SEQ ID NO: 11664 - protein, 479 aa, Homo sapiens
  Payload ID: 2297
  Gene Symbol: CHST3
  Gene Name: carbohydrate (chondroitin 6) sulfotransferase 3
  Uniprot ID: Q7LGC8
  ENSP ID: ENSP00000362207
MEKGLTLPQDCRDFVHSLKMRSKYALFLVFVVIVFVFIEKENKIISRVSDKLKQIPQALADANSTDPALILAENASLLSLSELDSAFSQLQSRLRNLSLQLGVEPAMEAAGEEEEEQRKEEEPPRPAVAGPRRHVLLMATTRTGSSFVGEFFNQQGNIFYLFEPLWHIERTVSFEPGGANAAGSALVYRDVLKQLFLCDLYVLEHFITPLPEDHLTQFMFRRGSSRSLCEDPVCTPFVKKVFEKYHCKNRRCGPLNVTLAAEACRRKEHMALKAVRIRQLEFLQPLAEDPRLDLRVIQLVRDPRAVLASRMVAFAGKYKTWKKWLDDEGQDGLREEEVQRLRGNCESIRLSAELGLRQPAWLRGRYMLVRYEDVARGPLQKAREMYRFAGIPLTPQVEDWIQKNTQAAHDGSGIYSTQKNSSEQFEKWRFSMPFKLAQVVQAACGPAMRLFGYKLARDAAALTNRSVSLLEERGTFWVT

SEQ ID NO: 11665 - protein, 411 aa, Homo sapiens
  Payload ID: 2298
  Gene Symbol: CHST1
  Gene Name: carbohydrate (keratan sulfate Gal-6) sulfotransferase 1
  Uniprot ID: O43916
  ENSP ID: ENSP00000309270
MQCSWKAVLLLALASIAIQYTAIRTFTAKSFHTCPGLAEAGLAERLCEESPTFAYNLSRKTHILILATTRSGSSFVGQLFNQHLDVFYLFEPLYHVQNTLIPRFTQGKSPADRRVMLGASRDLLRSLYDCDLYFLENYIKPPPVNHTTDRIFRRGASRVLCSRPVCDPPGPADLVLEEGDCVRKCGLLNLTVAAEACRERSHVAIKTVRVPEVNDLRALVEDPRLNLKVIQLVRDPRGILASRSETFRDTYRLWRLWYGTGRKPYNLDVTQLTTVCEDFSNSVSTGLMRPPWLKGKYMLVRYEDLARNPMKKTEEIYGFLGIPLDSHVARWIQNNTRGDPTLGKHKYGTVRNSAATAEKWRFRLSYDIVAFAQNACQQVLAQLGYKIAASEEELKNPSVSLVEERDFRPFS

SEQ ID NO: 11666 - protein, 376 aa, Homo sapiens
  Payload ID: 2299
  Gene Symbol: CHST14
  Gene Name: carbohydrate (N-acetylgalactosamine 4-0) sulfotransferase 14
  Uniprot ID: Q8NCH0
  ENSP ID: ENSP00000307297
MFPRPLTPLAAPNGAEPLGRALRRAPLGRARAGLGGPPLLLPSMLMFAVIVASSGLLLMIERGILAEMKPLPLHPPGREGTAWRGKAPKPGGLSLRAGDADLQVRQDVRNRTLRAVCGQPGMPRDPWDLPVGQRRTLLRHILVSDRYRFLYCYVPKVACSNWKRVMKVLAGVLDSVDVRLKMDHRSDLVFLADLRPEEIRYRLQHYFKFLFVREPLERLLSAYRNKFGEIREYQQRYGAEIVRRYRAGAGPSPAGDDVTFPEFLRYLVDEDPERMNEHWMPVYHLCQPCAVHYDFVGSYERLEADANQVLEWVRAPPHVRFPARQAWYRPASPESLHYHLCSAPRALLQDVLPKYILDFSLFAYPLPNVTKEACQQ

SEQ ID NO: 11667 - protein, 351 aa, Homo sapiens
  Payload ID: 2299
  Gene Symbol: CHST14
  Gene Name: carbohydrate (N-acetylgalactosamine 4-0) sulfotransferase 14
  ENSP ID: ENSP00000453882
MFPRPLTPLAAPNGAEPLGRALRRAPLGRARAGLGGPPLLLPSMLMFAVIVASSGLLLMIERGILAEMKPLPLHPPGREGTAWRGKAPKPGGLSLRAGDADLQVRQDVRNRTLRAVCGQPGMPRDPWDLPVGQRRTLLRHILVLAGVLDSVDVRLKMDHRSDLVFLADLRPEEIRYRLQHYFKFLFVREPLERLLSAYRNKFGEIREYQQRYGAEIVRRYRAGAGPSPAGDDVTFPEFLRYLVDEDPERMNEHWMPVYHLCQPCAVHYDFVGSYERLEADANQVLEWVRAPPHVRFPARQAWYRPASPESLHYHLCSAPRALLQDVLPKYILDFSLFAYPLPNVTKEACQQ

SEQ ID NO: 11668 - protein, 424 aa, Homo sapiens
  Payload ID: 2300
  Gene Symbol: CHST8
  Gene Name: carbohydrate (N-acetylgalactosamine 4-0) sulfotransferase 8
  Uniprot ID: Q9H2A9
  ENSP ID: ENSP00000262622
MTLRPGTMRLACMFSSILLFGAAGLLLFISLQDPTELAPQQVPGIKFNIRPRQPHHDLPPGGSQDGDLKEPTERVTRDLSSGAPRGRNLPAPDQPQPPLQRGTRLRLRQRRRRLLIKKMPAAATIPANSSDAPFIRPGPGTLDGRWVSLHRSQQERKRVMQEACAKYRASSSRRAVTPRHVSRIFVEDRHRVLYCEVPKAGCSNWKRVLMVLAGLASSTADIQHNTVHYGSALKRLDTFDRQGILHRLSTYTKMLFVREPFERLVSAFRDKFEHPNSYYHPVFGKAILARYRANASREALRTGSGVRFPEFVQYLLDVHRPVGMDIHWDHVSRLCSPCLIDYDFVGKFESMEDDANFFLSLIRAPRNLTFPRFKDRHSQEARTTARIAHQYFAQLSALQRQRTYDFYYMDYLMFNYSKPFADLY

SEQ ID NO: 11669 - protein, 424 aa, Homo sapiens; identical to SEQ ID NO: 11668
  Payload ID: 2300
  Gene Symbol: CHST8
  Gene Name: carbohydrate (N-acetylgalactosamine 4-0) sulfotransferase 8
  Uniprot ID: Q9H2A9
  ENSP ID: ENSP00000392604

SEQ ID NO: 11670 - protein, 424 aa, Homo sapiens; identical to SEQ ID NO: 11668
  Payload ID: 2300
  Gene Symbol: CHST8
  Gene Name: carbohydrate (N-acetylgalactosamine 4-0) sulfotransferase 8
  Uniprot ID: Q9H2A9
  ENSP ID: ENSP00000393879

SEQ ID NO: 11671 - protein, 178 aa, Homo sapiens
  Payload ID: 2300
  Gene Symbol: CHST8
  Gene Name: carbohydrate (N-acetylgalactosamine 4-0) sulfotransferase 8
  ENSP ID: ENSP00000467012
MTLRPGTMRLACMFSSILLFGAAGLLLFISLQDPTELAPQQVPGIKFNIRPRQPHHDLPPGGSQDGDLKEPTERVTRDLSSGAPRGRNLPAPDQPQPPLQRGTRLRLRQRRRRLLIKKMPAAATIPANSSDAPFIRPGPGTLDGRWVSLHRSQQERKRVMQEACAKYRASSSRRAVTP

SEQ ID NO: 11672 - protein, 358 aa, Homo sapiens
  Payload ID: 2301
  Gene Symbol: CHST9
  Gene Name: carbohydrate (N-acetylgalactosamine 4-0) sulfotransferase 9
  ENSP ID: ENSP00000284224
MPEDVREKKENLLLNSERSTRLLTKTSHSQGGDQALSKSTGSPTEKLIEKRQGAKTVFNKFSNMNWPVDIHPLNKSLVKDNKWKKTEETQEKRRSFLQEFCKKYGGVSHHQSHLFHTVSRIYVEDKHKILYCEVPKAGCSNWKRILMVLNGLASSAYNISHNAVHYGKHLKKLDSFDLKGIYTRLNTYTKAVFVRDPMERLVSAFRDKFEHPNSYYHPVFGKAIIKKYRPNACEEALINGSGVKFKEFIHYLLDSHRPVGMDIHWEKVSKLCYPCLINYDFVGKFETLEEDANYFLQMIGAPKELKFPNFKDRHSSDERTNAQVVRQYLKDLTRTERQLIYDFYYLDYLMFNYTTPFL

SEQ ID NO: 11673 - protein, 443 aa, Homo sapiens
  Payload ID: 2301
  Gene Symbol: CHST9
  Gene Name: carbohydrate (N-acetylgalactosamine 4-0) sulfotransferase 9
  Uniprot ID: Q7L1S5
  ENSP ID: ENSP00000462852
MQPSEMVMNPKQVFLSVLIFGVAGLLLFMYLQVWIEEQHTGRVEKRREQKVTSGWGPVKYLRPVPRIMSTEKIQEHITNQNPKFHMPEDVREKKENLLLNSERSTRLLTKTSHSQGGDQALSKSTGSPTEKLIEKRQGAKTVFNKFSNMNWPVDIHPLNKSLVKDNKWKKTEETQEKRRSFLQEFCKKYGGVSHHQSHLFHTVSRIYVEDKHKILYCEVPKAGCSNWKRILMVLNGLASSAYNISHNAVHYGKHLKKLDSFDLKGIYTRLNTYTKAVFVRDPMERLVSAFRDKFEHPNSYYHPVFGKAIIKKYRPNACEEALINGSGVKFKEFIHYLLDSHRPVGMDIHWEKVSKLCYPCLINYDFVGKFETLEEDANYFLQMIGAPKELKFPNFKDRHSSDERTNAQVVRQYLKDLTRTERQLIYDFYYLDYLMFNYTTPFL

SEQ ID NO: 11674 - protein, 74 aa, Homo sapiens
  Payload ID: 2301
  Gene Symbol: CHST9
  Gene Name: carbohydrate (N-acetylgalactosamine 4-0) sulfotransferase 9
  Uniprot ID: Q7L1S5
  ENSP ID: ENSP00000464655
MQPSEMVMNPKQVFLSVLIFGVAGLLLFMYLQVWIEEQHTGRVEKRREQKVTSGWGPVKYLRPVPRIKPQVSHA

SEQ ID NO: 11675 - protein, 443 aa, Homo sapiens; identical to SEQ ID NO: 11673
  Payload ID: 2301
  Gene Symbol: CHST9
  Gene Name: carbohydrate (N-acetylgalactosamine 4-0) sulfotransferase 9
  Uniprot ID: Q7L1S5
  ENSP ID: ENSP00000480991

SEQ ID NO: 11676 - protein, 561 aa, Homo sapiens
  Payload ID: 2302
  Gene Symbol: CHST15
  Gene Name: carbohydrate (N-acetylgalactosamine 4-sulfate 6-O) sulfotransferase 15
  Uniprot ID: Q7LFX5
  ENSP ID: ENSP00000333947
MRHCINCCIQLLPDGAHKQQVNCQGGPHHGHQACPTCKGENKILFRVDSKQMNLLAVLEVRTEGNENWGGFLRFKKGKRCSLVFGLIIMTLVMASYILSGAHQELLISSPFHYGGFPSNPSLMDSENPSDTKEHHHQSSVNNISYMKDYPSIKLIINSITTRIEFTTRQLPDLEDLKKQELHMFSVIPNKFLPNSKSPCWYEEFSGQNTTDPYLTNSYVLYSKRFRSTFDALRKAFWGHLAHAHGKHFRLRCLPHFYIIGQPKCGTTDLYDRLRLHPEVKFSAIKEPHWWTRKRFGIVRLRDGLRDRYPVEDYLDLFDLAAHQIHQGLQASSAKEQSKMNTIIIGEASASTMWDNNAWTFFYDNSTDGEPPFLTQDFIHAFQPNARLIVMLRDPVERLYSDYLYFASSNKSADDFHEKVTEALQLFENCMLDYSLRACVYNNTLNNAMPVRLQVGLYAVYLLDWLSVFDKQQFLILRLEDHASNVKYTMHKVFQFLNLGPLSEKQEALMTKSPASNARRPEDRNLGPMWPITQKILRDFYRPFNARLAQVLADEAFAWKTT

SEQ ID NO: 11677 - protein, 561 aa, Homo sapiens; identical to SEQ ID NO: 11676
  Payload ID: 2302
  Gene Symbol: CHST15
  Gene Name: carbohydrate (N-acetylgalactosamine 4-sulfate 6-O) sulfotransferase 15
  Uniprot ID: Q7LFX5
  ENSP ID: ENSP00000402394

SEQ ID NO: 11678 - protein, 506 aa, Homo sapiens
  Payload ID: 2302
  Gene Symbol: CHST15
  Gene Name: carbohydrate (N-acetylgalactosamine 4-sulfate 6-O) sulfotransferase 15
  Uniprot ID: Q7LFX5
  ENSP ID: ENSP00000485905
MRHCINCCIQLLPDGAHKQQVNCQGGPHHGHQACPTCKGENKILFRVDSKQMNLLAVLEVRTEGNENWGGFLRFKKGKRCSLVFGLIIMTLVMASYILSGAHQELLISSPFHYGGFPSNPSLMDSENPSDTKEHHHQSSVNNISYMKDYPSIKLIINSITTRIEFTTRQLPDLEDLKKQELHMFSVIPNKFLPNSKSPCWYEEFSGQNTTDPYLTNSYVLYSKRFRSTFDALRKAFWGHLAHAHGKHFRLRCLPHFYIIGQPKCGTTDLYDRLRLHPEVKFSAIKEPHWWTRKRFGIVRLRDGLRDRYPVEDYLDLFDLAAHQIHQGLQASSAKEQSKMNTIIIGEASASTMWDNNAWTFFYDNSTDGEPPFLTQDFIHAFQPNARLIVMLRDPVERLYSDYLYFASSNKSADDFHEKVTEALQLFENCMLDYSLRACVYNNTLNNAMPVCTPPPRTPRAGPWQKELVCCYYASGIVGLRFSIGTERSVLMCKCCSPLFMDVKAEN

SEQ ID NO: 11679 - protein, 66 aa, Homo sapiens
  Payload ID: 2302
  Gene Symbol: CHST15
  Gene Name: carbohydrate (N-acetylgalactosamine 4-sulfate 6-O) sulfotransferase 15
  ENSP ID: ENSP00000487014
MRHCINCCIQLLPDGAHKQQVNCQGGPHHGHQACPTCKGENKILFRVDSKQMNLLAVLEVRTEGNE

SEQ ID NO: 11680 - protein, 386 aa, Homo sapiens
  Payload ID: 2303
  Gene Symbol: CHST4
  Gene Name: carbohydrate (N-acetylglucosamine 6-O) sulfotransferase 4
  Uniprot ID: Q8NCG5
  ENSP ID: ENSP00000341206
MLLPKKMKLLLFLVSQMAILALFFHMYSHNISSLSMKAQPERMHVLVLSSWRSGSSFVGQLFGQHPDVFYLMEPAWHVWMTFKQSTAWMLHMAVRDLIRAVFLCDMSVFDAYMEPGPRRQSSLFQWENSRALCSAPACDIIPQDEIIPRAHCRLLCSQQPFEVVEKACRSYSHVVLKEVRFFNLQSLYPLLKDPSLNLHIVHLVRDPRAVFRSRERTKGDLMIDSRIVMGQHEQKLKKEDQPYYVMQVICQSQLEIYKTIQSLPKALQERYLLVRYEDLARAPVAQTSRMYEFVGLEFLPHLQTWVHNITRGKGMGDHAFHTNARDALNVSQAWRWSLPYEKVSRLQKACGDAMNLLGYRHVRSEQEQRNLLLDLLSTWTVPEQIH

SEQ ID NO: 11681 - protein, 386 aa, Homo sapiens; identical to SEQ ID NO: 11680
  Payload ID: 2303
  Gene Symbol: CHST4
  Gene Name: carbohydrate (N-acetylglucosamine 6-O) sulfotransferase 4
  Uniprot ID: Q8NCG5
  ENSP ID: ENSP00000441204

SEQ ID NO: 11682 - protein, 411 aa, Homo sapiens
  Payload ID: 2304
  Gene Symbol: CHST5
  Gene Name: carbohydrate (N-acetylglucosamine 6-O) sulfotransferase 5
  Uniprot ID: Q9GZS9
  ENSP ID: ENSP00000338783
MGMRARVPKVAHSTRRPPAARMWLPRFSSKTVTVLLLAQTTCLLLFIISRPGPSSPAGGEDRVHVLVLSSWRSGSSFLGQLFSQHPDVFYLMEPAWHVWTTLSQGSAATLHMAVRDLMRSIFLCDMDVFDAYMPQSRNLSAFFNWATSRALCSPPACSAFPRGTISKQDVCKTLCTRQPFSLAREACRSYSHVVLKEVRFFNLQVLYPLLSDPALNLRIVHLVRDPRAVLRSREAAGPILARDNGIVLGTNGKWVEADPHLRLIREVCRSHVRIAEAATLKPPPFLRGRYRLVRFEDLAREPLAEIRALYAFTGLTLTPQLEAWIHNITHGSGIGKPIEAFHTSSRNARNVSQAWRHALPFTKILRVQEVCAGALQLLGYRPVYSADQQRDLTLDLVLPRGPDHFSWASPD

SEQ ID NO: 11683 - protein, 99 aa, Homo sapiens
  Payload ID: 2304
  Gene Symbol: CHST5
  Gene Name: carbohydrate (N-acetylglucosamine 6-O) sulfotransferase 5
  ENSP ID: ENSP00000454375
MSRHLPWICDQRCSSPSSPGRWPPAARMWLPRFSSKTVTVLLLAQTTCLLLFIISRPGPSSPAGGEDRVHVLVLSSWRSGSSFLGQLFSQHPDVFYLME

SEQ ID NO: 11684 - protein, 395 aa, Homo sapiens
  Payload ID: 2305
  Gene Symbol: CHST6
  Gene Name: carbohydrate (N-acetylglucosamine 6-O) sulfotransferase 6
  Uniprot ID: Q9GZX3
  ENSP ID: ENSP00000328983
MWLPRVSSTAVTALLLAQTFLLLFLVSRPGPSSPAGGEARVHVLVLSSWRSGSSFVGQLFNQHPDVFYLMEPAWHVWTTLSQGSAATLHMAVRDLVRSVFLCDMDVFDAYLPWRRNLSDLFQWAVSRALCSPPACSAFPRGAISSEAVCKPLCARQSFTLAREACRSYSHVVLKEVRFFNLQVLYPLLSDPALNLRIVHLVRDPRAVLRSREQTAKALARDNGIVLGTNGTWVEADPGLRVVREVCRSHVRIAEAATLKPPPFLRGRYRLVRFEDLAREPLAEIRALYAFTGLSLTPQLEAWIHNITHGSGPGARREAFKTSSRNALNVSQAWRHALPFAKIRRVQELCAGALQLLGYRPVYSEDEQRNLALDLVLPRGLNGFTWASSTASHPRN

SEQ ID NO: 11685 - protein, 395 aa, Homo sapiens; identical to SEQ ID NO: 11684
  Payload ID: 2305
  Gene Symbol: CHST6
  Gene Name: carbohydrate (N-acetylglucosamine 6-O) sulfotransferase 6
  Uniprot ID: Q9GZX3
  ENSP ID: ENSP00000375079

SEQ ID NO: 11686 - protein, 486 aa, Homo sapiens
  Payload ID: 2306
  Gene Symbol: CHST7
  Gene Name: carbohydrate (N-acetylglucosamine 6-O) sulfotransferase 7
  Uniprot ID: Q9NS84
  ENSP ID: ENSP00000276055
MKGRRRRRREYCKFALLLVLYTLVLLLVPSVLDGGRDGDKGAEHCPGLQRSLGVWSLEAAAAGEREQGAEARAAEEGGANQSPRFPSNLSGAVGEAVSREKQHIYVHATWRTGSSFLGELFNQHPDVFYLYEPMWHLWQALYPGDAESLQGALRDMLRSLFRCDFSVLRLYAPPGDPAARAPDTANLTTAALFRWRTNKVICSPPLCPGAPRARAEVGLVEDTACERSCPPVAIRALEAECRKYPVVVIKDVRLLDLGVLVPLLRDPGLNLKVVQLFRDPRAVHNSRLKSRQGLLRESIQVLRTRQRGDRFHRVLLAHGVGARPGGQSRALPAAPRADFFLTGALEVICEAWLRDLLFARGAPAWLRRRYLRLRYEDLVRQPRAQLRRLLRFSGLRALAALDAFALNMTRGAAYGADRPFHLSARDAREAVHAWRERLSREQVRQVEAACAPAMRLLAYPRSGEEGDAEQPREGETPLEMDADGAT

SEQ ID NO: 11687 - protein, 530 aa, Homo sapiens
  Payload ID: 2307
  Gene Symbol: CHST2
  Gene Name: carbohydrate (N-acetylglucosamine-6-O) sulfotransferase 2
  Uniprot ID: Q9Y4C5
  ENSP ID: ENSP00000307911
MSRSPQRALPPGALPRLLQAAPAAAPRALLPQWPRRPGRRWPASPLGMKVFRRKALVLCAGYALLLVLTMLNLLDYKWHKEPLQQCNPDGPLGAAAGAAGGSWGRPGPPPAGPPRAHARLDLRTPYRPPAAAVGAAPAAAAGMAGVAAPPGNGTRGTGGVGDKRQLVYVFTTWRSGSSFFGELFNQNPEVFFLYEPVWHVWQKLYPGDAVSLQGAARDMLSALYRCDLSVFQLYSPAGSGGRNLTTLGIFGAATNKVVCSSPLCPAYRKEVVGLVDDRVCKKCPPQRLARFEEECRKYRTLVIKGVRVFDVAVLAPLLRDPALDLKVIHLVRDPRAVASSRIRSRHGLIRESLQVVRSRDPRAHRMPFLEAAGHKLGAKKEGVGGPADYHALGAMEVICNSMAKTLQTALQPPDWLQGHYLVVRYEDLVGDPVKTLRRVYDFVGLLVSPEMEQFALNMTSGSGSSSKPFVVSARNATQAANAWRTALTFQQIKQVEEFCYQPMAVLGYERVNSPEEVKDLSKTLLRKPRL

SEQ ID NO: 11688 - protein, 390 aa, Homo sapiens
  Payload ID: 2308
  Gene Symbol: CARKD
  Gene Name: carbohydrate kinase domain containing
  Uniprot ID: Q8IW45
  ENSP ID: ENSP00000311984
MVTRAGAGTAVAGAVVVALLSAALALYGPPLDAVLERAFSLRKAHSIKDMENTLQLVRNIIPPLSSTKHKGQDGRIGVVGGCQEYTGAPYFAAISALKVGADLSHVFCASAAAPVIKAYSPELIVHPVLDSPNAVHEVEKWLPRLHALVVGPGLGRDDALLRNVQGILEVSKARDIPVVIDADGLWLVAQQPALIHGYRKAVLTPNHVEFSRLYDAVLRGPMDSDDSHGSVLRLSQALGNVTVVQKGERDILSNGQQVLVCSQEGSSRRCGGQGDLLSGSLGVLVHWALLAGPQKTNGGISDLKLTIWGPEIETGVKTRAQGSCGPRTTTPTSPHLLLSPSPQVQPSPGGRVWRLLSHQAVQPPSLPEARSLHHHLRHDRRGGGRLQQAL

SEQ ID NO: 11689 - protein, 237 aa, Homo sapiens
  Payload ID: 2308
  Gene Symbol: CARKD
  Gene Name: carbohydrate kinase domain containing
  Uniprot ID: Q8IW45
  ENSP ID: ENSP00000413191
MLPDGPGSSLWGNPGLQTSDSPNAVHEVEKWLPRLHALVVGPGLGRDDALLRNVQGILEVSKARDIPVVIDADGLWLVAQQPALIHGYRKAVLTPNHVEFSRLYDAVLRGPMDSDDSHGSVLRLSQALGNVTVVQKGERDILSNGQQVLVCSQEGSSRRCGGQGDLLSGSLGVLVHWALLAGPQKTNGSSPLLVAAFGACSLTRQCNHQAFQKHGRSTTTSDMIAEVGAAFSKLFET

SEQ ID NO: 11690 - protein, 356 aa, Homo sapiens
  Payload ID: 2309
  Gene Symbol: CHST10
  Gene Name: carbohydrate sulfotransferase 10
  Uniprot ID: O43529
  ENSP ID: ENSP00000264249
MHHQWLLLAACFWVIFMFMVASKFITLTFKDPDVYSAKQEFLFLTTMPEVRKLPEEKHIPEELKPTGKELPDSQLVQPLVYMERLELIRNVCRDDALKNLSHTPVSKFVLDRIFVCDKHKILFCQTPKVGNTQWKKVLIVLNGAFSSIEEIPENVVHDHEKNGLPRLSSFSDAEIQKRLKTYFKFFIVRDPFERLISAFKDKFVHNPRFEPWYRHEIAPGIIRKYRRNRTETRGIQFEDFVRYLGDPNHRWLDLQFGDHIIHWVTYVELCAPCEIMYSVIGHHETLEDDAPYILKEAGIDHLVSYPTIPPGITVYNRTKVEHYFLGISKRDIRRLYARFEGDFKLFGYQKPDFLLN

SEQ ID NO: 11691 - protein, 141 aa, Homo sapiens
  Payload ID: 2309
  Gene Symbol: CHST10
  Gene Name: carbohydrate sulfotransferase 10
  ENSP ID: ENSP00000387121
MHHQWLLLAACFWVIFMFMVASKFITLTFKDPDVYSAKQEFLFLTTMPEVRKLPEEKHIPEELKPTGKELPDSQLVQPLVYMERLELIRNVCRDDALKNLSHTPVSKFVLDRIFVCDKHKILFCQTPKVGNTQWKKVLIVL

SEQ ID NO: 11692 - protein, 356 aa, Homo sapiens; identical to SEQ ID NO: 11690
  Payload ID: 2309
  Gene Symbol: CHST10
  Gene Name: carbohydrate sulfotransferase 10
  Uniprot ID: O43529
  ENSP ID: ENSP00000387309

SEQ ID NO: 11693 - protein, 142 aa, Homo sapiens
  Payload ID: 2309
  Gene Symbol: CHST10
  Gene Name: carbohydrate sulfotransferase 10
  ENSP ID: ENSP00000387977
MQRKAGKKEHVQLRDKRNQEPQFRGNTARKCEPQAAEGRVSEWLRCDNMHHQWLLLAACFWVIFMFMVASKFITLTFKDPDVYSAKQEFLFLTTMPEVRKLPEEKHIPEELKPTGKELPDSQLVQPLVYMERLELIRNVCRD

SEQ ID NO: 11694 - protein, 33 aa, Homo sapiens
  Payload ID: 2309
  Gene Symbol: CHST10
  Gene Name: carbohydrate sulfotransferase 10
  ENSP ID: ENSP00000395643
MHHQWLLLAACFWVIFMFMVASKFITLTFKDPD

SEQ ID NO: 11695 - protein, 133 aa, Homo sapiens
  Payload ID: 2309
  Gene Symbol: CHST10
  Gene Name: carbohydrate sulfotransferase 10
  ENSP ID: ENSP00000405922
MHHQWLLLAACFWVIFMFMVASKFITLTFKDPDVYSAKQEFLFLTTMPEVRKLPEEKHIPEELKPTGKELPDSQLVQPLVYMERLELIRNVCRDDALKNLSHTPVSKFVLDRIFVCDKHKILFCQTPKVGNTQ

SEQ ID NO: 11696 - protein, 85 aa, Homo sapiens
  Payload ID: 2309
  Gene Symbol: CHST10
  Gene Name: carbohydrate sulfotransferase 10
  ENSP ID: ENSP00000407525
MHHQWLLLAACFWVIFMFMVASKFITLTFKDPDVYSAKQEFLFLTTMPEVRKLPEEKHIPEELKPTGKELPDSQLVQPLVYMERL

SEQ ID NO: 11697 - protein, 64 aa, Homo sapiens
  Payload ID: 2309
  Gene Symbol: CHST10
  Gene Name: carbohydrate sulfotransferase 10
  ENSP ID: ENSP00000416831
MHHQWLLLAACFWVIFMFMVASKFITLTFKDPDVYSAKQEFLFLTTMPEVRKLPEEKHIPEELK

SEQ ID NO: 11698 - protein, 261 aa, Homo sapiens
  Payload ID: 2310
  Gene Symbol: CA1
  Gene Name: carbonic anhydrase I
  Uniprot ID: P00915
  ENSP ID: ENSP00000392338
MASPDWGYDDKNGPEQWSKLYPIANGNNQSPVDIKTSETKHDTSLKPISVSYNPATAKEIINVGHSFHVNFEDNDNRSVLKGGPFSDSYRLFQFHFHWGSTNEHGSEHTVDGVKYSAELHVAHWNSAKYSSLAEAASKADGLAVIGVLMKVGEANPKLQKVLDALQAIKTKGKRAPFTNFDPSTLLPSSLDFWTYPGSLTHPPLYESVTWIICKESISVSSEQLAQFRSLLSNVEGDNAVPMQHNNRPTQPLKGRTVRASF

SEQ ID NO: 11699 - protein, 127 aa, Homo sapiens
  Payload ID: 2310
  Gene Symbol: CA1
  Gene Name: carbonic anhydrase I
  ENSP ID: ENSP00000427773
MMTKMLHVAHWNSAKYSSLAEAASKADGLAVIGVLMKGKRAPFTNFDPSTLLPSSLDFWTYPGSLTHPPLYESVTWIICKESISVSSEQLAQFRSLLSNVEGDNAVPMQHNNRPTQPLKGRTVRASF

SEQ ID NO: 11700 - protein, 149 aa, Homo sapiens
  Payload ID: 2310
  Gene Symbol: CA1
  Gene Name: carbonic anhydrase I
  ENSP ID: ENSP00000427852
MASPDWGYDDKNGPEQWSKLYPIANGNNQSPVDIKTSETKHDTSLKPISVSYNPATAKEIINVGHSFHVNFEDNDNRSVLKGGPFSDSYRLFQFHFHWGSTNEHGSEHTVDGVKYSAELHVAHWNSAKYSSLAEAASKADGLAVIGVLM

SEQ ID NO: 11701 - protein, 194 aa, Homo sapiens
  Payload ID: 2310
  Gene Symbol: CA1
  Gene Name: carbonic anhydrase I
  ENSP ID: ENSP00000428923
MASPDWGYDDKNVLKGGPFSDSYRLFQFHFHWGSTNEHGSEHTVDGVKYSAELHVAHWNSAKYSSLAEAASKADGLAVIGVLMKVGEANPKLQKVLDALQAIKTKGKRAPFTNFDPSTLLPSSLDFWTYPGSLTHPPLYESVTWIICKESISVSSEQLAQFRSLLSNVEGDNAVPMQHNNRPTQPLKGRTVRAS

SEQ ID NO: 11702 - protein, 178 aa, Homo sapiens
  Payload ID: 2310
  Gene Symbol: CA1
  Gene Name: carbonic anhydrase I
  ENSP ID: ENSP00000429300
  MOD_RES (1)..(1): Any amino acid
XHSFHVNFEDNDNRSVLKGGPFSDSYRLFQFHFHWGSTNEHGSEHTVDGVKYSAELHVAHWNSAKYSSLAEAASKADGLAVIGVLMKVGEANPKLQKVLDALQAIKTKGKRAPFTNFDPSTLLPSSLDFWTYPGSLTHPPLYESVTWIICKESISVSSEQHNNRPTQPLKGRTVRASF

SEQ ID NO: 11703 - protein, 22 aa, Homo sapiens
  Payload ID: 2310
  Gene Symbol: CA1
  Gene Name: carbonic anhydrase I
  ENSP ID: ENSP00000429688
MASPDWGYDDKNGPEQWSKLYP

SEQ ID NO: 11704 - protein, 261 aa, Homo sapiens; identical to SEQ ID NO: 11698
  Payload ID: 2310
  Gene Symbol: CA1
  Gene Name: carbonic anhydrase I
  Uniprot ID: P00915
  ENSP ID: ENSP00000429798

SEQ ID NO: 11705 - protein, 175 aa, Homo sapiens
  Payload ID: 2310
  Gene Symbol: CA1
  Gene Name: carbonic anhydrase I
  ENSP ID: ENSP00000429843
MASPDWGYDDKNGPEQWSKLYPIANGNNQSPVDIKTSETKHDTSLKPISVSYNPATAKEIINVGHSFHVNFEDNDNRSVLKGGPFSDSYRLFQFHFHWGSTNEHGSEHTVDGVKYSAELHVAHWNSAKYSSLAEAASKADGLAVIGVLMKVGEANPKLQKVLDALQAIKTKGKRA

SEQ ID NO: 11706 - protein, 118 aa, Homo sapiens
  Payload ID: 2310
  Gene Symbol: CA1
  Gene Name: carbonic anhydrase I
  ENSP ID: ENSP00000430372
MASPDWGYDDKNGPEQWSKLYPIANGNNQSPVDIKTSETKHDTSLKPISVSYNPATAKEIINVGHSFHVNFEDNDNRSVLKGGPFSDSYRLFQFHFHWGSTNEHGSEHTVDGVKYSAE

SEQ ID NO: 11707 - protein, 149 aa, Homo sapiens; identical to SEQ ID NO: 11700
  Payload ID: 2310
  Gene Symbol: CA1
  Gene Name: carbonic anhydrase I
  ENSP ID: ENSP00000430471

SEQ ID NO: 11708 - protein, 137 aa, Homo sapiens
  Payload ID: 2310
  Gene Symbol: CA1
  Gene Name: carbonic anhydrase I
  ENSP ID: ENSP00000430543
MMTKMLHVAHWNSAKYSSLAEAASKADGLAVIGVLMKVGEANPKLQKVLDALQAIKTKGKRAPFTNFDPSTLLPSSLDFWTYPGSLTHPPLYESVTWIICKESISVSSEQLAQFRSLLSNVEGDNAVPMQHNNRPTQ

SEQ ID NO: 11709 - protein, 87 aa, Homo sapiens
  Payload ID: 2310
  Gene Symbol: CA1
  Gene Name: carbonic anhydrase I
  ENSP ID: ENSP00000430571
MMTKMLHVAHWNSAKYSSLAEAASKADGLAVIGVLMKVGEANPKLQKVLDALQAIKTKGKRAPFTNFDPSTLLPSSLDFWTYPGSLT

SEQ ID NO: 11710 - protein, 261 aa, Homo sapiens; identical to SEQ ID NO: 11698
  Payload ID: 2310
  Gene Symbol: CA1
  Gene Name: carbonic anhydrase I
  Uniprot ID: P00915
  ENSP ID: ENSP00000430656

SEQ ID NO: 11711 - protein, 81 aa, Homo sapiens
  Payload ID: 2310
  Gene Symbol: CA1
  Gene Name: carbonic anhydrase I
  ENSP ID: ENSP00000430710
MASPDWGYDDKNGPEQWSKLYPIANGNNQSPVDIKTSETKHDTSLKPISVSYNPATAKEIINVGHSFHVNFEDNDNRSALL

SEQ ID NO: 11712 - protein, 148 aa, Homo sapiens
  Payload ID: 2310
  Gene Symbol: CA1
  Gene Name: carbonic anhydrase I
  ENSP ID: ENSP00000430737
MASPDWGYDDKNGPEQWSKLYPIANGNNQSPVDIKTSETKHDTSLKPISVSYNPATAKEIINVGHSFHVNFEDNDNRSVLKGGPFSDSYRLFQFHFHWGSTNEHGSEHTVDGVKYSAELHVAHWNSAKYSSLAEAASKADGLAVIGVL

SEQ ID NO: 11713 - protein, 251 aa, Homo sapiens
  Payload ID: 2310
  Gene Symbol: CA1
  Gene Name: carbonic anhydrase I
  ENSP ID: ENSP00000430861
MASPDWGYDDKNGPEQWSKLYPIANGNNQSPVDIKTSETKHDTSLKPISVSYNPATAKEIINVGHSFHVNFEDNDNRSVLKGGPFSDSYRLFQFHFHWGSTNEHGSEHTVDGVKYSAELHVAHWNSAKYSSLAEAASKADGLAVIGVLMKVGEANPKLQKVLDALQAIKTKGKRAPFTNFDPSTLLPSSLDFWTYPGSLTHPPLYESVTWIICKESISVSSEQLAQFRSLLSNVEGDNAVPMQHNNRPTQP

SEQ ID NO: 11714 - protein, 99 aa, Homo sapiens
  Payload ID: 2310
  Gene Symbol: CA1
  Gene Name: carbonic anhydrase I
  ENSP ID: ENSP00000430975
MASPDWGYDDKNGPEQWSKLYPIANGNNQSPVDIKTSETKHDTSLKPISVSYNPATAKEIINVGHSFHVNFEDNDNRSVLKGGPFSDSYRLFQFHFHWG

SEQ ID NO: 11715 - protein, 261 aa, Homo sapiens; identical to SEQ ID NO: 11698
  Payload ID: 2310
  Gene Symbol: CA1
  Gene Name: carbonic anhydrase I
  Uniprot ID: P00915
  ENSP ID: ENSP00000443517

SEQ ID NO: 11716 - protein, 127 aa, Homo sapiens; identical to SEQ ID NO: 11699
  Payload ID: 2310
  Gene Symbol: CA1
  Gene Name: carbonic anhydrase I
  ENSP ID: ENSP00000486171

SEQ ID NO: 11717 - protein, 260 aa, Homo sapiens
  Payload ID: 2311
  Gene Symbol: CA2
  Gene Name: carbonic anhydrase II
  Uniprot ID: P00918
  ENSP ID: ENSP00000285379
MSHHWGYGKHNGPEHWHKDFPIAKGERQSPVDIDTHTAKYDPSLKPLSVSYDQATSLRILNNGHAFNVEFDDSQDKAVLKGGPLDGTYRLIQFHFHWGSLDGQGSEHTVDKKKYAAELHLVHWNTKYGDFGKAVQQPDGLAVLGIFLKVGSAKPGLQKVVDVLDSIKTKGKSADFTNFDPRGLLPESLDYWTYPGSLTTPPLLECVTWIVLKEPISVSSEQVLKFRKLNFNGEGEPEELMVDNWRPAQPLKNRQIKASFK

SEQ ID NO: 11718 - protein, 97 aa, Homo sapiens
  Payload ID: 2311
  Gene Symbol: CA2
  Gene Name: carbonic anhydrase II
  ENSP ID: ENSP00000428443
MSHHWGYGKHNGPEHWHKDFPIAKGERQSPVDIDTHTAKYDPSLKPLSVSYDQATSLRILNNGHAFNVEFDDSQDKAASLGSLEHQIWGFWESCAAT

SEQ ID NO: 11719 - protein, 101 aa, Homo sapiens
  Payload ID: 2311
  Gene Symbol: CA2
  Gene Name: carbonic anhydrase II
  ENSP ID: ENSP00000428947
MSHHWGYGKHNGPEHWHKDFPIAKGERQSPVDIDTHTAKYDPSLKPLSVSYDQATSLRILNNGHAFNVEFDDSQDKAEKGISMLRKKDVKNIHSPDNACEE

SEQ ID NO: 11720 - protein, 260 aa, Homo sapiens
  Payload ID: 2312
  Gene Symbol: CA3
  Gene Name: carbonic anhydrase III
  Uniprot ID: P07451
  ENSP ID: ENSP00000285381
MAKEWGYASHNGPDHWHELFPNAKGENQSPVELHTKDIRHDPSLQPWSVSYDGGSAKTILNNGKTCRVVFDDTYDRSMLRGGPLPGPYRLRQFHLHWGSSDDHGSEHTVDGVKYAAELHLVHWNPKYNTFKEALKQRDGIAVIGIFLKIGHENGEFQIFLDALDKIKTKGKEAPFTKFDPSCLFPACRDYWTYQGSFTTPPCEECIVWLLLKEPMTVSSDQMAKLRSLLSSAENEPPVPLVSNWRPPQPINNRVVRASFK

SEQ ID NO: 11721 - protein, 19 aa, Homo sapiens
  Payload ID: 2312
  Gene Symbol: CA3
  Gene Name: carbonic anhydrase III
  ENSP ID: ENSP00000429760
MLRGGPLPGPYRLRQFHLH

SEQ ID NO: 11722 - protein, 312 aa, Homo sapiens
  Payload ID: 2313
  Gene Symbol: CA4
  Gene Name: carbonic anhydrase IV
  Uniprot ID: P22748
  ENSP ID: ENSP00000300900
MRMLLALLALSAARPSASAESHWCYEVQAESSNYPCLVPVKWGGNCQKDRQSPINIVTTKAKVDKKLGRFFFSGYDKKQTWTVQNNGHSVMMLLENKASISGGGLPAPYQAKQLHLHWSDLPYKGSEHSLDGEHFAMEMHIVHEKEKGTSRNVKEAQDPEDEIAVLAFLVEAGTQVNEGFQPLVEALSNIPKPEMSTTMAESSLLDLLPKEEKLRHYFRYLGSLTTPTCDEKVVWTVFREPIQLHREQILAFSQKLYYDKEQTVSMKDNVRPLQQLGQRTVIKSGAPGRPLPWALPALLGPMLACLLAGFLR

SEQ ID NO: 11723 - protein, 99 aa, Homo sapiens
  Payload ID: 2313
  Gene Symbol: CA4
  Gene Name: carbonic anhydrase IV
  ENSP ID: ENSP00000464757
  MOD_RES (1)..(1): Any amino acid
XSNIPKPEMSTTMAESSLLDLLPKEEKLRHYFRYLGSLTTPTCDEKVVWTVFREPIQLHREQVHRAWGRAWAPTAWLPRNYPSVCPQRSLRIQVGSPGN

SEQ ID NO: 11724 - protein, 184 aa, Homo sapiens
  Payload ID: 2313
  Gene Symbol: CA4
  Gene Name: carbonic anhydrase IV
  ENSP ID: ENSP00000465837
VKEAQDPEDEIAVLAFLVEIGRMNWPPPLAPCRLSQDPSLPFQAGTQVNEGFQPLVEALSNIPKPEMSTTMAESSLLDLLPKEEKLRHYFRYLGSLTTPTCDEKVVWTVFREPIQLHREQILAFSQKLYYDKEQTVSMKDNVRPLQQLGQRTVIKSGAPGRPLPWALPALLGPMLACLLAGFLR

SEQ ID NO: 11725 - protein, 38 aa, Homo sapiens
  Payload ID: 2313
  Gene Symbol: CA4
  Gene Name: carbonic anhydrase IV
  ENSP ID: ENSP00000466964
MMLLENKASISGGGLPAPYQAKQLHLHWSDLPYKGSEH

SEQ ID NO: 11726 - protein, 106 aa, Homo sapiens
  Payload ID: 2313
  Gene Symbol: CA4
  Gene Name: carbonic anhydrase IV
  Uniprot ID: P22748
  ENSP ID: ENSP00000467465
MRMLLALLALSAARPSASAESHWCYEVQAESSNYPCLVPVKWGGNCQKDRQSPINIVTTKAKVDKKLGRFFFSGYDKKQTWTVQNNGHSGWNPGERGLPATGGGTV

SEQ ID NO: 11727 - protein, 459 aa, Homo sapiens
  Payload ID: 2314
  Gene Symbol: CA9
  Gene Name: carbonic anhydrase IX
  Uniprot ID: Q16790
  ENSP ID: ENSP00000367608
MAPLCPSPWLPLLIPAPAPGLTVQLLLSLLLLVPVHPQRLPRMQEDSPLGGGSSGEDDPLGEEDLPSEEDSPREEDPPGEEDLPGEEDLPGEEDLPEVKPKSEEEGSLKLEDLPTVEAPGDPQEPQNNAHRDKEGDDQSHWRYGGDPPWPRVSPACAGRFQSPVDIRPQLAAFCPALRPLELLGFQLPPLPELRLRNNGHSVQLTLPPGLEMALGPGREYRALQLHLHWGAAGRPGSEHTVEGHRFPAEIHVVHLSTAFARVDEALGRPGGLAVLAAFLEEGPEENSAYEQLLSRLEEIAEEGSETQVPGLDISALLPSDFSRYFQYEGSLTTPPCAQGVIWTVFNQTVMLSAKQLHTLSDTLWGPGDSRLQLNFRATQPLNGRVIEASFPAGVDSSPRAAEPVQLNSCLAAGDILALVFGLLFAVTSVAFLVQMRRQHRRGTKGGVSYRPAEVAETGA

SEQ ID NO: 11728 - protein, 356 aa, Homo sapiens [sequence omitted]

SEQ ID NO: 11729 - protein, 305 aa, Homo sapiens
  Payload ID: 2315
  Gene Symbol: CA5A
  Gene Name: carbonic anhydrase VA, mitochondrial
  Uniprot ID: P35218
  ENSP ID: ENSP00000309649
MLGRNTWKTSAFSFLVEQMWAPLWSRSMRPGRWCSQRSCAWQTSNNTLHPLWTVPVSVPGGTRQSPINIQWRDSVYDPQLKPLRVSYEAASCLYIWNTGYLFQVEFDDATEASGISGGPLENHYRLKQFHFHWGAVNEGGSEHTVDGHAYPAELHLVHWNSVKYQNYKEAVVGENGLAVIGVFLKLGAHHQTLQRLVDILPEIKHKDARAAMRPFDPSTLLPTCWDYWTYAGSLTTPPLTESVTWIIQKEPVEVAPSQLSAFRTLLFSALGEEEKMMVNNYRPLQPLMNRKVWASFQATNEGTRS

SEQ ID NO: 11730 - protein, 317 aa, Homo sapiens
  Payload ID: 2316
  Gene Symbol: CA5B
  Gene Name: carbonic anhydrase VB, mitochondrial
  Uniprot ID: Q9Y2D0
  ENSP ID: ENSP00000314099
MVVMNSLRVILQASPGKLLWRKFQIPRFMPARPCSLYTCTYKTRNRALHPLWESVDLVPGGDRQSPINIRWRDSVYDPGLKPLTISYDPATCLHVWNNGYSFLVEFEDSTDKSVIKGGPLEHNYRLKQFHFHWGAIDAWGSEHTVDSKCFPAELHLVHWNAVRFENFEDAALEENGLAVIGVFLKLGKHHKELQKLVDTLPSIKHKDALVEFGSFDPSCLMPTCPDYWTYSGSLTTPPLSESVTWIIKKQPVEVDHDQLEQFRTLLFTSEGEKEKRMVDNFRPLQPLMNRTVRSSFRHDYVLNVQAKPKPATSQATP

SEQ ID NO: 11731 - protein, 317 aa, Homo sapiens; identical to SEQ ID NO: 11730
  Payload ID: 2316
  Gene Symbol: CA5B
  Gene Name: carbonic anhydrase VB, mitochondrial
  Uniprot ID: Q9Y2D0
  ENSP ID: ENSP00000417021

SEQ ID NO: 11732 - protein, 70 aa, Homo sapiens
  Payload ID: 2316
  Gene Symbol: CA5B
  Gene Name: carbonic anhydrase VB, mitochondrial
  ENSP ID: ENSP00000417236
  MOD_RES (1)..(1): Any amino acid
XVDLVPGGDRQSPINIRWRDSVYDPGLKPLTISYDPATCLHVWNNGYSFLVEFEDSTDKSECAPFSTGSP

SEQ ID NO: 11733 - protein, 136 aa, Homo sapiens
  Payload ID: 2316
  Gene Symbol: CA5B
  Gene Name: carbonic anhydrase VB, mitochondrial
  ENSP ID: ENSP00000417553
MVVMNSLRVILQASPGKLLWRKFQIPRFMPARPCSLYTCTYKTRNRALHPLWESVDLVPGGDRQSPINIRWRDSVYDPGLKPLTISYDPATCLHVWNNGYSFLVEFEDSTDKSVIKGGPLEHNYRLKQFHFHWGAI

SEQ ID NO: 11734 - protein, 76 aa, Homo sapiens
  Payload ID: 2316
  Gene Symbol: CA5B
  Gene Name: carbonic anhydrase VB, mitochondrial
  ENSP ID: ENSP00000418622
MVVMNSLRVILQASPGKLLWRKFQIPRFMPARPCSLYTCTYKTRNRALHPLWESVDLVPGGDRQSPINIRWRDSVY

SEQ ID NO: 11735 - protein, 313 aa, Homo sapiens
  Payload ID: 2317
  Gene Symbol: CA6
  Gene Name: carbonic anhydrase VI
  Uniprot ID: P23280
  ENSP ID: ENSP00000366654
MRALVLLLSLFLLGGQAQHVSDWTYSEGALDEAHWPQHYPACGGQRQSPINLQRTKVRYNPSLKGLNMTGYETQAGEFPMVNNGHTVQISLPSTMRMTVADGTVYIAQQMHFHWGGASSEISGSEHTVDGIRHVIEIHIVHYNSKYKSYDIAQDAPDGLAVLAAFVEVKNYPENTYYSNFISHLANIKYPGQRTTLTGLDVQDMLPRNLQHYYTYHGSLTTPPCTENVHWFVLADFVKLSRTQVWKLENSLLDHRNKTIHNDYRRTQPLNHRVVESNFPNQGKGHGGHRGRSQNPRVQPTSTRHPLALGSLEA

SEQ ID NO: 11736 - protein, 248 aa, Homo sapiens
  Payload ID: 2317
  Gene Symbol: CA6
  Gene Name: carbonic anhydrase VI
  Uniprot ID: P23280
  ENSP ID: ENSP00000366661
MRALVLLLSLFLLGGQAQHVSDWTYSVQISLPSTMRMTVADGTVYIAQQMHFHWGGASSEISGSEHTVDGIRHVIEIHIVHYNSKYKSYDIAQDAPDGLAVLAAFVEVKNYPENTYYSNFISHLANIKYPGQRTTLTGLDVQDMLPRNLQHYYTYHGSLTTPPCTENVHWFVLADFVKLSRTQVWKLENSLLDHRNKTIHNDYRRTQPLNHRVVESNFPNQEYTLGSEFQFYLHKIEEILDYLRRALN

SEQ ID NO: 11737 - protein, 308 aa, Homo sapiens
  Payload ID: 2317
  Gene Symbol: CA6
  Gene Name: carbonic anhydrase VI
  Uniprot ID: P23280
  ENSP ID: ENSP00000366662
MRALVLLLSLFLLGGQAQHVSDWTYSEGALDEAHWPQHYPACGGQRQSPINLQRTKVRYNPSLKGLNMTGYETQAGEFPMVNNGHTVQISLPSTMRMTVADGTVYIAQQMHFHWGGASSEISGSEHTVDGIRHVIEIHIVHYNSKYKSYDIAQDAPDGLAVLAAFVEVKNYPENTYYSNFISHLANIKYPGQRTTLTGLDVQDMLPRNLQHYYTYHGSLTTPPCTENVHWFVLADFVKLSRTQVWKLENSLLDHRNKTIHNDYRRTQPLNHRVVESNFPNQEYTLGSEFQFYLHKIEEILDYLRRALN

SEQ ID NO: 11738 - protein, 179 aa, Homo sapiens
  Payload ID: 2317
  Gene Symbol: CA6
  Gene Name: carbonic anhydrase VI
  ENSP ID: ENSP00000435280
MRALVLLLSLFLLGGQAQHVSDWTYSEGALDEAHWPQHYPACGGQRQSPINLQRTKVRYNPSLKGLNMTGYETQAGEFPMVNNGHTDWQAELFLPSLSSPCGEGAKHKGQRQWLCSPSLDSWWEAIIDGGSLWATLAECGLRAEGPEEGRHMEEKSPASQGACSGSRLPISRGPCTFFL

SEQ ID NO: 11739 - protein, 187 aa, Homo sapiens
  Payload ID: 2317
  Gene Symbol: CA6
  Gene Name: carbonic anhydrase VI
  ENSP ID: ENSP00000447108
MRALVLLLSLFLLGGQAQHVSDWTYSEGALDEAHWPQHYPACGGQRQSPINLQRTKISLPSTMRMTVADGTVYIAQQMHFHWGGASSEISGSEHTVDGIRHVIEIHIVHYNSKYKSYDIAQDAPDGLAVLAAFVEVKNYPENTYYSNFISHLANIKYPGQRTTLTGLDVQDMLPRNLQHYYTYHGSL

SEQ ID NO: 11740 - protein, 264 aa, Homo sapiens [sequence omitted]

SEQ ID NO: 11741 - protein, 208 aa, Homo sapiens
  Payload ID: 2318
  Gene Symbol: CA7
  Gene Name: carbonic anhydrase VII
  Uniprot ID: P43166
  ENSP ID: ENSP00000377632
MSLSITNNGHSVQVDFNDSDDRTVVTGGPLEGPYRLKQFHFHWGKKHDVGSEHTVDGKSFPSELHLVHWNAKKYSTFGEAASAPDGLAVVGVFLETGDEHPSMNRLTDALYMVRFKGTKAQFSCFNPKCLLPASRHYWTYPGSLTTPPLSESVTWIVLREPICISERQMGKFRSLLFTSEDDERIHMVNNFRPPQPLKGRVVKASFRA

SEQ ID NO: 11742 - protein, 44 aa, Homo sapiens
  Payload ID: 2318
  Gene Symbol: CA7
  Gene Name: carbonic anhydrase VII
  ENSP ID: ENSP00000447178
MSLSITNNGHSVQVDFNDSDDRTAASGSLECQEVQHFWGGGLST

SEQ ID NO: 11743 - protein, 290 aa, Homo sapiens
  Payload ID: 2319
  Gene Symbol: CA8
  Gene Name: carbonic anhydrase VIII
  Uniprot ID: P35219
  ENSP ID: ENSP00000314407
MADLSFIEDTVAFPEKEEDEEEEEEGVEWGYEEGVEWGLVFPDANGEYQSPINLNSREARYDPSLLDVRLSPNYVVCRDCEVTNDGHTIQVILKSKSVLSGGPLPQGHEFELYEVRFHWGRENQRGSEHTVNFKAFPMELHLIHWNSTLFGSIDEAVGKPHGIAIIALFVQIGKEHVGLKAVTEILQDIQYKGKSKTIPCFNPNTLLPDPLLRDYWVYEGSLTIPPCSEGVTWILFRYPLTISQLQIEEFRRLRTHVKGAELVEGCDGILGDNFRPTQPLSDRVIRAAFQ

SEQ ID NO: 11744 - protein, 328 aa, Homo sapiens
  Payload ID: 2320
  Gene Symbol: CA10
  Gene Name: carbonic anhydrase X
  Uniprot ID: Q9NS85
  ENSP ID: ENSP00000285273
MEIVWEVLFLLQANFIVCISAQQNSPKIHEGWWAYKEVVQGSFVPVPSFWGLVNSAWNLCSVGKRQSPVNIETSHMIFDPFLTPLRINTGGRKVSGTMYNTGRHVSLRLDKEHLVNISGGPMTYSHRLEEIRLHFGSEDSQGSEHLLNGQAFSGEVQLIHYNHELYTNVTEAAKSPNGLVVVSIFIKVSDSSNPFLNRMLNRDTITRITYKNDAYLLQGLNIEELYPETSSFITYDGSMTIPPCYETASWIIMNKPVYITRMQMHSLRLLSQNQPSQIFLSMSDNFRPVQPLNNRCIRTNINFSLQGKDCPNNRAQKLQYRVNEWLLK

SEQ ID NO: 11745 - protein, 328 aa, Homo sapiens; identical to SEQ ID NO: 11744
  Payload ID: 2320
  Gene Symbol: CA10
  Gene Name: carbonic anhydrase X
  Uniprot ID: Q9NS85
  ENSP ID: ENSP00000390666

SEQ ID NO: 11746 - protein, 328 aa, Homo sapiens; identical to SEQ ID NO: 11744
  Payload ID: 2320
  Gene Symbol: CA10
  Gene Name: carbonic anhydrase X
  Uniprot ID: Q9NS85
  ENSP ID: ENSP00000405388

SEQ ID NO: 11747 - protein, 56 aa, Homo sapiens
  Payload ID: 2320
  Gene Symbol: CA10
  Gene Name: carbonic anhydrase X
  ENSP ID: ENSP00000458145
HVSLRLDKEHLVNISGGPMTYSHRLEEIRLHFGSEDSQGSEHLLNGQAFSGEEKVC

SEQ ID NO: 11748 - protein, 253 aa, Homo sapiens
  Payload ID: 2320
  Gene Symbol: CA10
  Gene Name: carbonic anhydrase X
  Uniprot ID: Q9NS85
  ENSP ID: ENSP00000459619
MIFDPFLTPLRINTGGRKVSGTMYNTGRHVSLRLDKEHLVNISGGPMTYSHRLEEIRLHFGSEDSQGSEHLLNGQAFSGEVQLIHYNHELYTNVTEAAKSPNGLVVVSIFIKVSDSSNPFLNRMLNRDTITRITYKNDAYLLQGLNIEELYPETSSFITYDGSMTIPPCYETASWIIMNKPVYITRMQMHSLRLLSQNQPSQIFLSMSDNFRPVQPLNNRCIRTNINFSLQGKDCPNNRAQKLQYRVNEWLLK

SEQ ID NO: 11749 - protein, 276 aa, Homo sapiens
  Payload ID: 2320
  Gene Symbol: CA10
  Gene Name: carbonic anhydrase X
  ENSP ID: ENSP00000460238
MEIVWEVLFLLQANFIVCISAQQNSPKIHEGWWAYKEVVQGSFVPVPSFWGLVNSAWNLCSVGKRQSPVNIETSHMIFDPFLTPLRINTGGRKVSGTMYNTGRHVSLRLDKEHLVNISGGPMTYSHRLEEIRLHFGSEDSQGSEHLLNGQAFSGEVQLIHYNHELYTNVTEAAKSPNGLVVVSIFIKVSDSSNPFLNRMLNRDTITRITYKNDAYLLQGLNIEELYPETSSFITYDGSMTIPPCYETASWIIMNKPVYITRMQMHSLRLLSQNQPS

SEQ ID NO: 11750 - protein, 42 aa, Homo sapiens
  Payload ID: 2320
  Gene Symbol: CA10
  Gene Name: carbonic anhydrase X
  ENSP ID: ENSP00000461908
MEIVWEVLFLLQANFIVCISGDLRRAVRRLWWQSGLEMQVTC

SEQ ID NO: 11751 - protein, 328 aa, Homo sapiens
  Payload ID: 2321
  Gene Symbol: CA11
  Gene Name: carbonic anhydrase XI
  Uniprot ID: O75493
  ENSP ID: ENSP00000084798
MGAAARLSAPRALVLWAALGAAAHIGPAPDPEDWWSYKDNLQGNFVPGPPFWGLVNAAWSLCAVGKRQSPVDVELKRVLYDPFLPPLRLSTGGEKLRGTLYNTGRHVSFLPAPRPVVNVSGGPLLYSHRLSELRLLFGARDGAGSEHQINHQGFSAEVQLIHFNQELYGNFSAASRGPNGLAILSLFVNVASTSNPFLSRLLNRDTITRISYKNDAYFLQDLSLELLFPESFGFITYQGSLSTPPCSETVTWILIDRALNITSLQMHSLRLLSQNPPSQIFQSLSGNSRPLQPLAHRALRGNRDPRHPERRCRGPNYRLHVDGVPHGR

SEQ ID NO: 11752 - protein, 113 aa, Homo sapiens
  Payload ID: 2321
  Gene Symbol: CA11
  Gene Name: carbonic anhydrase XI
  ENSP ID: ENSP00000469234
  MOD_RES (1)..(1): Any amino acid
XDAYFLQDLSLELLFPESFGFITYQGSLSTPPCSETVTWILIDRALNITSLQMHSLRLLSQNPPSQIFQSLSGNSRPLQPLAHRALRGNRDPRHPERRCRGPNYRLHAQCFST

SEQ ID NO: 11753 - protein, 354 aa, Homo sapiens
  Payload ID: 2322
  Gene Symbol: CA12
  Gene Name: carbonic anhydrase XII
  Uniprot ID: O43570
  ENSP ID: ENSP00000178638
MPRRSLHAAAVLLLVILKEQPSSPAPVNGSKWTYFGPDGENSWSKKYPSCGGLLQSPIDLHSDILQYDASLTPLEFQGYNLSANKQFLLTNNGHSVKLNLPSDMHIQGLQSRYSATQLHLHWGNPNDPHGSEHTVSGQHFAAELHIVHYNSDLYPDASTASNKSEGLAVLAVLIEMGSFNPSYDKIFSHLQHVKYKGQEAFVPGFNIEELLPERTAEYYRYRGSLTTPPCNPTVLWTVFRNPVQISQEQLLALETALYCTHMDDPSPREMINNFRQVQKFDERLVYTSFSQVQVCTAAGLSLGIILSLALAGILGICIVVVVSIWLFRRKSIKKGDNKGVIYKPATKMETEAHA

SEQ ID NO: 11754 - protein, 343 aa, Homo sapiens
  Payload ID: 2322
  Gene Symbol: CA12
  Gene Name: carbonic anhydrase XII
  Uniprot ID: O43570
  ENSP ID: ENSP00000343088
MPRRSLHAAAVLLLVILKEQPSSPAPVNGSKWTYFGPDGENSWSKKYPSCGGLLQSPIDLHSDILQYDASLTPLEFQGYNLSANKQFLLTNNGHSVKLNLPSDMHIQGLQSRYSATQLHLHWGNPNDPHGSEHTVSGQHFAAELHIVHYNSDLYPDASTASNKSEGLAVLAVLIEMGSFNPSYDKIFSHLQHVKYKGQEAFVPGFNIEELLPERTAEYYRYRGSLTTPPCNPTVLWTVFRNPVQISQEQLLALETALYCTHMDDPSPREMINNFRQVQKFDERLVYTSFSQGIILSLALAGILGICIVVVVSIWLFRRKSIKKGDNKGVIYKPATKMETEAHA

SEQ ID NO: 11755 - protein, 283 aa, Homo sapiens
  Payload ID: 2322
  Gene Symbol: CA12
  Gene Name: carbonic anhydrase XII
  ENSP ID: ENSP00000403028
MPRRSLHAAAVLLLVILKEQPSSPAPVNGSKWTYFVKLNLPSDMHIQGLQSRYSATQLHLHWGNPNDPHGSEHTVSGQHFAAELHIVHYNSDLYPDASTASNKSEGLAVLAVLIEMGSFNPSYDKIFSHLQHVKYKGQEAFVPGFNIEELLPERTAEYYRYRGSLTTPPCNPTVLWTVFRNPVQISQEQLLALETALYCTHMDDPSPREMINNFRQVQKFDERLVYTSFSQGIILSLALAGILGICIVVVVSIWLFRRKSIKKGDNKGVIYKPATKMETEAHA

SEQ ID NO: 11756 - protein, 262 aa, Homo sapiens
  Payload ID: 2323
  Gene Symbol: CA13
  Gene Name: carbonic anhydrase XIII
  Uniprot ID: Q8N1Q1
  ENSP ID: ENSP00000318912
MSRLSWGYREHNGPIHWKEFFPIADGDQQSPIEIKTKEVKYDSSLRPLSIKYDPSSAKIISNSGHSFNVDFDDTENKSVLRGGPLTGSYRLRQVHLHWGSADDHGSEHIVDGVSYAAELHVVHWNSDKYPSFVEAAHEPDGLAVLGVFLQIGEPNSQLQKITDTLDSIKEKGKQTRFTNFDLLSLLPPSWDYWTYPGSLTVPPLLESVTWIVLKQPINISSQQLAKFRSLLCTAEGEAAAFLVSNHRPPQPLKGRKVRASFH

SEQ ID NO: 11757 - protein, 337 aa, Homo sapiens
  Payload ID: 2324
  Gene Symbol: CA14
  Gene Name: carbonic anhydrase XIV
  Uniprot ID: Q9ULX7
  ENSP ID: ENSP00000358107
MLFSALLLEVIWILAADGGQHWTYEGPHGQDHWPASYPECGNNAQSPIDIQTDSVTFDPDLPALQPHGYDQPGTEPLDLHNNGHTVQLSLPSTLYLGGLPRKYVAAQLHLHWGQKGSPGGSEHQINSEATFAELHIVHYDSDSYDSLSEAAERPQGLAVLGILIEVGETKNIAYEHILSHLHEVRHKDQKTSVPPFNLRELLPKQLGQYFRYNGSLTTPPCYQSVLWTVFYRRSQISMEQLEKLQGTLFSTEEEPSKLLVQNYRALQPLNQRMVFASFIQAGSSYTTGEMLSLGVGILVGCLCLLLAVYFIARKIRKKRLENRKSVVFTSAQATTEA

SEQ ID NO: 11758 - protein, 130 aa, Homo sapiens
  Payload ID: 2324
  Gene Symbol: CA14
  Gene Name: carbonic anhydrase XIV
  ENSP ID: ENSP00000475238
QKTSVPPFNLRELLPKQLGQYFRYNGSLTTPPCYQSVLWTVFYRRSQISMEQLEKLQGTLFSTEEEPSKLLVQNYRALQPLNQRMVFASFIQGSSYTTGRRGWKTERVWSSPQHKPRLRHKFLLRYHGCG

SEQ ID NO: 11759 - protein, 42 aa, Homo sapiens
  Payload ID: 2324
  Gene Symbol: CA14
  Gene Name: carbonic anhydrase XIV
  ENSP ID: ENSP00000475869
MLFSALLLEVIWILAADGGQHWTYEAPPFWISSCLEFHIYGS

SEQ ID NO: 11760 - protein, 277 aa, Homo sapiens
  Payload ID: 2325
  Gene Symbol: CBR1
  Gene Name: carbonyl reductase 1
  Uniprot ID: P16152
  ENSP ID: ENSP00000290349
MSSGIHVALVTGGNKGIGLAIVRDLCRLFSGDVVLTARDVTRGQAAVQQLQAEGLSPRFHQLDIDDLQSIRALRDFLRKEYGGLDVLVNNAGIAFKVADPTPFHIQAEVTMKTNFFGTRDVCTELLPLIKPQGRVVNVSSIMSVRALKSCSPELQQKFRSETITEEELVGLMNKFVEDTKKGVHQKEGWPSSAYGVTKIGVTVLSRIHARKLSEQRKGDKILLNACCPGWVRTDMAGPKATKSPEEGAETPVYLALLPPDAEGPHGQFVSEKRVEQW

SEQ ID NO: 11761 - protein, 222 aa, Homo sapiens
  Payload ID: 2325
  Gene Symbol: CBR1
  Gene Name: carbonyl reductase 1
  ENSP ID: ENSP00000382143
MSSGIHVALVTGGNKGIGLAIVRDLCRLFSGDVVLTARDVTRGQAAVQQLQAEGLSPRFHQLDIDDLQSIRALRDFLRKEYGGLDVLVNNAGIAFKVADPTPFHIQAEVTMKTNFFGTRDVCTELLPLIKPQVVLLLRLWFTRTSKGSSSKSHLTLLSQNSKAGMNFFMQLPPHFLCVFLLELIPVTVSHMKIFCSKIPANLAFTSLRDCCTPFYIMLCGVS

SEQ ID NO: 11762 - protein, 178 aa, Homo sapiens
  Payload ID: 2325
  Gene Symbol: CBR1
  Gene Name: carbonyl reductase 1
  ENSP ID: ENSP00000395132
MSSGIHVALVTGGNKGIGLAIVRDLCRLFSGDVVLTARDVTRGQAAVQQLQAEGLSPRFHQLDIDDLQSIRALRDFLRKEYGGLDVLVNNAGIAFKVADPTPFHIQAEVTMKTNFFGTRDVCTELLPLIKPQGESDGKQRTFSLGLDLAPACLGFLLQAPASSPCCTCTDLCAFSPAS

SEQ ID NO: 11763 - protein, 173 aa, Homo sapiens
  Payload ID: 2325
  Gene Symbol: CBR1
  Gene Name: carbonyl reductase 1
  Uniprot ID: P16152
  ENSP ID: ENSP00000434613
MSSGIHVALVTGGNKGIGLAIVRDLCRLFSGDVVLTARDVTRGQAAVQQLQAEGLSPRFHQLDIDDLQSIRALRDFLRKEYGGLDVLVNNAGIAFKVADPTPFHIQAEVTMKTNFFGTRDVCTELLPLIKPQASCVLSAWSCLSQNPSGGKSKPLAWFTEMSIICRCLTLGPF

SEQ ID NO: 11764 - protein, 277 aa, Homo sapiens
  Payload ID: 2326
  Gene Symbol: CBR3
  Gene Name: carbonyl reductase 3
  Uniprot ID: O75828
  ENSP ID: ENSP00000290354
MSSCSRVALVTGANRGIGLAIARELCRQFSGDVVLTARDVARGQAAVQQLQAEGLSPRFHQLDIDDLQSIRALRDFLRKEYGGLNVLVNNAAVAFKSDDPMPFDIKAEMTLKTNFFATRNMCNELLPIMKPHGRVVNISSLQCLRAFENCSEDLQERFHSETLTEGDLVDLMKKFVEDTKNEVHEREGWPNSPYGVSKLGVTVLSRILARRLDEKRKADRILVNACCPGPVKTDMDGKDSIRTVEEGAETPVYLALLPPDATEPQGQLVHDKVVQNW

SEQ ID NO: 11765 - protein, 237 aa, Homo sapiens
  Payload ID: 2327
  Gene Symbol: CBR4
  Gene Name: carbonyl reductase 4
  Uniprot ID: Q8N4T8
  ENSP ID: ENSP00000303525
MDKVCAVFGGSRGIGRAVAQLMARKGYRLAVIARNLEGAKAAAGDLGGDHLAFSCDVAKEHDVQNTFEELEKHLGRVNFLVNAAGINRDGLLVRTKTEDMVSQLHTNLLGSMLTCKAAMRTMIQQQGGSIVNVGSIVGLKGNSGQSVYSASKGGLVGFSRALAKEVARKKIRVNVVAPGFVHTDMTKDLKEEHLKKNIPLGRFGETIEVAHAVVFLLESPYITGHVLVVDGGLQLIL

SEQ ID NO: 11766 - protein, 60 aa, Homo sapiens
  Payload ID: 2327
  Gene Symbol: CBR4
  Gene Name: carbonyl reductase 4
  ENSP ID: ENSP00000421254
MDKVCAVFGGSRGIGRAVAQLMARKGYRLAVIARNLEGAKAAAGDLGEIFSPQSPKDLGL

SEQ ID NO: 11767 - protein, 186 aa, Homo sapiens
  Payload ID: 2327
  Gene Symbol: CBR4
  Gene Name: carbonyl reductase 4
  ENSP ID: ENSP00000423128
VCAVFGGSRGIGRAVAQLMARKGYRLAVIARNLEGAKAAAGDLGGDHLAFSCDVAKEHDVQNTFEELEKHLGRVNFLVNAAGINRDGLLVRTKTEDMVSQLHTNLLGSMLTCKAAMRTMIQQQGGSIVNVGHRREMLLHKRSIVGLKGNSGQSVYSASKGGLVGFSRALAKEVARKKIRVNVVAPG

SEQ ID NO: 11768 - protein, 51 aa, Homo sapiens
  Payload ID: 2327
  Gene Symbol: CBR4
  Gene Name: carbonyl reductase 4
  ENSP ID: ENSP00000424717
MDKVCAVFGGSRGIGRAVAQLMARKGYRLAVIARNLEGAKAAAGDLGGMVF

SEQ ID NO: 11769 - protein, 60 aa, Homo sapiens
  Payload ID: 2327
  Gene Symbol: CBR4
  Gene Name: carbonyl reductase 4
  ENSP ID: ENSP00000425671
MDKVCAVFGGSRGIGRAVAQLMARKGYRLAVIARNLEGAKAAAGDLGGLPIMLPVLDPNS

SEQ ID NO: 11770 - protein, 179 aa, Homo sapiens
  Payload ID: 2327
  Gene Symbol: CBR4
  Gene Name: carbonyl reductase 4
  Uniprot ID: Q8N4T8
  ENSP ID: ENSP00000427615
MDKVCAVFGGSRGIGRAVAQLMARKGYRLAVIARNLEGAKAAAGDLGGDHLAFSCDVAKEHDVQNTFEELEKHLGRVNFLVNAAGINRDGLLVRTKTEDMVSQLHTNLLGSMLTCKAAMRTMIQQQGGSIVNVGSIVGLKGNSGQSVYSASKGGLVGFSRALAKEVARKKIRVNVVAPG

SEQ ID NO: 11771 - protein, 756 aa, Homo sapiens
  Payload ID: 2328
  Gene Symbol: CEL
  Gene Name: carboxyl ester lipase
  ENSP ID: ENSP00000361151
MLTMGRLQLVVLGLTCCWAVASAAKLGAVYTEGGFVEGVNKKLGLLGDSVDIFKGIPFAAPTKALENPQPHPGWQGTLKAKNFKKRCLQATITQDSTYGDEDCLYLNIWVPQGRKQVSRDLPVMIWIYGGAFLMGSGHGANFLNNYLYDGEEIATRGNVIVVTFNYRVGPLGFLSTGDANLPGNYGLRDQHMAIAWVKRNIAAFGGDPNNITLFGESAGGASVSLQTLSPYNKGLIRRAISQSGVALSPWVIQKNPLFWAKKVAEKVGCPVGDAARMAQCLKVTDPRALTLAYKVPLAGLEYPMLHYVGFVPVIDGDFIPADPINLYANAADIDYIAGTNNMDGHIFASIDMPAINKGNKKVTEEDFYKLVSEFTITKGLRGAKTTFDVYTESWAQDPSQENKKKTVVDFETDVLFLVPTEIALAQHRANAKSAKTYAYLFSHPSRMPVYPKWVGADHADDIQYVFGKPFATPTGYRPQDRTVSKAMIAYWTNFAKTGDPNMGDSAVPTHWEPYTTENSGYLEITKKMGSSSMKRSLRTNFLRYWTLTYLALPTVTDQEATPVPPTGDSEATPVPPTGDSETAPVPPTGDSGAPPVPPTGDSGAPPVPPTGDSGAPPVPPTGDSGAPPVPPTGDSGAPPVPPTGDSGAPPVPPTGDSGAPPVPPTGDSGAPPVPPTGDAGPPPVPPTGDSGAPPVPPTGDSGAPPVTPTGDSETAPVPPTGDSGAPPVPPTGDSEAAPVPPTDDSKEAQMPAVIRF

SEQ ID NO: 11772 - protein, 59 aa, Homo sapiens
  Payload ID: 2328
  Gene Symbol: CEL
  Gene Name: carboxyl ester lipase
  ENSP ID: ENSP00000480238
MLTMGRLQLVVLGLTCCWAVASAAKTPCCTMWASSLSLMETSSPLTRSTCTPTPPTSTI

SEQ ID NO: 11773 - protein, 568 aa, Homo sapiens
  Payload ID: 2329
  Gene Symbol: CES1
  Gene Name: carboxylesterase 1
  Uniprot ID: P23141
  ENSP ID: ENSP00000353720
MWLRAFILATLSASAAWAGHPSSPPVVDTVHGKVLGKFVSLEGFAQPVAIFLGIPFAKPPLGPLRFTPPQPAEPWSFVKNATSYPPMCTQDPKAGQLLSELFTNRKENIPLKLSEDCLYLNIYTPADLTKKNRLPVMVWIHGGGLMVGAASTYDGLALAAHENVVVVTIQYRLGIWGFFSTGDEHSRGNWGHLDQVAALRWVQDNIASFGGNPGSVTIFGESAGGESVSVLVLSPLAKNLFHRAISESGVALTSVLVKKGDVKPLAEQIAITAGCKTTTSAVMVHCLRQKTEEELLETTLKMKFLSLDLQGDPRESQPLLGTVIDGMLLLKTPEELQAERNFHTVPYMVGINKQEFGWLIPMQLMSYPLSEGQLDQKTAMSLLWKSYPLVCIAKELIPEATEKYLGGTDDTVKKKDLFLDLIADVMFGVPSVIVARNHRDAGAPTYMYEFQYRPSFSSDMKPKTVIGDHGDELFSVFGAPFLKEGASEEEIRLSKMVMKFWANFARNGNPNGEGLPHWPEYNQKEGYLQIGANTQAAQKLKDKEVAFWTNLFAKKAVEKPPQTEHIEL

SEQ ID NO: 11774 - protein, 567 aa, Homo sapiens
  Payload ID: 2329
  Gene Symbol: CES1
  Gene Name: carboxylesterase 1
  Uniprot ID: P23141
  ENSP ID: ENSP00000355193
MWLRAFILATLSASAAWGHPSSPPVVDTVHGKVLGKFVSLEGFAQPVAIFLGIPFAKPPLGPLRFTPPQPAEPWSFVKNATSYPPMCTQDPKAGQLLSELFTNRKENIPLKLSEDCLYLNIYTPADLTKKNRLPVMVWIHGGGLMVGAASTYDGLALAAHENVVVVTIQYRLGIWGFFSTGDEHSRGNWGHLDQVAALRWVQDNIASFGGNPGSVTIFGESAGGESVSVLVLSPLAKNLFHRAISESGVALTSVLVKKGDVKPLAEQIAITAGCKTTTSAVMVHCLRQKTEEELLETTLKMKFLSLDLQGDPRESQPLLGTVIDGMLLLKTPEELQAERNFHTVPYMVGINKQEFGWLIPMQLMSYPLSEGQLDQKTAMSLLWKSYPLVCIAKELIPEATEKYLGGTDDTVKKKDLFLDLIADVMFGVPSVIVARNHRDAGAPTYMYEFQYRPSFSSDMKPKTVIGDHGDELFSVFGAPFLKEGASEEEIRLSKMVMKFWANFARNGNPNGEGLPHWPEYNQKEGYLQIGANTQAAQKLKDKEVAFWTNLFAKKAVEKPPQTEHIEL

SEQ ID NO: 11775 - protein, 566 aa, Homo sapiens
  Payload ID: 2329
  Gene Symbol: CES1
  Gene Name: carboxylesterase 1
  Uniprot ID: P23141
  ENSP ID: ENSP00000390492
MWLRAFILATLSASAAWGHPSSPPVVDTVHGKVLGKFVSLEGFAQPVAIFLGIPFAKPPLGPLRFTPPQPAEPWSFVKNATSYPPMCTQDPKAGQLLSELFTNRKENIPLKLSEDCLYLNIYTPADLTKKNRLPVMVWIHGGGLMVGAASTYDGLALAAHENVVVVTIQYRLGIWGFFSTGDEHSRGNWGHLDQVAALRWVQDNIASFGGNPGSVTIFGESAGGESVSVLVLSPLAKNLFHRAISESGVALTSVLVKKGDVKPLAEQIAITAGCKTTTSAVMVHCLRQKTEEELLETTLKMKFLSLDLQGDPRESQPLLGTVIDGMLLLKTPEELQAERNFHTVPYMVGINKQEFGWLIPMLMSYPLSEGQLDQKTAMSLLWKSYPLVCIAKELIPEATEKYLGGTDDTVKKKDLFLDLIADVMFGVPSVIVARNHRDAGAPTYMYEFQYRPSFSSDMKPKTVIGDHGDELFSVFGAPFLKEGASEEEIRLSKMVMKFWANFARNGNPNGEGLPHWPEYNQKEGYLQIGANTQAAQKLKDKEVAFWTNLFAKKAVEKPPQTEHIEL

SEQ ID NO: 11776 - protein, 44 aa, Homo sapiens
  Payload ID: 2329
  Gene Symbol: CES1
  Gene Name: carboxylesterase 1
  ENSP ID: ENSP00000455902
ERNFHTVPYMVGINKQEFGWLIPMMLEHPPTCMSFSTVQASHQT

SEQ ID NO: 11777 - protein, 131 aa, Homo sapiens
  Payload ID: 2329
  Gene Symbol: CES1
  Gene Name: carboxylesterase 1
  ENSP ID: ENSP00000455959
KELIPEATEKYLGGTDDTVKKKDLFLDLIADVMFGVPSVIVARNHREGASEEEIRLSKMVMKFWANFARNGNPNGEGLPHWPEYNQKEGYLQIGANTQAAQKLKDKEVAFWTNLFAKKAVEKPPQTEHIEL

SEQ ID NO: 11778 - protein, 44 aa, Homo sapiens; identical to SEQ ID NO: 11776
  Payload ID: 2329
  Gene Symbol: CES1
  Gene Name: carboxylesterase 1
  ENSP ID: ENSP00000456356

SEQ ID NO: 11779 - protein, 84 aa, Homo sapiens
  Payload ID: 2329
  Gene Symbol: CES1
  Gene Name: carboxylesterase 1
  ENSP ID: ENSP00000456865
  MOD_RES (1)..(1): Any amino acid
XRQKTEEELLETTLKMKFLSLDLQGDPRESQPLLGTVIDGMLLLKTPEELQAERNFHTVPYMVGINKQEFGWLIPMGTADISVY

SEQ ID NO: 11780 - protein, 566 aa, Homo sapiens
  Payload ID: 2329
  Gene Symbol: CES1
  Gene Name: carboxylesterase 1
  Uniprot ID: P23141
  ENSP ID: ENSP00000458586
MWLPALVLATLAASAAWGHPSSPPVVDTVHGKVLGKFVSLEGFAQPVAIFLGIPFAKPPLGPLRFTPPQPAEPWSFVKNATSYPPMCTQDPKAGQLLSELFTNRKENIPLKLSEDCLYLNIYTPADLTKKNRLPVMVWIHGGGLMVGAASTYDGLALAAHENVVVVTIQYRLGIWGFFSTGDEHSRGNWGHLDQVAALRWVQDNIASFGGNPGSVTIFGESAGGESVSVLVLSPLAKNLFHRAISESGVALTSVLVKKGDVKPLAEQIAITAGCKTTTSAVMVHCLRQKTEEELLETTLKMKFLSLDLQGDPRESQPLLGTVIDGMLLLKTPEELQAERNFHTVPYMVGINKQEFGWLIPMLMSYPLSEGQLDQKTAMSLLWKSYPLVCIAKELIPEATEKYLGGTDDTVKKKDLFLDLIADVMFGVPSVIVARNHRDAGAPTYMYEFQYRPSFSSDMKPKTVIGDHGDELFSVFGAPFLKEGASEEEIRLSKMVMKFWANFARNGNPNGEGLPHWPEYNQKEGYLQIGANTQAAQKLKDKEVAFWTNLFAKKAVEKPPQTEHIEL

SEQ ID NO: 11781 - protein, 134 aa, Homo sapiens
  Payload ID: 2329
  Gene Symbol: CES1
  Gene Name: carboxylesterase 1
  ENSP ID: ENSP00000458773
CIAKELIPEATEKYLGGTDDTVKKKDLFLDLIADVMFGVPSVIVARNHREGASEEEIRLSKMVMKFWANFARNGNPNGEGLPHWPEYNQKEGYLQIGANTQAAQKLKDKEVAFWTNLFAKKAVEKPPQTEHIEL

SEQ ID NO: 11782 - protein, 84 aa, Homo sapiens; identical to SEQ ID NO: 11779
  Payload ID: 2329
  Gene Symbol: CES1
  Gene Name: carboxylesterase 1
  ENSP ID: ENSP00000459806
  MOD_RES (1)..(1): Any amino acid

SEQ ID NO: 11783 - protein, 567 aa, Homo sapiens
  Payload ID: 2329
  Gene Symbol: CES1
  Gene Name: carboxylesterase 1
  Uniprot ID: P23141
  ENSP ID: ENSP00000460045
MWLPALVLATLAASAAWGHPSSPPVVDTVHGKVLGKFVSLEGFAQPVAIFLGIPFAKPPLGPLRFTPPQPAEPWSFVKNATSYPPMCTQDPKAGQLLSELFTNRKENIPLKLSEDCLYLNIYTPADLTKKNRLPVMVWIHGGGLMVGAASTYDGLALAAHENVVVVTIQYRLGIWGFFSTGDEHSRGNWGHLDQVAALRWVQDNIASFGGNPGSVTIFGESAGGESVSVLVLSPLAKNLFHRAISESGVALTSVLVKKGDVKPLAEQIAITAGCKTTTSAVMVHCLRQKTEEELLETTLKMKFLSLDLQGDPRESQPLLGTVIDGMLLLKTPEELQAERNFHTVPYMVGINKQEFGWLIPMQLMSYPLSEGQLDQKTAMSLLWKSYPLVCIAKELIPEATEKYLGGTDDTVKKKDLFLDLIADVMFGVPSVIVARNHRDAGAPTYMYEFQYRPSFSSDMKPKTVIGDHGDELFSVFGAPFLKEGASEEEIRLSKMVMKFWANFARNGNPNGEGLPHWPEYNQKEGYLQIGANTQAAQKLKDKEVAFWTNLFAKKAVEKPPQTEHIEL

SEQ ID NO: 11784 - protein, 568 aa, Homo sapiens
  Payload ID: 2329
  Gene Symbol: CES1
  Gene Name: carboxylesterase 1
  Uniprot ID: P23141
  ENSP ID: ENSP00000461208
MWLPALVLATLAASAAWAGHPSSPPVVDTVHGKVLGKFVSLEGFAQPVAIFLGIPFAKPPLGPLRFTPPQPAEPWSFVKNATSYPPMCTQDPKAGQLLSELFTNRKENIPLKLSEDCLYLNIYTPADLTKKNRLPVMVWIHGGGLMVGAASTYDGLALAAHENVVVVTIQYRLGIWGFFSTGDEHSRGNWGHLDQVAALRWVQDNIASFGGNPGSVTIFGESAGGESVSVLVLSPLAKNLFHRAISESGVALTSVLVKKGDVKPLAEQIAITAGCKTTTSAVMVHCLRQKTEEELLETTLKMKFLSLDLQGDPRESQPLLGTVIDGMLLLKTPEELQAERNFHTVPYMVGINKQEFGWLIPMQLMSYPLSEGQLDQKTAMSLLWKSYPLVCIAKELIPEATEKYLGGTDDTVKKKDLFLDLIADVMFGVPSVIVARNHRDAGAPTYMYEFQYRPSFSSDMKPKTVIGDHGDELFSVFGAPFLKEGASEEEIRLSKMVMKFWANFARNGNPNGEGLPHWPEYNQKEGYLQIGANTQAAQKLKDKEVAFWTNLFAKKAVEKPPQTEHIEL

SEQ ID NO: 11785 - protein, 623 aa, Homo sapiens
  Payload ID: 2330
  Gene Symbol: CES2
  Gene Name: carboxylesterase 2
  ENSP ID: ENSP00000317842
MTAQSRSPTTPTFPGPSQRTPLTPCPVQTPRLGKALIHCWTDPGQPLGEQQRVRRQRTETSEPTMRLHRLRARLSAVACGLLLLLVRGQGQDSASPIRTTHTGQVLGSLVHVKGANAGVQTFLGIPFAKPPLGPLRFAPPEPPESWSGVRDGTTHPAMCLQDLTAVESEFLSQFNMTFPSDSMSEDCLYLSIYTPAHSHEGSNLPVMVWIHGGALVFGMASLYDGSMLAALENVVVVIIQYRLGVLGFFSTGDKHATGNWGYLDQVAALRWVQQNIAHFGGNPDRVTIFGESAGGTSVSSLVVSPISQGLFHGAIMESGVALLPGLIASSADVISTVVANLSACDQVDSEALVGCLRGKSKEEILAINKPFKMIPGVVDGVFLPRHPQELLASADFQPVPSIVGVNNNEFGWLIPKVMRIYDTQKEMDREASQAALQKMLTLLMLPPTFGDLLREEYIGDNGDPQTLQAQFQEMMADSMFVIPALQVAHFQCSRAPVYFYEFQHQPSWLKNIRPPHMKADHGDELPFVFRSFFGGNYIKFTEEEEQLSRKMMKYWANFARNGNPNGEGLPHWPLFDQEEQYLQLNLQPAVGRALKAHRLQFWKKALPQKIQELEEPEERHTEL

SEQ ID NO: 11786 - protein, 607 aa, Homo sapiens
  Payload ID: 2330
  Gene Symbol: CES2
  Gene Name: carboxylesterase 2
  Uniprot ID: O00748
  ENSP ID: ENSP00000394452
MTAQSRSPTTPTFPGPSQRTPLTPCPVQTPRLGKALIHCWTDPGQPLGEQQRVRRQRTETSEPTMRLHRLRARLSAVACGLLLLLVRGQGQDSASPIRTTHTGQVLGSLVHVKGANAGVQTFLGIPFAKPPLGPLRFAPPEPPESWSGVRDGTTHPAMCLQDLTAVESEFLSQFNMTFPSDSMSEDCLYLSIYTPAHSHEGSNLPVMVWIHGGALVFGMASLYDGSMLAALENVVVVIIQYRLGVLGFFSTGDKHATGNWGYLDQVAALRWVQQNIAHFGGNPDRVTIFGESAGGTSVSSLVVSPISQGLFHGAIMESGVALLPGLIASSADVISTVVANLSACDQVDSEALVGCLRGKSKEEILAINKPFKMIPGVVDGVFLPRHPQELLASADFQPVPSIVGVNNNEFGWLIPKVMRIYDTQKEMDREASQAALQKMLTLLMLPPTFGDLLREEYIGDNGDPQTLQAQFQEMMADSMFVIPALQVAHFQCSRAPVYFYEFQHQPSWLKNIRPPHMKADHVKFTEEEEQLSRKMMKYWANFARNGNPNGEGLPHWPLFDQEEQYLQLNLQPAVGRALKAHRLQFWKKALPQKIQELEEPEERHTEL

SEQ ID NO: 11787 - protein, 122 aa, Homo sapiens
  Payload ID: 2330
  Gene Symbol: CES2
  Gene Name: carboxylesterase 2
  ENSP ID: ENSP00000456167
MTAQSRSPTTPTFPGPSQRTPLTPCPVQTPRLGKALIHCWTDPGQPLGEQQRVRRQRTETSEPTMRLHRLRARLSAVACGLLLLLVRGQGEAPSEGRQGPGSDLPNAAEAEPDSAGGQAPGR

SEQ ID NO: 11788 - protein, 122 aa, Homo sapiens; identical to SEQ ID NO: 11787
  Payload ID: 2330
  Gene Symbol: CES2
  Gene Name: carboxylesterase 2
  ENSP ID: ENSP00000457721

SEQ ID NO: 11789 - protein, 21 aa, Homo sapiens
  Payload ID: 2330
  Gene Symbol: CES2
  Gene Name: carboxylesterase 2
  ENSP ID: ENSP00000463166
MTAQSRSPTTPTFPGPSQRTP

SEQ ID NO: 11790 - protein, 125 aa, Homo sapiens
  Payload ID: 2330
  Gene Symbol: CES2
  Gene Name: carboxylesterase 2
  ENSP ID: ENSP00000463641
MCLQDLTAVESEFLSQFNMTFPSDSMSEDCLYLSIYTPAHSHEGSNLPVMVWIHGGALVFGMASLYDGSMLAALENVVVVIIQYRLGVLGFFSTGDKHATGNWGYLDQVAALRWVQQNIAHFGGN

SEQ ID NO: 11791 - protein, 201 aa, Homo sapiens
  Payload ID: 2330
  Gene Symbol: CES2
  Gene Name: carboxylesterase 2
  ENSP ID: ENSP00000464620
  MOD_RES (1)..(1): Any amino acid
XVDSEALVGCLRGKSKEEILAINKPFKMIPGVVDGVFLPRHPQELLASADFQPVPSIVGVNNNEFGWLIPKVMRIYDTQKEMDREASQAALQKMLTLLMLPPTFGDLLREEYIGDNGDPQTLQAQFQEMMADSMFVIPALQVAHFQCSRAPVYFYEFQHQPSWLKNIRPPHMKADHVKFTEEEEQLSRKMMKYWANFARNG

SEQ ID NO: 11792 - protein, 571 aa, Homo sapiens
  Payload ID: 2331
  Gene Symbol: CES3
  Gene Name: carboxylesterase 3
  Uniprot ID: Q6UWW8
  ENSP ID: ENSP00000304782
MERAVRVESGVLVGVVCLLLACPATATGPEVAQPEVDTTLGRVRGRQVGVKGTDRLVNVFLGIPFAQPPLGPDRFSAPHPAQPWEGVRDASTAPPMCLQDVESMNSSRFVLNGKQQIFSVSEDCLVLNVYSPAEVPAGSGRPVMVWVHGGALITGAATSYDGSALAAYGDVVVVTVQYRLGVLGFFSTGDEHAPGNQGFLDVVAALRWVQENIAPFGGDLNCVTVFGGSAGGSIISGLVLSPVAAGLFHRAITQSGVITTPGIIDSHPWPLAQKIANTLACSSSSPAEMVQCLQQKEGEELVLSKKLKNTIYPLTVDGTVFPKSPKELLKEKPFHSVPFLMGVNNHEFSWLIPRGWGLLDTMEQMSREDMLAISTPVLTSLDVPPEMMPTVIDEYLGSNSDAQAKCQAFQEFMGDVFINVPTVSFSRYLRDSGSPVFFYEFQHRPSSFAKIKPAWVKADHGAEGAFVFGGPFLMDESSRLAFPEATEEEKQLSLTMMAQWTHFARTGDPNSKALPPWPQFNQAEQYLEINPVPRAGQKFREAWMQFWSETLPSKIQQWHQKQKNRKAQEDL

SEQ ID NO: 11793 - protein, 568 aa, Homo sapiens
  Payload ID: 2331
  Gene Symbol: CES3
  Gene Name: carboxylesterase 3
  ENSP ID: ENSP00000377602
MERAVRVESGVLVGVVCLLLACPATATGPEVAQPEVDTTLGRVRGRQVGVKGTDRLVNVFLGIPFAQPPLGPDRFSAPHPAQPWEGVRDASTAPPMCLQDVESMNSSRFVLNGKQQIFSVSEDCLVLNVYSPAEVPAGSGRPVMVWVHGGALITGAATSYDGSALAAYGDVVVVTVQYRLGVLGFFSTGDEHAPGNQGFLDVVAALRWVQENIAPFGGDLNCVTVFGGSAGGSIISGLVLSPVAAGLFHRAITQSGVITTPGIIDSHPWPLAQKIANTLACSSSSPAEMVQCLQQKEGEELVLSKKLKNTIYPLTVDGTVFPKSPKELLKEKPFHSVPFLMGVNNHEFSWLIPRGWGLLDTMEQMSREDMLAISTPVLTSLDVPPEMMPTVIDEYLGSNSDAQAKCQAFQEFMGDVFINVPTVSFSRYLRDSGSPVFFYEFQHRPSSFAKIKPAWVKADHGAEGAFVFGGPFLMDESSRLEATEEEKQLSLTMMAQWTHFARTGDPNSKALPPWPQFNQAEQYLEINPVPRAGQKFREAWMQFWSETLPSKIQQWHQKQKNRKAQEDL

SEQ ID NO: 11794 - protein, 210 aa, Homo sapiens
  Payload ID: 2331
  Gene Symbol: CES3
  Gene Name: carboxylesterase 3
  Uniprot ID: Q6UWW8
  ENSP ID: ENSP00000445559
MEQMSREDMLAISTPVLTSLDVPPEMMPTVIDEYLGSNSDAQAKCQAFQEFMGDVFINVPTVSFSRYLRDSGSPVFFYEFQHRPSSFAKIKPAWVKADHGAEGAFVFGGPFLMDESSRLAFPEATEEEKQLSLTMMAQWTHFARTGDPNSKALPPWPQFNQAEQYLEINPVPRAGQKFREAWMQFWSETLPSKIQQWHQKQKNRKAQEDL

SEQ ID NO: 11795 - protein, 40 aa, Homo sapiens
  Payload ID: 2331
  Gene Symbol: CES3
  Gene Name: carboxylesterase 3
  ENSP ID: ENSP00000456203
MERAVRVESGVLVGVVCLLLACPATATGYQDAVWARSCSA

SEQ ID NO: 11796 - protein, 379 aa, Homo sapiens
  Payload ID: 2331
  Gene Symbol: CES3
  Gene Name: carboxylesterase 3
  ENSP ID: ENSP00000457547
MERAVRVESGVLVGVVCLLLACPATATGPEVAQPEVDTTLGRVRGRQVGVKGTDRLVNVFLGIPFAQPPLGPDRFSAPHPAQPWEGVRDASTAPPMCLQDVESMNSSRFVLNGKQQIFSVSEDCLVLNVYSPAEVPAGSGRPVMVWVHGGALITGAATSYDGSALAAYGDVVVVTVQYRLGVLGFFSTGDEHAPGNQGFLDVVAALRWVQENIAPFGGDLNCVTVFGGSAGGSIISGLVLSPVAAGLFHRAITQSGVITTPGIIDSHPWPLAQKIANTLACSSSSPAEMVQCLQQKEGEELVLSKKLKNTIYPLTVDGTVFPKSPKELLKEKPFHSVPFLMGVNNHEFSWLIPRILEALSFSMSSSIDPVLLRRSNLPG

SEQ ID NO: 11797 - protein, 454 aa, Homo sapiens
  Payload ID: 2332
  Gene Symbol: CES4A
  Gene Name: carboxylesterase 4A
  ENSP ID: ENSP00000441103
GKQMHVGKTPIQVFLGVPFSRPPLGILRFAPPEPPEPWKGIRDATTYPPGCLQESWGQLASMYVSTRERYKWLRFSEDCLYLNVYAPARAPGDPQLPVMVWFPGGAFIVGAASSYEGSDLAAREKVVLVFLQHRLGIFGFLSTDDSHARGNWGLLDQMAALRWVQENIAAFGGDPGNVTLFGQSAGAMSISGLMMSPLASGLFHRAISQSGTALFRLFITSNPLKVAKKVAHLAGCNHNSTQILVNCLRALSGTKVMRVSNKMRFLQLNFQRDPEEIIWSMSPVVDGVVIPDDPLVLLTQGKVSSVPYLLGVNNLEFNWLLPYNITKEQVPLVVEEYLDNVNEHDWKMLRNRMMDIVQDATFVYATLQTAHYHRGLSMGKEKALSLQMMKYWANFARTGNPNDGNLPCWPRYNKDEKYLQLDFTTRVGMKLKEKKMAFWMSLYQSQRPEKQRQF

SEQ ID NO: 11798 - protein, 374 aa, Homo sapiens
  Payload ID: 2332
  Gene Symbol: CES4A
  Gene Name: carboxylesterase 4A
  Uniprot ID: Q5XG92
  ENSP ID: ENSP00000441644
MYVSTRERYKWLRFSEDCLYLNVYAPARAPGDPQLPVMVWFPGGAFIVGAASSYEGSDLAAREKVVLVFLQHRLGIFGFLRWRGRTDDSHARGNWGLLDQMAALRWVQENIAAFGGDPGNVTLFGQSAGAMSISGLMMSPLASGLFHRAISQSGTALFRLFITSNPLKVAKKVAHLAGCNHNSTQILVNCLRALSGTKVMRVSNKMRFLQLNFQRDPEEIIWSMSPVVDGVVIPDDPLVLLTQGKVSSVPYLLGVNNLEFNWLLPYIMKFPLNRQAMRKETITKMLWSTRTLLNITKEQVPLVVEEYLDNVNEHDWKMLRNRMMDIVQDATFVYATLQTAHYHRETPMMGICPAGHATTRMKSTCSWILPQEWA

SEQ ID NO: 11799 - protein, 463 aa, Homo sapiens
  Payload ID: 2332
  Gene Symbol: CES4A
  Gene Name: carboxylesterase 4A
  Uniprot ID: Q5XG92
  ENSP ID: ENSP00000441907
MYVSTRERYKWLRFSEDCLYLNVYAPARAPGDPQLPVMVWFPGGAFIVGAASSYEGSDLAAREKVVLVFLQHRLGIFGFLSTDDSHARGNWGLLDQMAALRWVQENIAAFGGDPGNVTLFGQSAGAMSISGLMMSPLASGLFHRAISQSGTALFRLFITSNPLKVAKKVAHLAGCNHNSTQILVNCLRALSGTKVMRVSNKMRFLQLNFQRDPEEIIWSMSPVVDGVVIPDDPLVLLTQGKVSSVPYLLGVNNLEFNWLLPYIMKFPLNRQAMRKETITKMLWSTRTLLNITKEQVPLVVEEYLDNVNEHDWKMLRNRMMDIVQDATFVYATLQTAHYHRDAGLPVYLYEFEHHARGIIVKPRTDGADHGDEMYFLFGGPFATGLSMGKEKALSLQMMKYWANFARTGNPNDGNLPCWPRYNKDEKYLQLDFTTRVGMKLKEKKMAFWMSLYQSQRPEKQRQF

SEQ ID NO: 11800 - protein, 468 aa, Homo sapiens
  Payload ID: 2332
  Gene Symbol: CES4A
  Gene Name: carboxylesterase 4A
  Uniprot ID: Q5XG92
  ENSP ID: ENSP00000444052
MRWILCWSLTLCLMAQTALGALHTKRPQVVTKYGTLQGKQMHVGKTPIQVFLGVPFSRPPLGILRFAPPEPPEPWKGIRDATTYPPGCLQESWGQLASMYVSTRERYKWLRFSEDCLYLNVYAPARAPGDPQLPVMVWFPGGAFIVGAASSYEGSDLAAREKVVLVFLQHRLGIFGFLSTDDSHARGNWGLLDQMAALRWVQENIAAFGGDPGNVTLFGQSAGAMSISGLMMSPLASGLFHRAISQSGTALFRLFITSNPLKVAKKVAHLAGCNHNSTQILVNCLRALSGTKVMRVSNKMRFLQLNFQRDPEEIIWSMSPVVDGVVIPDDPLVLLTQGKVSSVPYLLGVNNLEFNWLLPYIMKFPLNRQAMRKETITKMLWSTRTLLNITKEQVPLVVEEYLDNVNEHDWKMLRNRMMDIVQDATFVYATLQTAHYHRETPMMGICPAGHATTRMKSTCSWILPQEWA

SEQ ID NO: 11801 - protein, 135 aa, Homo sapiens
  Payload ID: 2332
  Gene Symbol: CES4A
  Gene Name: carboxylesterase 4A
  ENSP ID: ENSP00000444182
MYVSTRERYKWLRFSEDCLYLNVYAPARAPGDPQLPVMVWFPGGAFIVGAASSYEGSDLAAREKVVLVFLQHRLGIFGFLRWRGRYPLGPQLWPERRGLARTTATRAGTGGCWTRWRLCAGCRRTSQPSGETQEM

SEQ ID NO: 11802 - protein, 177 aa, Homo sapiens
  Payload ID: 2332
  Gene Symbol: CES4A
  Gene Name: carboxylesterase 4A
  ENSP ID: ENSP00000458664
  MOD_RES (1)..(1): Any amino acid
XALHTKRPQVVTKYGTLQGKQMHVGKTPIQVFLGVPFSRPPLGILRFAPPEPPEPWKGIRDATTYPPGWSLALSPGWSAVARSRLTATSASRVQASLLPQPLSIWGYRCLQESWGQLASMYVSTRERYKWLRFSEDCLYLNVYAPARAPGDPQLPVSDGLVPGRRLHRGRCFFVRGL

SEQ ID NO: 11803 - protein, 575 aa, Homo sapiens
  Payload ID: 2333
  Gene Symbol: CES5A
  Gene Name: carboxylesterase 5A
  Uniprot ID: Q6NT32
  ENSP ID: ENSP00000290567
MSGNWVHPGQILIWAIWVLAAPTKGPSAEGPQRNTRLGWIQGKQVTVLGSPVPVNVFLGVPFAAPPLGSLRFTNPQPASPWDNLREATSYPNLCLQNSEWLLLDQHMLKVHYPKFGVSEDCLYLNIYAPAHADTGSKLPVLVWFPGGAFKTGSASIFDGSALAAYEDVLVVVVQYRLGIFGFFTTWDQHAPGNWAFKDQVAALSWVQKNIEFFGGDPSSVTIFGESAGAISVSSLILSPMAKGLFHKAIMESGVAIIPYLEAHDYEKSEDLQVVAHFCGNNASDSEALLRCLRTKPSKELLTLSQKTKSFTRVVDGAFFPNEPLDLLSQKAFKAIPSIIGVNNHECGFLLPMKEAPEILSGSNKSLALHLIQNILHIPPQYLHLVANEYFHDKHSLTEIRDSLLDLLGDVFFVVPALITARYHRDAGAPVYFYEFRHRPQCFEDTKPAFVKADHADEVRFVFGGAFLKGDIVMFEGATEEEKLLSRKMMKYWATFARTGNPNGNDLSLWPAYNLTEQYLQLDLNMSLGQRLKEPRVDFWTSTIPLILSASDMLHSPLSSLTFLSLLQPFFFFCAP

SEQ ID NO: 11804 - protein, 525 aa, Homo sapiens
  Payload ID: 2333
  Gene Symbol: CES5A
  Gene Name: carboxylesterase 5A
  Uniprot ID: Q6NT32
  ENSP ID: ENSP00000324271
MSGNWVHPGQILIWAIWVLAAPTKGPSAEGPQRNTRLGWIQGKQVTVLGSPVPVNVFLGVPFAAPPLGSLRFTNPQPASPWDNLREATSYPNLCLQNSEWLLLDQHMLKVHYPKFGVSEDCLYLNIYAPAHADTGSKLPVLVWFPGGAFKTGSASIFDGSALAAYEDVLVVVVQYRLGIFGFFTTWDQHAPGNWAFKDQVAALSWVQKNIEFFGGDPSSVTIFGESAGAISVSSLILSPMAKGLFHKAIMESGVAIIPYLEAHDYEKSEDLQVVAHFCGNNASDSEALLRCLRTKPSKELLTLSQKTKSFTRVVDGAFFPNEPLDLLSQKAFKAIPSIIGVNNHECGFLLPMKEAPEILSGSNKSLALHLIQNILHIPPQYLHLVANEYFHDKHSLTEIRDSLLDLLGDVFFVVPALITARYHREGATEEEKLLSRKMMKYWATFARTGNPNGNDLSLWPAYNLTEQYLQLDLNMSLGQRLKEPRVDFWTSTIPLILSASDMLHSPLSSLTFLSLLQPFFFFCAP

SEQ ID NO: 11805 - protein, 469 aa, Homo sapiens
  Payload ID: 2333
  Gene Symbol: CES5A
  Gene Name: carboxylesterase 5A
  Uniprot ID: Q6NT32
  ENSP ID: ENSP00000428571
MLKVHYPKFGVSEDCLYLNIYAPAHADTGSKLPVLVWFPGGAFKTGSASIFDGSALAAYEDVLVVVVQYRLGIFGFFTTWDQHAPGNWAFKDQVAALSWVQKNIEFFGGDPSSVTIFGESAGAISVSSLILSPMAKGLFHKAIMESGVAIIPYLEAHDYEKSEDLQVVAHFCGNNASDSEALLRCLRTKPSKELLTLSQKTKSFTRVVDGAFFPNEPLDLLSQKAFKAIPSIIGVNNHECGFLLPMKEAPEILSGSNKSLALHLIQNILHIPPQYLHLVANEYFHDKHSLTEIRDSLLDLLGDVFFVVPALITARYHRDAGAPVYFYEFRHRPQCFEDTKPAFVKADHADEVRFVFGGAFLKGDIVMFEGATEEEKLLSRKMMKYWATFARTGNPNGNDLSLWPAYNLTEQYLQLDLNMSLGQRLKEPRVDFWTSTIPLILSASDMLHSPLSSLTFLSLLQPFFFFCAP

SEQ ID NO: 11806 - protein, 604 aa, Homo sapiens
  Payload ID: 2333
  Gene Symbol: CES5A
  Gene Name: carboxylesterase 5A
  Uniprot ID: Q6NT32
  ENSP ID: ENSP00000428864
MAVLVCPASCHGLKEFRIRRGMWRLCLVYYFYPASSTLYVLRIDVLNYTSKDEGPSAEGPQRNTRLGWIQGKQVTVLGSPVPVNVFLGVPFAAPPLGSLRFTNPQPASPWDNLREATSYPNLCLQNSEWLLLDQHMLKVHYPKFGVSEDCLYLNIYAPAHADTGSKLPVLVWFPGGAFKTGSASIFDGSALAAYEDVLVVVVQYRLGIFGFFTTWDQHAPGNWAFKDQVAALSWVQKNIEFFGGDPSSVTIFGESAGAISVSSLILSPMAKGLFHKAIMESGVAIIPYLEAHDYEKSEDLQVVAHFCGNNASDSEALLRCLRTKPSKELLTLSQKTKSFTRVVDGAFFPNEPLDLLSQKAFKAIPSIIGVNNHECGFLLPMKEAPEILSGSNKSLALHLIQNILHIPPQYLHLVANEYFHDKHSLTEIRDSLLDLLGDVFFVVPALITARYHRDAGAPVYFYEFRHRPQCFEDTKPAFVKADHADEVRFVFGGAFLKGDIVMFEGATEEEKLLSRKMMKYWATFARTGNPNGNDLSLWPAYNLTEQYLQLDLNMSLGQRLKEPRVDFWTSTIPLILSASDMLHSPLSSLTFLSLLQPFFFFCAP

SEQ ID NO: 11807 - protein, 545 aa, Homo sapiens
  Payload ID: 2333
  Gene Symbol: CES5A
  Gene Name: carboxylesterase 5A
  ENSP ID: ENSP00000428887
MSGNWVHPGQILIWAIWVLAAPTKGPSAEGPQRNTRLGWIQGKQVTVLGSPVPVNVFLGVPFAAPPLGSLRFTNPQPASPWDNLREATSYPNLCLQNSEWLLLDQHMLKVLVWFPGGAFKTGSASIFDGSALAAYEDVLVVVVQYRLGIFGFFTTWDQHAPGNWAFKDQVAALSWVQKNIEFFGGDPSSVTIFGESAGAISVSSLILSPMAKGLFHKAIMESGVAIIPYLEAHDYEKSEDLQVVAHFCGNNASDSEALLRCLRTKPSKELLTLSQKTKSFTRVVDGAFFPNEPLDLLSQKAFKAIPSIIGVNNHECGFLLPMKEAPEILSGSNKSLALHLIQNILHIPPQYLHLVANEYFHDKHSLTEIRDSLLDLLGDVFFVVPALITARYHRDAGAPVYFYEFRHRPQCFEDTKPAFVKADHADEVRFVFGGAFLKGDIVMFEGATEEEKLLSRKMMKYWATFARTGNPNGNDLSLWPAYNLTEQYLQLDLNMSLGQRLKEPRVDFWTSTIPLILSASDMLHSPLSSLTFLSLLQPFFFFCAP

SEQ ID NO: 11808 - protein, 75 aa, Homo sapiens
  Payload ID: 2333
  Gene Symbol: CES5A
  Gene Name: carboxylesterase 5A
  ENSP ID: ENSP00000439810
MLKVHYPKFGVSEDCLYLNIYAPAHADTGSKLPVLVWFPGGAFKTGSASIFDGSALAAYEDVLVVVVQYRLGIFG

SEQ ID NO: 11809 - protein, 545 aa, Homo sapiens
  Payload ID: 2333
  Gene Symbol: CES5A
  Gene Name: carboxylesterase 5A
  ENSP ID: ENSP00000458678
MSGNWVHPGQILIWAIWVLAAPTKGPSAEGPQRNTRLGWIQGKQVTVLGSPVPVNVFLGVPFAAPPLGSLRFTNPQPASPWDNLREATSYPNLCLQNSEWLLLDQHMLKVLVWFPGGAFKTGSASIFDGSALAAYEDVLVVVVQYRLGIFGFFTTWDQHAPGNWAFKDQVAALSWVQKNIEFFGGDPSSVTIFGESAGAISVSSLILSPMAKGLFHKAIMESGVAIIPYLEAHDYEKSEDLQVVAHFCGNNASDSEALLRCLRTKPSKELLTLSQKTKSFTRVVDGAFFPNEPLDLLSQKAFKAIPSIIGVNNHECGFLLPMKEAPEILSGSNKSLALHLIQNILHIPPQYLHLVANEYFHDKHSLTEIRDSLLDLLGDVFFVVPALITARYHRDAGAPVYFYEFRHRPQCFEDTKPAFVKADHADEVRFVFGGAFLKGDIVMFEGATEEEKLLSRKMMKYWATFARTGNPNGNDLSLWPAYNLTEQYLQLDLNMSLGQRLKEPRVEFWTSTIPLILSASDMLHSPLSSLTFLSLLQPFFFFCAP

SEQ ID NO: 11810 - protein, 575 aa, Homo sapiens
  Payload ID: 2333
  Gene Symbol: CES5A
  Gene Name: carboxylesterase 5A
  ENSP ID: ENSP00000459314
MSGNWVHPGQILIWAIWVLAAPTKGPSAEGPQRNTRLGWIQGKQVTVLGSPVPVNVFLGVPFAAPPLGSLRFTNPQPASPWDNLREATSYPNLCLQNSEWLLLDQHMLKVHYPKFGVSEDCLYLNIYAPAHADTGSKLPVLVWFPGGAFKTGSASIFDGSALAAYEDVLVVVVQYRLGIFGFFTTWDQHAPGNWAFKDQVAALSWVQKNIEFFGGDPSSVTIFGESAGAISVSSLILSPMAKGLFHKAIMESGVAIIPYLEAHDYEKSEDLQVVAHFCGNNASDSEALLRCLRTKPSKELLTLSQKTKSFTRVVDGAFFPNEPLDLLSQKAFKAIPSIIGVNNHECGFLLPMKEAPEILSGSNKSLALHLIQNILHIPPQYLHLVANEYFHDKHSLTEIRDSLLDLLGDVFFVVPALITARYHRDAGAPVYFYEFRHRPQCFEDTKPAFVKADHADEVRFVFGGAFLKGDIVMFEGATEEEKLLSRKMMKYWATFARTGNPNGNDLSLWPAYNLTEQYLQLDLNMSLGQRLKEPRVEFWTSTIPLILSASDMLHSPLSSLTFLSLLQPFFFFCAP

SEQ ID NO: 11811 - protein, 75 aa, Homo sapiens; identical to SEQ ID NO: 11808
  Payload ID: 2333
  Gene Symbol: CES5A
  Gene Name: carboxylesterase 5A
  ENSP ID: ENSP00000460292

SEQ ID NO: 11812 - protein, 604 aa, Homo sapiens
  Payload ID: 2333
  Gene Symbol: CES5A
  Gene Name: carboxylesterase 5A
  ENSP ID: ENSP00000460799
MAVLVCPASCHGLKEFRIRRGMWRLCLVYYFYPASSTLYVLRIDVLNYTSKDEGPSAEGPQRNTRLGWIQGKQVTVLGSPVPVNVFLGVPFAAPPLGSLRFTNPQPASPWDNLREATSYPNLCLQNSEWLLLDQHMLKVHYPKFGVSEDCLYLNIYAPAHADTGSKLPVLVWFPGGAFKTGSASIFDGSALAAYEDVLVVVVQYRLGIFGFFTTWDQHAPGNWAFKDQVAALSWVQKNIEFFGGDPSSVTIFGESAGAISVSSLILSPMAKGLFHKAIMESGVAIIPYLEAHDYEKSEDLQVVAHFCGNNASDSEALLRCLRTKPSKELLTLSQKTKSFTRVVDGAFFPNEPLDLLSQKAFKAIPSIIGVNNHECGFLLPMKEAPEILSGSNKSLALHLIQNILHIPPQYLHLVANEYFHDKHSLTEIRDSLLDLLGDVFFVVPALITARYHRDAGAPVYFYEFRHRPQCFEDTKPAFVKADHADEVRFVFGGAFLKGDIVMFEGATEEEKLLSRKMMKYWATFARTGNPNGNDLSLWPAYNLTEQYLQLDLNMSLGQRLKEPRVEFWTSTIPLILSASDMLHSPLSSLTFLSLLQPFFFFCAP

SEQ ID NO: 11813 - protein, 355 aa, Homo sapiens
  Payload ID: 2333
  Gene Symbol: CES5A
  Gene Name: carboxylesterase 5A
  ENSP ID: ENSP00000460847
MEDDLSWRSWSLLCMEILSPMAKGLFHKAIMESGVAIIPYLEAHDYEKSEDLQVVAHFCGNNASDSEALLRCLRTKPSKELLTLSQKTKSFTRVVDGAFFPNEPLDLLSQKAFKAIPSIIGVNNHECGFLLPMEAPEILSGSNKSLALHLIQNILHIPPQYLHLVANEYFHDKHSLTEIRDSLLDLLGDVFFVVPALITARYHRDAGAPVYFYEFRHRPQCFEDTKPAFVKADHADEVRFVFGGAFLKGDIVMFEGATEEEKLLSRKMMKYWATFARTGNPNGNDLSLWPAYNLTEQYLQLDLNMSLGQRLKEPRVEFWTSTIPLILSASDMLHSPLSSLTFLSLLQPFFFFCAP

SEQ ID NO: 11814 - protein, 525 aa, Homo sapiens
  Payload ID: 2333
  Gene Symbol: CES5A
  Gene Name: carboxylesterase 5A
  ENSP ID: ENSP00000461336
MSGNWVHPGQILIWAIWVLAAPTKGPSAEGPQRNTRLGWIQGKQVTVLGSPVPVNVFLGVPFAAPPLGSLRFTNPQPASPWDNLREATSYPNLCLQNSEWLLLDQHMLKVHYPKFGVSEDCLYLNIYAPAHADTGSKLPVLVWFPGGAFKTGSASIFDGSALAAYEDVLVVVVQYRLGIFGFFTTWDQHAPGNWAFKDQVAALSWVQKNIEFFGGDPSSVTIFGESAGAISVSSLILSPMAKGLFHKAIMESGVAIIPYLEAHDYEKSEDLQVVAHFCGNNASDSEALLRCLRTKPSKELLTLSQKTKSFTRVVDGAFFPNEPLDLLSQKAFKAIPSIIGVNNHECGFLLPMKEAPEILSGSNKSLALHLIQNILHIPPQYLHLVANEYFHDKHSLTEIRDSLLDLLGDVFFVVPALITARYHREGATEEEKLLSRKMMKYWATFARTGNPNGNDLSLWPAYNLTEQYLQLDLNMSLGQRLKEPRVEFWTSTIPLILSASDMLHSPLSSLTFLSLLQPFFFFCAP

SEQ ID NO: 11815 - protein, 469 aa, Homo sapiens
  Payload ID: 2333
  Gene Symbol: CES5A
  Gene Name: carboxylesterase 5A
  ENSP ID: ENSP00000461519
MLKVHYPKFGVSEDCLYLNIYAPAHADTGSKLPVLVWFPGGAFKTGSASIFDGSALAAYEDVLVVVVQYRLGIFGFFTTWDQHAPGNWAFKDQVAALSWVQKNIEFFGGDPSSVTIFGESAGAISVSSLILSPMAKGLFHKAIMESGVAIIPYLEAHDYEKSEDLQVVAHFCGNNASDSEALLRCLRTKPSKELLTLSQKTKSFTRVVDGAFFPNEPLDLLSQKAFKAIPSIIGVNNHECGFLLPMKEAPEILSGSNKSLALHLIQNILHIPPQYLHLVANEYFHDKHSLTEIRDSLLDLLGDVFFVVPALITARYHRDAGAPVYFYEFRHRPQCFEDTKPAFVKADHADEVRFVFGGAFLKGDIVMFEGATEEEKLLSRKMMKYWATFARTGNPNGNDLSLWPAYNLTEQYLQLDLNMSLGQRLKEPRVEFWTSTIPLILSASDMLHSPLSSLTFLSLLQPFFFFCAP

SEQ ID NO: 11816 - protein, 78 aa, Homo sapiens
  Payload ID: 2333
  Gene Symbol: CES5A
  Gene Name: carboxylesterase 5A
  ENSP ID: ENSP00000461804
MLKVHYPKFGVSEDCLYLNIYAPAHADTGSKLPVLVWFPGGAFKTGSASIFDGSALAAYEDVLVVVVQYRLGIFGFFT

SEQ ID NO: 11817 - protein, 355 aa, Homo sapiens
  Payload ID: 2333
  Gene Symbol: CES5A
  Gene Name: carboxylesterase 5A
  ENSP ID: ENSP00000487767
MEDDLSWRSWSLLCMEILSPMAKGLFHKAIMESGVAIIPYLEAHDYEKSEDLQVVAHFCGNNASDSEALLRCLRTKPSKELLTLSQKTKSFTRVVDGAFFPNEPLDLLSQKAFKAIPSIIGVNNHECGFLLPMEAPEILSGSNKSLALHLIQNILHIPPQYLHLVANEYFHDKHSLTEIRDSLLDLLGDVFFVVPALITARYHRDAGAPVYFYEFRHRPQCFEDTKPAFVKADHADEVRFVFGGAFLKGDIVMFEGATEEEKLLSRKMMKYWATFARTGNPNGNDLSLWPAYNLTEQYLQLDLNMSLGQRLKEPRVDFWTSTIPLILSASDMLHSPLSSLTFLSLLQPFFFFCAP

SEQ ID NO: 11818 - protein, 78 aa, Homo sapiens; identical to SEQ ID NO: 11816
  Payload ID: 2333
  Gene Symbol: CES5A
  Gene Name: carboxylesterase 5A
  ENSP ID: ENSP00000487919

SEQ ID NO: 11819 - protein, 245 aa, Homo sapiens
  Payload ID: 2334
  Gene Symbol: CMBL
  Gene Name: carboxymethylenebutenolidase homolog (Pseudomonas)
  Uniprot ID: Q96DG6
  ENSP ID: ENSP00000296658
MANEAYPCPCDIGHRLEYGGLGREVQVEHIKAYVTKSPVDAGKAVIVIQDIFGWQLPNTRYIADMISGNGYTTIVPDFFVGQEPWDPSGDWSIFPEWLKTRNAQKIDREISAILKYLKQQCHAQKIGIVGFCWGGTAVHHLMMKYSEFRAGVSVYGIVKDSEDIYNLKNPTLFIFAENDVVIPLKDVSLLTQKLKEHCKVEYQIKTFSGQTHGFVHRKREDCSPADKPYIDEARRNLIEWLNKYM

SEQ ID NO: 11820 - protein, 419 aa, Homo sapiens
  Payload ID: 2335
  Gene Symbol: CPA1
  Gene Name: carboxypeptidase A1 (pancreatic)
  Uniprot ID: P15085
  ENSP ID: ENSP00000011292
MRGLLVLSVLLGAVFGKEDFVGHQVLRISVADEAQVQKVKELEDLEHLQLDFWRGPAHPGSPIDVRVPFPSIQAVKIFLESHGISYETMIEDVQSLLDEEQEQMFAFRSRARSTDTFNYATYHTLEEIYDFLDLLVAENPHLVSKIQIGNTYEGRPIYVLKFSTGGSKRPAIWIDTGIHSREWVTQASGVWFAKKITQDYGQDAAFTAILDTLDIFLEIVTNPDGFAFTHSTNRMWRKTRSHTAGSLCIGVDPNRNWDAGFGLSGASSNPCSETYHGKFANSEVEVKSIVDFVKDHGNIKAFISIHSYSQLLMYPYGYKTEPVPDQDELDQLSKAAVTALASLYGTKFNYGSIIKAIYQASGSTIDWTYSQGIKYSFTFELRDTGRYGFLLPASQIIPTAKETWLALLTIMEHTLNHPY

SEQ ID NO: 11821 - protein, 269 aa, Homo sapiens
  Payload ID: 2335
  Gene Symbol: CPA1
  Gene Name: carboxypeptidase A1 (pancreatic)
  ENSP ID: ENSP00000419408
MIEDVQSLLDEEQEQMFAFRSRARSTDTFNYATYHTLEEIYDFLDLLVAENPHLVSKIQIGNTYEGRPIYVLKFSTGGSKRPAIWIDTGIHSREWVTQASGVWFAKKITQDYGQDAAFTAILDTLDIFLEIVTNPDGFAFTHSTNRMWRKTRSHTAGSLCIGVDPNRNWDAGFGLSGASSNPCSETYHGKFANSEVEVKSIVDFVKDHGNIKAFISIHSYSQLLMYPYGYKTEPVPDQDELDQLSKAAVTALASLYGTKFNYGSIIKAI

SEQ ID NO: 11822 - protein, 331 aa, Homo sapiens
  Payload ID: 2335
  Gene Symbol: CPA1
  Gene Name: carboxypeptidase A1 (pancreatic)
  ENSP ID: ENSP00000419497
MIEDVQSLLDEEQEQMFAFRSRARSTDTFNYATYHTLEEIYDFLDLLVAENPHLVSKIQIGNTYEGRPIYVLKFSTGGSKRPAIWIDTGIHSREWVTQASGVWFAKKITQDYGQDAAFTAILDTLDIFLEIVTNPDGFAFTHSTNRMWRKTRSHTAGSLCIGVDPNRNWDAGFGLSGASSNPCSETYHGKFANSEVEVKSIVDFVKDHGNIKAFISIHSYSQLLMYPYGYKTEPVPDQDELDQLSKAAVTALASLYGTKFNYGSIIKAIYQASGSTIDWTYSQGIKYSFTFELRDTGRYGFLLPASQIIPTAKETWLALLTIMEHTLNHPY

SEQ ID NO: 11823 - protein, 103 aa, Homo sapiens
  Payload ID: 2335
  Gene Symbol: CPA1
  Gene Name: carboxypeptidase A1 (pancreatic)
  ENSP ID: ENSP00000420218
MIEDVQSLLDEEQEQMFAFRSRARSTDTFNYATYHTLEEIYDFLDLLVAENPHLVSKIQIGNTYEGRPIYVLKFSTGGSKRPAIWIDTGIHSREWVTQASGVW

SEQ ID NO: 11824 - protein, 191 aa, Homo sapiens
  Payload ID: 2335
  Gene Symbol: CPA1
  Gene Name: carboxypeptidase A1 (pancreatic)
  ENSP ID: ENSP00000475021
SLTFPPGSSMRGLLVLSVLLGAVFGKEDFVGHQVLRISVADEAQVQKITQDYGQDAAFTAILDTLDIFLEIVTNPDGFAFTHSTNRMWRKTRSHTAGSLCIGVDPNRNWDAGFGLSGASSNPCSETYHGKFANSEVEVKSIVDFVKDHGNIKAFISIHSYSQLLMYPYGYKTEPVPDQDELDQLSKAAVTA

SEQ ID NO: 11825 - protein, 419 aa, Homo sapiens
  Payload ID: 2336
  Gene Symbol: CPA2
  Gene Name: carboxypeptidase A2 (pancreatic)
  Uniprot ID: P48052
  ENSP ID: ENSP00000222481
MAMRLILFFGALFGHIYCLETFVGDQVLEIVPSNEEQIKNLLQLEAQEHLQLDFWKSPTTPGETAHVRVPFVNVQAVKVFLESQGIAYSIMIEDVQVLLDKENEEMLFNRRRERSGNFNFGAYHTLEEISQEMDNLVAEHPGLVSKVNIGSSFENRPMNVLKFSTGGDKPAIWLDAGIHAREWVTQATALWTANKIVSDYGKDPSITSILDALDIFLLPVTNPDGYVFSQTKNRMWRKTRSKVSGSLCVGVDPNRNWDAGFGGPGASSNPCSDSYHGPSANSEVEVKSIVDFIKSHGKVKAFITLHSYSQLLMFPYGYKCTKLDDFDELSEVAQKAAQSLRSLHGTKYKVGPICSVIYQASGGSIDWSYDYGIKYSFAFELRDTGRYGFLLPARQILPTAEETWLGLKAIMEHVRDHPY

SEQ ID NO: 11826 - protein, 182 aa, Homo sapiens
  Payload ID: 2336
  Gene Symbol: CPA2
  Gene Name: carboxypeptidase A2 (pancreatic)
  ENSP ID: ENSP00000395582
MRLILFFGALFGHIYCLETFVGDQVLEIVPSNEEQIKNLLQLEAQEHLQLDFWKSPTTPGETAHVRVPFVNVQAVKVFLESQGIAYSIMIEDVQVLLDKENEEMLFNRRRERSGNFNFGAYHTLEEISQEMDNLVAEHPGLVSKVNIGSSFENRPMNVLKKSSGRMQKDDGQLNPKPQRQTP

SEQ ID NO: 11827 - protein, 417 aa, Homo sapiens
  Payload ID: 2337
  Gene Symbol: CPA3
  Gene Name: carboxypeptidase A3 (mast cell)
  Uniprot ID: P15088
  ENSP ID: ENSP00000296046
MRLILPVGLIATTLAIAPVRFDREKVFRVKPQDEKQADIIKDLAKTNELDFWYPGATHHVAANMMVDFRVSEKESQAIQSALDQNKMHYEILIHDLQEEIEKQFDVKEDIPGRHSYAKYNNWEKIVAWTEKMMDKYPEMVSRIKIGSTVEDNPLYVLKIGEKNERRKAIFTDCGIHAREWVSPAFCQWFVYQATKTYGRNKIMTKLLDRMNFYILPVFNVDGYIWSWTKNRMWRKNRSKNQNSKCIGTDLNRNFNASWNSIPNTNDPCADNYRGSAPESEKETKAVTNFIRSHLNEIKVYITFHSYSQMLLFPYGYTSKLPPNHEDLAKVAKIGTDVLSTRYETRYIYGPIESTIYPISGSSLDWAYDLGIKHTFAFELRDKGKFGFLLPESRIKPTCRETMLAVKFIAKYILKHTS

SEQ ID NO: 11828 - protein, 421 aa, Homo sapiens
  Payload ID: 2338
  Gene Symbol: CPA4
  Gene Name: carboxypeptidase A4
  Uniprot ID: Q9UI42
  ENSP ID: ENSP00000222482
MRWILFIGALIGSSICGQEKFFGDQVLRINVRNGDEISKLSQLVNSNNLKLNFWKSPSSFNRPVDVLVPSVSLQAFKSFLRSQGLEYAVTIEDLQALLDNEDDEMQHNEGQERSSNNFNYGAYHSLEAIYHEMDNIAADFPDLARRVKIGHSFENRPMYVLKFSTGKGVRRPAVWLNAGIHSREWISQATAIWTARKIVSDYQRDPAITSILEKMDIFLLPVANPDGYVYTQTQNRLWRKTRSRNPGSSCIGADPNRNWNASFAGKGASDNPCSEVYHGPHANSEVEVKSVVDFIQKHGNFKGFIDLHSYSQLLMYPYGYSVKKAPDAEELDKVARLAAKALASVSGTEYQVGPTCTTVYPASGSSIDWAYDNGIKFAFTFELRDTGTYGFLLPANQIIPTAEETWLGLKTIMEHVRDNLY

SEQ ID NO: 11829 - protein, 388 aa, Homo sapiens
  Payload ID: 2338
  Gene Symbol: CPA4
  Gene Name: carboxypeptidase A4
  Uniprot ID: Q9UI42
  ENSP ID: ENSP00000412947
MRWILFIGALIGSSICGQEKFFGDQVLRINVRNGDEISKLSQLVNSNNLKLNFWKSPSSFNRPVDVLVPSVSLQAFKSFLRSQGLEYAVTIEDLQIYHEMDNIAADFPDLARRVKIGHSFENRPMYVLKFSTGKGVRRPAVWLNAGIHSREWISQATAIWTARKIVSDYQRDPAITSILEKMDIFLLPVANPDGYVYTQTQNRLWRKTRSRNPGSSCIGADPNRNWNASFAGKGASDNPCSEVYHGPHANSEVEVKSVVDFIQKHGNFKGFIDLHSYSQLLMYPYGYSVKKAPDAEELDKVARLAAKALASVSGTEYQVGPTCTTVYPASGSSIDWAYDNGIKFAFTFELRDTGTYGFLLPANQIIPTAEETWLGLKTIMEHVRDNLY

SEQ ID NO: 11830 - protein, 171 aa, Homo sapiens
  Payload ID: 2338
  Gene Symbol: CPA4
  Gene Name: carboxypeptidase A4
  ENSP ID: ENSP00000417255
MRWILFIGALIGSSICGQEKFFGDQVLRINVRNGDEISKLSQLVNSNNLKLNFWKSPSSFNRPVDVLVPSVSLQAFKSFLRSQGLEYAVTIEDLQALLDNEDDEMQHNEGQERSSNNFNYGAYHSLEAIYHEMDNIAADFPDLARRVKIGHSFENRPMYVLKIVSDYQRDP

SEQ ID NO: 11831 - protein, 29 aa, Homo sapiens
  Payload ID: 2338
  Gene Symbol: CPA4
  Gene Name: carboxypeptidase A4
  ENSP ID: ENSP00000418276
MQHNEGQERSSNNFNYGAYHSLEAIYHEM

SEQ ID NO: 11832 - protein, 177 aa, Homo sapiens
  Payload ID: 2338
  Gene Symbol: CPA4
  Gene Name: carboxypeptidase A4
  ENSP ID: ENSP00000418392
MRWILFIGALIGSSICGQEKFFGDQVLRINVRNGDEISKLSQLVNSNNLKLNFWKSPSSFNRPVDVLVPSVSLQAFKSFLRSQGLEYAVTIEDLQIYHEMDNIAADFPDLARRVKIGHSFENRPMYVLKFSTGKGVRRPAVWLNAGIHSREWISQATAIWTARKIVSDYQRDPAITS

SEQ ID NO: 11833 - protein, 317 aa, Homo sapiens
  Payload ID: 2338
  Gene Symbol: CPA4
  Gene Name: carboxypeptidase A4
  ENSP ID: ENSP00000419660
MQHNEGQERSSNNFNYGAYHSLEAIYHEMDNIAADFPDLARRVKIGHSFENRPMYVLKFSTGKGVRRPAVWLNAGIHSREWISQATAIWTARKIVSDYQRDPAITSILEKMDIFLLPVANPDGYVYTQTQNRLWRKTRSRNPGSSCIGADPNRNWNASFAGKGASDNPCSEVYHGPHANSEVEVKSVVDFIQKHGNFKGFIDLHSYSQLLMYPYGYSVKKAPDAEELDKVARLAAKALASVSGTEYQVGPTCTTVYPASGSSIDWAYDNGIKFAFTFELRDTGTYGFLLPANQIIPTAEETWLGLKTIMEHVRDNLY

SEQ ID NO: 11834 - protein, 436 aa, Homo sapiens
  Payload ID: 2339
  Gene Symbol: CPA5
  Gene Name: carboxypeptidase A5
  Uniprot ID: Q8WXQ8
  ENSP ID: ENSP00000376907
MQGTPGGGTRPGPSPVDRRTLLVFSFILAAALGQMNFTGDQVLRVLAKDEKQLSLLGDLEGLKPQKVDFWRGPARPSLPVDMRVPFSELKDIKAYLESHGLAYSIMIKDIQVLLDEERQAMAKSRRLERSTNSFSYSSYHTLEEIYSWIDNFVMEHSDIVSKIQIGNSFENQSILVLKFSTGGSRHPAIWIDTGIHSREWITHATGIWTANKIVSDYGKDRVLTDILNAMDIFIELVTNPDGFAFTHSMNRLWRKNKSIRPGIFCIGVDLNRNWKSGFGGNGSNSNPCSETYHGPSPQSEPEVAAIVNFITAHGNFKALISIHSYSQMLMYPYGRLLEPVSNQRELYDLAKDAVEALYKVHGIEYIFGSISTTLYVASGITVDWAYDSGIKYAFSFELRDTGQYGFLLPATQIIPTAQETWMALRTIMEHTLNHPY

SEQ ID NO: 11835 - protein, 403 aa, Homo sapiens
  Payload ID: 2339
  Gene Symbol: CPA5
  Gene Name: carboxypeptidase A5
  Uniprot ID: Q8WXQ8
  ENSP ID: ENSP00000393045
MQGTPGGGTRPGPSPVDRRTLLVFSFILAAALGQMNFTGDQVLRVLAKDEKQLSLLGDLEGLKPQKVDFWRGPARPSLPVDMRVPFSELKDIKAYLESHGLAYSIMIKDIQVLLDEERQAMAKSRRLERSTNSFSYSSYHTLEEIYSWIDNFVMEHSDIVSKIQIGNSFENQSILVLKFSTGGSRHPAIWIDTGIHSREWITHATGIWTANKIVSDYGKDRVLTDILNAMDIFIELVTNPDGFAFTHSMNRLWRKNKSIRPGIFCIGVDLNRNWKSGFGGNGSNSNPCSETYHGPSPQSEPEVAAIVNFITAHGNFKALISIHSYSQMLMYPYGRLLEPVSNQRELMWPVGSPSTGPMTVASSTPSALSSGTLGSMASCCRPHRSSPRPRRRGWRFGPSWSTP

SEQ ID NO: 11836 - protein, 436 aa, Homo sapiens; identical to SEQ ID NO: 11834
  Payload ID: 2339
  Gene Symbol: CPA5
  Gene Name: carboxypeptidase A5
  Uniprot ID: Q8WXQ8
  ENSP ID: ENSP00000417314

SEQ ID NO: 11837 - protein, 85 aa, Homo sapiens
  Payload ID: 2339
  Gene Symbol: CPA5
  Gene Name: carboxypeptidase A5
  ENSP ID: ENSP00000417886
  MOD_RES (1)..(1): Any amino acid
XSIRPGIFCIGVDLNRNWKSGFGDVASGITVDWAYDSGIKYAFSFELRDTGQYGFLLPATQIIPTAQETWMALRTIMEHTLNHPY

SEQ ID NO: 11838 - protein, 436 aa, Homo sapiens; identical to SEQ ID NO: 11834
  Payload ID: 2339
  Gene Symbol: CPA5
  Gene Name: carboxypeptidase A5
  Uniprot ID: Q8WXQ8
  ENSP ID: ENSP00000418183

SEQ ID NO: 11839 - protein, 8 aa, Homo sapiens
  Payload ID: 2339
  Gene Symbol: CPA5
  Gene Name: carboxypeptidase A5
  ENSP ID: ENSP00000419013
MQGTPGGG

SEQ ID NO: 11840 - protein, 436 aa, Homo sapiens; identical to SEQ ID NO: 11834
  Payload ID: 2339
  Gene Symbol: CPA5
  Gene Name: carboxypeptidase A5
  Uniprot ID: Q8WXQ8
  ENSP ID: ENSP00000419025

SEQ ID NO: 11841 - protein, 32 aa, Homo sapiens
  Payload ID: 2339
  Gene Symbol: CPA5
  Gene Name: carboxypeptidase A5
  ENSP ID: ENSP00000419778
MQGTPGGGTRPGPSPVDRRTLLVFSFILAAAL

SEQ ID NO: 11842 - protein, 123 aa, Homo sapiens
  Payload ID: 2339
  Gene Symbol: CPA5
  Gene Name: carboxypeptidase A5
  ENSP ID: ENSP00000420060
MQGTPGGGTRPGPSPVDRRTLLVFSFILAAALGQMNFTGDQVLRVLAKDEKQLSLLGDLEGLKPQKVDFWRGPARPSLPVDMRVPFSELKDIKAYLESHGLAYSIMIKDIQVLLDEERQAMAK

SEQ ID NO: 11843 - protein, 436 aa, Homo sapiens; identical to SEQ ID NO: 11834
  Payload ID: 2339
  Gene Symbol: CPA5
  Gene Name: carboxypeptidase A5
  Uniprot ID: Q8WXQ8
  ENSP ID: ENSP00000420237

SEQ ID NO: 11844 - protein, 437 aa, Homo sapiens
  Payload ID: 2340
  Gene Symbol: CPA6
  Gene Name: carboxypeptidase A6
  Uniprot ID: Q8N4T0
  ENSP ID: ENSP00000297770
MKCLGKRRGQAAAFLPLCWLFLKILQPGHSHLYNNRYAGDKVIRFIPKTEEEAYALKKISYQLKVDLWQPSSISYVSEGTVTDVHIPQNGSRALLAFLQEANIQYKVLIEDLQKTLEKGSSLHTQRNRRSLSGYNYEVYHSLEEIQNWMHHLNKTHSGLIHMFSIGRSYEGRSLFILKLGRRSRLKRAVWIDCGIHAREWIGPAFCQWFVKEALLTYKSDPAMRKMLNHLYFYIMPVFNVDGYHFSWTNDRFWRKTRSRNSRFRCRGVDANRNWKVKWCDEGASMHPCDDTYCGPFPESEPEVKAVANFLRKHRKHIRAYLSFHAYAQMLLYPYSYKYATIPNFRCVESAAYKAVNALQSVYGVRYRYGPASTTLYVSSGSSMDWAYKNGIPYAFAFELRDTGYFGFLLPEMLIKPTCTETMLAVKNITMHLLKKCP

SEQ ID NO: 11845 - protein, 92 aa, Homo sapiens
  Payload ID: 2340
  Gene Symbol: CPA6
  Gene Name: carboxypeptidase A6
  ENSP ID: ENSP00000419016
MKCLGKRRGQAAAFLPLCWLFLKILQPGHSHLYNNRYAGDKVIRFIPKTEEEAYALKKISYQLKGPHRRSSENTGEGKQLAHPEKPKIPLWI

SEQ ID NO: 11846 - protein, 315 aa, Homo sapiens
  Payload ID: 2340
  Gene Symbol: CPA6
  Gene Name: carboxypeptidase A6
  Uniprot ID: Q8N4T0
  ENSP ID: ENSP00000431112
MKCLGKRRGQAAAFLPLCWLFLKILQPGHSHLYNNRYAGDKVIRFIPKTEEEAYALKKISYQLKVDLWQPSSISYVSEGTVTDVHIPQNGSRALLAFLQEANIQYKVLIEDLQKTLEKGSSLHTQRNRRSLSGYNYEVYHSLEEIQNWMHHLNKTHSGLIHMFSIGRSYEGRSLFILKLGRRSRLKRAVWIDCGIHAREWIGPAFCQWFVKEALLTYKSDPAMRKMLNHLYFYIMPVFNVDGYHFSWTNDRFWRKTRSRNSRFRCRGVDANRNWKVKWCGKFGTNWDPDPKVSAGFTLQNMSPEDSHGRLMFFCM

SEQ ID NO: 11847 - protein, 417 aa, Homo sapiens
  Payload ID: 2341
  Gene Symbol: CPB1
  Gene Name: carboxypeptidase B1 (tissue)
  Uniprot ID: P15086
  ENSP ID: ENSP00000282957
MLALLVLVTVALASAHHGGEHFEGEKVFRVNVEDENHINIIRELASTTQIDFWKPDSVTQIKPHSTVDFRVKAEDTVTVENVLKQNELQYKVLISNLRNVVEAQFDSRVRATGHSYEKYNKWETIEAWTQQVATENPALISRSVIGTTFEGRAIYLLKVGKAGQNKPAIFMDCGFHAREWISPAFCQWFVREAVRTYGREIQVTELLDKLDFYVLPVLNIDGYIYTWTKSRFWRKTRSTHTGSSCIGTDPNRNFDAGWCEIGASRNPCDETYCGPAAESEKETKALADFIRNKLSSIKAYLTIHSYSQMMIYPYSYAYKLGENNAELNALAKATVKELASLHGTKYTYGPGATTIYPAAGGSDDWAYDQGIRYSFTFELRDTGRYGFLLPESQIRATCEETFLAIKYVASYVLEHLY

SEQ ID NO: 11848 - protein, 99 aa, Homo sapiens
  Payload ID: 2341
  Gene Symbol: CPB1
  Gene Name: carboxypeptidase B1 (tissue)
  ENSP ID: ENSP00000417117
MLALLVLVTVALASAHHGGEHFEGEKVFRVNVEDENHINIIRELASTTQIDFWKPDSVTQIKPHSTVDFRVKAEDTVTVENVLKQNELQYKVLISNLRN

SEQ ID NO: 11849 - protein, 417 aa, Homo sapiens; identical to SEQ ID NO: 11847
  Payload ID: 2341
  Gene Symbol: CPB1
  Gene Name: carboxypeptidase B1 (tissue)
  Uniprot ID: P15086
  ENSP ID: ENSP00000417222

SEQ ID NO: 11850 - protein, 59 aa, Homo sapiens
  Payload ID: 2341
  Gene Symbol: CPB1
  Gene Name: carboxypeptidase B1 (tissue)
  ENSP ID: ENSP00000419114
MLALLVLVTVALASAHHGGEHFEGEKVFRVNVEDENHINIIRELASTTQIDFWKPDSVT

SEQ ID NO: 11851 - protein, 203 aa, Homo sapiens
  Payload ID: 2341
  Gene Symbol: CPB1
  Gene Name: carboxypeptidase B1 (tissue)
  ENSP ID: ENSP00000419427
MLALLVLVTVALASAHHGGEHFEGEKVFRVNVEDENHINIIRELASTTQIDFWKPDSVTQIKPHSTVDFRVKAEDTVTVENVLKQNELQYKVLISNLRNVVEAQFDSRVRATGHSYEKYNKWETVGKAGQNKPAIFMDCGFHAREWISPAFCQWFVREAVRTYGREIQVTELLDKLDFYVLPVLNIDGYIYTWTKSRFWRKTR

SEQ ID NO: 11852 - protein, 423 aa, Homo sapiens
  Payload ID: 2342
  Gene Symbol: CPB2
  Gene Name: carboxypeptidase B2 (plasma)
  Uniprot ID: Q96IY4
  ENSP ID: ENSP00000181383
MKLCSLAVLVPIVLFCEQHVFAFQSGQVLAALPRTSRQVQVLQNLTTTYEIVLWQPVTADLIVKKKQVHFFVNASDVDNVKAHLNVSGIPCSVLLADVEDLIQQQISNDTVSPRASASYYEQYHSLNEIYSWIEFITERHPDMLTKIHIGSSFEKYPLYVLKVSGKEQAAKNAIWIDCGIHAREWISPAFCLWFIGHITQFYGIIGQYTNLLRLVDFYVMPVVNVDGYDYSWKKNRMWRKNRSFYANNHCIGTDLNRNFASKHWCEEGASSSSCSETYCGLYPESEPEVKAVASFLRRNINQIKAYISMHSYSQHIVFPYSYTRSKSKDHEELSLVASEAVRAIEKISKNTRYTHGHGSETLYLAPGGGDDWIYDLGIKYSFTIELRDTGTYGFLLPERYIKPTCREAFAAVSKIAWHVIRNV

SEQ ID NO: 11853 - protein, 386 aa, Homo sapiens
  Payload ID: 2342
  Gene Symbol: CPB2
  Gene Name: carboxypeptidase B2 (plasma)
  ENSP ID: ENSP00000400714
MKLCSLAVLVPIVLFCEQHVFAFQSGQVLAALPRTSRQVQVLQNLTTTYEIVLWQPVTADLIVKKKQVHFFVNASDVDNVKAHLNVSGIPCSVLLADVEDLIQQQISNDTVSPRASASYYEQYHSLNEIYSWIEFITERHPDMLTKIHIGSSFEKYPLYVLKVSGKEQAAKNAIWIDCGIHAREWISPAFCLWFIGHNRMWRKNRSFYANNHCIGTDLNRNFASKHWCEEGASSSSCSETYCGLYPESEPEVKAVASFLRRNINQIKAYISMHSYSQHIVFPYSYTRSKSKDHEELSLVASEAVRAIEKISKNTRYTHGHGSETLYLAPGGGDDWIYDLGIKYSFTIELRDTGTYGFLLPERYIKPTCREAFAAVSKIAWHVIRNV

SEQ ID NO: 11854 - protein, 1380 aa, Homo sapiens
  Payload ID: 2343
  Gene Symbol: CPD
  Gene Name: carboxypeptidase D
  Uniprot ID: O75976
  ENSP ID: ENSP00000225719
MASGRDERPPWRLGRLLLLMCLLLLGSSARAAHIKKAEATTTTTSAGAEAAEGQFDRYYHEEELESALREAAAAGLPGLARLFSIGRSVEGRPLWVLRLTAGLGSLIPEGDAGPDAAGPDAAGPLLPGRPQVKLVGNMHGDETVSRQVLIYLARELAAGYRRGDPRLVRLLNTTDVYLLPSLNPDGFERAREGDCGFGDGGPSGASGRDNSRGRDLNRSFPDQFSTGEPPALDEVPEVRALIEWIRRNKFVLSGNLHGGSVVASYPFDDSPEHKATGIYSKTSDDEVFKYLAKAYASNHPIMKTGEPHCPGDEDETFKDGITNGAHWYDVEGGMQDYNYVWANCFEITLELSCCKYPPASQLRQEWENNRESLITLIEKVHIGVKGFVKDSITGSGLENATISVAGINHNITTGRFGDFYRLLVPGTYNLTVVLTGYMPLTVTNVVVKEGPATEVDFSLRPTVTSVIPDTTEAVSTASTVAIPNILSGTSSSYQPIQPKDFHHHHFPDMEIFLRRFANEYPNITRLYSLGKSVESRELYVMEISDNPGVHEPGEPEFKYIGNMHGNEVVGRELLLNLIEYLCKNFGTDPEVTDLVHNTRIHLMPSMNPDGYEKSQEGDSISVIGRNNSNNFDLNRNFPDQFVQITDPTQPETIAVMSWMKSYPFVLSANLHGGSLVVNYPFDDDEQGLATYSKSPDDAVFQQIALSYSKENSQMFQGRPCKNMYPNEYFPHGITNGASWYNVPGGMQDWNYLQTNCFEVTIELGCVKYPLEKELPNFWEQNRRSLIQFMKQVHQGVRGFVLDATDGRGILNATISVAEINHPVTTYKTGDYWRLLVPGTYKITASARGYNPVTKNVTVKSEGAIQVNFTLVRSSTDSNNESKKGKGASSSTNDASDPTTKEFETLIKDLSAENGLESLMLRSSSNLALALYRYHSYKDLSEFLRGLVMNYPHITNLTNLGQSTEYRHIWSLEISNKPNVSEPEEPKIRFVAGIHGNAPVGTELLLALAEFLCLNYKKNPAVTQLVDRTRIVIVPSLNPDGRERAQEKDCTSKIGQTNARGKDLDTDFTNNASQPETKAIIENLIQKQDFSLSVALDGGSMLVTYPYDKPVQTVENKETLKHLASLYANNHPSMHMGQPSCPNKSDENIPGGVMRGAEWHSHLGSMKDYSVTYGHCPEITVYTSCCYFPSAARLPSLWADNKRSLLSMLVEVHKGVHGFVKDKTGKPISKAVIVLNEGIKVQTKEGGYFHVLLAPGVHNIIAIADGYQQQHSQVFVHHDAASSVVIVFDTDNRIFGLPRELVVTVSGATMSALILTACIIWCICSIKSNRHKDGFHRLRQHHDEYEDEIRMMSTGSKKSLLSHEFQDETDTEEETLYSSKH

SEQ ID NO: 11855 - protein, 1133 aa, Homo sapiens
  Payload ID: 2343
  Gene Symbol: CPD
  Gene Name: carboxypeptidase D
  Uniprot ID: O75976
  ENSP ID: ENSP00000444443
MRFVLSGNLHGGSVVASYPFDDSPEHKATGIYSKTSDDEVFKYLAKAYASNHPIMKTGEPHCPGDEDETFKDGITNGAHWYDVEGGMQDYNYVWANCFEITLELSCCKYPPASQLRQEWENNRESLITLIEKVHIGVKGFVKDSITGSGLENATISVAGINHNITTGRFGDFYRLLVPGTYNLTVVLTGYMPLTVTNVVVKEGPATEVDFSLRPTVTSVIPDTTEAVSTASTVAIPNILSGTSSSYQPIQPKDFHHHHFPDMEIFLRRFANEYPNITRLYSLGKSVESRELYVMEISDNPGVHEPGEPEFKYIGNMHGNEVVGRELLLNLIEYLCKNFGTDPEVTDLVHNTRIHLMPSMNPDGYEKSQEGDSISVIGRNNSNNFDLNRNFPDQFVQITDPTQPETIAVMSWMKSYPFVLSANLHGGSLVVNYPFDDDEQGLATYSKSPDDAVFQQIALSYSKENSQMFQGRPCKNMYPNEYFPHGITNGASWYNVPGGMQDWNYLQTNCFEVTIELGCVKYPLEKELPNFWEQNRRSLIQFMKQVHQGVRGFVLDATDGRGILNATISVAEINHPVTTYKTGDYWRLLVPGTYKITASARGYNPVTKNVTVKSEGAIQVNFTLVRSSTDSNNESKKGKGASSSTNDASDPTTKEFETLIKDLSAENGLESLMLRSSSNLALALYRYHSYKDLSEFLRGLVMNYPHITNLTNLGQSTEYRHIWSLEISNKPNVSEPEEPKIRFVAGIHGNAPVGTELLLALAEFLCLNYKKNPAVTQLVDRTRIVIVPSLNPDGRERAQEKDCTSKIGQTNARGKDLDTDFTNNASQPETKAIIENLIQKQDFSLSVALDGGSMLVTYPYDKPVQTVENKETLKHLASLYANNHPSMHMGQPSCPNKSDENIPGGVMRGAEWHSHLGSMKDYSVTYGHCPEITVYTSCCYFPSAARLPSLWADNKRSLLSMLVEVHKGVHGFVKDKTGKPISKAVIVLNEGIKVQTKEGGYFHVLLAPGVHNIIAIADGYQQQHSQVFVHHDAASSVVIVFDTDNRIFGLPRELVVTVSGATMSALILTACIIWCICSIKSNRHKDGFHRLRQHHDEYEDEIRMMSTGSKKSLLSHEFQDETDTEEETLYSSKH

SEQ ID NO: 11856 - protein, 184 aa, Homo sapiens
  Payload ID: 2343
  Gene Symbol: CPD
  Gene Name: carboxypeptidase D
  ENSP ID: ENSP00000463763
VHQGVRGFVLDATDGRGILNATISVAEINHPVTTYKTGDYWRLLVPGTYKITASARGYNPVTKNVTVKSEGAIQVNFTLVRSSTDSNNESKKGKGASSSTNDASDPTTKEFETLIKDLSAENGLESLMLRSSSNLALALYRYHSYKDLSEFLRGLVMNYPHITNLTNLGPKNLLLSSQIVFYIH

SEQ ID NO: 11857 - protein, 82 aa, Homo sapiens
  Payload ID: 2343
  Gene Symbol: CPD
  Gene Name: carboxypeptidase D
  ENSP ID: ENSP00000464255
NARGKDLDTDFTNNASQPETKAIIENLIQKQDFSLSVALDGGSMLVTYPYDKPVQTVENKETLKHLASLYANNHPSMHMVLW

SEQ ID NO: 11858 - protein, 40 aa, Homo sapiens
  Payload ID: 2343
  Gene Symbol: CPD
  Gene Name: carboxypeptidase D
  ENSP ID: ENSP00000466049
  MOD_RES (1)..(1): Any amino acid
XVGTELLLALAEFLCLNYKKNPAVTQMGERELKRKTVLQK

SEQ ID NO: 11859 - protein, 476 aa, Homo sapiens
  Payload ID: 2344
  Gene Symbol: CPE
  Gene Name: carboxypeptidase E
  Uniprot ID: P16870
  ENSP ID: ENSP00000386104
MAGRGGSALLALCGALAACGWLLGAEAQEPGAPAAGMRRRRRLQQEDGISFEYHRYPELREALVSVWLQCTAISRIYTVGRSFEGRELLVIELSDNPGVHEPGEPEFKYIGNMHGNEAVGRELLIFLAQYLCNEYQKGNETIVNLIHSTRIHIMPSLNPDGFEKAASQPGELKDWFVGRSNAQGIDLNRNFPDLDRIVYVNEKEGGPNNHLLKNMKKIVDQNTKLAPETKAVIHWIMDIPFVLSANLHGGDLVANYPYDETRSGSAHEYSSSPDDAIFQSLARAYSSFNPAMSDPNRPPCRKNDDDSSFVDGTTNGGAWYSVPGGMQDFNYLSSNCFEITVELSCEKFPPEETLKTYWEDNKNSLISYLEQIHRGVKGFVRDLQGNPIANATISVEGIDHDVTSAKDGDYWRLLIPGNYKLTASAPGYLAITKKVAVPYSPAAGVDFELESFSERKEEEKEELMEWWKMMSETLNF

SEQ ID NO: 11860 - protein, 147 aa, Homo sapiens
  Payload ID: 2344
  Gene Symbol: CPE
  Gene Name: carboxypeptidase E
  ENSP ID: ENSP00000416601
MHGNEAVGRELLIFLAQYLCNEYQKGNETIVNLIHSTRIHIMPSLNPDGFEKAASQPGELKDWFVGRSNAQGIDLNRNFPDLDRIVYVNEKEGGPNNHLLKNMKKIVDQNTKLAPETKAVIHWIMDIPFVLSANLHGGDLVANYPYD

SEQ ID NO: 11861 - protein, 157 aa, Homo sapiens
  Payload ID: 2344
  Gene Symbol: CPE
  Gene Name: carboxypeptidase E
  ENSP ID: ENSP00000423699
MHGNEAVGRELLIFLAQYLCNEYQKGNETIVNLIHSTRIHIMPSLNPDGFEKAASQPGELKDWFVGRSNAQGIDLNRNFPDLDRIVYVNEKEGGPNNHLLKNMKKIVDQNTKLAPETKAVIHWIMDIPFVLSANLHGGDLVANYPYDETRSGSAHEY

SEQ ID NO: 11862 - protein, 139 aa, Homo sapiens
  Payload ID: 2344
  Gene Symbol: CPE
  Gene Name: carboxypeptidase E
  ENSP ID: ENSP00000424830
MHGNEAVGRELLIFLAQYLCNEYQKGNETIVNLIHSTRIHIMPSLNPDGFEKAASQPGELKDWFVGRSNAQGIDLNRNFPDLDRIVYVNEKEGGPNNHLLKNMKKIVDQNTKLAPETKAVIHWIMDIPFVLSANLHGGD

SEQ ID NO: 11863 - protein, 108 aa, Homo sapiens
  Payload ID: 2344
  Gene Symbol: CPE
  Gene Name: carboxypeptidase E
  ENSP ID: ENSP00000427629
  MOD_RES (1)..(1): Any amino acid
XLGAEAQEPGAPAAGMRRRRRLQQEDGISFEYHRYPELREALVSVWLQCTAISRIYTVGRSFEGRELLVIELSDNPGVHEPDCKLYEVGTLIPAPSSCLAHSGLEYTL

SEQ ID NO: 11864 - protein, 443 aa, Homo sapiens
  Payload ID: 2345
  Gene Symbol: CPM
  Gene Name: carboxypeptidase M
  Uniprot ID: P14384
  ENSP ID: ENSP00000339157
MDFPCLWLGLLLPLVAALDFNYHRQEGMEAFLKTVAQNYSSVTHLHSIGKSVKGRNLWVLVVGRFPKEHRIGIPEFKYVANMHGDETVGRELLLHLIDYLVTSDGKDPEITNLINSTRIHIMPSMNPDGFEAVKKPDCYYSIGRENYNQYDLNRNFPDAFEYNNVSRQPETVAVMKWLKTETFVLSANLHGGALVASYPFDNGVQATGALYSRSLTPDDDVFQYLAHTYASRNPNMKKGDECKNKMNFPNGVTNGYSWYPLQGGMQDYNYIWAQCFEITLELSCCKYPREEKLPSFWNNNKASLIEYIKQVHLGVKGQVFDQNGNPLPNVIVEVQDRKHICPYRTNKYGEYYLLLLPGSYIINVTVPGHDPHITKVIIPEKSQNFSALKKDILLPFQGQLDSIPVSNPSCPMIPLYRNLPDHSAATKPSLFLFLVSLLHIFFK

SEQ ID NO: 11865 - protein, 64 aa, Homo sapiens
  Payload ID: 2345
  Gene Symbol: CPM
  Gene Name: carboxypeptidase M
  ENSP ID: ENSP00000446573
MDFPCLWLGLLLPLVAALDFNYHRQEGMEAFLKTVAQNYSSVTHLHSIGKSVKDCWAGAAAPSD

SEQ ID NO: 11866 - protein, 249 aa, Homo sapiens
  Payload ID: 2345
  Gene Symbol: CPM
  Gene Name: carboxypeptidase M
  ENSP ID: ENSP00000446799
MDFPCLWLGLLLPLVAALDFNYHRQEGMEAFLKTVAQNYSSVTHLHSIGKSVKGRNLWVLVVGRFPKEHRIGIPEFKYVANMHGDETVGRELLLHLIDYLVTSDGKDPEITNLINSTRIHIMPSMNPDGFEAVKKPDCYYSIGRENYNQYDLNRNFPDAFEYNNVSRQPETVAVMKWLKTETFVLSANLHGGALVASYPFDNGVQATGALYSRSLTPDDDVFQYLAHTYASRNPNMKKGDECKNKMNFP

SEQ ID NO: 11867 - protein, 35 aa, Homo sapiens
  Payload ID: 2345
  Gene Symbol: CPM
  Gene Name: carboxypeptidase M
  ENSP ID: ENSP00000447051
SCPMIPLYRNLPDHSAATKPSLFLFLVSLLHIFFK

SEQ ID NO: 11868 - protein, 443 aa, Homo sapiens; identical to SEQ ID NO: 11864
  Payload ID: 2345
  Gene Symbol: CPM
  Gene Name: carboxypeptidase M
  Uniprot ID: P14384
  ENSP ID: ENSP00000447255

SEQ ID NO: 11869 - protein, 198 aa, Homo sapiens
  Payload ID: 2345
  Gene Symbol: CPM
  Gene Name: carboxypeptidase M
  ENSP ID: ENSP00000447455
  MOD_RES (1)..(1): Any amino acid
XPFDNGVQATGALYSRSLTPDDDVFQYLAHTYASRNPNMKKGDECKNKMNFPNGVTNGYSWYPLQGGMQDYNYIWAQCFEITLELSCCKYPREEKLPSFWNNNKASLIEYIKQVHLGVKGQVFDQNGNPLPNVIVEVQDRKHICPYRTNKYGEYYLLLLPGSYIINVTVPGHDPHITKLRSFACNRGQDEFCLTSLMS

SEQ ID NO: 11870 - protein, 72 aa, Homo sapiens
  Payload ID: 2345
  Gene Symbol: CPM
  Gene Name: carboxypeptidase M
  ENSP ID: ENSP00000448078
MDFPCLWLGLLLPLVAALDFNYHRQEGMEAFLKTVAQNYSSVTHLHSIGKSVKETCGFLLWGGFQRNTELGF

SEQ ID NO: 11871 - protein, 443 aa, Homo sapiens; identical to SEQ ID NO: 11864
  Payload ID: 2345
  Gene Symbol: CPM
  Gene Name: carboxypeptidase M
  Uniprot ID: P14384
  ENSP ID: ENSP00000448517

SEQ ID NO: 11872 - protein, 136 aa, Homo sapiens
  Payload ID: 2345
  Gene Symbol: CPM
  Gene Name: carboxypeptidase M
  ENSP ID: ENSP00000449911
MDFPCLWLGLLLPLVAALDFNYHRQEGMEAFLKTVAQNYSSVTHLHSIGKSVKGRNLWVLVVGRFPKEHRIGIPEFKYVANMHGDETVGRELLLHLIDYLVTSDGKDPEITNLINSTRIHIMPSMNPDGFEAVKKP

SEQ ID NO: 11873 - protein, 64 aa, Homo sapiens; identical to SEQ ID NO: 11865
  Payload ID: 2345
  Gene Symbol: CPM
  Gene Name: carboxypeptidase M
  ENSP ID: ENSP00000450400

SEQ ID NO: 11874 - protein, 458 aa, Homo sapiens
  Payload ID: 2346
  Gene Symbol: CPN1
  Gene Name: carboxypeptidase N, polypeptide 1
  Uniprot ID: P15169
  ENSP ID: ENSP00000359446
MSDLLSVFLHLLLLFKLVAPVTFRHHRYDDLVRTLYKVQNECPGITRVYSIGRSVEGRHLYVLEFSDHPGIHEPLEPEVKYVGNMHGNEALGRELMLQLSEFLCEEFRNRNQRIVQLIQDTRIHILPSMNPDGYEVAAAQGPNKPGYLVGRNNANGVDLNRNFPDLNTYIYYNEKYGGPNHHLPLPDNWKSQVEPETRAVIRWMHSFNFVLSANLHGGAVVANYPYDKSFEHRVRGVRRTASTPTPDDKLFQKLAKVYSYAHGWMFQGWNCGDYFPDGITNGASWYSLSKGMQDFNYLHTNCFEITLELSCDKFPPEEELQREWLGNREALIQFLEQVHQGIKGMVLDENYNNLANAVISVSGINHDVTSGDHGDYFRLLLPGIYTVSATAPGYDPETVTVTVGPAEPTLVNFHLKRSIPQVSPVRRAPSRRHGVRAKVQPQARKKEMEMRQLQRGPA

SEQ ID NO: 11875 - protein, 204 aa, Homo sapiens
  Payload ID: 2346
  Gene Symbol: CPN1
  Gene Name: carboxypeptidase N, polypeptide 1
  ENSP ID: ENSP00000410895
MHSFNFVLSANLHGGAVVANYPYDKSFEHRVRGVRRTASTPTPDDKLFQKLAKVYSYAHGWMFQGWNCGDYFPDGITNGASWYSLSKGMQDFNYLHTNCFEITLELSCDKFPPEEELQREWLGNREALIQFLEQVHQGIKGMVLDENYNNLANAVISVSGINHDVTSGDHGDYFRLLLPGIYTVSATAPGYDPETVTVTVGPAE

SEQ ID NO: 11876 - protein, 545 aa, Homo sapiens
  Payload ID: 2347
  Gene Symbol: CPN2
  Gene Name: carboxypeptidase N, polypeptide 2
  Uniprot ID: P22792
  ENSP ID: ENSP00000319464
MLPGAWLLWTSLLLLARPAQPCPMGCDCFVQEVFCSDEELATVPLDIPPYTKNIIFVETSFTTLETRAFGSNPNLTKVVFLNTQLCQFRPDAFGGLPRLEDLEVTGSSFLNLSTNIFSNLTSLGKLTLNFNMLEALPEGLFQHLAALESLHLQGNQLQALPRRLFQPLTHLKTLNLAQNLLAQLPEELFHPLTSLQTLKLSNNALSGLPQGVFGKLGSLQELFLDSNNISELPPQVFSQLFCLERLWLQRNAITHLPLSIFASLGNLTFLSLQWNMLRVLPAGLFAHTPCLVGLSLTHNQLETVAEGTFAHLSNLRSLMLSYNAITHLPAGIFRDLEELVKLYLGSNNLTALHPALFQNLSKLELLSLSKNQLTTLPEGIFDTNYNLFNLALHGNPWQCDCHLAYLFNWLQQYTDRLLNIQTYCAGPAYLKGQVVPALNEKQLVCPVTRDHLGFQVTWPDESKAGGSWDLAVQERAARSQCTYSNPEGTVVLACDQAQCRWLNVQLSPQQGSLGLQYNASQEWDLRSSCGSLRLTVSIEARAAGP

SEQ ID NO: 11877 - protein, 545 aa, Homo sapiens; identical to SEQ ID NO: 11876
  Payload ID: 2347
  Gene Symbol: CPN2
  Gene Name: carboxypeptidase N, polypeptide 2
  Uniprot ID: P22792
  ENSP ID: ENSP00000402232

SEQ ID NO: 11878 - protein, 374 aa, Homo sapiens
  Payload ID: 2348
  Gene Symbol: CPO
  Gene Name: carboxypeptidase O
  Uniprot ID: Q8IVL8
  ENSP ID: ENSP00000272852
MKPLLETLYLLGMLVPGGLGYDRSLAQHRQEIVDKSVSPWSLETYSYNIYHPMGEIYEWMREISEKYKEVVTQHFLGVTYETHPMYYLKISQPSGNPKKIIWMDCGIHAREWIAPAFCQWFVKEILQNHKDNSSIRKLLRNLDFYVLPVLNIDGYIYTWTTDRLWRKSRSPHNNGTCFGTDLNRNFNASWCSIGASRNCQDQTFCGTGPVSEPETKAVASFIESKKDDILCFLTMHSYGQLILTPYGYTKNKSSNHPEMIQVGQKAANALKAKYGTNYRVGSSADILYASSGSSRDWARDIGIPFSYTFELRDSGTYGFVLPEAQIQPTCEETMEAVLSVLDDVYAKHWHSDSAGRVTSATMLLGLLVSCMSLL

SEQ ID NO: 11879 - protein, 472 aa, Homo sapiens
  Payload ID: 2349
  Gene Symbol: CPQ
  Gene Name: carboxypeptidase Q
  Uniprot ID: Q9Y646
  ENSP ID: ENSP00000220763
MKFLIFAFFGGVHLLSLCSGKAICKNGISKRTFEEIKEEIASCGDVAKAIINLAVYGKAQNRSYERLALLVDTVGPRLSGSKNLEKAIQIMYQNLQQDGLEKVHLEPVRIPHWERGEESAVMLEPRIHKIAILGLGSSIGTPPEGITAEVLVVTSFDELQRRASEARGKIVVYNQPYINYSRTVQYRTQGAVEAAKVGALASLIRSVASFSIYSPHTGIQEYQDGVPKIPTACITVEDAEMMSRMASHGIKIVIQLKMGAKTYPDTDSFNTVAEITGSKYPEQVVLVSGHLDSWDVGQGAMDDGGGAFISWEALSLIKDLGLRPKRTLRLVLWTAEEQGGVGAFQYYQLHKVNISNYSLVMESDAGTFLPTGLQFTGSEKARAIMEEVMSLLQPLNITQVLSHGEGTDINFWIQAGVPGASLLDDLYKYFFFHHSHGDTMTVMDPKQMNVAAAVWAVVSYVVADMEEMLPRS

SEQ ID NO: 11880 - protein, 130 aa, Homo sapiens
  Payload ID: 2349
  Gene Symbol: CPQ
  Gene Name: carboxypeptidase Q
  ENSP ID: ENSP00000429134
  MOD_RES (1)..(1): Any amino acid
XFQYYQLHKVNISNYSLVMESDAGTFLPTGLQFTGSEKARAIMEEVMSLLQPLNITQVLSHGEGTDINFWIQAGVPGASLLDDLYKYFFFHHSHGDTMTVMDPKQMNVAAAVWAVVSYVVADMEEMLPRS

SEQ ID NO: 11881 - protein, 186 aa, Homo sapiens
  Payload ID: 2349
  Gene Symbol: CPQ
  Gene Name: carboxypeptidase Q
  ENSP ID: ENSP00000429146
MKFLIFAFFGGVHLLSLCSGKAICKNGISKRTFEEIKEEIASCGDVAKAIINLAVYGKAQNRSYERLALLVDTVGPRLSGSKNLEKAIQIMYQNLQQDGLEKVHLEPVRIPHWERGEESAVMLEPRIHKIAILGLGSSIGTPPEGITAEVLVVTSFDELQRRASEARGKIVVYNQPYINYSRTVQY

SEQ ID NO: 11882 - protein, 130 aa, Homo sapiens
  Payload ID: 2349
  Gene Symbol: CPQ
  Gene Name: carboxypeptidase Q
  ENSP ID: ENSP00000429934
MKFLIFAFFGGVHLLSLCSGKAICKNGISKRTFEEIKEEIASCGDVAKAIINLAVYGKAQNRSYERLALLVDTVGPRLSGSKNLEKAIQIMYQNLQQDGLEKVHLEPVRIPHWERGEESAVMLEPRIHKI

SEQ ID NO: 11883 - protein, 131 aa, Homo sapiens
  Payload ID: 2349
  Gene Symbol: CPQ
  Gene Name: carboxypeptidase Q
  ENSP ID: ENSP00000431024
MKFLIFAFFGGVHLLSLCSGKAICKNGISKRTFEEIKEEIASCGDVAKAIINLAVYGKAQNRSYERLALLVDTVGPRLSGSKNLEKAIQIMYQNLQQDGLEKVHLEPVRIPHWERGEESAVMLEPRIHKIA

SEQ ID NO: 11884 - protein, 137 aa, Homo sapiens
  Payload ID: 2349
  Gene Symbol: CPQ
  Gene Name: carboxypeptidase Q
  ENSP ID: ENSP00000431114
MKFLIFAFFGGVHLLSLCSGKAICKNGISKRTFEEIKEEIASCGDVAKAIINLAVYGKAQNRSYERLALLVDTVGPRLSGSKNLEKAIQIMYQNLQQDGLEKVHLEPVRIPHWERGEESAVMLEPRIHKIAILGLGS

SEQ ID NO: 11885 - protein, 734 aa, Homo sapiens
  Payload ID: 2350
  Gene Symbol: CPXM1
  Gene Name: carboxypeptidase X (M14 family), member 1
  Uniprot ID: Q96SM3
  ENSP ID: ENSP00000369979
MWGLLLALAAFAPAVGPALGAPRNSVLGLAQPGTTKVPGSTPALHSSPAQPPAETANGTSEQHVRIRVIKKKKVIMKKRKKLTLTRPTPLVTAGPLVTPTPAGTLDPAEKQETGCPPLGLESLRVSDSRLEASSSQSFGLGPHRGRLNIQSGLEDGDLYDGAWCAEEQDADPWFQVDAGHPTRFSGVITQGRNSVWRYDWVTSYKVQFSNDSRTWWGSRNHSSGMDAVFPANSDPETPVLNLLPEPQVARFIRLLPQTWLQGGAPCLRAEILACPVSDPNDLFLEAPASGSSDPLDFQHHNYKAMRKLMKQVQEQCPNITRIYSIGKSYQGLKLYVMEMSDKPGEHELGEPEVRYVAGMHGNEALGRELLLLLMQFLCHEFLRGNPRVTRLLSEMRIHLLPSMNPDGYEIAYHRGSELVGWAEGRWNNQSIDLNHNFADLNTPLWEAQDDGKVPHIVPNHHLPLPTYYTLPNATVAPETRAVIKWMKRIPFVLSANLHGGELVVSYPFDMTRTPWAARELTPTPDDAVFRWLSTVYAGSNLAMQDTSRRPCHSQDFSVHGNIINGADWHTVPGSMNDFSYLHTNCFEVTVELSCDKFPHENELPQEWENNKDALLTYLEQVRMGIAGVVRDKDTELGIADAVIAVDGINHDVTTAWGGDYWRLLTPGDYMVTASAEGYHSVTRNCRVTFEEGPFPCNFVLTKTPKQRLRELLAAGAKVPPDLRRRLERLRGQKD

SEQ ID NO: 11886 - protein, 756 aa, Homo sapiens
  Payload ID: 2351
  Gene Symbol: CPXM2
  Gene Name: carboxypeptidase X (M14 family), member 2
  Uniprot ID: Q8N436
  ENSP ID: ENSP00000241305
MSRPGTATPALALVLLAVTLAGVGAQGAALEDPDYYGQEIWSREPYYARPEPELETFSPPLPAGPGEEWERRPQEPRPPKRATKPKKAPKREKSAPEPPPPGKHSNKKVMRTKSSEKAANDDHSVRVAREDVRESCPPLGLETLKITDFQLHASTVKRYGLGAHRGRLNIQAGINENDFYDGAWCAGRNDLQQWIEVDARRLTRFTGVITQGRNSLWLSDWVTSYKVMVSNDSHTWVTVKNGSGDMIFEGNSEKEIPVLNELPVPMVARYIRINPQSWFDNGSICMRMEILGCPLPDPNNYYHRRNEMTTTDDLDFKHHNYKEMRQLMKVVNEMCPNITRIYNIGKSHQGLKLYAVEISDHPGEHEVGEPEFHYIAGAHGNEVLGRELLLLLVQFVCQEYLARNARIVHLVEETRIHVLPSLNPDGYEKAYEGGSELGGWSLGRWTHDGIDINNNFPDLNTLLWEAEDRQNVPRKVPNHYIAIPEWFLSENATVAAETRAVIAWMEKIPFVLGGNLQGGELVVAYPYDLVRSPWKTQEHTPTPDDHVFRWLAYSYASTHRLMTDARRRVCHTEDFQKEEGTVNGASWHTVAGSLNDFSYLHTNCFELSIYVGCDKYPHESQLPEEWENNRESLIVFMEQVHRGIKGLVRDSHGKGIPNAIISVEGINHDIRTANDGDYWRLLNPGEYVVTAKAEGFTASTKNCMVGYDMGATRCDFTLSKTNMARIREIMEKFGKQPVSLPARRLKLRGQKRRQRG

SEQ ID NO: 11887 - protein, 224 aa, Homo sapiens
  Payload ID: 2351
  Gene Symbol: CPXM2
  Gene Name: carboxypeptidase X (M14 family), member 2
  ENSP ID: ENSP00000483180
MEKIPFVLGGNLQGGELVVAYPYDLVRSPWKTQEHTPTPDDHVFRWLAYSYASTHRLMTDARRRVCHTEDFQKEEGTVNGASWHTVAGSLNDFSYLHTNCFELSIYVGCDKYPHESQLPEEWENNRESLIVFMEQVHRGIKGLVRDSHGKGIPNAIISVEGINHDIRTGRVSLQKLSLACRRVRCAFALSSSSTMIVRPPQPYGTVPHSSPDPVTTKISPLRNF

SEQ ID NO: 11888 - protein, 641 aa, Homo sapiens
  Payload ID: 2352
  Gene Symbol: CPZ
  Gene Name: carboxypeptidase Z
  Uniprot ID: Q66K79
  ENSP ID: ENSP00000315074
MPPPLPLLLLTVLVVAAARPGCEFERNPAATCVDLQLRTCSDAAYNHTTFPNLLQHRSWEVVEASSEYILLSVLHQLLEGQCNPDLRLLGCAVLAPRCEGGWVRRPCRHICEGLREVCQPAFDAIDMAWPYFLDCHRYFTREDEGCYDPLEKLRGGLEADEALPSGLPPTFIRFSHHSYAQMVRVLRRTASRCAHVARTYSIGRSFDGRELLVIEFSSRPGQHELMEPEVKLIGNIHGNEVAGREMLIYLAQYLCSEYLLGNPRIQRLLNTTRIHLLPSMNPDGYEVAAAEGAGYNGWTSGRQNAQNLDLNRNFPDLTSEYYRLAETRGARSDHIPIPQHYWWGKVAPETKAIMKWMQTIPFVLSASLHGGDLVVSYPFDFSKHPQEEKMFSPTPDEKMFKLLSRAYADVHPMMMDRSENRCGGNFLKRGSIINGADWYSFTGGMSDFNYLHTNCFEITVELGCVKFPPEEALYILWQHNKESLLNFVETVHRGIKGVVTDKFGKPVKNARISVKGIRHDITTAPDGDYWRLLPPGIHIVIAQAPGYAKVIKKVIIPARMKRAGRVDFILQPLGMGPKNFIHGLRRTGPHDPLGGASSLGEATEPDPLRARRQPSADGSKPWWWSYFTSLSTHRPRWLLKY

SEQ ID NO: 11889 - protein, 652 aa, Homo sapiens
  Payload ID: 2352
  Gene Symbol: CPZ
  Gene Name: carboxypeptidase Z
  Uniprot ID: Q66K79
  ENSP ID: ENSP00000354255
MPPPLPLLLLTVLVVAAARPGCEFERNPAGECHRPPAADSATCVDLQLRTCSDAAYNHTTFPNLLQHRSWEVVEASSEYILLSVLHQLLEGQCNPDLRLLGCAVLAPRCEGGWVRRPCRHICEGLREVCQPAFDAIDMAWPYFLDCHRYFTREDEGCYDPLEKLRGGLEADEALPSGLPPTFIRFSHHSYAQMVRVLRRTASRCAHVARTYSIGRSFDGRELLVIEFSSRPGQHELMEPEVKLIGNIHGNEVAGREMLIYLAQYLCSEYLLGNPRIQRLLNTTRIHLLPSMNPDGYEVAAAEGAGYNGWTSGRQNAQNLDLNRNFPDLTSEYYRLAETRGARSDHIPIPQHYWWGKVAPETKAIMKWMQTIPFVLSASLHGGDLVVSYPFDFSKHPQEEKMFSPTPDEKMFKLLSRAYADVHPMMMDRSENRCGGNFLKRGSIINGADWYSFTGGMSDFNYLHTNCFEITVELGCVKFPPEEALYILWQHNKESLLNFVETVHRGIKGVVTDKFGKPVKNARISVKGIRHDITTAPDGDYWRLLPPGIHIVIAQAPGYAKVIKKVIIPARMKRAGRVDFILQPLGMGPKNFIHGLRRTGPHDPLGGASSLGEATEPDPLRARRQPSADGSKPWWWSYFTSLSTHRPRWLLKY

SEQ ID NO: 11890 - protein, 515 aa, Homo sapiens
  Payload ID: 2352
  Gene Symbol: CPZ
  Gene Name: carboxypeptidase Z
  Uniprot ID: Q66K79
  ENSP ID: ENSP00000371920
MAWPYFLDCHRYFTREDEGCYDPLEKLRGGLEADEALPSGLPPTFIRFSHHSYAQMVRVLRRTASRCAHVARTYSIGRSFDGRELLVIEFSSRPGQHELMEPEVKLIGNIHGNEVAGREMLIYLAQYLCSEYLLGNPRIQRLLNTTRIHLLPSMNPDGYEVAAAEGAGYNGWTSGRQNAQNLDLNRNFPDLTSEYYRLAETRGARSDHIPIPQHYWWGKVAPETKAIMKWMQTIPFVLSASLHGGDLVVSYPFDFSKHPQEEKMFSPTPDEKMFKLLSRAYADVHPMMMDRSENRCGGNFLKRGSIINGADWYSFTGGMSDFNYLHTNCFEITVELGCVKFPPEEALYILWQHNKESLLNFVETVHRGIKGVVTDKFGKPVKNARISVKGIRHDITTAPDGDYWRLLPPGIHIVIAQAPGYAKVIKKVIIPARMKRAGRVDFILQPLGMGPKNFIHGLRRTGPHDPLGGASSLGEATEPDPLRARRQPSADGSKPWWWSYFTSLSTHRPRWLLKY

SEQ ID NO: 11891 - protein, 69 aa, Homo sapiens
  Payload ID: 2352
  Gene Symbol: CPZ
  Gene Name: carboxypeptidase Z
  ENSP ID: ENSP00000422693
MPPPLPLLLLTVLVVAAARPGCEFERNPAGECHRPPAADSGTVPGPPWLLFCRRAAAPTLSEHFRQLNP

SEQ ID NO: 11892 - protein, 476 aa, Homo sapiens
  Payload ID: 2353
  Gene Symbol: CPVL
  Gene Name: carboxypeptidase, vitellogenic-like
  Uniprot ID: Q9H3G5
  ENSP ID: ENSP00000265394
MVGAMWKVIVSLVLLMPGPCDGLFRSLYRSVSMPPKGDSGQPLFLTPYIEAGKIQKGRELSLVGPFPGLNMKSYAGFLTVNKTYNSNLFFWFFPAQIQPEDAPVVLWLQGGPGGSSMFGLFVEHGPYVVTSNMTLRDRDFPWTTTLSMLYIDNPVGTGFSFTDDTHGYAVNEDDVARDLYSALIQFFQIFPEYKNNDFYVTGESYAGKYVPAIAHLIHSLNPVREVKINLNGIAIGDGYSDPESIIGGYAEFLYQIGLLDEKQKKYFQKQCHECIEHIRKQNWFEAFEILDKLLDGDLTSDPSYFQNVTGCSNYYNFLRCTEPEDQLYYVKFLSLPEVRQAIHVGNQTFNDGTIVEKYLREDTVQSVKPWLTEIMNNYKVLIYNGQLDIIVAAALTERSLMGMDWKGSQEYKKAEKKVWKIFKSDSEVAGYIRQAGDFHQVIIRGGGHILPYDQPLRAFDMINRFIYGKGWDPYVG

SEQ ID NO: 11893 - protein, 476 aa, Homo sapiens; identical to SEQ ID NO: 11892
  Payload ID: 2353
  Gene Symbol: CPVL
  Gene Name: carboxypeptidase, vitellogenic-like
  Uniprot ID: Q9H3G5
  ENSP ID: ENSP00000379572

SEQ ID NO: 11894 - protein, 476 aa, Homo sapiens; identical to SEQ ID NO: 11892
  Payload ID: 2353
  Gene Symbol: CPVL
  Gene Name: carboxypeptidase, vitellogenic-like
  Uniprot ID: Q9H3G5
  ENSP ID: ENSP00000387164

SEQ ID NO: 11895 - protein, 141 aa, Homo sapiens
  Payload ID: 2353
  Gene Symbol: CPVL
  Gene Name: carboxypeptidase, vitellogenic-like
  ENSP ID: ENSP00000395690
MKSYAGFLTVNKTYNSNLFFWFFPAQIQPEDAPVVLWLQGGPGGSSMFGLFVEHGPYVVTSNMTLRDRDFPWTTTLSMLYIDNPVGTGFSFTDDTHGYAVNEDDVARDLYSALIQFFQIFPEYKNNDFYVTGESYAGKYVP

SEQ ID NO: 11896 - protein, 180 aa, Homo sapiens
  Payload ID: 2353
  Gene Symbol: CPVL
  Gene Name: carboxypeptidase, vitellogenic-like
  ENSP ID: ENSP00000397327
  MOD_RES (1)..(1): Any amino acid
XKYFQKQCHECIEHIRKQNWFEAFEEPEDQLYYVKFLSLPEVRQAIHVGNQTFNDGTIVEKYLREDTVQSVKPWLTEIMNNYKVLIYNGQLDIIVAAALTERSLMGMDWKGSQEYKKAEKKVWKIFKSDSEVAGYIRQAGDFHQVIIRGGGHILPYDQPLRAFDMINRFIYGKGWDPYVG

SEQ ID NO: 11897 - protein, 141 aa, Homo sapiens
  Payload ID: 2353
  Gene Symbol: CPVL
  Gene Name: carboxypeptidase, vitellogenic-like
  ENSP ID: ENSP00000403580
IIGGYAEFLYQIGLLDEKQKKYFQKQCHECIEHIRKQNWFEAFEVLIYNGQLDIIVAAALTERSLMGMDWKGSQEYKKAEKKVWKIFKSDSEVAGYIRQAGDFHQVIIRGGGHILPYDQPLRAFDMINRFIYGKGWDPYVG

SEQ ID NO: 11898 - protein, 244 aa, Homo sapiens
  Payload ID: 2353
  Gene Symbol: CPVL
  Gene Name: carboxypeptidase, vitellogenic-like
  ENSP ID: ENSP00000409036
MKSYAGFLTVNKTYNSNLFFWFFPAQIQPEDAPVVLWLQGGPGGSSMFGLFVEHGPYVVTSNMTLRDRDFPWTTTLSMLYIDNPVGTGFSFTDDTHGYAVNEDDVARDLYSALIQFFQIFPEYKNNDFYVTGESYAGKYVPAIAHLIHSLNPVREVKINLNGIAIGDGYSDPESIIGGYAEFLYQIGLLDEKQKKYFQKQCHECIEHIRKQNWFEAFEILDKLLDGDLTSDPSYFQNVTGCSNY

SEQ ID NO: 11899 - protein, 43 aa, Homo sapiens
  Payload ID: 2353
  Gene Symbol: CPVL
  Gene Name: carboxypeptidase, vitellogenic-like
  ENSP ID: ENSP00000412857
MVGAMWKVIVSLVLLMPGPCDGLFRSLYRSVSMPPKGDSGQPL

SEQ ID NO: 11900 - protein, 52 aa, Homo sapiens
  Payload ID: 2353
  Gene Symbol: CPVL
  Gene Name: carboxypeptidase, vitellogenic-like
  ENSP ID: ENSP00000413287
MVGAMWKVIVSLVLLMPGPCDGLFRSLYRSVSMPPKGDSGQPLFLTPYIEAG

SEQ ID NO: 11901 - protein, 6 aa, Homo sapiens
  Payload ID: 2353
  Gene Symbol: CPVL
  Gene Name: carboxypeptidase, vitellogenic-like
  ENSP ID: ENSP00000416555
MVGAMW

SEQ ID NO: 11902 - protein, 100 aa, Homo sapiens
  Payload ID: 2353
  Gene Symbol: CPVL
  Gene Name: carboxypeptidase, vitellogenic-like
  ENSP ID: ENSP00000417015
MFGLFVEHGPYVVTSNMTLRDRDFPWTTTLSMLYIDNPVGTGFSFTDDTHGYAVNEDDVARDLYSALIQFFQIFPEYKNNDFYVTGESYAGKYVPAIAHL

SEQ ID NO: 11903 - protein, 232 aa, Homo sapiens
  Payload ID: 2353
  Gene Symbol: CPVL
  Gene Name: carboxypeptidase, vitellogenic-like
  ENSP ID: ENSP00000479581
MFGLFVEHGPYVVTSNMTLRDRDFPWTTTLSMLYIDNPVGTGFSFTDDTHGYAVNEDDVARDLYSALIQFFQIFPEYKNNDFYVTGESYAGKYVPAIAHLIHSLNPVREVKINLNGIAIGDGYSDPESIIGGYAEFLYQIGLLDEKQKKYFQKQCHECIEHIRKQNWFEAFEILDKLLDGDLTSDPSYFQNVTGCSNYYNFLRCTEPEDQLYYVKFLSLPEVRQAPRGESDF

SEQ ID NO: 11904 - protein, 230 aa, Homo sapiens
  Payload ID: 2353
  Gene Symbol: CPVL
  Gene Name: carboxypeptidase, vitellogenic-like
  ENSP ID: ENSP00000481092
MFGLFVEHGPYVVTSNMTLRDRDFPWTTTLSMLYIDNPVGTGFSFTDDTHGYAVNEDDVARDLYSALIQFFQIFPEYKNNDFYVTGESYAGKYVPAIAHLIHSLNPVREVKINLNGIAIGDGYSDPESIIGGYAEFLYQIGLLDEKQKKYFQKQCHECIEHIRKQNWFEAFEILDKLLDGDLTSDPSYFQNVTGCSNYYNFLRCTEPEDQLYYVKFCHSQRDKPRGESDF

SEQ ID NO: 11905 - protein, 526 aa, Homo sapiens
  Payload ID: 2354
  Gene Symbol: CEACAM1
  Gene Name: carcinoembryonic antigen-related cell adhesion molecule 1 (biliary glycoprotein)
  Uniprot ID: P13688
  ENSP ID: ENSP00000161559
MGHLSAPLHRVRVPWQGLLLTASLLTFWNPPTTAQLTTESMPFNVAEGKEVLLLVHNLPQQLFGYSWYKGERVDGNRQIVGYAIGTQQATPGPANSGRETIYPNASLLIQNVTQNDTGFYTLQVIKSDLVNEEATGQFHVYPELPKPSISSNNSNPVEDKDAVAFTCEPETQDTTYLWWINNQSLPVSPRLQLSNGNRTLTLLSVTRNDTGPYECEIQNPVSANRSDPVTLNVTYGPDTPTISPSDTYYRPGANLSLSCYAASNPPAQYSWLINGTFQQSTQELFIPNITVNNSGSYTCHANNSVTGCNRTTVKTIIVTELSPVVAKPQIKASKTTVTGDKDSVNLTCSTNDTGISIRWFFKNQSLPSSERMKLSQGNTTLSINPVKREDAGTYWCEVFNPISKNQSDPIMLNVNYNALPQENGLSPGAIAGIVIGVVALVALIAVALACFLHFGKTGRASDQRDLTEHKPSVSNHTQDHSNDPPNKMNEVTYSTLNFEAQQPTQPTSASPSLTATEIIYSEVKKQ

SEQ ID NO: 11906 - protein, 430 aa, Homo sapiens
  Payload ID: 2354
  Gene Symbol: CEACAM1
  Gene Name: carcinoembryonic antigen-related cell adhesion molecule 1 (biliary glycoprotein)
  Uniprot ID: P13688
  ENSP ID: ENSP00000244291
MGHLSAPLHRVRVPWQGLLLTASLLTFWNPPTTAQLTTESMPFNVAEGKEVLLLVHNLPQQLFGYSWYKGERVDGNRQIVGYAIGTQQATPGPANSGRETIYPNASLLIQNVTQNDTGFYTLQVIKSDLVNEEATGQFHVYPELPKPSISSNNSNPVEDKDAVAFTCEPETQDTTYLWWINNQSLPVSPRLQLSNGNRTLTLLSVTRNDTGPYECEIQNPVSANRSDPVTLNVTYGPDTPTISPSDTYYRPGANLSLSCYAASNPPAQYSWLINGTFQQSTQELFIPNITVNNSGSYTCHANNSVTGCNRTTVKTIIVTDNALPQENGLSPGAIAGIVIGVVALVALIAVALACFLHFGKTGRASDQRDLTEHKPSVSNHTQDHSNDPPNKMNEVTYSTLNFEAQQPTQPTSASPSLTATEIIYSEVKKQ

SEQ ID NO: 11907 - protein, 461 aa, Homo sapiens
  Payload ID: 2354
  Gene Symbol: CEACAM1
  Gene Name: carcinoembryonic antigen-related cell adhesion molecule 1 (biliary glycoprotein)
  Uniprot ID: P13688
  ENSP ID: ENSP00000351165
MGHLSAPLHRVRVPWQGLLLTASLLTFWNPPTTAQLTTESMPFNVAEGKEVLLLVHNLPQQLFGYSWYKGERVDGNRQIVGYAIGTQQATPGPANSGRETIYPNASLLIQNVTQNDTGFYTLQVIKSDLVNEEATGQFHVYPELPKPSISSNNSNPVEDKDAVAFTCEPETQDTTYLWWINNQSLPVSPRLQLSNGNRTLTLLSVTRNDTGPYECEIQNPVSANRSDPVTLNVTYGPDTPTISPSDTYYRPGANLSLSCYAASNPPAQYSWLINGTFQQSTQELFIPNITVNNSGSYTCHANNSVTGCNRTTVKTIIVTERQNLTMLPRLDSNSWAQAILPSVSQSAEITDNALPQENGLSPGAIAGIVIGVVALVALIAVALACFLHFGKTGRASDQRDLTEHKPSVSNHTQDHSNDPPNKMNEVTYSTLNFEAQQPTQPTSASPSLTATEIIYSEVKKQ

SEQ ID NO: 11908 - protein, 368 aa, Homo sapiens
  Payload ID: 2354
  Gene Symbol: CEACAM1
  Gene Name: carcinoembryonic antigen-related cell adhesion molecule 1 (biliary glycoprotein)
  Uniprot ID: P13688
  ENSP ID: ENSP00000384083
MGHLSAPLHRVRVPWQGLLLTASLLTFWNPPTTAQLTTESMPFNVAEGKEVLLLVHNLPQQLFGYSWYKGERVDGNRQIVGYAIGTQQATPGPANSGRETIYPNASLLIQNVTQNDTGFYTLQVIKSDLVNEEATGQFHVYPELPKPSISSNNSNPVEDKDAVAFTCEPETQDTTYLWWINNQSLPVSPRLQLSNGNRTLTLLSVTRNDTGPYECEIQNPVSANRSDPVTLNVTYGPDTPTISPSDTYYRPGANLSLSCYAASNPPAQYSWLINGTFQQSTQELFIPNITVNNSGSYTCHANNSVTGCNRTTVKTIIVTDNALPQENGLSPGAIAGIVIGVVALVALIAVALACFLHFGKTGSSGPLQ

SEQ ID NO: 11909 - protein, 464 aa, Homo sapiens
  Payload ID: 2354
  Gene Symbol: CEACAM1
  Gene Name: carcinoembryonic antigen-related cell adhesion molecule 1 (biliary glycoprotein)
  Uniprot ID: P13688
  ENSP ID: ENSP00000384709
MGHLSAPLHRVRVPWQGLLLTASLLTFWNPPTTAQLTTESMPFNVAEGKEVLLLVHNLPQQLFGYSWYKGERVDGNRQIVGYAIGTQQATPGPANSGRETIYPNASLLIQNVTQNDTGFYTLQVIKSDLVNEEATGQFHVYPELPKPSISSNNSNPVEDKDAVAFTCEPETQDTTYLWWINNQSLPVSPRLQLSNGNRTLTLLSVTRNDTGPYECEIQNPVSANRSDPVTLNVTYGPDTPTISPSDTYYRPGANLSLSCYAASNPPAQYSWLINGTFQQSTQELFIPNITVNNSGSYTCHANNSVTGCNRTTVKTIIVTELSPVVAKPQIKASKTTVTGDKDSVNLTCSTNDTGISIRWFFKNQSLPSSERMKLSQGNTTLSINPVKREDAGTYWCEVFNPISKNQSDPIMLNVNYNALPQENGLSPGAIAGIVIGVVALVALIAVALACFLHFGKTGSSGPLQ

SEQ ID NO: 11910 - protein, 99 aa, Homo sapiens
  Payload ID: 2354
  Gene Symbol: CEACAM1
  Gene Name: carcinoembryonic antigen-related cell adhesion molecule 1 (biliary glycoprotein)
  ENSP ID: ENSP00000471566
MPFNVAEGKEVLLLVHNLPQQLFGYSWYKGERVDGNRQIVGYAIGTQQATPGPANSGRETIYPNASLLIQNVTQNDTGFYTLQVIKSDLVNEEATGQFH

SEQ ID NO: 11911 - protein, 399 aa, Homo sapiens
  Payload ID: 2354
  Gene Symbol: CEACAM1
  Gene Name: carcinoembryonic antigen-related cell adhesion molecule 1 (biliary glycoprotein)
  Uniprot ID: P13688
  ENSP ID: ENSP00000471918
MGHLSAPLHRVRVPWQGLLLTASLLTFWNPPTTAQLTTESMPFNVAEGKEVLLLVHNLPQQLFGYSWYKGERVDGNRQIVGYAIGTQQATPGPANSGRETIYPNASLLIQNVTQNDTGFYTLQVIKSDLVNEEATGQFHVYPELPKPSISSNNSNPVEDKDAVAFTCEPETQDTTYLWWINNQSLPVSPRLQLSNGNRTLTLLSVTRNDTGPYECEIQNPVSANRSDPVTLNVTYGPDTPTISPSDTYYRPGANLSLSCYAASNPPAQYSWLINGTFQQSTQELFIPNITVNNSGSYTCHANNSVTGCNRTTVKTIIVTEMAFHHVAKAGLKLLSSSNPPASTSQSAKITDNALPQENGLSPGAIAGIVIGVVALVALIAVALACFLHFGKTGSSGPLQ

SEQ ID NO: 11912 - protein, 94 aa, Homo sapiens
  Payload ID: 2354
  Gene Symbol: CEACAM1
  Gene Name: carcinoembryonic antigen-related cell adhesion molecule 1 (biliary glycoprotein)
  ENSP ID: ENSP00000472633
MPFNVAEGKEVLLLVHNLPQQLFGYSWYKGERVDGNRQIVGYAIGTQQATPGPANSGRETIYPNASLLIQNVTQNDTGFYTLQVIKSDLVNEEA

SEQ ID NO: 11913 - protein, 425 aa, Homo sapiens
  Payload ID: 2355
  Gene Symbol: CEACAM16
  Gene Name: carcinoembryonic antigen-related cell adhesion molecule 16
  Uniprot ID: Q2WEN9
  ENSP ID: ENSP00000385576
MALTGYSWLLLSATFLNVGAEISITLEPAQPSEGDNVTLVVHGLSGELLAYSWYAGPTLSVSYLVASYIVSTGDETPGPAHTGREAVRPDGSLDIQGILPRHSGTYILQTFNRQLQTEVGYGHVQVHEILAQPTVLANSTALVERRDTLRLMCSSPSPTAEVRWFFNGGALPVALRLGLSPDGRVLARHGIRREEAGAYQCEVWNPVSVSRSEPINLTVYFGPERVAILQDSTTRTGCTIKVDFNTSLTLWCVSRSCPEPEYVWTFNGQALKNGQDHLNISSMTAAQEGTYTCIAKNTKTLLSGSASVVVKLSAAAVATMIVPVPTKPTEGQDVTLTVQGYPKDLLVYAWYRGPASEPNRLLSQLPSGTWIAGPAHTGREVGFPNCSLLVQKLNLTDTGRYTLKTVTVQGKTETLEVELQVAPLG

SEQ ID NO: 11914 - protein, 425 aa, Homo sapiens; identical to SEQ ID NO: 11913
  Payload ID: 2355
  Gene Symbol: CEACAM16
  Gene Name: carcinoembryonic antigen-related cell adhesion molecule 16
  Uniprot ID: Q2WEN9
  ENSP ID: ENSP00000466561

SEQ ID NO: 11915 - protein, 384 aa, Homo sapiens
  Payload ID: 2356
  Gene Symbol: CEACAM18
  Gene Name: carcinoembryonic antigen-related cell adhesion molecule 18
  Uniprot ID: A8MTB9
  ENSP ID: ENSP00000379738
MDLSRPRWSLWRRVFLMASLLACGICQASGQIFITQTLGIKGYRTVVALDKVPEDVQEYSWYWGANDSAGNMIISHKPPSAQQPGPMYTGRERVNREGSLLIRPTALNDTGNYTVRVVAGNETQRATGWLEVLELGSNLGISVNASSLVENMDSVAADCLTNVTNITWYVNDVPTSSSDRMTISPDGKTLVILRVSRYDRTIQCMIESFPEIFQRSERISLTVAYGPDYVLLRSNPDDFNGIVTAEIGSQVEMECICYSFLDLKYHWIHNGSLLNFSDAKMNLSSLAWEQMGRYRCTVENPVTQLIMYMDVRIQAPHEDLTCCPQRFLHLRIHGDVPHHADSAGWRLHLWSPDPCSDQPLLNQDKSGSMSVHPRPEDKTRRASR

SEQ ID NO: 11916 - protein, 299 aa, Homo sapiens
  Payload ID: 2357
  Gene Symbol: CEACAM19
  Gene Name: carcinoembryonic antigen-related cell adhesion molecule 19
  Uniprot ID: Q7Z692
  ENSP ID: ENSP00000351627
MEIPMGTQGCFSKSLLLSASILVLWMLQGSQAALYIQKIPEQPQKNQDLLLSVQGVPDTFQDFNWYLGEETYGGTRLFTYIPGIQRPQRDGSAMGQRDIVGFPNGSMLLRRAQPTDSGTYQVAITINSEWTMKAKTEVQVAEKNKELPSTHLPTNAGILAATIIGSLAAGALLISCIAYLLVTRNWRGQSHRLPAPRGQGSLSILCSAVSPVPSVTPSTWMATTEKPELGPAHDAGDNNIYEVMPSPVLLVSPISDTRSINPARPLPTPPHLQAEPENHQYQDLLNPDPAPYCQLVPTS

SEQ ID NO: 11917 - protein, 300 aa, Homo sapiens
  Payload ID: 2357
  Gene Symbol: CEACAM19
  Gene Name: carcinoembryonic antigen-related cell adhesion molecule 19
  Uniprot ID: Q7Z692
  ENSP ID: ENSP00000384887
MEIPMGTQGCFSKSLLLSASILVLWMLQGSQAALYIQKIPEQPQKNQDLLLSVQGVPDTFQDFNWYLGEETYGGTRLFTYIPGIQRPQRDGSAMGQRDIVGFPNGSMLLRRAQPTDSGTYQVAITINSEWTMKAKTEVQVAEKNKELPSTHLPTNAGILAATIIGSLAAGALLISCIAYLLVTRNWRGQSHRLPAPRGQGSLSILCSAVSPVPSVTPSTWMATTEKPELGPAHDAGDNNIYEVMPSPVLLVSPISDTRSINPARPLPTPPHLQAEPENHQYQQDLLNPDPAPYCQLVPTS

SEQ ID NO: 11918 - protein, 56 aa, Homo sapiens
  Payload ID: 2357
  Gene Symbol: CEACAM19
  Gene Name: carcinoembryonic antigen-related cell adhesion molecule 19
  ENSP ID: ENSP00000465422
MEIPMGTQGCFSKSLLLSASILVLWMLQGSQAALYIQKIPEQPQKNQDLLLSVQGV

SEQ ID NO: 11919 - protein, 56 aa, Homo sapiens; identical to SEQ ID NO: 11918
  Payload ID: 2357
  Gene Symbol: CEACAM19
  Gene Name: carcinoembryonic antigen-related cell adhesion molecule 19
  ENSP ID: ENSP00000466592

SEQ ID NO: 11920 - protein, 54 aa, Homo sapiens
  Payload ID: 2357
  Gene Symbol: CEACAM19
  Gene Name: carcinoembryonic antigen-related cell adhesion molecule 19
  ENSP ID: ENSP00000480588
MEIPMGTQGCFSKSLLLSASILVLWMLQGSQAALYIQKIPEQPQKNQDLLLSVQ

SEQ ID NO: 11921 - protein, 56 aa, Homo sapiens; identical to SEQ ID NO: 11918
  Payload ID: 2357
  Gene Symbol: CEACAM19
  Gene Name: carcinoembryonic antigen-related cell adhesion molecule 19
  ENSP ID: ENSP00000481453

SEQ ID NO: 11922 - protein, 56 aa, Homo sapiens; identical to SEQ ID NO: 11918
  Payload ID: 2357
  Gene Symbol: CEACAM19
  Gene Name: carcinoembryonic antigen-related cell adhesion molecule 19
  ENSP ID: ENSP00000483240

SEQ ID NO: 11923 - protein, 585 aa, Homo sapiens
  Payload ID: 2358
  Gene Symbol: CEACAM20
  Gene Name: carcinoembryonic antigen-related cell adhesion molecule 20
  ENSP ID: ENSP00000480940
MGPADSWGHHWMGILLSASLCTVWSPPAAAQLTLNANPLDATQSEDVVLPVFGTPRTPQIHGRSRELAKPSIAVSPGTAIEQKDMVTFYCTTKDVNITIHWVSNNLSIVFHERMQLSKDGKILTILIVQREDSGTYQCEARDALLSQRSDPIFLDVKYGPDPVEIKLESGVASGEVVEVMEGSSMTFLAETKSHPPCAYTWFLLDSILSHTTRTFTIHAVSREHEGLYRCLVSNSATHLSSLGTLKVRVLETLTMPQVVPSSLNLVENARSVDLTCQTVNQSVNVQWFLSGQPLLPSEHLQLSADNRTLIIHGLQRNDTGPYACEVWNWGSRARSEPLELTINYGPDQVHITRESASEMISTIEAELNSSLTLQCWAESKPGAEYRWTLEHSTGEHLGEQLIIRALTWEHDGIYNCTASNSLTGLARSTSVLVKVVGPQSSSLSSGAIAGIVIGILAVIAVASELGYFLCIRNARRPSRKTTEDPSHETSQPIPKEEHPTEPSSESLSPEYRNISQLQGRIRVELMQPPDLPEETYETKLPSASRRGNSFSPWKPPPKPLMPPLRLVSTVPKNMESIYEVLGMQQ

SEQ ID NO: 11924 - protein, 491 aa, Homo sapiens
  Payload ID: 2358
  Gene Symbol: CEACAM20
  Gene Name: carcinoembryonic antigen-related cell adhesion molecule 20
  ENSP ID: ENSP00000481812
MGPADSWGHHWMGILLSASLCTVWSPPAAAQLTLNANPLDATQSEDVVLPVFGTPRTPQIHGRSRELAKPSIAVSPGTAIEQKDMVTFYCTTKDVNITIHWVSNNLSIVFHERMQLSKDGKILTILIVQREDSGTYQCEARDALLSQRSDPIFLDVKYGPDPVEIKLESGVASGEVVEVMEGSSMTFLAETKSHPPCAYTWFLLDSILSHTTRTFTIHAVSREHEGLYRCLVSNSATHLSSLGTLKVRVLETLTMPQVVPSSLNLVENARSVDLTCQTVNQSVNVQWFLSGQPLLPSEHLQLSADNRTLIIHGLQRNDTGPYACEVWNWGSRARSEPLELTINCPQSSSLSSGAIAGIVIGILAVIAVASELGYFLCIRNARRPSRKTTEDPSHETSQPIPKEEHPTEPSSESLSPEYRNISQLQGRIRVELTKLPSASRRGNSFSPWKPPPKPLMPPLRLVSTVPKNMESIYEELVNPEPNTYIQINPSV

SEQ ID NO: 11925 - protein, 596 aa, Homo sapiens
  Payload ID: 2358
  Gene Symbol: CEACAM20
  Gene Name: carcinoembryonic antigen-related cell adhesion molecule 20
  ENSP ID: ENSP00000481937
MGPADSWGHHWMGILLSASLCTVWSPPAAAQLTLNANPLDATQSEDVVLPVFGTPRTPQIHGRSRELAKPSIAVSPGTAIEQKDMVTFYCTTKDVNITIHWVSNNLSIVFHERMQLSKDGKILTILIVQREDSGTYQCEARDALLSQRSDPIFLDVKYGPDPVEIKLESGVASGEVVEVMEGSSMTFLAETKSHPPCAYTWFLLDSILSHTTRTFTIHAVSREHEGLYRCLVSNSATHLSSLGTLKVRVLETLTMPQVVPSSLNLVENARSVDLTCQTVNQSVNVQWFLSGQPLLPSEHLQLSADNRTLIIHGLQRNDTGPYACEVWNWGSRARSEPLELTINYGPDQVHITRESASEMISTIEAELNSSLTLQCWAESKPGAEYRWTLEHSTGEHLGEQLIIRALTWEHDGIYNCTASNSLTGLARSTSVLVKVVGPQSSSLSSGAIAGIVIGILAVIAVASELGYFLCIRNARRPSRKTTEDPSHETSQPIPKEEHPTEPSSESLSPEYRNISQLQGRIRVELMQPPDLPEETYETKLPSASRRGNSFSPWKPPPKPLMPPLRLVSTVPKNMESIYEELVNPEPNTYIQINPSV

SEQ ID NO: 11926 - protein, 503 aa, Homo sapiens
  Payload ID: 2358
  Gene Symbol: CEACAM20
  Gene Name: carcinoembryonic antigen-related cell adhesion molecule 20
  ENSP ID: ENSP00000482943
MGPADSWGHHWMGILLSASLCTVWSPPAAAQLTLNANPLDATQSEDVVLPVFGTPRTPQIHGRSRELAKPSIAVSPGTAIEQKDMVTFYCTTKDVNITIHWVSNNLSIVFHERMQLSKDGKILTILIVQREDSGTYQCEARDALLSQRSDPIFLDVKYGPDPVEIKLESGVASGEVVEVMEGSSMTFLAETKSHPPCAYTWFLLDSILSHTTRTFTIHAVSREHEGLYRCLVSNSATHLSSLGTLKVRVLETLTMPQVVPSSLNLVENARSVDLTCQTVNQSVNVQWFLSGQPLLPSEHLQLSADNRTLIIHGLQRNDTGPYACEVWNWGSRARSEPLELTINCPQSSSLSSGAIAGIVIGILAVIAVASELGYFLCIRNARRPSRKTTEDPSHETSQPIPKEEHPTEPSSESLSPEYRNISQLQGRIRVELMQPPDLPEETYETKLPSASRRGNSFSPWKPPPKPLMPPLRLVSTVPKNMESIYEELVNPEPNTYIQINPSV

SEQ ID NO: 11927 - protein, 584 aa, Homo sapiens
  Payload ID: 2358
  Gene Symbol: CEACAM20
  Gene Name: carcinoembryonic antigen-related cell adhesion molecule 20
  ENSP ID: ENSP00000483639
MGPADSWGHHWMGILLSASLCTVWSPPAAAQLTLNANPLDATQSEDVVLPVFGTPRTPQIHGRSRELAKPSIAVSPGTAIEQKDMVTFYCTTKDVNITIHWVSNNLSIVFHERMQLSKDGKILTILIVQREDSGTYQCEARDALLSQRSDPIFLDVKYGPDPVEIKLESGVASGEVVEVMEGSSMTFLAETKSHPPCAYTWFLLDSILSHTTRTFTIHAVSREHEGLYRCLVSNSATHLSSLGTLKVRVLETLTMPQVVPSSLNLVENARSVDLTCQTVNQSVNVQWFLSGQPLLPSEHLQLSADNRTLIIHGLQRNDTGPYACEVWNWGSRARSEPLELTINYGPDQVHITRESASEMISTIEAELNSSLTLQCWAESKPGAEYRWTLEHSTGEHLGEQLIIRALTWEHDGIYNCTASNSLTGLARSTSVLVKVVGPQSSSLSSGAIAGIVIGILAVIAVASELGYFLCIRNARRPSRKTTEDPSHETSQPIPKEEHPTEPSSESLSPEYRNISQLQGRIRVELMQPPDLPEETYETKLPSASRRGNSFSPWKPPPKPLMPPLRLVSTVPKNMESIYEVFMPH

SEQ ID NO: 11928 - protein, 584 aa, Homo sapiens
  Payload ID: 2358
  Gene Symbol: CEACAM20
  Gene Name: carcinoembryonic antigen-related cell adhesion molecule 20
  ENSP ID: ENSP00000483912
MGPADSWGHHWMGILLSASLCTVWSPPAAAQLTLNANPLDATQSEDVVLPVFGTPRTPQIHGRSRELAKPSIAVSPGTAIEQKDMVTFYCTTKDVNITIHWVSNNLSIVFHERMQLSKDGKILTILIVQREDSGTYQCEARDALLSQRSDPIFLDVKYGPDPVEIKLESGVASGEVVEVMEGSSMTFLAETKSHPPCAYTWFLLDSILSHTTRTFTIHAVSREHEGLYRCLVSNSATHLSSLGTLKVRVLETLTMPQVVPSSLNLVENARSVDLTCQTVNQSVNVQWFLSGQPLLPSEHLQLSADNRTLIIHGLQRNDTGPYACEVWNWGSRARSEPLELTINYGPDQVHITRESASEMISTIEAELNSSLTLQCWAESKPGAEYRWTLEHSTGEHLGEQLIIRALTWEHDGIYNCTASNSLTGLARSTSVLVKVVGPQSSSLSSGAIAGIVIGILAVIAVASELGYFLCIRNARRPSRKTTEDPSHETSQPIPKEEHPTEPSSESLSPEYRNISQLQGRIRVELTKLPSASRRGNSFSPWKPPPKPLMPPLRLVSTVPKNMESIYEELVNPEPNTYIQINPSV

SEQ ID NO: 11929 - protein, 292 aa, Homo sapiens
  Payload ID: 2359
  Gene Symbol: CEACAM21
  Gene Name: carcinoembryonic antigen-related cell adhesion molecule 21
  Uniprot ID: Q3KPI0
  ENSP ID: ENSP00000187608
MGPPSACPHRECIPWQGLLLTASLLTFWNAPTTAWLFIASAPFEVAEGENVHLSVVYLPENLYSYGWYKGKTVEPNQLIAAYVIDTHVRTPGPAYSGRETISPSGDLHFQNVTLEDTGYYNLQVTYRNSQIEQASHHLRVYESVAQPSIQASSTTVTEKGSVVLTCHTNNTGTSFQWIFNNQRLQVTKRMKLSWFNHVLTIDPIRQEDAGEYQCEVSNPVSSNRSDPLKLTVKYDNTLGILIGVLVGSLLVAALVCFLLLRKTGRASDQSDFREQQPPASTPGHGPSDSSIS

SEQ ID NO: 11930 - protein, 165 aa, Homo sapiens
  Payload ID: 2359
  Gene Symbol: CEACAM21
  Gene Name: carcinoembryonic antigen-related cell adhesion molecule 21
  ENSP ID: ENSP00000384380
MAPRHFLLVTLSTESVAQPSIQASSTTVTEKGSVVLTCHTNNTGTSFQWIFNNQRLQVTKRMKLSWFNHVLTIDPIRQEDAGEYQCEVSNPVSSNRSDPLKLTVKSDDNTLGILIGVLVGSLLVAALVCFLLLRKTGRASDQSDFREQQPPASTPGHGPSDSSIS

SEQ ID NO: 11931 - protein, 293 aa, Homo sapiens
  Payload ID: 2359
  Gene Symbol: CEACAM21
  Gene Name: carcinoembryonic antigen-related cell adhesion molecule 21
  Uniprot ID: Q3KPI0
  ENSP ID: ENSP00000385739
MGPPSACPHRECIPWQGLLLTASLLTFWNAPTTAWLFIASAPFEVAEGENVHLSVVYLPENLYSYGWYKGKTVEPNQLIAAYVIDTHVRTPGPAYSGRETISPSGDLHFQNVTLEDTGYYNLQVTYRNSQIEQASHHLRVYESVAQPSIQASSTTVTEKGSVVLTCHTNNTGTSFQWIFNNQRLQVTKRMKLSWFNHVLTIDPIRQEDAGEYQCEVSNPVSSNRSDPLKLTVKSDDNTLGILIGVLVGSLLVAALVCFLLLRKTGRASDQSDFREQQPPASTPGHGPSDSSIS

SEQ ID NO: 11932 - protein, 191 aa, Homo sapiens
  Payload ID: 2359
  Gene Symbol: CEACAM21
  Gene Name: carcinoembryonic antigen-related cell adhesion molecule 21
  Uniprot ID: Q3KPI0
  ENSP ID: ENSP00000390697
MGPPSACPHRECIPWQGLLLTASLLTFWNAPTTAWLFIASAPFEVAEGENVHLSVVYLPENLYSYGWYKGKTVEPNQLIAAYVIDTHVRTPGPAYSGRETISPSGDLHFQNVTLEDTGYYNLQVTYRNSQIEQASHHLRVYGECSKFDSEISEDAAWPQDTFCWSLYPQSQWLSPPSKPAAPQSQRRAPWS

SEQ ID NO: 11933 - protein, 165 aa, Homo sapiens; identical to SEQ ID NO: 11930
  Payload ID: 2359
  Gene Symbol: CEACAM21
  Gene Name: carcinoembryonic antigen-related cell adhesion molecule 21
  ENSP ID: ENSP00000482379

SEQ ID NO: 11934 - protein, 292 aa, Homo sapiens; identical to SEQ ID NO: 11929
  Payload ID: 2359
  Gene Symbol: CEACAM21
  Gene Name: carcinoembryonic antigen-related cell adhesion molecule 21
  Uniprot ID: Q3KPI0
  ENSP ID: ENSP00000483598

SEQ ID NO: 11935 - protein, 191 aa, Homo sapiens; identical to SEQ ID NO: 11932
  Payload ID: 2359
  Gene Symbol: CEACAM21
  Gene Name: carcinoembryonic antigen-related cell adhesion molecule 21
  ENSP ID: ENSP00000487327

SEQ ID NO: 11936 - protein, 293 aa, Homo sapiens; identical to SEQ ID NO: 11931
  Payload ID: 2359
  Gene Symbol: CEACAM21
  Gene Name: carcinoembryonic antigen-related cell adhesion molecule 21
  ENSP ID: ENSP00000487532

SEQ ID NO: 11937 - protein, 95 aa, Homo sapiens
  Payload ID: 2359
  Gene Symbol: CEACAM21
  Gene Name: carcinoembryonic antigen-related cell adhesion molecule 21
  ENSP ID: ENSP00000488260
  MOD_RES (1)..(1): Any amino acid
XLTIDPIRQEDAGEYQCEVSNPVSSNRSDPLKLTVKYDNTLGILIGVLVGSLLVAALVCFLLLRKTGRASDQSDFREQQPPASTPGHGPSDSSIS

SEQ ID NO: 11938 - protein, 212 aa, Homo sapiens
  Payload ID: 2360
  Gene Symbol: CEACAM3
  Gene Name: carcinoembryonic antigen-related cell adhesion molecule 3
  Uniprot ID: P40198
  ENSP ID: ENSP00000341725
MGPPSASPHRECIPWQGLLLTASLLNFWNPPTTAKLTIESMPLSVAEGKEVLLLVHNLPQHLFGYSWYKGERVDGNSLIVGYVIGTQQATPGAAYSGRETIYTNASLLIQNVTQNDIGFYTLQVIKSDLVNEEATGQFHVYQENAPGLPVGAVAGIVTGVLVGVALVAALVCFLLLAKTGRPWSLPQLCLLDVPSLHCPGPPTQPQDSSFHL

SEQ ID NO: 11939 - protein, 252 aa, Homo sapiens
  Payload ID: 2360
  Gene Symbol: CEACAM3
  Gene Name: carcinoembryonic antigen-related cell adhesion molecule 3
  Uniprot ID: P40198
  ENSP ID: ENSP00000349971
MGPPSASPHRECIPWQGLLLTASLLNFWNPPTTAKLTIESMPLSVAEGKEVLLLVHNLPQHLFGYSWYKGERVDGNSLIVGYVIGTQQATPGAAYSGRETIYTNASLLIQNVTQNDIGFYTLQVIKSDLVNEEATGQFHVYQENAPGLPVGAVAGIVTGVLVGVALVAALVCFLLLAKTGRTSIQRDLKEQQPQALAPGRGPSHSSAFSMSPLSTAQAPLPNPRTAASIYEELLKHDTNIYCRMDHKAEVAS

SEQ ID NO: 11940 - protein, 177 aa, Homo sapiens
  Payload ID: 2360
  Gene Symbol: CEACAM3
  Gene Name: carcinoembryonic antigen-related cell adhesion molecule 3
  Uniprot ID: P40198
  ENSP ID: ENSP00000411641
MGPPSASPHRECIPWQGLLLTASLLNFWNPPTTAKLTIESMPLSVAEGKEVLLLVHNLPQHLFGYSWYKGERVDGNSLIVGYVIGTQQATPGAAYSGRETIYTNASLLIQNVTQNDIGFYTLQVIKSDLVNEEATGQFHVYPELPKPSISSNNSNPKEDKDAVAFTCEPEIHSTTCL

SEQ ID NO: 11941 - protein, 99 aa, Homo sapiens
  Payload ID: 2360
  Gene Symbol: CEACAM3
  Gene Name: carcinoembryonic antigen-related cell adhesion molecule 3
  ENSP ID: ENSP00000469333
MPLSVAEGKEVLLLVHNLPQHLFGYSWYKGERVDGNSLIVGYVIGTQQATPGAAYSGRETIYTNASLLIQNVTQNDIGFYTLQVIKSDLVNEEATGQFH

SEQ ID NO: 11942 - protein, 212 aa, Homo sapiens; identical to SEQ ID NO: 11938
  Payload ID: 2360
  Gene Symbol: CEACAM3
  Gene Name: carcinoembryonic antigen-related cell adhesion molecule 3
  Uniprot ID: P40198
  ENSP ID: ENSP00000485920

SEQ ID NO: 11943 - protein, 244 aa, Homo sapiens
  Payload ID: 2361
  Gene Symbol: CEACAM4
  Gene Name: carcinoembryonic antigen-related cell adhesion molecule 4
  Uniprot ID: O75871
  ENSP ID: ENSP00000221954
MGPPSAAPRGGHRPWQGLLITASLLTFWHPPTTVQFTIEALPSSAAEGKDVLLLACNISETIQAYYWHKGKTAEGSPLIAGYITDIQANIPGAAYSGRETVYPNGSLLFQNITLEDAGSYTLRTINASYDSDQATGQLHVHQNNVPGLPVGAVAGIVTGVLVGVALVAALVCFLLLSRTGRASIQRDLREQPPPASTPGHGPSHRSTFSAPLPSPRTATPIYEELLYSDANIYCQIDHKADVVS

SEQ ID NO: 11944 - protein, 254 aa, Homo sapiens
  Payload ID: 2361
  Gene Symbol: CEACAM4
  Gene Name: carcinoembryonic antigen-related cell adhesion molecule 4
  ENSP ID: ENSP00000473018
MGPPSAAPRGGHRPWQGLLITASLLTFWHPPTTVQFTIEALPSSAAEGKDVLLLACNISETIQAYYWHKGKTAEGSPLIAGYITDIQANIPGAAYSGRETVYPNGSLLFQNITLEDAGSYTLRTINASYDSDQATGQLHVHQNNVPGLPVGAVAGIVTGVLVGVALVAALVCFLLLSRTGSIQRDLREQPPPASTPGHGPSHRSTFSAPLPSPRTATPIYEVSVGHGCSGPAGSRGPRICPHQHLAELRFRKMQ

SEQ ID NO: 11945 - protein, 244 aa, Homo sapiens; identical to SEQ ID NO: 11943
  Payload ID: 2361
  Gene Symbol: CEACAM4
  Gene Name: carcinoembryonic antigen-related cell adhesion molecule 4
  Uniprot ID: O75871
  ENSP ID: ENSP00000481247

SEQ ID NO: 11946 - protein, 254 aa, Homo sapiens; identical to SEQ ID NO: 11944
  Payload ID: 2361
  Gene Symbol: CEACAM4
  Gene Name: carcinoembryonic antigen-related cell adhesion molecule 4
  ENSP ID: ENSP00000486872

SEQ ID NO: 11947 - protein, 702 aa, Homo sapiens
  Payload ID: 2362
  Gene Symbol: CEACAM5
  Gene Name: carcinoembryonic antigen-related cell adhesion molecule 5
  Uniprot ID: P06731
  ENSP ID: ENSP00000221992
MESPSAPPHRWCIPWQRLLLTASLLTFWNPPTTAKLTIESTPFNVAEGKEVLLLVHNLPQHLFGYSWYKGERVDGNRQIIGYVIGTQQATPGPAYSGREIIYPNASLLIQNIIQNDTGFYTLHVIKSDLVNEEATGQFRVYPELPKPSISSNNSKPVEDKDAVAFTCEPETQDATYLWWVNNQSLPVSPRLQLSNGNRTLTLFNVTRNDTASYKCETQNPVSARRSDSVILNVLYGPDAPTISPLNTSYRSGENLNLSCHAASNPPAQYSWFVNGTFQQSTQELFIPNITVNNSGSYTCQAHNSDTGLNRTTVTTITVYAEPPKPFITSNNSNPVEDEDAVALTCEPEIQNTTYLWWVNNQSLPVSPRLQLSNDNRTLTLLSVTRNDVGPYECGIQNELSVDHSDPVILNVLYGPDDPTISPSYTYYRPGVNLSLSCHAASNPPAQYSWLIDGNIQQHTQELFISNITEKNSGLYTCQANNSASGHSRTTVKTITVSAELPKPSISSNNSKPVEDKDAVAFTCEPEAQNTTYLWWVNGQSLPVSPRLQLSNGNRTLTLFNVTRNDARAYVCGIQNSVSANRSDPVTLDVLYGPDTPIISPPDSSYLSGANLNLSCHSASNPSPQYSWRINGIPQQHTQVLFIAKITPNNNGTYACFVSNLATGRNNSIVKSITVSASGTSPGLSAGATVGIMIGVLVGVALI

SEQ ID NO: 11948 - protein, 701 aa, Homo sapiens
  Payload ID: 2362
  Gene Symbol: CEACAM5
  Gene Name: carcinoembryonic antigen-related cell adhesion molecule 5
  Uniprot ID: P06731
  ENSP ID: ENSP00000381600
MESPSAPPHRWCIPWQRLLLTASLLTFWNPPTTAKLTIESTPFNVAEGKEVLLLVHNLPQHLFGYSWYKGERVDGNRQIIGYVIGTQQATPGPAYSGREIIYPNASLLIQNIIQNDTGFYTLHVIKSDLVNEEATGQFRVYPELPKPSISSNNSKPVEDKDAVAFTCEPETQDATYLWWVNNQSLPVSPRLQLSNGNRTLTLFNVTRNDTASYKCETQNPVSARRSDSVILNVLYGPDAPTISPLNTSYRSGENLNLSCHAASNPPAQYSWFVNGTFQQSTQELFIPNITVNNSGSYTCQAHNSDTGLNRTTVTTITVYEPPKPFITSNNSNPVEDEDAVALTCEPEIQNTTYLWWVNNQSLPVSPRLQLSNDNRTLTLLSVTRNDVGPYECGIQNELSVDHSDPVILNVLYGPDDPTISPSYTYYRPGVNLSLSCHAASNPPAQYSWLIDGNIQQHTQELFISNITEKNSGLYTCQANNSASGHSRTTVKTITVSAELPKPSISSNNSKPVEDKDAVAFTCEPEAQNTTYLWWVNGQSLPVSPRLQLSNGNRTLTLFNVTRNDARAYVCGIQNSVSANRSDPVTLDVLYGPDTPIISPPDSSYLSGANLNLSCHSASNPSPQYSWRINGIPQQHTQVLFIAKITPNNNGTYACFVSNLATGRNNSIVKSITVSASGTSPGLSAGATVGIMIGVLVGVALI

SEQ ID NO: 11949 - protein, 702 aa, Homo sapiens; identical to SEQ ID NO: 11947
  Payload ID: 2362
  Gene Symbol: CEACAM5
  Gene Name: carcinoembryonic antigen-related cell adhesion molecule 5
  Uniprot ID: P06731
  ENSP ID: ENSP00000385072

SEQ ID NO: 11950 - protein, 141 aa, Homo sapiens
  Payload ID: 2362
  Gene Symbol: CEACAM5
  Gene Name: carcinoembryonic antigen-related cell adhesion molecule 5
  ENSP ID: ENSP00000468997
  MOD_RES (1)..(1): Any amino acid
XKLTIESTPFNVAEGKEVLLLVHNLPQHLFGYSWYKGERVDGNRQIIGYVIGTQQATPGPAYSGREIIYPNASLLIQNIIQNDTGFYTLHVIKSDLVNEEATGQFRVYPELPKPSISSNNSKPVEDKDAVAFTCEPEAQNT

SEQ ID NO: 11951 - protein, 194 aa, Homo sapiens
  Payload ID: 2362
  Gene Symbol: CEACAM5
  Gene Name: carcinoembryonic antigen-related cell adhesion molecule 5
  ENSP ID: ENSP00000473252
  MOD_RES (1)..(1): Any amino acid
XIYPNASLLIQNIIQNDTGFYTLHVIKSDLVNEEATGQFRVYPELPKPSISSNNSKPVEDKDAVAFTCEPETQDATYLWWVNNQSLPVSPRLQLSNGNRTLTLFNVTRNDTASYKCETQNPVSARRSDSVILNVLSEPPKPFITSNNSNPVEDEDAVALTCEPEIQNTTYLWWVNNQSLPVSPRLQLSNDNRTL

SEQ ID NO: 11952 - protein, 346 aa, Homo sapiens
  Payload ID: 2362
  Gene Symbol: CEACAM5
  Gene Name: carcinoembryonic antigen-related cell adhesion molecule 5
  ENSP ID: ENSP00000480800
MESPSAPPHRWCIPWQRLLLTASLLTFWNPPTTAKLTIESTPFNVAEGKEVLLLVHNLPQHLFGYSWYKGERVDGNRQIIGYVIGTQQATPGPAYSGREIIYPNASLLIQNIIQNDTGFYTLHVIKSDLVNEEATGQFRVYPELPKPSISSNNSKPVEDKDAVAFTCEPETQDATYLWWVNNQSLPVSPRLQLSNGNRTLTLFNVTRNDARAYVCGIQNSVSANRSDPVTLDVLYGPDTPIISPPDSSYLSGANLNLSCHSASNPSPQYSWRINGIPQQHTQVLFIAKITPNNNGTYACFVSNLATGRNNSIVKSITVSASGTSPGLSAGATVGIMIGVLVGVALI

SEQ ID NO: 11953 - protein, 524 aa, Homo sapiens
  Payload ID: 2362
  Gene Symbol: CEACAM5
  Gene Name: carcinoembryonic antigen-related cell adhesion molecule 5
  ENSP ID: ENSP00000482157
MESPSAPPHRWCIPWQRLLLTASLLTFWNPPTTAKLTIESTPFNVAEGKEVLLLVHNLPQHLFGYSWYKGERVDGNRQIIGYVIGTQQATPGPAYSGREIIYPNASLLIQNIIQNDTGFYTLHVIKSDLVNEEATGQFRVYPEPPKPFITSNNSNPVEDEDAVALTCEPEIQNTTYLWWVNNQSLPVSPRLQLSNDNRTLTLLSVTRNDVGPYECGIQNELSVDHSDPVILNVLYGPDDPTISPSYTYYRPGVNLSLSCHAASNPPAQYSWLIDGNIQQHTQELFISNITEKNSGLYTCQANNSASGHSRTTVKTITVSAELPKPSISSNNSKPVEDKDAVAFTCEPEAQNTTYLWWVNGQSLPVSPRLQLSNGNRTLTLFNVTRNDARAYVCGIQNSVSANRSDPVTLDVLYGPDTPIISPPDSSYLSGANLNLSCHSASNPSPQYSWRINGIPQQHTQVLFIAKITPNNNGTYACFVSNLATGRNNSIVKSITVSASGTSPGLSAGATVGIMIGVLVGVALI

SEQ ID NO: 11954 - protein, 702 aa, Homo sapiens; identical to SEQ ID NO: 11947
  Payload ID: 2362
  Gene Symbol: CEACAM5
  Gene Name: carcinoembryonic antigen-related cell adhesion molecule 5
  ENSP ID: ENSP00000482303

SEQ ID NO: 11955 - protein, 344 aa, Homo sapiens
  Payload ID: 2363
  Gene Symbol: CEACAM6
  Gene Name: carcinoembryonic antigen-related cell adhesion molecule 6 (non-specific cross reacting antigen)
  Uniprot ID: P40199
  ENSP ID: ENSP00000199764
MGPPSAPPCRLHVPWKEVLLTASLLTFWNPPTTAKLTIESTPFNVAEGKEVLLLAHNLPQNRIGYSWYKGERVDGNSLIVGYVIGTQQATPGPAYSGRETIYPNASLLIQNVTQNDTGFYTLQVIKSDLVNEEATGQFHVYPELPKPSISSNNSNPVEDKDAVAFTCEPEVQNTTYLWWVNGQSLPVSPRLQLSNGNMTLTLLSVKRNDAGSYECEIQNPASANRSDPVTLNVLYGPDVPTISPSKANYRPGENLNLSCHAASNPPAQYSWFINGTFQQSTQELFIPNITVNNSGSYMCQAHNSATGLNRTTVTMITVSGSAPVLSAVATVGITIGVLARVALI

SEQ ID NO: 11956 - protein, 33 aa, Homo sapiens
  Payload ID: 2363
  Gene Symbol: CEACAM6
  Gene Name: carcinoembryonic antigen-related cell adhesion molecule 6 (non-specific cross reacting antigen)
  ENSP ID: ENSP00000469752
MGPPSAPPCRLHVPWKEVLLTASLLTFWNPPTT

SEQ ID NO: 11957 - protein, 265 aa, Homo sapiens
  Payload ID: 2364
  Gene Symbol: CEACAM7
  Gene Name: carcinoembryonic antigen-related cell adhesion molecule 7
  Uniprot ID: Q14002
  ENSP ID: ENSP00000006724
MGSPSACPYRVCIPWQGLLLTASLLTFWNLPNSAQTNIDVVPFNVAEGKEVLLVVHNESQNLYGYNWYKGERVHANYRIIGYVKNISQENAPGPAHNGRETIYPNGTLLIQNVTHNDAGIYTLHVIKENLVNEEVTRQFYVFSEPPKPSITSNNFNPVENKDIVVLTCQPETQNTTYLWWVNNQSLLVSPRLLLSTDNRTLVLLSATKNDIGPYECEIQNPVGASRSDPVTLNVRYESVQASSPDLSAGTAVSIMIGVLAGMALI

SEQ ID NO: 11958 - protein, 265 aa, Homo sapiens; identical to SEQ ID NO: 11957
  Payload ID: 2364
  Gene Symbol: CEACAM7
  Gene Name: carcinoembryonic antigen-related cell adhesion molecule 7
  Uniprot ID: Q14002
  ENSP ID: ENSP00000385932

SEQ ID NO: 11959 - protein, 172 aa, Homo sapiens
  Payload ID: 2364
  Gene Symbol: CEACAM7
  Gene Name: carcinoembryonic antigen-related cell adhesion molecule 7
  ENSP ID: ENSP00000469597
MGSPSACPYRVCIPWQGLLLTASLLTFWNLPNSAQTNIDVVPFNVAEGKEVLLVVHNESQNLYGYNWYKGERVHANYRIIGYVKNISQENAPGPAHNGRETIYPNGTLLIQNVTHNDAGIYTLHVIKENLVNEEVTRQFYVFYESVQASSPDLSAGTAVSIMIGVLAGMALI

SEQ ID NO: 11960 - protein, 30 aa, Homo sapiens
  Payload ID: 2364
  Gene Symbol: CEACAM7
  Gene Name: carcinoembryonic antigen-related cell adhesion molecule 7
  ENSP ID: ENSP00000486147
  MOD_RES (1)..(1): Any amino acid
XESVQASSPDLSAGTAVSIMIGVLAGMALI

SEQ ID NO: 11961 - protein, 30 aa, Homo sapiens; identical to SEQ ID NO: 11960
  Payload ID: 2364
  Gene Symbol: CEACAM7
  Gene Name: carcinoembryonic antigen-related cell adhesion molecule 7
  ENSP ID: ENSP00000486586
  MOD_RES (1)..(1): Any amino acid

SEQ ID NO: 11962 - protein, 30 aa, Homo sapiens; identical to SEQ ID NO: 11960
  Payload ID: 2364
  Gene Symbol: CEACAM7
  Gene Name: carcinoembryonic antigen-related cell adhesion molecule 7
  ENSP ID: ENSP00000487273
  MOD_RES (1)..(1): Any amino acid

SEQ ID NO: 11963 - protein, 349 aa, Homo sapiens
  Payload ID: 2365
  Gene Symbol: CEACAM8
  Gene Name: carcinoembryonic antigen-related cell adhesion molecule 8
  Uniprot ID: P31997
  ENSP ID: ENSP00000244336
MGPISAPSCRWRIPWQGLLLTASLFTFWNPPTTAQLTIEAVPSNAAEGKEVLLLVHNLPQDPRGYNWYKGETVDANRRIIGYVISNQQITPGPAYSNRETIYPNASLLMRNVTRNDTGSYTLQVIKLNLMSEEVTGQFSVHPETPKPSISSNNSNPVEDKDAVAFTCEPETQNTTYLWWVNGQSLPVSPRLQLSNGNRTLTLLSVTRNDVGPYECEIQNPASANFSDPVTLNVLYGPDAPTISPSDTYYHAGVNLNLSCHAASNPPSQYSWSVNGTFQQYTQKLFIPNITTKNSGSYACHTTNSATGRNRTTVRMITVSDALVQGSSPGLSARATVSIMIGVLARVALI

SEQ ID NO: 11964 - protein, 51 aa, Homo sapiens
  Payload ID: 2365
  Gene Symbol: CEACAM8
  Gene Name: carcinoembryonic antigen-related cell adhesion molecule 8
  ENSP ID: ENSP00000472166
MGPISAPSCRWRIPWQGLLLTDALVQGSSPGLSARATVSIMIGVLARVALI

SEQ ID NO: 11965 - protein, 344 aa, Homo sapiens
  Payload ID: 2365
  Gene Symbol: CEACAM8
  Gene Name: carcinoembryonic antigen-related cell adhesion molecule 8
  ENSP ID: ENSP00000484915
MGPLSAPPCTQRITWKGLLLTASLFTFWNPPTTAQLTIEAVPSNAAEGKEVLLLVHNLPQDPRGYNWYKGETVDANRRIIGYVISNQQITPGPAYSNRETIYPNASLLMRNVTRNDTGSYTLQVIKLNLMSEEVTGQFSVHPETPKPSISSNNSNPVEDKDAVAFTCEPETQNTTYLWWVNGQSLPVSPRLQLSNGNRTLTLLSVTRNDVGPYECEIQNPASANFSDPVTLNVLYGPDAPTISPSDTYYHAGVNLNLSCHAASNPPSQYSWSVNGTFQQYTQKLFIPNITTKNSGSYACHTTNSATGRNRTTVRMITVSGSSPGLSARATVSIMIGVLARVALI

SEQ ID NO: 11966 - protein, 301 aa, Homo sapiens
  Payload ID: 2366
  Gene Symbol: CRLS1
  Gene Name: cardiolipin synthase 1
  Uniprot ID: Q9UJA2
  ENSP ID: ENSP00000368140
MLALRVARGSWGALRGAAWAPGTRPSKRRACWALLPPVPCCLGCLAERWRLRPAALGLRLPGIGQRNHCSGAGKAAPRPAAGAGAAAEAPGGQWGPASTPSLYENPWTIPNMLSMTRIGLAPVLGYLIIEEDFNIALGVFALAGLTDLLDGFIARNWANQRSALGSALDPLADKILISILYVSLTYADLIPVPLTYMIISRDVMLIAAVFYVRYRTLPTPRTLAKYFNPCYATARLKPTFISKVNTAVQLILVAASLAAPVFNYADSIYLQILWCFTAFTTAASAYSYYHYGRKTVQVIKD

SEQ ID NO: 11967 - protein, 202 aa, Homo sapiens
  Payload ID: 2366
  Gene Symbol: CRLS1
  Gene Name: cardiolipin synthase 1
  Uniprot ID: Q9UJA2
  ENSP ID: ENSP00000368145
MPQYENPWTIPNMLSMTRIGLAPVLGYLIIEEDFNIALGVFALAGLTDLLDGFIARNWANQRSALGSALDPLADKILISILYVSLTYADLIPVPLTYMIISRDVMLIAAVFYVRYRTLPTPRTLAKYFNPCYATARLKPTFISKVNTAVQLILVAASLAAPVFNYADSIYLQILWCFTAFTTAASAYSYYHYGRKTVQVIKD

SEQ ID NO: 11968 - protein, 205 aa, Homo sapiens
  Payload ID: 2366
  Gene Symbol: CRLS1
  Gene Name: cardiolipin synthase 1
  ENSP ID: ENSP00000416770
MLALRVARGSWGALRGAAWAPGTRPSKRRACWALLPPVPCCLGCLAERWRLRPAALGLRLPGIGQRNHCSGAGKAAPRPAAGAGAAAEAPGGQWGPASTPSLYENPWTIPNMLSMTRIGLAPVLGYLIIEEDFNIALGVFALAGLTDLLDGFIARNWANQRSALGSALDPLADKILISILYVSLTYADLIPANTCQVFQSLLCHC

SEQ ID NO: 11969 - protein, 4069 aa, Homo sapiens
  Payload ID: 2367
  Gene Symbol: CMYA5
  Gene Name: cardiomyopathy associated 5
  Uniprot ID: Q8N3K9
  ENSP ID: ENSP00000394770
MASRDSNHAGESFLGSDGDEEATRELETEEESEGEEDETAAESEEEPDSRLSDQDEEGKIKQEYIISDPSFSMVTVQREDSGITWETNSSRSSTPWASEESQTSGVCSREGSTVNSPPGNVSFIVDEVKKVRKRTHKSKHGSPSLRRKGNRKRNSFESQDVPTNKKGSPLTSASQVLTTEKEKSYTGIYDKARKKKTTSNTPPITGAIYKEHKPLVLRPVYIGTVQYKIKMFNSVKEELIPLQFYGTLPKGYVIKEIHYRKGKDASISLEPDLDNSGSNTVSKTRKLVAQSIEDKVKEVFPPWRGALSKGSESLTLMFSHEDQKKIYADSPLNATSALEHTVPSYSSSGRAEQGIQLRHSQSVPQQPEDEAKPHEVEPPSVTPDTPATMFLRTTKEECELASPGTAASENDSSVSPSFANEVKKEDVYSAHHSISLEAASPGLAASTQDGLDPDQEQPDLTSIERAEPVSAKLTPTHPSVKGEKEENMLEPSISLSEPLMLEEPEKEEIETSLPIAITPEPEDSNLVEEEIVELDYPESPLVSEKPFPPHMSPEVEHKEEELILPLLAASSPEHVALSEEEREEIASVSTGSAFVSEYSVPQDLNHELQEQEGEPVPPSNVEAIAEHAVLSEEENEEFEAYSPAAAPTSESSLSPSTTEKTSENQSPLFSTVTPEYMVLSGDEASESGCYTPDSTSASEYSVPSLATKESLKKTIDRKSPLILKGVSEYMIPSEEKEDTGSFTPAVAPASEPSLSPSTTEKTSECQSPLPSTATSEHVVPSEGEDLGSERFTPDSKLISKYAAPLNATQESQKKIINEASQFKPKGISEHTVLSVDGKEVIGPSSPDLVVASEHSFPPHTTEMTSECQAPPLSATPSEYVVLSDEEAVELERYTPSSTSASEFSVPPYATPEAQEEEIVHRSLNLKGASSPMNLSEEDQEDIGPFSPDSAFVSEFSFPPYATQEAEKREFECDSPICLTSPSEHTILSDEDTEEAELFSPDSASQVSIPPFRISETEKNELEPDSLLTAVSASGYSCFSEADEEDIGSTAATPVSEQFSSSQKQKAETFPLMSPLEDLSLPPSTDKSEKAEIKPEIPTTSTSVSEYLILAQKQKTQAYLEPESEDLIPSHLTSEVEKGEREASSSVAAIPAALPAQSSIVKEETKPASPHSVLPDSVPAIKKEQEPTAALTLKAADEQMALSKVRKEEIVPDSQEATAHVSQDQKMEPQPPNVPESEMKYSVLPDMVDEPKKGVKPKLVLNVTSELEQRKLSKNEPEVIKPYSPLKETSLSGPEALSAVKMEMKHDSKITTTPIVLHSASSGVEKQVEHGPPALAFSALSEEIKKEIEPSSSTTTASVTKLDSNLTRAVKEEIPTDSSLITPVDRPVLTKVGKGELGSGLPPLVTSADEHSVLAEEDKVAIKGASPIETSSKHLAWSEAEKEIKFDSLPSVSSIAEHSVLSEVEAKEVKAGLPVIKTSSSQHSDKSEEARVEDKQDLLFSTVCDSERLVSSQKKSLMSTSEVLEPEHELPLSLWGEIKKKETELPSSQNVSPASKHIIPKGKDEETASSSPELENLASGLAPTLLLLSDDKNKPAVEVSSTAQGDFPSEKQDVALAELSLEPEKKDKPHQPLELPNAGSEFSSDLGRQSGSIGTKQAKSPITETEDSVLEKGPAELRSREGKEENRELCASSTMPAISELSSLLREESQNEEIKPFSPKIISLESKEPPASVAEGGNPEEFQPFTFSLKGLSEEVSHPADFKKGGNQEIGPLPPTGNLKAQVMGDILDKLSEETGHPNSSQVLQSITEPSKIAPSDLLVEQKKTEKALHSDQTVKLPDVSTSSEDKQDLGIKQFSLMRENLPLEQSKSFMTTKPADVKETKMEEFFISPKDENWMLGKPENVASQHEQRIAGSVQLDSSSSNELRPGQLKAAVSSKDHTCEVRKQVLPHSAEESHLSSQEAVSALDTSSGNTETLSSKSYSSEEVKLAEEPKSLVLAGNVERNIAEGKEIHSLMESESLLLEKANTELSWPSKEDSQEKIKLPPERFFQKPVSGLSVEQVKSETISSSVKTAHFPAEGVEPALGNEKEAHRSTPPFPEEKPLEESKMVQSKVIDDADEGKKPSPEVKIPTQRKPISSIHAREPQSPESPEVTQNPPTQPKVAKPDLPEEKGKKGISSFKSWMSSLFFGSSTPDNKVAEQEDLETQPSPSVEKAVTVIDPEGTIPTNFNVAEKPADHSLSEVKLKTADEPRGTLVKSGDGQNVKEKSMILSNVEDLQQPKFISEVSREDYGKKEISGDSEEMNINSVVTSADGENLEIQSYSLIGEKLVMEEAKTIVPPHVTDSKRVQKPAIAPPSKWNISIFKEEPRSDQKQKSLLSFDVVDKVPQQPKSASSNFASKNITKESEKPESIILPVEESKGSLIDFSEDRLKKEMQNPTSLKISEEETKLRSVSPTEKKDNLENRSYTLAEKKVLAEKQNSVAPLELRDSNEIGKTQITLGSRSTELKESKADAMPQHFYQNEDYNERPKIIVGSEKEKGEEKENQVYVLSEGKKQQEHQPYSVNVAESMSRESDISLGHSLGETQSFSLVKATSVTEKSEAMLAEAHPEIREAKAVGTQPHPLEESKVLVEKTKTFLPVALSCRDEIENHSLSQEGNLVLEKSSRDMPDHSEEKEQFRESELSKGGSVDITKETVKQGFQEKAVGTQPRPLEESKVLVEKTKTFLPVVLSCHDEIENHSLSQEGNLVLEKSSRDMPDHSEEKEQFKESELWKGGSVDITKESMKEGFPSKESERTLARPFDETKSSETPPYLLSPVKPQTLASGASPEINAVKKKEMPRSELTPERHTVHTIQTSKDDTSDVPKQSVLVSKHHLEAAEDTRVKEPLSSAKSNYAQFISNTSASNADKMVSNKEMPKEPEDTYAKGEDFTVTSKPAGLSEDQKTAFSIISEGCEILNIHAPAFISSIDQEESEQMQDKLEYLEEKASFKTIPLPDDSETVACHKTLKSRLEDEKVTPLKENKQKETHKTKEEISTDSETDLSFIQPTIPSEEDYFEKYTLIDYNISPDPEKQKAPQKLNVEEKLSKEVTEETISFPVSSVESALEHEYDLVKLDESFYGPEKGHNILSHPETQSQNSADRNVSKDTKRDVDSKSPGMPLFEAEEGVLSRTQIFPTTIKVIDPEFLEEPPALAFLYKDLYEEAVGEKKKEEETASEGDSVNSEASFPSRNSDTDDGTGIYFEKYILKDDILHDTSLTQKDQGQGLEEKRVGKDDSYQPIAAEGEIWGKFGTICREKSLEEQKGVYGEGESVDHVETVGNVAMQKKAPITEDVRVATQKISYAVPFEDTHHVLERADEAGSHGNEVGNASPEVNLNVPVQVSFPEEEFASGATHVQETSLEEPKILVPPEPSEERLRNSPVQDEYEFTESLHNEVVPQDILSEELSSESTPEDVLSQGKESFEHISENEFASEAEQSTPAEQKELGSERKEEDQLSSEVVTEKAQKELKKSQIDTYCYTCKCPISATDKVFGTHKDHEVSTLDTAISAVKVQLAEFLENLQEKSLRIEAFVSEIESFFNTIEENCSKNEKRLEEQNEEMMKKVLAQYDEKAQSFEEVKKKKMEFLHEQMVHFLQSMDTAKDTLETIVREAEELDEAVFLTSFEEINERLLSAMESTASLEKMPAAFSLFEHYDDSSARSDQMLKQVAVPQPPRLEPQEPNSATSTTIAVYWSMNKEDVIDSFQVYCMEEPQDDQEVNELVEEYRLTVKESYCIFEDLEPDRCYQVWVMAVNFTGCSLPSERAIFRTAPSTPVIRAEDCTVCWNTATIRWRPTTPEATETYTLEYCRQHSPEGEGLRSFSGIKGLQLKVNLQPNDNYFFYVRAINAFGTSEQSEAALISTRGTRFLLLRETAHPALHISSSGTVISFGERRRLTEIPSVLGEELPSCGQHYWETTVTDCPAYRLGICSSSAVQAGALGQGETSWYMHCSEPQRYTFFYSGIVSDVHVTERPARVGILLDYNNQRLIFINAESEQLLFIIRHRFNEGVHPAFALEKPGKCTLHLGIEPPDSVRHK

SEQ ID NO: 11970 - protein, 201 aa, Homo sapiens
  Payload ID: 2368
  Gene Symbol: CTF1
  Gene Name: cardiotrophin 1
  Uniprot ID: Q16619
  ENSP ID: ENSP00000279804
MSRREGSLEDPQTDSSVSLLPHLEAKIRQTHSLAHLLTKYAEQLLQEYVQLQGDPFGLPSFSPPRLPVAGLSAPAPSHAGLPVHERLRLDAAALAALPPLLDAVCRRQAELNPRAPRLLRRLEDAARQARALGAAVEALLAALGAANRGPRAEPPAATASAASATGVFPAKVLGLRVCGLYREWLSRTEGDLGQLLPGGSA

SEQ ID NO: 11971 - protein, 200 aa, Homo sapiens
  Payload ID: 2368
  Gene Symbol: CTF1
  Gene Name: cardiotrophin 1
  Uniprot ID: Q16619
  ENSP ID: ENSP00000378465
MSRREGSLDPQTDSSVSLLPHLEAKIRQTHSLAHLLTKYAEQLLQEYVQLQGDPFGLPSFSPPRLPVAGLSAPAPSHAGLPVHERLRLDAAALAALPPLLDAVCRRQAELNPRAPRLLRRLEDAARQARALGAAVEALLAALGAANRGPRAEPPAATASAASATGVFPAKVLGLRVCGLYREWLSRTEGDLGQLLPGGSA

SEQ ID NO: 11972 - protein, 225 aa, Homo sapiens
  Payload ID: 2369
  Gene Symbol: CLCF1
  Gene Name: cardiotrophin-like cytokine  factor 1
  Uniprot ID: Q9UBD9
  ENSP ID: ENSP00000309338
MDLRAGDSWGMLACLCTVLWHLPAVPALNRTGDPGPGPSIQKTYDLTRYLEHQLRSLAGTYLNYLGPPFNEPDFNPPRLGAETLPRATVDLEVWRSLNDKLRLTQNYEAYSHLLCYLRGLNRQAATAELRRSLAHFCTSLQGLLGSIAGVMAALGYPLPQPLPGTEPTWTPGPAHSDFLQKMDDFWLLKELQTWLWRSAKDFNRLKKKMQPPAAAVTLHLGAHGF

SEQ ID NO: 11973 - protein, 215 aa, Homo sapiens
  Payload ID: 2369
  Gene Symbol: CLCF1
  Gene Name: cardiotrophin-like cytokine  factor 1
  Uniprot ID: Q9UBD9
  ENSP ID: ENSP00000434122
MLACLCTVLWHLPAVPALNRTGDPGPGPSIQKTYDLTRYLEHQLRSLAGTYLNYLGPPFNEPDFNPPRLGAETLPRATVDLEVWRSLNDKLRLTQNYEAYSHLLCYLRGLNRQAATAELRRSLAHFCTSLQGLLGSIAGVMAALGYPLPQPLPGTEPTWTPGPAHSDFLQKMDDFWLLKELQTWLWRSAKDFNRLKKKMQPPAAAVTLHLGAHGF

SEQ ID NO: 11974 - protein, 626 aa, Homo sapiens
  Payload ID: 2370
  Gene Symbol: CRAT
  Gene Name: carnitine O-acetyltransferase
  Uniprot ID: P43155
  ENSP ID: ENSP00000315013
MLAFAARTVVKPLGFLKPFSLMKASSRFKAHQDALPRLPVPPLQQSLDHYLKALQPIVSEEEWAHTKQLVDEFQASGGVGERLQKGLERRARKTENWLSEWWLKTAYLQYRQPVVIYSSPGVMLPKQDFVDLQGQLRFAAKLIEGVLDFKVMIDNETLPVEYLGGKPLCMNQYYQILSSCRVPGPKQDTVSNFSKTKKPPTHITVVHNYQFFELDVYHSDGTPLTADQIFVQLEKIWNSSLQTNKEPVGILTSNHRNSWAKAYNTLIKDKVNRDSVRSIQKSIFTVCLDATMPRVSEDVYRSHVAGQMLHGGGSRLNSGNRWFDKTLQFIVAEDGSCGLVYEHAAAEGPPIVTLLDYVIEYTKKPELVRSPLVPLPMPKKLRFNITPEIKSDIEKAKQNLSIMIQDLDITVMVFHHFGKDFPKSEKLSPDAFIQMALQLAYYRIYGQACATYESASLRMFHLGRTDTIRSASMDSLTFVKAMDDSSVTEHQKVELLRKAVQAHRGYTDRAIRGEAFDRHLLGLKLQAIEDLVSMPDIFMDTSYAIAMHFHLSTSQVPAKTDCVMFFGPVVPDGYGVCYNPMEAHINFSLSAYNSCAETNAARLAHYLEKALLDMRALLQSHPRAKL

SEQ ID NO: 11975 - protein, 161 aa, Homo sapiens
  Payload ID: 2370
  Gene Symbol: CRAT
  Gene Name: carnitine O-acetyltransferase
  ENSP ID: ENSP00000377045
MLAFAARTVVKPLGFLKPFSLMKASSRFKAHQDALPRLPVPPLQQSLDHYLKALQPIVSEEEWAHTKQLVDEFQASGGVGERLQKGLERRARKTENWVSEGILTVTCCWLHMHSSPVPTALARPFVCCPEFREHILCVWHLAGCWVIKKDTVTSSLELTFK

SEQ ID NO: 11976 - protein, 98 aa, Homo sapiens
  Payload ID: 2370
  Gene Symbol: CRAT
  Gene Name: carnitine O-acetyltransferase
  ENSP ID: ENSP00000390571
MEEDGQQREKVKPLGFLKPFSLMKASSRFKAHQDALPRLPVPPLQQSLDHYLKALQPIVSEEEWAHTKQLVDEFQASGGVGERLQKGLERRARKTENW

SEQ ID NO: 11977 - protein, 31 aa, Homo sapiens
  Payload ID: 2370
  Gene Symbol: CRAT
  Gene Name: carnitine O-acetyltransferase
  ENSP ID: ENSP00000394420
  MOD_RES (1)..(1): Any amino acid
XRSQGCGVTSAARQSLSSSQVFPHQNDLRRF

SEQ ID NO: 11978 - protein, 201 aa, Homo sapiens
  Payload ID: 2370
  Gene Symbol: CRAT
  Gene Name: carnitine O-acetyltransferase
  ENSP ID: ENSP00000395458
  MOD_RES (1)..(1): Any amino acid
XMIQDLDITVMVFHHFGKDFPKSEKLSPDAFIQMALQLAYYRIYGQACATYESASLRMFHLGRTDTIRSASMDSLTFVKAMDDSSVTEHQKVELLRKAVQAHRGYTDRAIRGEAFDRHLLGLKLQAIEDLVPAKTDCVMFFGPVVPDGYGVCYNPMEAHINFSLSAYNSCAETNAARLAHYLEKALLDMRALLQSHPRAKL

SEQ ID NO: 11979 - protein, 40 aa, Homo sapiens
  Payload ID: 2370
  Gene Symbol: CRAT
  Gene Name: carnitine O-acetyltransferase
  ENSP ID: ENSP00000400367
MLAFAARTVDRSQGCGVTSAARQSLSSSQVFPHQNDLRRF

SEQ ID NO: 11980 - protein, 40 aa, Homo sapiens; identical to SEQ ID NO: 11979
  Payload ID: 2370
  Gene Symbol: CRAT
  Gene Name: carnitine O-acetyltransferase
  ENSP ID: ENSP00000404405

SEQ ID NO: 11981 - protein, 612 aa, Homo sapiens
  Payload ID: 2371
  Gene Symbol: CROT
  Gene Name: carnitine O-octanoyltransferase
  Uniprot ID: Q9UKG9
  ENSP ID: ENSP00000331981
MENQLAKSTEERTFQYQDSLPSLPVPSLEESLKKYLESVKPFANQEEYKKTEEIVQKFQSGIGEKLHQKLLERAKGKRNWLEEWWLNVAYLDVRIPSQLNVNFAGPAAHFEHYWPPKEGTQLERGSITLWHNLNYWQLLRKEKVPVHKVGNTPLDMNQFRMLFSTCKVPGITRDSIMNYFRTESEGRSPNHIVVLCRGRAFVFDVIHEGCLVTPPELLRQLTYIHKKCHSEPDGPGIAALTSEERTRWAKAREYLIGLDPENLALLEKIQSSLLVYSMEDSSPHVTPEDYSEIIAAILIGDPTVRWGDKSYNLISFSNGVFGCNCDHAPFDAMIMVNISYYVDEKIFQNEGRWKGSEKVRDIPLPEELIFIVDEKVLNDINQAKAQYLREASDLQIAAYAFTSFGKKLTKNKMLHPDTFIQLALQLAYYRLHGHPGCCYETAMTRHFYHGRTETMRSCTVEAVRWCQSMQDPSVNLRERQQKMLQAFAKHNKMMKDCSAGKGFDRHLLGLLLIAKEEGLPVPELFTDPLFSKSGGGGNFVLSTSLVGYLRVQGVVVPMVHNGYGFFYHIRDDRFVVACSAWKSCPETDAEKLVQLTFCAFHDMIQLMNSTHL

SEQ ID NO: 11982 - protein, 87 aa, Homo sapiens
  Payload ID: 2371
  Gene Symbol: CROT
  Gene Name: carnitine O-octanoyltransferase
  Uniprot ID: Q9UKG9
  ENSP ID: ENSP00000404867
MENQLAKSTEERTFQYQDSLPSLPVPSLEESLKKYLESVKPFANQEEYKKTEEIVQKFQSGIGEKLHQKLLERAKGKRNWVFVVIIE

SEQ ID NO: 11983 - protein, 574 aa, Homo sapiens
  Payload ID: 2371
  Gene Symbol: CROT
  Gene Name: carnitine O-octanoyltransferase
  ENSP ID: ENSP00000411983
MENQLAKSTEERTFQYQDSLPSLPVPSLEESLKKYLESVKPFANQEEYKKTEEIVQKFQSGIGEKLHQKLLERAKGKRNWLEEWWLNVAYLDVRIPSQLNVNFAGPAAHFEHYWPPKEGTQLERGSITLWHNLNYWQLLRKEKVPVHKVGNTPLDMNQFRMLFSTCKVPGITRDSIMNYFRTESEGRSPNHIVVLCRGRAFVFDVIHEGCLVTPPELLRQLTYIHKKCHSEPDGPGIAALTSEERTRWAKAREYLIGLDPENLALLEKIQSSLLVYSMEDSSPHVTPEDYSEIIAAILIGDPTVRWGDKSYNLISFSNGVFGCNCDHAPFDAMIMVNISYYVDEKIFQNEGRWKGSEKVRDIPLPEELIFIVDEKVLNDINQAKAQYLREASDLQIAAYAFTSFGKKLTKNKMLHPDTFIQLALQLAYYRLHGHPGCCYETAMTRHFYHGRTETMRSCTVEAVRWCQSMQDPSVNLRERQQKMLQAFAKHNKMMKDCSAGKGFDRHLLGLLLIAKEEGLPVPELFTDPLFSKSGGGGNFVLSTSLVGYLRVQGVVVPMVHNGYGFFYHIRDDRC

SEQ ID NO: 11984 - protein, 640 aa, Homo sapiens
  Payload ID: 2371
  Gene Symbol: CROT
  Gene Name: carnitine O-octanoyltransferase
  Uniprot ID: Q9UKG9
  ENSP ID: ENSP00000413575
MENQLAKSTEERTFQYQDSLPSLPVPSLEESLKKYLESVTRTCYQIRGLDPDAKRGFLDLTREGIQVKPFANQEEYKKTEEIVQKFQSGIGEKLHQKLLERAKGKRNWLEEWWLNVAYLDVRIPSQLNVNFAGPAAHFEHYWPPKEGTQLERGSITLWHNLNYWQLLRKEKVPVHKVGNTPLDMNQFRMLFSTCKVPGITRDSIMNYFRTESEGRSPNHIVVLCRGRAFVFDVIHEGCLVTPPELLRQLTYIHKKCHSEPDGPGIAALTSEERTRWAKAREYLIGLDPENLALLEKIQSSLLVYSMEDSSPHVTPEDYSEIIAAILIGDPTVRWGDKSYNLISFSNGVFGCNCDHAPFDAMIMVNISYYVDEKIFQNEGRWKGSEKVRDIPLPEELIFIVDEKVLNDINQAKAQYLREASDLQIAAYAFTSFGKKLTKNKMLHPDTFIQLALQLAYYRLHGHPGCCYETAMTRHFYHGRTETMRSCTVEAVRWCQSMQDPSVNLRERQQKMLQAFAKHNKMMKDCSAGKGFDRHLLGLLLIAKEEGLPVPELFTDPLFSKSGGGGNFVLSTSLVGYLRVQGVVVPMVHNGYGFFYHIRDDRFVVACSAWKSCPETDAEKLVQLTFCAFHDMIQLMNSTHL

SEQ ID NO: 11985 - protein, 773 aa, Homo sapiens
  Payload ID: 2372
  Gene Symbol: CPT1A
  Gene Name: carnitine palmitoyltransferase 1A (liver)
  Uniprot ID: P50416
  ENSP ID: ENSP00000265641
MAEAHQAVAFQFTVTPDGIDLRLSHEALRQIYLSGLHSWKKKFIRFKNGIITGVYPASPSSWLIVVVGVMTTMYAKIDPSLGIIAKINRTLETANCMSSQTKNVVSGVLFGTGLWVALIVTMRYSLKVLLSYHGWMFTEHGKMSRATKIWMGMVKIFSGRKPMLYSFQTSLPRLPVPAVKDTVNRYLQSVRPLMKEEDFKRMTALAQDFAVGLGPRLQWYLKLKSWWATNYVSDWWEEYIYLRGRGPLMVNSNYYAMDLLYILPTHIQAARAGNAIHAILLYRRKLDREEIKPIRLLGSTIPLCSAQWERMFNTSRIPGEETDTIQHMRDSKHIVVYHRGRYFKVWLYHDGRLLKPREMEQQMQRILDNTSEPQPGEARLAALTAGDRVPWARCRQAYFGRGKNKQSLDAVEKAAFFVTLDETEEGYRSEDPDTSMDSYAKSLLHGRCYDRWFDKSFTFVVFKNGKMGLNAEHSWADAPIVAHLWEYVMSIDSLQLGYAEDGHCKGDINPNIPYPTRLQWDIPGECQEVIETSLNTANLLANDVDFHSFPFVAFGKGIIKKCRTSPDAFVQLALQLAHYKDMGKFCLTYEASMTRLFREGRTETVRSCTTESCDFVRAMVDPAQTVEQRLKLFKLASEKHQHMYRLAMTGSGIDRHLFCLYVVSKYLAVESPFLKEVLSEPWRLSTSQTPQQQVELFDLENNPEYVSSGGGFGPVADDGYGVSYILVGENLINFHISSKFSCPETDSHRFGRHLKEAMTDIITLFGLSSNSKK

SEQ ID NO: 11986 - protein, 756 aa, Homo sapiens
  Payload ID: 2372
  Gene Symbol: CPT1A
  Gene Name: carnitine palmitoyltransferase 1A (liver)
  Uniprot ID: P50416
  ENSP ID: ENSP00000365803
MAEAHQAVAFQFTVTPDGIDLRLSHEALRQIYLSGLHSWKKKFIRFKNGIITGVYPASPSSWLIVVVGVMTTMYAKIDPSLGIIAKINRTLETANCMSSQTKNVVSGVLFGTGLWVALIVTMRYSLKVLLSYHGWMFTEHGKMSRATKIWMGMVKIFSGRKPMLYSFQTSLPRLPVPAVKDTVNRYLQSVRPLMKEEDFKRMTALAQDFAVGLGPRLQWYLKLKSWWATNYVSDWWEEYIYLRGRGPLMVNSNYYAMDLLYILPTHIQAARAGNAIHAILLYRRKLDREEIKPIRLLGSTIPLCSAQWERMFNTSRIPGEETDTIQHMRDSKHIVVYHRGRYFKVWLYHDGRLLKPREMEQQMQRILDNTSEPQPGEARLAALTAGDRVPWARCRQAYFGRGKNKQSLDAVEKAAFFVTLDETEEGYRSEDPDTSMDSYAKSLLHGRCYDRWFDKSFTFVVFKNGKMGLNAEHSWADAPIVAHLWEYVMSIDSLQLGYAEDGHCKGDINPNIPYPTRLQWDIPGECQEVIETSLNTANLLANDVDFHSFPFVAFGKGIIKKCRTSPDAFVQLALQLAHYKDMGKFCLTYEASMTRLFREGRTETVRSCTTESCDFVRAMVDPAQTVEQRLKLFKLASEKHQHMYRLAMTGSGIDRHLFCLYVVSKYLAVESPFLKEVLSEPWRLSTSQTPQQQVELFDLENNPEYVSSGGGFGPVADDGYGVSYILVGENLINFHISSKFSCPETGIISQGPSSDT

SEQ ID NO: 11987 - protein, 756 aa, Homo sapiens; identical to SEQ ID NO: 11986
  Payload ID: 2372
  Gene Symbol: CPT1A
  Gene Name: carnitine palmitoyltransferase 1A (liver)
  Uniprot ID: P50416
  ENSP ID: ENSP00000439084

SEQ ID NO: 11988 - protein, 773 aa, Homo sapiens; identical to SEQ ID NO: 11985
  Payload ID: 2372
  Gene Symbol: CPT1A
  Gene Name: carnitine palmitoyltransferase 1A (liver)
  Uniprot ID: P50416
  ENSP ID: ENSP00000446108

SEQ ID NO: 11989 - protein, 78 aa, Homo sapiens
  Payload ID: 2372
  Gene Symbol: CPT1A
  Gene Name: carnitine palmitoyltransferase 1A (liver)
  ENSP ID: ENSP00000454332
MVNSNYYAMDLLYILPTHIQAARAGNAIHAILLYRRKLDREEIKPIRLLGSTIPLCSAQWERMFNTSRIPGEETDDLP

SEQ ID NO: 11990 - protein, 117 aa, Homo sapiens
  Payload ID: 2372
  Gene Symbol: CPT1A
  Gene Name: carnitine palmitoyltransferase 1A (liver)
  ENSP ID: ENSP00000455116
MAEAHQAVAFQFTVTPDGIDLRLSHEALRQIYLSGLHSWKKKFIRFKNGIITGVYPASPSSWLIVVVGVMTTMYAKIDPSLGIIAKINRTLETANCMSSQTKNVVSGVLFGTGLWVA

SEQ ID NO: 11991 - protein, 93 aa, Homo sapiens
  Payload ID: 2372
  Gene Symbol: CPT1A
  Gene Name: carnitine palmitoyltransferase 1A (liver)
  ENSP ID: ENSP00000457663
MAEAHQAVAFQFTVTPDGIDLRLSHEALRQIYLSGLHSWKKKFIRFKNGIITGVYPASPSSWLIVVVGVMTTMYAKIDPSLGIIAKINRTLET

SEQ ID NO: 11992 - protein, 134 aa, Homo sapiens
  Payload ID: 2372
  Gene Symbol: CPT1A
  Gene Name: carnitine palmitoyltransferase 1A (liver)
  ENSP ID: ENSP00000457826
MAEAHQAVAFQFTVTPDGIDLRLSHEALRQIYLSGLHSWKKKFIRFKNGIITGVYPASPSSWLIVVVGVMTTMYAKIDPSLGIIAKINRTLETANCMSSQTKNVVSGVLFGTGLWVALIVTMRYSLKVLLSYHG

SEQ ID NO: 11993 - protein, 772 aa, Homo sapiens
  Payload ID: 2373
  Gene Symbol: CPT1B
  Gene Name: carnitine palmitoyltransferase 1B (muscle)
  Uniprot ID: Q92523
  ENSP ID: ENSP00000312189
MAEAHQAVAFQFTVTPDGVDFRLSREALKHVYLSGINSWKKRLIRIKNGILRGVYPGSPTSWLVVIMATVGSSFCNVDISLGLVSCIQRCLPQGCGPYQTPQTRALLSMAIFSTGVWVTGIFFFRQTLKLLLCYHGWMFEMHGKTSNLTRIWAMCIRLLSSRHPMLYSFQTSLPKLPVPRVSATIQRYLESVRPLLDDEEYYRMELLAKEFQDKTAPRLQKYLVLKSWWASNYVSDWWEEYIYLRGRSPLMVNSNYYVMDLVLIKNTDVQAARLGNIIHAMIMYRRKLDREEIKPVMALGIVPMCSYQMERMFNTTRIPGKDTDVLQHLSDSRHVAVYHKGRFFKLWLYEGARLLKPQDLEMQFQRILDDPSPPQPGEEKLAALTAGGRVEWAQARQAFFSSGKNKAALEAIERAAFFVALDEESYSYDPEDEASLSLYGKALLHGNCYNRWFDKSFTLISFKNGQLGLNAEHAWADAPIIGHLWEFVLGTDSFHLGYTETGHCLGKPNPALAPPTRLQWDIPKQCQAVIESSYQVAKALADDVELYCFQFLPFGKGLIKKCRTSPDAFVQIALQLAHFRDRGKFCLTYEASMTRMFREGRTETVRSCTSESTAFVQAMMEGSHTKADLRDLFQKAAKKHQNMYRLAMTGAGIDRHLFCLYLVSKYLGVSSPFLAEVLSEPWRLSTSQIPQSQIRMFDPEQHPNHLGAGGGFGPVADDGYGVSYMIAGENTIFFHISSKFSSSETNAQRFGNHIRKALLDIADLFQVPKAYS

SEQ ID NO: 11994 - protein, 772 aa, Homo sapiens; identical to SEQ ID NO: 11993
  Payload ID: 2373
  Gene Symbol: CPT1B
  Gene Name: carnitine palmitoyltransferase 1B (muscle)
  Uniprot ID: Q92523
  ENSP ID: ENSP00000353945

SEQ ID NO: 11995 - protein, 772 aa, Homo sapiens; identical to SEQ ID NO: 11993
  Payload ID: 2373
  Gene Symbol: CPT1B
  Gene Name: carnitine palmitoyltransferase 1B (muscle)
  Uniprot ID: Q92523
  ENSP ID: ENSP00000379011

SEQ ID NO: 11996 - protein, 772 aa, Homo sapiens; identical to SEQ ID NO: 11993
  Payload ID: 2373
  Gene Symbol: CPT1B
  Gene Name: carnitine palmitoyltransferase 1B (muscle)
  Uniprot ID: Q92523
  ENSP ID: ENSP00000385486

SEQ ID NO: 11997 - protein, 92 aa, Homo sapiens
  Payload ID: 2373
  Gene Symbol: CPT1B
  Gene Name: carnitine palmitoyltransferase 1B (muscle)
  ENSP ID: ENSP00000396408
LMVNSNYYVMDLVLIKNTDVQAARLGNIIHAMIMYRRKLDREEIKPVMALGIVPMCSYQMERMFNTTRIPGKDTGLLVLREREWKHPAQGLV

SEQ ID NO: 11998 - protein, 125 aa, Homo sapiens
  Payload ID: 2373
  Gene Symbol: CPT1B
  Gene Name: carnitine palmitoyltransferase 1B (muscle)
  ENSP ID: ENSP00000406316
MAEAHQAVAFQFTVTPDGVDFRLSREALKHVYLSGINSWKKRLIRIKNGILRGVYPGSPTSWLVVIMATVGSSFCNVDISLGLVSCIQRCLPQGCGPYQTPQTRALLSMAIFSTGVWVTGIFFFR

SEQ ID NO: 11999 - protein, 738 aa, Homo sapiens
  Payload ID: 2373
  Gene Symbol: CPT1B
  Gene Name: carnitine palmitoyltransferase 1B (muscle)
  Uniprot ID: Q92523
  ENSP ID: ENSP00000409342
MAEAHQAVAFQFTVTPDGVDFRLSREALKHVYLSGINSWKKRLIRIKNGILRGVYPGSPTSWLVVIMATVGSSFCNVDISLGLVSCIQRCLPQGCGPYQTPQTRALLSMAIFSTGVWVTGIFFFRQTLKLLLCYHGWMFEMHGKTSNLTRIWAYLESVRPLLDDEEYYRMELLAKEFQDKTAPRLQKYLVLKSWWASNYVSDWWEEYIYLRGRSPLMVNSNYYVMDLVLIKNTDVQAARLGNIIHAMIMYRRKLDREEIKPVMALGIVPMCSYQMERMFNTTRIPGKDTDVLQHLSDSRHVAVYHKGRFFKLWLYEGARLLKPQDLEMQFQRILDDPSPPQPGEEKLAALTAGGRVEWAQARQAFFSSGKNKAALEAIERAAFFVALDEESYSYDPEDEASLSLYGKALLHGNCYNRWFDKSFTLISFKNGQLGLNAEHAWADAPIIGHLWEFVLGTDSFHLGYTETGHCLGKPNPALAPPTRLQWDIPKQCQAVIESSYQVAKALADDVELYCFQFLPFGKGLIKKCRTSPDAFVQIALQLAHFRDRGKFCLTYEASMTRMFREGRTETVRSCTSESTAFVQAMMEGSHTKADLRDLFQKAAKKHQNMYRLAMTGAGIDRHLFCLYLVSKYLGVSSPFLAEVLSEPWRLSTSQIPQSQIRMFDPEQHPNHLGAGGGFGPVADDGYGVSYMIAGENTIFFHISSKFSSSETNAQRFGNHIRKALLDIADLFQVPKAYS

SEQ ID NO: 12000 - protein, 803 aa, Homo sapiens
  Payload ID: 2374
  Gene Symbol: CPT1C
  Gene Name: carnitine palmitoyltransferase 1C
  Uniprot ID: Q8TCG5
  ENSP ID: ENSP00000319343
MAEAHQAVGFRPSLTSDGAEVELSAPVLQEIYLSGLRSWKRHLSRFWNDFLTGVFPASPLSWLFLFSAIQLAWFLQLDPSLGLMEKIKELLPDWGGQHHGLRGVLAAALFASCLWGALIFTLHVALRLLLSYHGWLLEPHGAMSSPTKTWLALVRIFSGRHPMLFSYQRSLPRQPVPSVQDTVRKYLESVRPILSDEDFDWTAVLAQEFLRLQASLLQWYLRLKSWWASNYVSDWWEEFVYLRSRNPLMVNSNYYMMDFLYVTPTPLQAARAGNAVHALLLYRHRLNRQEIPPTLLMGMRPLCSAQYEKIFNTTRIPGVQKDYIRHLHDSQHVAVFHRGRFFRMGTHSRNSLLSPRALEQQFQRILDDPSPACPHEEHLAALTAAPRGTWAQVRTSLKTQAAEALEAVEGAAFFVSLDAEPAGLTREDPAASLDAYAHALLAGRGHDRWFDKSFTLIVFSNGKLGLSVEHSWADCPISGHMWEFTLATECFQLGYSTDGHCKGHPDPTLPQPQRLQWDLPDQIHSSISLALRGAKILSENVDCHVVPFSLFGKSFIRRCHLSSDSFIQIALQLAHFRDRGQFCLTYESAMTRLFLEGRTETVRSCTREACNFVRAMEDKEKTDPQCLALFRVAVDKHQALLKAAMSGQGVDRHLFALYIVSRFLHLQSPFLTQVHSEQWQLSTSQIPVQQMHLFDVHNYPDYVSSGGGFGPADDHGYGVSYIFMGDGMITFHISSKKSSTKTDSHRLGQHIEDALLDVASLFQAGQHFKRRFRGSGKENSRHRCGFLSRQTGASKASMTSTDF

SEQ ID NO: 12001 - protein, 803 aa, Homo sapiens; identical to SEQ ID NO: 12000
  Payload ID: 2374
  Gene Symbol: CPT1C
  Gene Name: carnitine palmitoyltransferase 1C
  Uniprot ID: Q8TCG5
  ENSP ID: ENSP00000376303

SEQ ID NO: 12002 - protein, 792 aa, Homo sapiens
  Payload ID: 2374
  Gene Symbol: CPT1C
  Gene Name: carnitine palmitoyltransferase 1C
  Uniprot ID: Q8TCG5
  ENSP ID: ENSP00000384465
MAEAHQAVGFRPSLTSDGAEVELSAPVLQEIYLSGLRSWKRHLSRFWNDFLTGVFPASPLSWLFLFSAIQLAWFLQLDPSLGLMEKIKELLPDWGGQHHGLRGVLAAALFASCLWGALIFTLHVALRLLLSYHGWLLEPHGAMSSPTKTWLALVRIFSGRHPMLFSYQRSLPRQPVPSVQDTVRKYLESVRPILSDEDFDWTAVLAQEFLRLQASLLQWYLRLKSWWASNYVSDWWEEFVYLRSRNPLMVNSNYYMMAARAGNAVHALLLYRHRLNRQEIPPTLLMGMRPLCSAQYEKIFNTTRIPGVQKDYIRHLHDSQHVAVFHRGRFFRMGTHSRNSLLSPRALEQQFQRILDDPSPACPHEEHLAALTAAPRGTWAQVRTSLKTQAAEALEAVEGAAFFVSLDAEPAGLTREDPAASLDAYAHALLAGRGHDRWFDKSFTLIVFSNGKLGLSVEHSWADCPISGHMWEFTLATECFQLGYSTDGHCKGHPDPTLPQPQRLQWDLPDQIHSSISLALRGAKILSENVDCHVVPFSLFGKSFIRRCHLSSDSFIQIALQLAHFRDRGQFCLTYESAMTRLFLEGRTETVRSCTREACNFVRAMEDKEKTDPQCLALFRVAVDKHQALLKAAMSGQGVDRHLFALYIVSRFLHLQSPFLTQVHSEQWQLSTSQIPVQQMHLFDVHNYPDYVSSGGGFGPADDHGYGVSYIFMGDGMITFHISSKKSSTKTDSHRLGQHIEDALLDVASLFQAGQHFKRRFRGSGKENSRHRCGFLSRQTGASKASMTSTDF

SEQ ID NO: 12003 - protein, 257 aa, Homo sapiens
  Payload ID: 2374
  Gene Symbol: CPT1C
  Gene Name: carnitine palmitoyltransferase 1C
  ENSP ID: ENSP00000470221
MAEAHQAVGFRPSLTSDGAEVELSAPVLQEIYLSGLRSWKRHLSRFWNDFLTGVFPASPLSWLFLFSAIQLAWFLQLDPSLGLMEKIKELLPDWGGQHHGLRGVLAAALFASCLWGALIFTLHVALRLLLSYHGWLLEPHGAMSSPTKTWLALVRIFSGRHPMLFSYQRSLPRQPVPSVQDTVRKYLESVRPILSDEDFDWTAVLAQEFLRLQASLLQWYLRLKSWWASNYVSDWWEEFVYLRSRNPLMVNSNYYMM

SEQ ID NO: 12004 - protein, 68 aa, Homo sapiens
  Payload ID: 2374
  Gene Symbol: CPT1C
  Gene Name: carnitine palmitoyltransferase 1C
  ENSP ID: ENSP00000470739
MAEAHQAVGFRPSLTSDGAEVELSAPVLQEIYLSGLRSWKRHLSRFWGLTYFVTQAGVQCHHHSSLHP

SEQ ID NO: 12005 - protein, 68 aa, Homo sapiens; identical to SEQ ID NO: 12004
  Payload ID: 2374
  Gene Symbol: CPT1C
  Gene Name: carnitine palmitoyltransferase 1C
  ENSP ID: ENSP00000471160

SEQ ID NO: 12006 - protein, 177 aa, Homo sapiens
  Payload ID: 2374
  Gene Symbol: CPT1C
  Gene Name: carnitine palmitoyltransferase 1C
  ENSP ID: ENSP00000471579
MAEAHQAVGFRPSLTSDGAEVELSAPVLQEIYLSGLRSWKRHLSRFWNDFLTGVFPASPLSWLFLFSAIQLAWFLQLDPSLGLMEKIKELLPDWGGQHHGLRGVLAAALFASCLWGALIFTLHVALRLLLSYHGWLLEPHGAMSSPTKTWLALVRIFSGRHPMLFSYQRSLPRQPVP

SEQ ID NO: 12007 - protein, 81 aa, Homo sapiens
  Payload ID: 2374
  Gene Symbol: CPT1C
  Gene Name: carnitine palmitoyltransferase 1C
  ENSP ID: ENSP00000471841
VSYIFMGDGMITFHISSKKSSTKTDSHRLGQHIEDALLDVASLFQAGQHFKRRFRGSGKENSRHSRQLASPRNKGEIATAG

SEQ ID NO: 12008 - protein, 130 aa, Homo sapiens
  Payload ID: 2374
  Gene Symbol: CPT1C
  Gene Name: carnitine palmitoyltransferase 1C
  ENSP ID: ENSP00000472453
MAEAHQAVGFRPSLTSDGAEVELSAPVLQEIYLSGLRSWKRHLSRFWNDFLTGVFPASPLSWLFLFSAIQLAWFLQLDPSLGLMEKIKELLPDWPWSASSLAATRCCSVTSAPCHASPCPLCRTPCASTW

SEQ ID NO: 12009 - protein, 336 aa, Homo sapiens
  Payload ID: 2374
  Gene Symbol: CPT1C
  Gene Name: carnitine palmitoyltransferase 1C
  ENSP ID: ENSP00000472579
LAALTAAPRGTWAQVRTSLKTQAAEALEAVEGAAFFVSLDAEPAGLTREDPAASLDAYAHALLAGRGHDRWFDKSFTLIVFSNGKLGLSVEHSWADCPISGHMWEFTLATECFQLGYSTDGHCKGHPDPTLPQPQRLQWDLPDQIHSSISLALRGAKILSENVDCHVVPFSLFGKSFIRRCHLSSDSFIQIALQLAHFRDRGQFCLTYESAMTRLFLEGRTETVRSCTREACNFVRAMEDKEKTADDHGYGVSYIFMGDGMITFHISSKKSSTKTDSHRLGQHIEDALLDVASLFQAGQHFKRRFRGSGKENSRHRCGFLSRQTGASKASMTSTDF

SEQ ID NO: 12010 - protein, 68 aa, Homo sapiens; identical to SEQ ID NO: 12004
  Payload ID: 2374
  Gene Symbol: CPT1C
  Gene Name: carnitine palmitoyltransferase 1C
  ENSP ID: ENSP00000472742

SEQ ID NO: 12011 - protein, 95 aa, Homo sapiens
  Payload ID: 2374
  Gene Symbol: CPT1C
  Gene Name: carnitine palmitoyltransferase 1C
  ENSP ID: ENSP00000472828
MAEAHQAVGFRPSLTSDGAEVELSAPVLQEIYLSGLRSWKRHLSRFWNDFLTGVFPASPLSWLFLFSAIQLAWFLQLDPSLGLMEKIKELLPDWG

SEQ ID NO: 12012 - protein, 803 aa, Homo sapiens; identical to SEQ ID NO: 12000
  Payload ID: 2374
  Gene Symbol: CPT1C
  Gene Name: carnitine palmitoyltransferase 1C
  Uniprot ID: Q8TCG5
  ENSP ID: ENSP00000473028

SEQ ID NO: 12013 - protein, 72 aa, Homo sapiens
  Payload ID: 2374
  Gene Symbol: CPT1C
  Gene Name: carnitine palmitoyltransferase 1C
  ENSP ID: ENSP00000473082
MAEAHQAVGFRPSLTSDGAEVELSAPVLQEIYLSGLRSWKRHLSRFWCHPACLVPPAGSFLRTDGEDQRVAA

SEQ ID NO: 12014 - protein, 658 aa, Homo sapiens
  Payload ID: 2375
  Gene Symbol: CPT2
  Gene Name: carnitine palmitoyltransferase 2
  Uniprot ID: P23786
  ENSP ID: ENSP00000360541
MVPRLLLRAWPRGPAVGPGAPSRPLSAGSGPGQYLQRSIVPTMHYQDSLPRLPIPKLEDTIRRYLSAQKPLLNDGQFRKTEQFCKSFENGIGKELHEQLVALDKQNKHTSYISGPWFDMYLSARDSVVLNFNPFMAFNPDPKSEYNDQLTRATNMTVSAIRFLKTLRAGLLEPEVFHLNPAKSDTITFKRLIRFVPSSLSWYGAYLVNAYPLDMSQYFRLFNSTRLPKPSRDELFTDDKARHLLVLRKGNFYIFDVLDQDGNIVSPSEIQAHLKYILSDSSPAPEFPLAYLTSENRDIWAELRQKLMSSGNEESLRKVDSAVFCLCLDDFPIKDLVHLSHNMLHGDGTNRWFDKSFNLIIAKDGSTAVHFEHSWGDGVAVLRFFNEVFKDSTQTPAVTPQSQPATTDSTVTVQKLNFELTDALKTGITAAKEKFDATMKTLTIDCVQFQRGGKEFLKKQKLSPDAVAQLAFQMAFLRQYGQTVATYESCSTAAFKHGRTETIRPASVYTKRCSEAFVREPSRHSAGELQQMMVECSKYHGQLTKEAAMGQGFDRHLFALRHLAAAKGIILPELYLDPAYGQINHNVLSTSTLSSPAVNLGGFAPVVSDGFGVGYAVHDNWIGCNVSSYPGRNAREFLQCVEKALEDMFDALEGKSIKS

SEQ ID NO: 12015 - protein, 507 aa, Homo sapiens
  Payload ID: 2376
  Gene Symbol: CNDP1
  Gene Name: carnosine dipeptidase 1 (metallopeptidase M20 family)
  Uniprot ID: Q96KN2
  ENSP ID: ENSP00000351682
MDPKLGRMAASLLAVLLLLLERGMFSSPSPPPALLEKVFQYIDLHQDEFVQTLKEWVAIESDSVQPVPRFRQELFRMMAVAADTLQRLGARVASVDMGPQQLPDGQSLPIPPVILAELGSDPTKGTVCFYGHLDVQPADRGDGWLTDPYVLTEVDGKLYGRGATDNKGPVLAWINAVSAFRALEQDLPVNIKFIIEGMEEAGSVALEELVEKEKDRFFSGVDYIVISDNLWISQRKPAITYGTRGNSYFMVEVKCRDQDFHSGTFGGILHEPMADLVALLGSLVDSSGHILVPGIYDEVVPLTEEEINTYKAIHLDLEEYRNSSRVEKFLFDTKEEILMHLWRYPSLSIHGIEGAFDEPGTKTVIPGRVIGKFSIRLVPHMNVSAVEKQVTRHLEDVFSKRNSSNKMVVSMTLGLHPWIANIDDTQYLAAKRAIRTVFGTEPDMIRDGSTIPIAKMFQEIVHKSVVLIPLGAVDDGEHSQNEKINRWNYIEGTKLFAAFFLEMAQLH

SEQ ID NO: 12016 - protein, 464 aa, Homo sapiens
  Payload ID: 2376
  Gene Symbol: CNDP1
  Gene Name: carnosine dipeptidase 1 (metallopeptidase M20 family)
  ENSP ID: ENSP00000462096
MDPKLGRMTLKEWVAIESDSVQPVPRFRQELFRMMAVAADTLQRLGARVASVDMGPQQLPDGQSLPIPPVILAELGSDPTKGTVCFYGHLDVQPADRGDGWLTDPYVLTEVDGKLYGRGATDNKGPVLAWINAVSAFRALEQDLPVNIKFIIEGMEEAGSVALEELVEKEKDRFFSGVDYIVISDNLWISQRKPAITYGTRGNSYFMVEVKCRDQDFHSGTFGGILHEPMADLVALLGSLVDSSGHILVPGIYDEVVPLTEEEINTYKAIHLDLEEYRNSSRVEKFLFDTKEEILMHLWRYPSLSIHGIEGAFDEPGTKTVIPGRVIGKFSIRLVPHMNVSAVEKQVTRHLEDVFSKRNSSNKMVVSMTLGLHPWIANIDDTQYLAAKRAIRTVFGTEPDMIRDGSTIPIAKMFQEIVHKSVVLIPLGAVDDGEHSQNEKINRWNYIEGTKLFAAFFLEMAQLH

SEQ ID NO: 12017 - protein, 38 aa, Homo sapiens
  Payload ID: 2376
  Gene Symbol: CNDP1
  Gene Name: carnosine dipeptidase 1 (metallopeptidase M20 family)
  ENSP ID: ENSP00000463807
  MOD_RES (1)..(1): Any amino acid
XADRGDGWLTDPYVLTEGNFMDEERPTTKALSWLGSML

SEQ ID NO: 12018 - protein, 153 aa, Homo sapiens
  Payload ID: 2377
  Gene Symbol: CARNMT1
  Gene Name: carnosine N-methyltransferase 1
  ENSP ID: ENSP00000366026
MQRRRRPPPPTSRLPEGCGGGGGGSEEVEVQFSAGRWGSAAAVSAAAAAATRSTEEEEERLEREHFWKIINAFRYYGTSMHERVNRTERQFRSLPANQQKLLPQFLLHLDKIRKCIDHNQEILLTIVNDCIHMFENKEYGEDVCESLFYFCLF

SEQ ID NO: 12019 - protein, 409 aa, Homo sapiens
  Payload ID: 2377
  Gene Symbol: CARNMT1
  Gene Name: carnosine N-methyltransferase 1
  Uniprot ID: Q8N4J0
  ENSP ID: ENSP00000366030
MQRRRRPPPPTSRLPEGCGGGGGGSEEVEVQFSAGRWGSAAAVSAAAAAATRSTEEEEERLEREHFWKIINAFRYYGTSMHERVNRTERQFRSLPANQQKLLPQFLLHLDKIRKCIDHNQEILLTIVNDCIHMFENKEYGEDGNGKIMPASTFDMDKLKSTLKQFVRDWSETGKAERDACYQPIIKEILKNFPKERWDPSKVNILVPGAGLGRLAWEIAMLGYACQGNEWSFFMLFSSNFVLNRCSEINKYKLYPWIHQFSNNRRSADQIRPIFFPDVDPHSLPPGSNFSMTAGDFQEIYSECNTWDCIATCFFIDTAHNVIDYIDTIWKILKPGGIWINLGPLLYHFENLANELSIELSYEDIKNVVLQYGFKVEVEKESVLSTYTVNDLSMMKYYYECVLFVVRKPQ

SEQ ID NO: 12020 - protein, 238 aa, Homo sapiens
  Payload ID: 2377
  Gene Symbol: CARNMT1
  Gene Name: carnosine N-methyltransferase 1
  ENSP ID: ENSP00000396353
VLRLQLESDRHDLLRSTSMHERVNRTERQFRSLPANQQKLLPQFLLHLDKIRKCIDHNQEILLTIVNDCIHMFENKEYGEDGNGKIMPASTFDMDKLKSTLKQFVRDWSETGKAERDACYQPIIKEILKNFPKERWDPSKVNILVPGAGLGRLAWEIAMLGYACQGNEWSFFMLFSSNFVLNRCSEINKYKLYPWIHQFSNNRRSADQIRPIFFPDVDPHSLPPGSNFSMTAGDFQEI

SEQ ID NO: 12021 - protein, 827 aa, Homo sapiens
  Payload ID: 2378
  Gene Symbol: CARNS1
  Gene Name: carnosine synthase 1
  Uniprot ID: A5YM72
  ENSP ID: ENSP00000308268
MLLCLSPAWLMKVPAPGQPGEAALLVSKAVSFHPGGLTFLDDFVPPRRATYFLAGLGLGPGRGREAAELARDLTCPTGASAELARLLEDRLLTRQLLAQQGGVAVPATLAFTYKPPGLLRGGDASLGLRLVELSGKEGQETLVKEEVEAFLRSEALGDILQVAVKLSGWRWRGRQAWRLHPRAELGAVVDTVLALLEKLEEEESVLVEAVYPPAQLPCSDGPSPGPGLAVRICAVVCRTQGDRPLLSKVVCGVGRGDRPLRHHNSLPRTLEVALAQCGLGEEAQVAAVRQRVKAAAEAALAAVLALEAGLSAEQRGGRRAHTDFLGVDFALTAAGGVLTPVALELNGGLCLEACGALEGLWAAPRLGPAADEAVAAPLVETMLRRSARCLMEGKQLLVVGAGGVSKKFVWEAARDYGLQLHLVESDPNHFASQLVQTFIHFDMTEHRRDEENARLLAELVRARGLKLDGCFSYWDDCLVLTALLCQELGLPCSSPAAMRLAKQKSLTQLHLLHHHGPPWPAPSLHAVPCCPLESEADVERAVHQVPLPGVMKLEFGAGAVGVRLVEDAPQCHEHFSRITRDLQGEADHPGIGLGWGNAMLLMEFVEGTEHDVDLVLFGGRLLAAFVSDNGPTRLPGFTETAACMPTGLAPEQEAQMVQAAFRCCLGCGLLDGVFNVELKLTGAGPRLIEINPRMGGFYLRDWILELYGVDLLLAAVMVACGLRPALPTRPRARGHLVGVMCLVSQHLQALSSTASRETLQALHDRGLLRLNLLEEALVPGEYEEPYCSVACAGPSPTEARLRLLGLCQGLGIDGPSYPVAHFLSHFK

SEQ ID NO: 12022 - protein, 950 aa, Homo sapiens
  Payload ID: 2378
  Gene Symbol: CARNS1
  Gene Name: carnosine synthase 1
  Uniprot ID: A5YM72
  ENSP ID: ENSP00000389009
MLSLDPSGPEWDCPLGSKDLEEEGPWGGGSGLPPTGCFPGSWRQDVGLDCKGSPEGAEARAWTVYYYSLLQSCLQQAGLPETQDRGQVPRTGCPGAEVTLCVLGSPSTFLPVLLEGGVQSPGNMLLCLSPAWLMKVPAPGQPGEAALLVSKAVSFHPGGLTFLDDFVPPRRATYFLAGLGLGPGRGREAAELARDLTCPTGASAELARLLEDRLLTRQLLAQQGGVAVPATLAFTYKPPGLLRGGDASLGLRLVELSGKEGQETLVKEEVEAFLRSEALGDILQVAVKLSGWRWRGRQAWRLHPRAELGAVVDTVLALLEKLEEEESVLVEAVYPPAQLPCSDGPSPGPGLAVRICAVVCRTQGDRPLLSKVVCGVGRGDRPLRHHNSLPRTLEVALAQCGLGEEAQVAAVRQRVKAAAEAALAAVLALEAGLSAEQRGGRRAHTDFLGVDFALTAAGGVLTPVALELNGGLCLEACGALEGLWAAPRLGPAADEAVAAPLVETMLRRSARCLMEGKQLLVVGAGGVSKKFVWEAARDYGLQLHLVESDPNHFASQLVQTFIHFDMTEHRRDEENARLLAELVRARGLKLDGCFSYWDDCLVLTALLCQELGLPCSSPAAMRLAKQKSLTQLHLLHHHGPPWPAPSLHAVPCCPLESEADVERAVHQVPLPGVMKLEFGAGAVGVRLVEDAPQCHEHFSRITRDLQGEADHPGIGLGWGNAMLLMEFVEGTEHDVDLVLFGGRLLAAFVSDNGPTRLPGFTETAACMPTGLAPEQEAQMVQAAFRCCLGCGLLDGVFNVELKLTGAGPRLIEINPRMGGFYLRDWILELYGVDLLLAAVMVACGLRPALPTRPRARGHLVGVMCLVSQHLQALSSTASRETLQALHDRGLLRLNLLEEALVPGEYEEPYCSVACAGPSPTEARLRLLGLCQGLGIDGPSYPVAHFLSHFK

SEQ ID NO: 12023 - protein, 924 aa, Homo sapiens
  Payload ID: 2378
  Gene Symbol: CARNS1
  Gene Name: carnosine synthase 1
  Uniprot ID: A5YM72
  ENSP ID: ENSP00000431670
MLSLDPSGPEWDCPLGSKDLEEEGPWGGGSGLPPTGCFPGSWRQDVGLDCKGSPEGAEARAWTVYYYSLLQSCLQQAGLPETQDRGQVPRTGCPGAEVTLCVLGSPSTFLPVLLEGGVQSPGNMLLCLSPAWLMKVPAPGQPGEAALLVSKAVSFHPGGLTFLDDFVPPRRATYFLAGLGLGPGRGREAAELARDLTCPTGASAELARLLEDRLLTRQLLAQQGGVAVPATLAFTYKPPGLLRGGDASLGLRLVELSGKEGQETLVKEEVEAFLRSEALGDILQVAVKLSGWRWRGRQAWRLHPRAELGAVVDTVLALLEKLEEEESVLVEAVYPPAQLPCSDGPSPGPGLAVRICAVVCRTQGDRPLLSKVVCGVGRGDRPLRHHNSLPRTLEAALAAVLALEAGLSAEQRGGRRAHTDFLGVDFALTAAGGVLTPVALELNGGLCLEACGALEGLWAAPRLGPAADEAVAAPLVETMLRRSARCLMEGKQLLVVGAGGVSKKFVWEAARDYGLQLHLVESDPNHFASQLVQTFIHFDMTEHRRDEENARLLAELVRARGLKLDGCFSYWDDCLVLTALLCQELGLPCSSPAAMRLAKQKSLTQLHLLHHHGPPWPAPSLHAVPCCPLESEADVERAVHQVPLPGVMKLEFGAGAVGVRLVEDAPQCHEHFSRITRDLQGEADHPGIGLGWGNAMLLMEFVEGTEHDVDLVLFGGRLLAAFVSDNGPTRLPGFTETAACMPTGLAPEQEAQMVQAAFRCCLGCGLLDGVFNVELKLTGAGPRLIEINPRMGGFYLRDWILELYGVDLLLAAVMVACGLRPALPTRPRARGHLVGVMCLVSQHLQALSSTASRETLQALHDRGLLRLNLLEEALVPGEYEEPYCSVACAGPSPTEARLRLLGLCQGLGIDGPSYPVAHFLSHFK

SEQ ID NO: 12024 - protein, 116 aa, Homo sapiens
  Payload ID: 2379
  Gene Symbol: CARTPT
  Gene Name: CART prepropeptide
  Uniprot ID: Q16568
  ENSP ID: ENSP00000296777
MESSRVRLLPLLGAALLLMLPLLGTRAQEDAELQPRALDIYSAVDDASHEKELIEALQEVLKKLKSKRVPIYEKKYGQVPMCDAGEQCAVRKGARIGKLCDCPRGTSCNSFLLKCL

SEQ ID NO: 12025 - protein, 637 aa, Homo sapiens
  Payload ID: 2380
  Gene Symbol: CRTAC1
  Gene Name: cartilage acidic protein 1
  ENSP ID: ENSP00000310810
MSRMLPFLLLLWFLPITEGSQRAEPMFTAVTNSVLPPDYDSNPTQLNYGVAVTDVDHDGDFEIVVAGYNGPNLVLKYDRAQKRLVNIAVDERSSPYYALRDRQGNAIGVTACDIDGDGREEIYFLNTNNAFSGVATYTDKLFKFRNNRWEDILSDEVNVARGVASLFAGRSVACVDRKGSGRYSIYIANYAYGNVGPDALIEMDPEASDLSRGILALRDVAAEAGVSKYTGGRGVSVGPILSSSASDIFCDNENGPNFLFHNRGDGTFVDAAASAGVDDPHQHGRGVALADFNRDGKVDIVYGNWNGPHRLYLQMSTHGKVRFRDIASPKFSMPSPVRTVITADFDNDQELEIFFNNIAYRSSSANRLFRVIRREHGDPLIEELNPGDALEPEGRGTGGVVTDFDGDGMLDLILSHGESMAQPLSVFRGNQGFNNNWLRVVPRTRFGAFARGAKVVLYTKKSGAHLRIIDGGSGYLCEMEPVAHFGLGKDEASSVEVTWPDGKMVSRNVASGEMNSVLEILYPRDEDTLQDPAPLECGQGFSQQENGHCMDTNECIQFPFVCPRDKPVCVNTYGSYRCRTNKKCSRGYEPNEDGTACVAQVAFLGGYSSAASRISEPLSRASYLSLGLGLCLQLYAL

SEQ ID NO: 12026 - protein, 645 aa, Homo sapiens
  Payload ID: 2380
  Gene Symbol: CRTAC1
  Gene Name: cartilage acidic protein 1
  Uniprot ID: Q9NQ79
  ENSP ID: ENSP00000359623
MAPSADPGMSRMLPFLLLLWFLPITEGSQRAEPMFTAVTNSVLPPDYDSNPTQLNYGVAVTDVDHDGDFEIVVAGYNGPNLVLKYDRAQKRLVNIAVDERSSPYYALRDRQGNAIGVTACDIDGDGREEIYFLNTNNAFSGVATYTDKLFKFRNNRWEDILSDEVNVARGVASLFAGRSVACVDRKGSGRYSIYIANYAYGNVGPDALIEMDPEASDLSRGILALRDVAAEAGVSKYTGGRGVSVGPILSSSASDIFCDNENGPNFLFHNRGDGTFVDAAASAGVDDPHQHGRGVALADFNRDGKVDIVYGNWNGPHRLYLQMSTHGKVRFRDIASPKFSMPSPVRTVITADFDNDQELEIFFNNIAYRSSSANRLFRVIRREHGDPLIEELNPGDALEPEGRGTGGVVTDFDGDGMLDLILSHGESMAQPLSVFRGNQGFNNNWLRVVPRTRFGAFARGAKVVLYTKKSGAHLRIIDGGSGYLCEMEPVAHFGLGKDEASSVEVTWPDGKMVSRNVASGEMNSVLEILYPRDEDTLQDPAPLECGQGFSQQENGHCMDTNECIQFPFVCPRDKPVCVNTYGSYRCRTNKKCSRGYEPNEDGTACVAQVAFLGGYSSAASRISEPLSRASYLSLGLGLCLQLYAL

SEQ ID NO: 12027 - protein, 661 aa, Homo sapiens
  Payload ID: 2380
  Gene Symbol: CRTAC1
  Gene Name: cartilage acidic protein 1
  Uniprot ID: Q9NQ79
  ENSP ID: ENSP00000359629
MAPSADPGMSRMLPFLLLLWFLPITEGSQRAEPMFTAVTNSVLPPDYDSNPTQLNYGVAVTDVDHDGDFEIVVAGYNGPNLVLKYDRAQKRLVNIAVDERSSPYYALRDRQGNAIGVTACDIDGDGREEIYFLNTNNAFSGVATYTDKLFKFRNNRWEDILSDEVNVARGVASLFAGRSVACVDRKGSGRYSIYIANYAYGNVGPDALIEMDPEASDLSRGILALRDVAAEAGVSKYTGGRGVSVGPILSSSASDIFCDNENGPNFLFHNRGDGTFVDAAASAGVDDPHQHGRGVALADFNRDGKVDIVYGNWNGPHRLYLQMSTHGKVRFRDIASPKFSMPSPVRTVITADFDNDQELEIFFNNIAYRSSSANRLFRVIRREHGDPLIEELNPGDALEPEGRGTGGVVTDFDGDGMLDLILSHGESMAQPLSVFRGNQGFNNNWLRVVPRTRFGAFARGAKVVLYTKKSGAHLRIIDGGSGYLCEMEPVAHFGLGKDEASSVEVTWPDGKMVSRNVASGEMNSVLEILYPRDEDTLQDPAPLECGQGFSQQENGHCMDTNECIQFPFVCPRDKPVCVNTYGSYRCRTNKKCSRGYEPNEDGTACVGTLGQSPGPRPTTPTAAAATAAAAAAAGAATAAPVLVDGDLNLGSVVKESCEPSC

SEQ ID NO: 12028 - protein, 79 aa, Homo sapiens
  Payload ID: 2380
  Gene Symbol: CRTAC1
  Gene Name: cartilage acidic protein 1
  ENSP ID: ENSP00000404549
  MOD_RES (1)..(1): Any amino acid
XDEDTLQDPAPLETPMNASSSHSCALETSPYVSTPMEATGAGPTRSAVGATSPTRMAQPAWKEPCYLVSAISLENRMLL

SEQ ID NO: 12029 - protein, 524 aa, Homo sapiens
  Payload ID: 2380
  Gene Symbol: CRTAC1
  Gene Name: cartilage acidic protein 1
  ENSP ID: ENSP00000408445
YALRDRQGNAIGVTACDIDGDGREEIYFLNTNNAFSGVATYTDKLFKFRNNRWEDILSDEVNVARGVASLFAGRSVACVDRKGSGRYSIYIANYAYGNVGPDALIEMDPEASDLSRGILALRDVAAEAGVSKYTGGRGVSVGPILSSSASDIFCDNENGPNFLFHNRGDGTFVDAAASAGVDDPHQHGRGVALADFNRDGKVDIVYGNWNGPHRLYLQMSTHGKVRFRDIASPKFSMPSPVRTVITADFDNDQELEIFFNNIAYRSSSANRLFRVIRREHGDPLIEELNPGDALEPEGRGTGGVVTDFDGDGMLDLILSHGESMAQPLSVFRGNQGFNNNWLRVVPRTRFGAFARGAKVVLYTKKSGAHLRIIDGGSGYLCEMEPVAHFGLGKDEASSVEVTWPDGKMVSRNVASGEMNSVLEILYPRDEDTLQDPAPLETPMNASSSHSCALETSPYVSTPMEATGAGPTRSAVGATSPTRMAQPAWGLSASHRAPAPPPPPLLLPLPLLLPLLELPLLHRSS

SEQ ID NO: 12030 - protein, 401 aa, Homo sapiens
  Payload ID: 2381
  Gene Symbol: CRTAP
  Gene Name: cartilage associated protein
  Uniprot ID: O75718
  ENSP ID: ENSP00000323696
MEPGRRGAAALLALLCVACALRAGRAQYERYSFRSFPRDELMPLESAYRHALDKYSGEHWAESVGYLEISLRLHRLLRDSEAFCHRNCSAAPQPEPAAGLASYPELRLFGGLLRRAHCLKRCKQGLPAFRQSQPSREVLADFQRREPYKFLQFAYFKANNLPKAIAAAHTFLLKHPDDEMMKRNMAYYKSLPGAEDYIKDLETKSYESLFIRAVRAYNGENWRTSITDMELALPDFFKAFYECLAACEGSREIKDFKDFYLSIADHYVEVLECKIQCEENLTPVIGGYPVEKFVATMYHYLQFAYYKLNDLKNAAPCAVSYLLFDQNDKVMQQNLVYYQYHRDTWGLSDEHFQPRPEAVQFFNVTTLQKELYDFAKENIMDDDEGEVVEYVDDLLELEETS

SEQ ID NO: 12031 - protein, 358 aa, Homo sapiens
  Payload ID: 2381
  Gene Symbol: CRTAP
  Gene Name: cartilage associated protein
  ENSP ID: ENSP00000409997
MEPGRRGAAALLALLCVACALRAGRAQYERYSFRSFPRDELMPLESAYRHALDKYSGEHWAESVGYLEISLRLHRLLRDSEAFCHRNCSAAPQPEPAAGLASYPELRLFGGLLRRAHCLKRCKQGLPAFRQSQPSREVLADFQRREPYKFLQFAYFKANNLPKAIAAAHTFLLKHPDDEMMKRNMAYYKSLPGAEDYIKDLETKSYESLFIRAVRAYNGENWRTSITDMELALPDFFKAFYECLAACEGSREIKDFKDFYLSIAVNDLKNAAPCAVSYLLFDQNDKVMQQNLVYYQYHRDTWGLSDEHFQPRPEAVQFFNVTTLQKELYDFAKENIMDDDEGEVVEYVDDLLELEETS

SEQ ID NO: 12032 - protein, 1156 aa, Homo sapiens
  Payload ID: 2382
  Gene Symbol: CILP2
  Gene Name: cartilage intermediate layer protein 2
  Uniprot ID: Q8IUL8
  ENSP ID: ENSP00000291495
MASLLPLLCLCVVAAHLAGARDATPTEEPMATALGLERRSVYTGQPSPALEDWEEASEWTSWFNVDHPGGDGDFESLAAIRFYYGPARVCPRPLALEARTTDWALPSAVGERVHLNPTRGFWCLNREQPRGRRCSNYHVRFRCPLEASWGAWGPWGPCSGSCGPGRRLRRRHCPSPAGDACPGRPLEAQKCVRPRCPGCSLDTCECPDHILLGSVVTPSGQPLLGARVSLRDQPGTVATSDAHGTFRVPGVCADSRANIRAQMDGFSAGEAQAQANGSISVVTIILDKLEKPYLVKHPESRVREAGQNVTFCCKASGTPMPKKYSWFHNGTLLDRRAHGYGAHLELRGLRPDQAGIYHCKAWNEAGAVRSGTARLTVLAPGQPACDPRPREYLIKLPEDCGQPGSGPAYLDVGLCPDTRCPSLAGSSPRCGDASSRCCSVRRLERREIHCPGYVLPVKVVAECGCQKCLPPRGLVRGRVVAADSGEPLRFARILLGQEPIGFTAYQGDFTIEVPPSTQRLVVTFVDPSGEFMDAVRVLPFDPRGAGVYHEVKAMRKKAPVILHTSQSNTIPLGELEDEAPLGELVLPSGAFRRADGKPYSGPVEARVTFVDPRDLTSAASAPSDLRFVDSDGELAPLRTYGMFSVDLRAPGSAEQLQVGPVAVRVAASQIHMPGHVEALKLWSLNPETGLWEEESGFRREGSSGPRVRREERVFLVGNVEIRERRLFNLDVPERRRCFVKVRAYANDKFTPSEQVEGVVVTLVNLEPAPGFSANPRAWGRFDSAVTGPNGACLPAFCDADRPDAYTALVTATLGGEELEPAPSLPRPLPATVGVTQPYLDRLGYRRTDHDDPAFKRNGFRINLAKPRPGDPAEANGPVYPWRSLRECQGAPVTASHFRFARVEADKYEYNVVPFREGTPASWTGDLLAWWPNPQEFRACFLKVKIQGPQEYMVRSHNAGGSHPRTRGQLYGLRDARSVRDPERPGTSAACVEFKCSGMLFDQRQVDRTLVTIMPQGSCRRVAVNGLLRDYLTRHPPPVPAEDPAAFSMLAPLDPLGHNYGVYTVTDQSPRLAKEIAIGRCFDGSSDGFSREMKADAGTAVTFQCREPPAGRPSLFQRLLESPATALGDIRREMSEAAQAQARASGPLRTRRGRVRQ

SEQ ID NO: 12033 - protein, 1162 aa, Homo sapiens
  Payload ID: 2382
  Gene Symbol: CILP2
  Gene Name: cartilage intermediate layer protein 2
  ENSP ID: ENSP00000467413
MASLLPLLCLCVVAAHLAGARDATPTEEPMATALGLERRSVYTGQPSPALEDWEARAVPAEASEWTSWFNVDHPGGDGDFESLAAIRFYYGPARVCPRPLALEARTTDWALPSAVGERVHLNPTRGFWCLNREQPRGRRCSNYHVRFRCPLEASWGAWGPWGPCSGSCGPGRRLRRRHCPSPAGDACPGRPLEAQKCVRPRCPGCSLDTCECPDHILLGSVVTPSGQPLLGARVSLRDQPGTVATSDAHGTFRVPGVCADSRANIRAQMDGFSAGEAQAQANGSISVVTIILDKLEKPYLVKHPESRVREAGQNVTFCCKASGTPMPKKYSWFHNGTLLDRRAHGYGAHLELRGLRPDQAGIYHCKAWNEAGAVRSGTARLTVLAPGQPACDPRPREYLIKLPEDCGQPGSGPAYLDVGLCPDTRCPSLAGSSPRCGDASSRCCSVRRLERREIHCPGYVLPVKVVAECGCQKCLPPRGLVRGRVVAADSGEPLRFARILLGQEPIGFTAYQGDFTIEVPPSTQRLVVTFVDPSGEFMDAVRVLPFDPRGAGVYHEVKAMRKKAPVILHTSQSNTIPLGELEDEAPLGELVLPSGAFRRADGKPYSGPVEARVTFVDPRDLTSAASAPSDLRFVDSDGELAPLRTYGMFSVDLRAPGSAEQLQVGPVAVRVAASQIHMPGHVEALKLWSLNPETGLWEEESGFRREGSSGPRVRREERVFLVGNVEIRERRLFNLDVPERRRCFVKVRAYANDKFTPSEQVEGVVVTLVNLEPAPGFSANPRAWGRFDSAVTGPNGACLPAFCDADRPDAYTALVTATLGGEELEPAPSLPRPLPATVGVTQPYLDRLGYRRTDHDDPAFKRNGFRINLAKPRPGDPAEANGPVYPWRSLRECQGAPVTASHFRFARVEADKYEYNVVPFREGTPASWTGDLLAWWPNPQEFRACFLKVKIQGPQEYMVRSHNAGGSHPRTRGQLYGLRDARSVRDPERPGTSAACVEFKCSGMLFDQRQVDRTLVTIMPQGSCRRVAVNGLLRDYLTRHPPPVPAEDPAAFSMLAPLDPLGHNYGVYTVTDQSPRLAKEIAIGRCFDGSSDGFSREMKADAGTAVTFQCREPPAGRPSLFQRLLESPATALGDIRREMSEAAQAQARASGPLRTRRGRVRQ

SEQ ID NO: 12034 - protein, 1184 aa, Homo sapiens
  Payload ID: 2383
  Gene Symbol: CILP
  Gene Name: cartilage intermediate layer protein, nucleotide pyrophosphohydrolase
  Uniprot ID: O75339
  ENSP ID: ENSP00000261883
MVGTKAWVFSFLVLEVTSVLGRQTMLTQSVRRVQPGKKNPSIFAKPADTLESPGEWTTWFNIDYPGGKGDYERLDAIRFYYGDRVCARPLRLEARTTDWTPAGSTGQVVHGSPREGFWCLNREQRPGQNCSNYTVRFLCPPGSLRRDTERIWSPWSPWSKCSAACGQTGVQTRTRICLAEMVSLCSEASEEGQHCMGQDCTACDLTCPMGQVNADCDACMCQDFMLHGAVSLPGGAPASGAAIYLLTKTPKLLTQTDSDGRFRIPGLCPDGKSILKITKVKFAPIVLTMPKTSLKAATIKAEFVRAETPYMVMNPETKARRAGQSVSLCCKATGKPRPDKYFWYHNDTLLDPSLYKHESKLVLRKLQQHQAGEYFCKAQSDAGAVKSKVAQLIVIASDETPCNPVPESYLIRLPHDCFQNATNSFYYDVGRCPVKTCAGQQDNGIRCRDAVQNCCGISKTEEREIQCSGYTLPTKVAKECSCQRCTETRSIVRGRVSAADNGEPMRFGHVYMGNSRVSMTGYKGTFTLHVPQDTERLVLTFVDRLQKFVNTTKVLPFNKKGSAVFHEIKMLRRKKPITLEAMETNIIPLGEVVGEDPMAELEIPSRSFYRQNGEPYIGKVKASVTFLDPRNISTATAAQTDLNFINDEGDTFPLRTYGMFSVDFRDEVTSEPLNAGKVKVHLDSTQVKMPEHISTVKLWSLNPDTGLWEEEGDFKFENQRRNKREDRTFLVGNLEIRERRLFNLDVPESRRCFVKVRAYRSERFLPSEQIQGVVISVINLEPRTGFLSNPRAWGRFDSVITGPNGACVPAFCDDQSPDAYSAYVLASLAGEELQAVESSPKFNPNAIGVPQPYLNKLNYRRTDHEDPRVKKTAFQISMAKPRPNSAEESNGPIYAFENLRACEEAPPSAAHFRFYQIEGDRYDYNTVPFNEDDPMSWTEDYLAWWPKPMEFRACYIKVKIVGPLEVNVRSRNMGGTHRQTVGKLYGIRDVRSTRDRDQPNVSAACLEFKCSGMLYDQDRVDRTLVKVIPQGSCRRASVNPMLHEYLVNHLPLAVNNDTSEYTMLAPLDPLGHNYGIYTVTDQDPRTAKEIALGRCFDGTSDGSSRIMKSNVGVALTFNCVERQVGRQSAFQYLQSTPAQSPAAGTVQGRVPSRRQQRASRGGQRQGGVVASLRFPRVAQQPLIN

SEQ ID NO: 12035 - protein, 757 aa, Homo sapiens
  Payload ID: 2384
  Gene Symbol: COMP
  Gene Name: cartilage oligomeric matrix protein
  Uniprot ID: P49747
  ENSP ID: ENSP00000222271
MVPDTACVLLLTLAALGASGQGQSPLGSDLGPQMLRELQETNAALQDVRELLRQQVREITFLKNTVMECDACGMQQSVRTGLPSVRPLLHCAPGFCFPGVACIQTESGARCGPCPAGFTGNGSHCTDVNECNAHPCFPRVRCINTSPGFRCEACPPGYSGPTHQGVGLAFAKANKQVCTDINECETGQHNCVPNSVCINTRGSFQCGPCQPGFVGDQASGCQRRAQRFCPDGSPSECHEHADCVLERDGSRSCVCAVGWAGNGILCGRDTDLDGFPDEKLRCPERQCRKDNCVTVPNSGQEDVDRDGIGDACDPDADGDGVPNEKDNCPLVRNPDQRNTDEDKWGDACDNCRSQKNDDQKDTDQDGRGDACDDDIDGDRIRNQADNCPRVPNSDQKDSDGDGIGDACDNCPQKSNPDQADVDHDFVGDACDSDQDQDGDGHQDSRDNCPTVPNSAQEDSDHDGQGDACDDDDDNDGVPDSRDNCRLVPNPGQEDADRDGVGDVCQDDFDADKVVDKIDVCPENAEVTLTDFRAFQTVVLDPEGDAQIDPNWVVLNQGREIVQTMNSDPGLAVGYTAFNGVDFEGTFHVNTVTDDDYAGFIFGYQDSSSFYVVMWKQMEQTYWQANPFRAVAEPGIQLKAVKSSTGPGEQLRNALWHTGDTESQVRLLWKDPRNVGWKDKKSYRWFLQHRPQVGYIRVRFYEGPELVADSNVVLDTTMRGGRLGVFCFSQENIIWANLRYRCNDTIPEDYETHQLRQA

SEQ ID NO: 12036 - protein, 704 aa, Homo sapiens
  Payload ID: 2384
  Gene Symbol: COMP
  Gene Name: cartilage oligomeric matrix protein
  Uniprot ID: P49747
  ENSP ID: ENSP00000403792
MVPDTACVLLLTLAALGASGQGQSPLGSDLGPQMLRELQETNAALQDVRELLRQQVREITFLKNTVMECDACGMQQSVRTGLPSVRPLLHCAPGFCFPGVACIQTESGARCGPCPAGFTGNGSHCTDVNECETGQHNCVPNSVCINTRGSFQCGPCQPGFVGDQASGCQRRAQRFCPDGSPSECHEHADCVLERDGSRSCVCAVGWAGNGILCGRDTDLDGFPDEKLRCPERQCRKDNCVTVPNSGQEDVDRDGIGDACDPDADGDGVPNEKDNCPLVRNPDQRNTDEDKWGDACDNCRSQKNDDQKDTDQDGRGDACDDDIDGDRIRNQADNCPRVPNSDQKDSDGDGIGDACDNCPQKSNPDQADVDHDFVGDACDSDQDQDGDGHQDSRDNCPTVPNSAQEDSDHDGQGDACDDDDDNDGVPDSRDNCRLVPNPGQEDADRDGVGDVCQDDFDADKVVDKIDVCPENAEVTLTDFRAFQTVVLDPEGDAQIDPNWVVLNQGREIVQTMNSDPGLAVGYTAFNGVDFEGTFHVNTVTDDDYAGFIFGYQDSSSFYVVMWKQMEQTYWQANPFRAVAEPGIQLKAVKSSTGPGEQLRNALWHTGDTESQVRLLWKDPRNVGWKDKKSYRWFLQHRPQVGYIRVRFYEGPELVADSNVVLDTTMRGGRLGVFCFSQENIIWANLRYRCNDTIPEDYETHQLRQA

SEQ ID NO: 12037 - protein, 724 aa, Homo sapiens
  Payload ID: 2384
  Gene Symbol: COMP
  Gene Name: cartilage oligomeric matrix protein
  ENSP ID: ENSP00000439156
MLRELQETNAALQDVRELLRQQVREITFLKNTVMECDACGMQQSVRTGLPSVRPLLHCAPGFCFPGVACIQTESGARCGPCPAGFTGNGSHCTDVNECNAHPCFPRVRCINTSPGFRCEACPPGYSGPTHQGVGLAFAKANKQVCTDINECETGQHNCVPNSVCINTRGSFQCGPCQPGFVGDQASGCQRRAQRFCPDGSPSECHEHADCVLERDGSRSCVCAVGWAGNGILCGRDTDLDGFPDEKLRCPERQCRKDNCVTVPNSGQEDVDRDGIGDACDPDADGDGVPNEKDNCPLVRNPDQRNTDEDKWGDACDNCRSQKNDDQKDTDQDGRGDACDDDIDGDRIRNQADNCPRVPNSDQKDSDGDGIGDACDNCPQKSNPDQADVDHDFVGDACDSDQDQDGDGHQDSRDNCPTVPNSAQEDSDHDGQGDACDDDDDNDGVPDSRDNCRLVPNPGQEDADRDGVGDVCQDDFDADKVVDKIDVCPENAEVTLTDFRAFQTVVLDPEGDAQIDPNWVVLNQGREIVQTMNSDPGLAVGYTAFNGVDFEGTFHVNTVTDDDYAGFIFGYQDSSSFYVVMWKQMEQTYWQANPFRAVAEPGIQLKAVKSSTGPGEQLRNALWHTGDTESQVRLLWKDPRNVGWKDKKSYRWFLQHRPQVGYIRVRFYEGPELVADSNVVLDTTMRGGRLGVFCFSQENIIWANLRYRCNDTIPEDYETHQLRQA

SEQ ID NO: 12038 - protein, 786 aa, Homo sapiens
  Payload ID: 2385
  Gene Symbol: CASS4
  Gene Name: Cas scaffolding protein family member 4
  Uniprot ID: Q9NQ75
  ENSP ID: ENSP00000353462
MKGTGIMDCAPKALLARALYDNCPDCSDELAFSRGDILTILEQHVPESEGWWKCLLHGRQGLAPANRLQILTEVAADRPCPPFLRGLEEAPASSEETYQVPTLPRPPTPGPVYEQMRSWAEGPQPPTAQVYEFPDPPTSARIICEKTLSFPKQAILTLPRPVRASLPTLPSQVYDVPTQHRGPVVLKEPEKQQLYDIPASPKKAGLHPPDSQASGQGVPLISVTTLRRGGYSTLPNPQKSEWIYDTPVSPGKASVRNTPLTSFAEESRPHALPSSSSTFYNPPSGRSRSLTPQLNNNVPMQKKLSLPEIPSYGFLVPRGTFPLDEDVSYKVPSSFLIPRVEQQNTKPNIYDIPKATSSVSQAGKELEKAKEVSENSAGHNSSWFSRRTTSPSPEPDRLSGSSSDSRASIVSSCSTTSTDDSSSSSSEESAKELSLDLDVAKETVMALQHKVVSSVAGLMLFVSRKWRFRDYLEANIDAIHRSTDHIEESVREFLDFARGVHGTACNLTDSNLQNRIRDQMQTISNSYRILLETKESLDNRNWPLEVLVTDSVQNSPDDLERFVMVARMLPEDIKRFASIVIANGRLLFKRNCEKEETVQLTPNAEFKCEKYIQPPQRETESHQKSTPSTKQREDEHSSELLKKNRANICGQNPGPLIPQPSSQQTPERKPRLSEHCRLYFGALFKAISAFHGSLSSSQPAEIITQSKLVIMVGQKLVDTLCMETQERDVRNEILRGSSHLCSLLKDVALATKNAVLTYPSPAALGHLQAEAEKLEQHTRQFRGTLG

SEQ ID NO: 12039 - protein, 349 aa, Homo sapiens
  Payload ID: 2385
  Gene Symbol: CASS4
  Gene Name: Cas scaffolding protein family member 4
  Uniprot ID: Q9NQ75
  ENSP ID: ENSP00000410027
MKGTGIMDCAPKALLARALYDNCPDCSDELAFSRGDILTILEQHVPESEGWWKCLLHGRQGLAPANRLQILTEVAADRPCPPFLRGLEEAPASSEETYQVPTLPRPPTPGPVYEQMRSWAEGPQPPTAQVYEFPDPPTSARIICEKTLSFPKQAILTLPRPVRASLPTLPSQVYDVPTQHRGPVVLKEPEKQQLYDIPASPKKAGLHPPDSQASNPGPLIPQPSSQQTPERKPRLSEHCRLYFGALFKAISAFHGSLSSSQPAEIITQSKLVIMVGQKLVDTLCMETQERDVRNEILRGSSHLCSLLKDVALATKNAVLTYPSPAALGHLQAEAEKLEQHTRQFRGTLG

SEQ ID NO: 12040 - protein, 797 aa, Homo sapiens
  Payload ID: 2386
  Gene Symbol: CASD1
  Gene Name: CAS1 domain containing 1
  Uniprot ID: Q96PB1
  ENSP ID: ENSP00000297273
MAALAYNLGKREINHYFSVRSAKVLALVAVLLLAACHLASRRYRGNDSCEYLLSSGRFLGEKVWQPHSCMMHKYKISEAKNCLVDKHIAFIGDSRIRQLFYSFVKIINPQFKEEGNKHENIPFEDKTASVKVDFLWHPEVNGSMKQCIKVWTEDSIAKPHVIVAGAATWSIKIHNGSSEALSQYKMNITSIAPLLEKLAKTSDVYWVLQDPVYEDLLSENRKMITNEKIDAYNEAAVSILNSSTRNSKSNVKMFSVSKLIAQETIMESLDGLHLPESSRETTAMILMNVYCNKILKPVDGSCCQPRPPVTLIQKLAACFFTLSIIGYLIFYIIHRNAHRKNKPCTDLESGEEKKNIINTPVSSLEILLQSFCKLGLIMAYFYMCDRANLFMKENKFYTHSSFFIPIIYILVLGVFYNENTKETKVLNREQTDEWKGWMQLVILIYHISGASTFLPVYMHIRVLVAAYLFQTGYGHFSYFWIKGDFGIYRVCQVLFRLNFLVVVLCIVMDRPYQFYYFVPLVTVWFMVIYVTLALWPQIIQKKANGNCFWHFGLLLKLGFLLLFICFLAYSQGAFEKIFSLWPLSKCFELKGNVYEWWFRWRLDRYVVFHGMLFAFIYLALQKRQILSEGKGEPLFSNKISNFLLFISVVSFLTYSIWASSCKNKAECNELHPSVSVVQILAFILIRNIPGYARSVYSSFFAWFGKISLELFICQYHIWLAADTRGILVLIPGNPMLNIIVSTFIFVCVAHEISQITNDLAQIIIPKDNSSLLKRLACIAAFFCGLLILSSIQDKSKH

SEQ ID NO: 12041 - protein, 45 aa, Homo sapiens
  Payload ID: 2386
  Gene Symbol: CASD1
  Gene Name: CAS1 domain containing 1
  ENSP ID: ENSP00000389718
MAALAYNLGKREINHYFSVRSAKVLALVAVLLLAACHLASRRYRA

SEQ ID NO: 12042 - protein, 125 aa, Homo sapiens
  Payload ID: 2386
  Gene Symbol: CASD1
  Gene Name: CAS1 domain containing 1
  ENSP ID: ENSP00000396261
MMHKYKISEAKNCLVDKHIAFIGDSRIRQLFYSFVKIINPQFKEEGNKHENIPFEDKTASVKVDFLWHPEVNGSMKQCIKVWTEDSIAKPHVIVAGAATWSIKIHNGSSEALSQYKMNITSIAPL

SEQ ID NO: 12043 - protein, 103 aa, Homo sapiens
  Payload ID: 2386
  Gene Symbol: CASD1
  Gene Name: CAS1 domain containing 1
  ENSP ID: ENSP00000402708
MAALAYNLGKREINHYFSVRSAKVLALVAVLLLAACHLASRRYRGNDSCEYLLSSGRFLGEKVWQPHSCMMHKYKISMKTFLLKTRLHQLKWIFCGILKLMVL

SEQ ID NO: 12044 - protein, 185 aa, Homo sapiens
  Payload ID: 2387
  Gene Symbol: CSN1S1
  Gene Name: casein alpha s1
  Uniprot ID: P47710
  ENSP ID: ENSP00000246891
MRLLILTCLVAVALARPKLPLRYPERLQNPSESSEPIPLESREEYMNGMNRQRNILREKQTDEIKDTRNESTQNCVVAEPEKMESSISSSSEEMSLSKCAEQFCRLNEYNQLQLQAAHAQEQIRRMNENSHVQVPFQQLNQLAAYPYAVWYYPQIMQYVPFPPFSDISNPTAHENYEKNNVMLQW

SEQ ID NO: 12045 - protein, 76 aa, Homo sapiens
  Payload ID: 2387
  Gene Symbol: CSN1S1
  Gene Name: casein alpha s1
  ENSP ID: ENSP00000421314
KMESSISSSSEEQIRRMNENSHVQVPFQQLNQLAAYPYAVWYYPQIMQYVPFPPFSDISNPTAHENYEKNNVMLQW

SEQ ID NO: 12046 - protein, 176 aa, Homo sapiens
  Payload ID: 2387
  Gene Symbol: CSN1S1
  Gene Name: casein alpha s1
  Uniprot ID: P47710
  ENSP ID: ENSP00000422611
MRLLILTCLVAVALARPKLPLRYPERLQNPSESSEPIPLESREEYMNGMNRRNILREKQTDEIKDTRNESTQNCVVAEPEKMESSISSSSEEQFCRLNEYNQLQLQAAHAQEQIRRMNENSHVQVPFQQLNQLAAYPYAVWYYPQIMQYVPFPPFSDISNPTAHENYEKNNVMLQW

SEQ ID NO: 12047 - protein, 169 aa, Homo sapiens
  Payload ID: 2387
  Gene Symbol: CSN1S1
  Gene Name: casein alpha s1
  ENSP ID: ENSP00000426684
MRLLILTCLVAVALARPKLPLRYPERLQNPSESSEPIPLESREEYMNGMNRQRNILREKQTDEIKNCVVAEPEKMESSISSSSEEQFCRLNEYNQLQLQAAHAQEQIRRMNENSHVQVPFQQLNQLAAYPYAVWYYPQIMQYVPFPPFSDISNPTAHENYEKNNVMLQW

SEQ ID NO: 12048 - protein, 177 aa, Homo sapiens
  Payload ID: 2387
  Gene Symbol: CSN1S1
  Gene Name: casein alpha s1
  ENSP ID: ENSP00000427490
MRLLILTCLVAVALARPKLPLRYPERLQNPSESSEPIPLESREEYMNGMNRQRNILREKQTDEIKDTRNESTQNCVVAEPEKMESSISSSSEEQFCRLNEYNQLQLQAAHAQEQIRRMNENSHVQVPFQQLNQLAAYPYAVWYYPQIMQYVPFPPFSDISNPTAHENYEKNNVMLQW

SEQ ID NO: 12049 - protein, 55 aa, Homo sapiens
  Payload ID: 2387
  Gene Symbol: CSN1S1
  Gene Name: casein alpha s1
  ENSP ID: ENSP00000487633
QRNILREKQTDEIKNCVVAEPEKMESSISSSSEEMSLSKCAEQFCRLNEYNQLQL

SEQ ID NO: 12050 - protein, 226 aa, Homo sapiens
  Payload ID: 2388
  Gene Symbol: CSN2
  Gene Name: casein beta
  Uniprot ID: P05814
  ENSP ID: ENSP00000341030
MKVLILACLVALALARETIESLSSSEESITEYKQKVEKVKHEDQQQGEDEHQDKIYPSFQPQPLIYPFVEPIPYGFLPQNILPLAQPAVVLPVPQPEIMEVPKAKDTVYTKGRVMPVLKSPTIPFFDPQIPKLTDLENLHLPLPLLQPLMQQVPQPIPQTLALPPQPLWSVPQPKVLPIPQQVVPYPQRAVPVQALLLNQELLLNPTHQIYPVTQPLAPVHNPISV

SEQ ID NO: 12051 - protein, 226 aa, Homo sapiens; identical to SEQ ID NO: 12050
  Payload ID: 2388
  Gene Symbol: CSN2
  Gene Name: casein beta
  ENSP ID: ENSP00000489488

SEQ ID NO: 12052 - protein, 182 aa, Homo sapiens
  Payload ID: 2389
  Gene Symbol: CSN3
  Gene Name: casein kappa
  Uniprot ID: P07498
  ENSP ID: ENSP00000304822
MKSFLLVVNALALTLPFLAVEVQNQKQPACHENDERPFYQKTAPYVPMYYVPNSYPYYGTNLYQRRPAIAINNPYVPRTYYANPAVVRPHAQIPQRQYLPNSHPPTVVRRPNLHPSFIAIPPKKIQDKIIIPTINTIATVEPTPAPATEPTVDSVVTPEAFSESIITSTPETTTVAVTPPTA

SEQ ID NO: 12053 - protein, 325 aa, Homo sapiens
  Payload ID: 2390
  Gene Symbol: CSNK1A1
  Gene Name: casein kinase 1, alpha 1
  Uniprot ID: P48729
  ENSP ID: ENSP00000261798
MASSSGSKAEFIVGGKYKLVRKIGSGSFGDIYLAINITNGEEVAVKLESQKARHPQLLYESKLYKILQGGVGIPHIRWYGQEKDYNVLVMDLLGPSLEDLFNFCSRRFTMKTVLMLADQMISRIEYVHTKNFIHRDIKPDNFLMGIGRHCNKLFLIDFGLAKKYRDNRTRQHIPYREDKNLTGTARYASINAHLGIEQSRRDDMESLGYVLMYFNRTSLPWQGLKAATKKQKYEKISEKKMSTPVEVLCKGFPAEFAMYLNYCRGLRFEEAPDYMYLRQLFRILFRTLNHQYDYTFDWTMLKQKAAQQAASSSGQGQQAQTPTGF

SEQ ID NO: 12054 - protein, 337 aa, Homo sapiens
  Payload ID: 2390
  Gene Symbol: CSNK1A1
  Gene Name: casein kinase 1, alpha 1
  Uniprot ID: P48729
  ENSP ID: ENSP00000367074
MASSSGSKAEFIVGGKYKLVRKIGSGSFGDIYLAINITNGEEVAVKLESQKARHPQLLYESKLYKILQGGVGIPHIRWYGQEKDYNVLVMDLLGPSLEDLFNFCSRRFTMKTVLMLADQMISRIEYVHTKNFIHRDIKPDNFLMGIGRHCNKLFLIDFGLAKKYRDNRTRQHIPYREDKNLTGTARYASINAHLGIEQSRRDDMESLGYVLMYFNRTSLPWQGLKAATKKQKYEKISEKKMSTPVEVLCKGFPAEFAMYLNYCRGLRFEEAPDYMYLRQLFRILFRTLNHQYDYTFDWTMLKQKAAQQAASSSGQGQQAQTPTGKQTDKTKSNMKGF

SEQ ID NO: 12055 - protein, 89 aa, Homo sapiens
  Payload ID: 2390
  Gene Symbol: CSNK1A1
  Gene Name: casein kinase 1, alpha 1
  ENSP ID: ENSP00000421268
MASSSGSKAEFIVGGKYKLVRKIGSGSFGDIYLAINITNGEEVAVKLESQKARHPQLLYESKLYKILQGGVGIPHIRSPEWIKPLKSQE

SEQ ID NO: 12056 - protein, 365 aa, Homo sapiens
  Payload ID: 2390
  Gene Symbol: CSNK1A1
  Gene Name: casein kinase 1, alpha 1
  Uniprot ID: P48729
  ENSP ID: ENSP00000421689
MASSSGSKAEFIVGGKYKLVRKIGSGSFGDIYLAINITNGEEVAVKLESQKARHPQLLYESKLYKILQGGVGIPHIRWYGQEKDYNVLVMDLLGPSLEDLFNFCSRRFTMKTVLMLADQMISRIEYVHTKNFIHRDIKPDNFLMGIGRHCNKCLESPVGKRKRSMTVSTSQDPSFSGLNQLFLIDFGLAKKYRDNRTRQHIPYREDKNLTGTARYASINAHLGIEQSRRDDMESLGYVLMYFNRTSLPWQGLKAATKKQKYEKISEKKMSTPVEVLCKGFPAEFAMYLNYCRGLRFEEAPDYMYLRQLFRILFRTLNHQYDYTFDWTMLKQKAAQQAASSSGQGQQAQTPTGKQTDKTKSNMKGF

SEQ ID NO: 12057 - protein, 167 aa, Homo sapiens
  Payload ID: 2390
  Gene Symbol: CSNK1A1
  Gene Name: casein kinase 1, alpha 1
  ENSP ID: ENSP00000425366
  MOD_RES (1)..(1): Any amino acid
XQHIPYREDKNLTGTARYASINAHLGIEQSRRDDMESLGYVLMYFNRTSLPWQGLKAATKKQKYEKISEKKMSTPVEVLCKGFPAEFAMYLNYCRGLRFEEAPDYMYLRQLFRILFRTLNHQYDYTFDWTMLKQKAAQQAASSSGQGQQAQTPTGKQTDKTKSNMKG

SEQ ID NO: 12058 - protein, 236 aa, Homo sapiens
  Payload ID: 2390
  Gene Symbol: CSNK1A1
  Gene Name: casein kinase 1, alpha 1
  ENSP ID: ENSP00000426747
MDLLGPSLEDLFNFCSRRFTMKTVLMLADQMISRIEYVHTKNFIHRDIKPDNFLMGIGRHCNKLFLIDFGLAKKYRDNRTRQHIPYREDKNLTGTARYASINAHLGIEQSRRDDMESLGYVLMYFNRTSLPWQGLKAATKKQKYEKISEKKMSTPVEVLCKGFPAEFAMYLNYCRGLRFEEAPDYMYLRQLFRILFRTLNHQYDYTFDWTMLKQKAAQQAASSSGQGQQAQTPTGF

SEQ ID NO: 12059 - protein, 264 aa, Homo sapiens
  Payload ID: 2390
  Gene Symbol: CSNK1A1
  Gene Name: casein kinase 1, alpha 1
  ENSP ID: ENSP00000427031
MDLLGPSLEDLFNFCSRRFTMKTVLMLADQMISRIEYVHTKNFIHRDIKPDNFLMGIGRHCNKCLESPVGKRKRSMTVSTSQDPSFSGLNQLFLIDFGLAKKYRDNRTRQHIPYREDKNLTGTARYASINAHLGIEQSRRDDMESLGYVLMYFNRTSLPWQGLKAATKKQKYEKISEKKMSTPVEVLCKGFPAEFAMYLNYCRGLRFEEAPDYMYLRQLFRILFRTLNHQYDYTFDWTMLKQKAAQQAASSSGQGQQAQTPTGF

SEQ ID NO: 12060 - protein, 78 aa, Homo sapiens
  Payload ID: 2390
  Gene Symbol: CSNK1A1
  Gene Name: casein kinase 1, alpha 1
  ENSP ID: ENSP00000430252
MASSSGSKAEFIVGGKYKLVRKIGSGSFGDIYLAINITNGEEVAVKLESQKARHPQLLYESKLYKILQGGVGIPHIRM

SEQ ID NO: 12061 - protein, 134 aa, Homo sapiens
  Payload ID: 2390
  Gene Symbol: CSNK1A1
  Gene Name: casein kinase 1, alpha 1
  ENSP ID: ENSP00000475319
MESLGYVLMYFNRTSLPWQGLKAATKKQKYEKISEKKMSTPVEVLCKGFPAEFAMYLNYCRGLRFEEAPDYMYLRQLFRILFRTLNHQYDYTFDWTMLKQKAAQQAASSSGQGQQAQTPTGKQTDKTKSNMKGF

SEQ ID NO: 12062 - protein, 96 aa, Homo sapiens
  Payload ID: 2390
  Gene Symbol: CSNK1A1
  Gene Name: casein kinase 1, alpha 1
  ENSP ID: ENSP00000475633
MSTPVEVLCKGFPAEFAMYLNYCRGLRFEEAPDYMYLRQLFRILFRTLNHQYDYTFDWTMLKQKAAQQAASSSGQGQQAQTPTGKQTDKTKSNMKG

SEQ ID NO: 12063 - protein, 184 aa, Homo sapiens
  Payload ID: 2390
  Gene Symbol: CSNK1A1
  Gene Name: casein kinase 1, alpha 1
  ENSP ID: ENSP00000475969
  MOD_RES (1)..(1): Any amino acid
XGTARYASINAHLGIEQSRRDDMESLGYVLMYFNRTSLPWQGLKAATKKQKYEKISEKKMSTPVEVLCKGFPAEFAMYLNYCRGLRFEEAPDYMYLRQLFRILFRTLNHQYDYTFDWTMLKQKAAQQAASSSGQGQQAQTPTGKQTDKTKSNMKGNADESARVGLWSSGVHVSKTAGPSNSATC

SEQ ID NO: 12064 - protein, 166 aa, Homo sapiens
  Payload ID: 2390
  Gene Symbol: CSNK1A1
  Gene Name: casein kinase 1, alpha 1
  ENSP ID: ENSP00000479826
MFLVLKKKHICHRNLVNILQLNMYVCCLDKCNHCKHLYDLGFCFYFEMGAFLFTSSLKTKNCFCKEMRFFLNNKKCLADSLLNKNLPNFLIDYFKPFVTWYSFASQFRFRVITFPLFLRKMKKVILLSEGERHSFIFFFFFFFFYDLQAQYLVLQLPELGIVAAAR

SEQ ID NO: 12065 - protein, 337 aa, Homo sapiens
  Payload ID: 2391
  Gene Symbol: CSNK1A1L
  Gene Name: casein kinase 1, alpha 1-like
  Uniprot ID: Q8N752
  ENSP ID: ENSP00000369126
MTNNSGSKAELVVGGKYKLVRKIGSGSFGDVYLGITTTNGEDVAVKLESQKVKHPQLLYESKLYTILQGGVGIPHMHWYGQEKDNNVLVMDLLGPSLEDLFNFCSRRFTMKTVLMLADQMISRIEYVHTKNFLHRDIKPDNFLMGTGRHCNKLFLIDFGLAKKYRDNRTRQHIPYREDKHLIGTVRYASINAHLGIEQSRRDDMESLGYVFMYFNRTSLPWQGLRAMTKKQKYEKISEKKMSTPVEVLCKGFPAEFAMYLNYCRGLRFEEVPDYMYLRQLFRILFRTLNHQYDYTFDWTMLKQKAAQQAASSSGQGQQAQTQTGKQTEKNKNNVKDN

SEQ ID NO: 12066 - protein, 120 aa, Homo sapiens
  Payload ID: 2392
  Gene Symbol: CSNK1D
  Gene Name: casein kinase 1, delta
  ENSP ID: ENSP00000269361
  MOD_RES (1)..(1): Any amino acid
XLLGPSLEDLFNFCSRKFSLKTVLLLADQMISRIEYIHSKNFIHRDVKPDNFLMGLGKKGNLVYIIDFGLAKKYRDARTHQHIPYRENKNLTGTARYASINTHLGIGAEGCHQETEIRKD

SEQ ID NO: 12067 - protein, 415 aa, Homo sapiens [sequence omitted]

SEQ ID NO: 12068 - protein, 409 aa, Homo sapiens
  Payload ID: 2392
  Gene Symbol: CSNK1D
  Gene Name: casein kinase 1, delta
  Uniprot ID: P48730
  ENSP ID: ENSP00000376146
MELRVGNRYRLGRKIGSGSFGDIYLGTDIAAGEEVAIKLECVKTKHPQLHIESKIYKMMQGGVGIPTIRWCGAEGDYNVMVMELLGPSLEDLFNFCSRKFSLKTVLLLADQMISRIEYIHSKNFIHRDVKPDNFLMGLGKKGNLVYIIDFGLAKKYRDARTHQHIPYRENKNLTGTARYASINTHLGIEQSRRDDLESLGYVLMYFNLGSLPWQGLKAATKRQKYERISEKKMSTPIEVLCKGYPSEFATYLNFCRSLRFDDKPDYSYLRQLFRNLFHRQGFSYDYVFDWNMLKFGASRAADDAERERRDREERLRHSRNPATRGLPSTASGRLRGTQEVAPPTPLTPTSHTANTSPRPVSGMERERKVSMRLHRGAPVNISSSDLTGRQDTSRMSTSQNSIPFEHHGK

SEQ ID NO: 12069 - protein, 427 aa, Homo sapiens
  Payload ID: 2392
  Gene Symbol: CSNK1D
  Gene Name: casein kinase 1, delta
  ENSP ID: ENSP00000381531
MELRVGNRYRLGRKIGSGSFGDIYLGTDIAAGEEVAIKLECVKTKHPQLHIESKIYKMMQGGVGIPTIRWCGAEGDYNVMVMELLGPSLEDLFNFCSRKFSLKTVLLLADQMISRIEYIHSKNFIHRDVKPDNFLMGLGKKGNLVYIIDFGLAKKYRDARTHQHIPYRENKNLTGTARYASINTHLGIEQSRRDDLESLGYVLMYFNLGSLPWQGLKAATKRQKYERISEKKMSTPIEVLCKGYPSEFATYLNFCRSLRFDDKPDYSYLRQLFRNLFHRQGFSYDYVFDWNMLKFGASRAADDAERERRDREERLRHSRNPATRGLPSTASGRLRGTQEVAPPTPLTPTSHTANTSPRPVSGMERERKVSMRLHRGAPVNISSSDLTGRQDTSRMSTSQRSRDMASLRLHAARQGTRCRPQRPRRTY

SEQ ID NO: 12070 - protein, 126 aa, Homo sapiens
  Payload ID: 2392
  Gene Symbol: CSNK1D
  Gene Name: casein kinase 1, delta
  ENSP ID: ENSP00000385769
MELRVGNRYRLGRKIGSGSFGDIYLGTDIAAGEEVAIKLECVKTKHPQLHIESKIYKMMQGGVGIPTIRWCGAEGDYNVMVMELLGPSLEDLFNFCSRKFSLKTVLLLADQMNNPEEMTWSLWATC

SEQ ID NO: 12071 - protein, 64 aa, Homo sapiens
  Payload ID: 2392
  Gene Symbol: CSNK1D
  Gene Name: casein kinase 1, delta
  ENSP ID: ENSP00000462079
  MOD_RES (1)..(1): Any amino acid
XRERKVSMRLHRGAPVNISSSDLTGRQDTSRMSTSQRSRDMASLRLHAARQGTRCRPQRPRRTY

SEQ ID NO: 12072 - protein, 56 aa, Homo sapiens
  Payload ID: 2392
  Gene Symbol: CSNK1D
  Gene Name: casein kinase 1, delta
  ENSP ID: ENSP00000462144
MELRVGNRYRLGRKIGSGSFGDIYLGWSAVARSRLTASSASQRWGFTVLARMVSIS

SEQ ID NO: 12073 - protein, 187 aa, Homo sapiens
  Payload ID: 2392
  Gene Symbol: CSNK1D
  Gene Name: casein kinase 1, delta
  ENSP ID: ENSP00000463757
MELRVGNRYRLGRKIGSGSFGDIYLVGIPTIRWCGAEGDYNVMVMELLGPSLEDLFNFCSRKFSLKTVLLLADQMISRIEYIHSKNFIHRDVKPDNFLMGLGKKGNLVYIIDFGLAKKYRDARTHQHIPYRENKNLTGTARYASINTHLGIEQSRRDDLESLGYVLMYFNLGSLPWQGLKAATKRQK

SEQ ID NO: 12074 - protein, 20 aa, Homo sapiens
  Payload ID: 2392
  Gene Symbol: CSNK1D
  Gene Name: casein kinase 1, delta
  ENSP ID: ENSP00000463906
  MOD_RES (1)..(1): Any amino acid
XMTTCSTGTCSNLLLSRLKI

SEQ ID NO: 12075 - protein, 43 aa, Homo sapiens
  Payload ID: 2392
  Gene Symbol: CSNK1D
  Gene Name: casein kinase 1, delta
  ENSP ID: ENSP00000464551
MELRVGNRYRLGRKIGSGSFGDIYLVEMGFHRVSQDGLNLLTL

SEQ ID NO: 12076 - protein, 416 aa, Homo sapiens
  Payload ID: 2393
  Gene Symbol: CSNK1E
  Gene Name: casein kinase 1, epsilon
  Uniprot ID: P49674
  ENSP ID: ENSP00000352929
MELRVGNKYRLGRKIGSGSFGDIYLGANIASGEEVAIKLECVKTKHPQLHIESKFYKMMQGGVGIPSIKWCGAEGDYNVMVMELLGPSLEDLFNFCSRKFSLKTVLLLADQMISRIEYIHSKNFIHRDVKPDNFLMGLGKKGNLVYIIDFGLAKKYRDARTHQHIPYRENKNLTGTARYASINTHLGIEQSRRDDLESLGYVLMYFNLGSLPWQGLKAATKRQKYERISEKKMSTPIEVLCKGYPSEFSTYLNFCRSLRFDDKPDYSYLRQLFRNLFHRQGFSYDYVFDWNMLKFGAARNPEDVDRERREHEREERMGQLRGSATRALPPGPPTGATANRLRSAAEPVASTPASRIQPAGNTSPRAISRVDRERKVSMRLHRGAPANVSSSDLTGRQEVSRIPASQTSVPFDHLGK

SEQ ID NO: 12077 - protein, 416 aa, Homo sapiens; identical to SEQ ID NO: 12076
  Payload ID: 2393
  Gene Symbol: CSNK1E
  Gene Name: casein kinase 1, epsilon
  Uniprot ID: P49674
  ENSP ID: ENSP00000380044

SEQ ID NO: 12078 - protein, 416 aa, Homo sapiens; identical to SEQ ID NO: 12076
  Payload ID: 2393
  Gene Symbol: CSNK1E
  Gene Name: casein kinase 1, epsilon
  Uniprot ID: P49674
  ENSP ID: ENSP00000383067

SEQ ID NO: 12079 - protein, 416 aa, Homo sapiens; identical to SEQ ID NO: 12076
  Payload ID: 2393
  Gene Symbol: CSNK1E
  Gene Name: casein kinase 1, epsilon
  Uniprot ID: P49674
  ENSP ID: ENSP00000384074

SEQ ID NO: 12080 - protein, 311 aa, Homo sapiens
  Payload ID: 2393
  Gene Symbol: CSNK1E
  Gene Name: casein kinase 1, epsilon
  ENSP ID: ENSP00000384426
MELRVGNKYRLGRKIGSGSFGDIYLGANIASGEEVAIKLECVKTKHPQLHIESKFYKMMQGGVGIPSIKWCGAEGDYNVMVMELLGPSLEDLFNFCSRKFSLKTVLLLADQMISRIEYIHSKNFIHRDVKPDNFLMGLGKKGNLVYIIDFGLAKKYRDARTHQHIPYRENKNLTGTARYASINTHLGIEQSRRDDLESLGYVLMYFNLGSLPWQGLKAATKRQKYERISEKKMSTPIEVLCKGYPSEFSTYLNFCRSLRFDDKPDYSYLRQLFRNLFHRQGFSYDYVFDWNMLKFTDTVQDGSHWPHATHF

SEQ ID NO: 12081 - protein, 91 aa, Homo sapiens
  Payload ID: 2393
  Gene Symbol: CSNK1E
  Gene Name: casein kinase 1, epsilon
  ENSP ID: ENSP00000397460
  MOD_RES (1)..(1): Any amino acid
XSCTSTWAPCPGRGSKQPPSARSMNGSARRRCQRPSRSSAKAIPPNSQHTSTSAAPCGLTTSPTTLTYVSSSATSSTGRASPMTTSLTGTC

SEQ ID NO: 12082 - protein, 119 aa, Homo sapiens
  Payload ID: 2393
  Gene Symbol: CSNK1E
  Gene Name: casein kinase 1, epsilon
  ENSP ID: ENSP00000400494
  MOD_RES (1)..(1): Any amino acid
XRNPEDVDRERREHEREERMGQLRGSATRALPPGPPTGATANRLRSAAEPVASTPASRIQPAGNTSPRAISRVDRERKVSMRLHRGAPANVSSSDLTGRQEVSRIPASQTSVPFDHLGK

SEQ ID NO: 12083 - protein, 270 aa, Homo sapiens
  Payload ID: 2393
  Gene Symbol: CSNK1E
  Gene Name: casein kinase 1, epsilon
  ENSP ID: ENSP00000403057
  MOD_RES (1)..(1): Any amino acid
XGIPSIKWCGAEGDYNVMVMELLGPSLEDLFNFCSRKFSLKTVLLLADQMISRIEYIHSKNFIHRDVKPDNFLMGLGKKGNLVYIIDFGLAKKYRDARTHQHIPYRENKNLTGTARYASINTHLGIEQSRRDDLESLGYVLMYFNLGSLPWQGLKAATKRQKYERISEKKMSTPIEVLCKGYPSEFSTYLNFCRSLRFDDKPDYSYLRQLFRNLFHRQGFSYDYVFDWNMLKFGASSSQAQPRDSPMTAKGPFCPRPCPCAGPTYSPTYW

SEQ ID NO: 12084 - protein, 144 aa, Homo sapiens
  Payload ID: 2393
  Gene Symbol: CSNK1E
  Gene Name: casein kinase 1, epsilon
  ENSP ID: ENSP00000403610
  MOD_RES (1)..(1): Any amino acid
XRNLFHRQGFSYDYVFDWNMLKFGAARNPEDVDRERREHEREERMGQLRGSATRALPPGPPTGATANRLRSAAEPVASTPASRIQPAGNTSPRAISRVDRERKVSMRLHRGAPANVSSSDLTGRQEVSRIPASQTSVPFDHLGK

SEQ ID NO: 12085 - protein, 336 aa, Homo sapiens
  Payload ID: 2393
  Gene Symbol: CSNK1E
  Gene Name: casein kinase 1, epsilon
  ENSP ID: ENSP00000407235
MELRVGNKYRLGRKIGSGSFGDIYLGANIASGEEVAIKLECVKTKHPQLHIESKFYKMMQGGVGIPSIKWCGAEGDYNVMVMELLGPSLEDLFNFCSRKFSLKTVLLLADQMISRIEYIHSKNFIHRDVKPDNFLMGLGKKGNLVYIIDFGLAKKYRDARTHQHIPYRENKNLTGTARYASINTHLGIEQSRRDDLESLGYVLMYFNLGSLPWQGLKAATKRQKYERISEKKMSTPIEVLCKGYPSEFSTYLNFCRSLRFDDKPDYSYLRQLFRNLFHRQGFSYDYVFDWNMLKFARSTSPPTAAGLTAFLEVPLEAGPGVRSWAEAPTALSFANL

SEQ ID NO: 12086 - protein, 118 aa, Homo sapiens
  Payload ID: 2393
  Gene Symbol: CSNK1E
  Gene Name: casein kinase 1, epsilon
  ENSP ID: ENSP00000412194
  MOD_RES (1)..(1): Any amino acid
XRPATLPSTRTWALSKAVEMTWRAWATCSCTSTWAPCPGRGSKQPPSARSMNGSARRRCQRPSRSSAKAIPPNSQHTSTSAAPCGLTTSPTTLTYVSSSATSSTGRASPMTTSLTGTC

SEQ ID NO: 12087 - protein, 225 aa, Homo sapiens
  Payload ID: 2393
  Gene Symbol: CSNK1E
  Gene Name: casein kinase 1, epsilon
  ENSP ID: ENSP00000412335
MELRVGNKYRLGRKIGSGSFGDIYLGANIASGEEVAIKLECVKTKHPQLHIESKFYKMMQGGVGIPSIKWCGAEGDYNVMVMELLGPSLEDLFNFCSRKFSLKTVLLLADQMISRIEYIHSKNFIHRDVKPDNFLMGLGKKGNLVYIIDFGLAKKYRDARTHQHIPYRENKNLTGTARYASINTHLGIEQSRRDDLESLGYVLMYFNLGSLPWQGLKAATKRQKY

SEQ ID NO: 12088 - protein, 422 aa, Homo sapiens
  Payload ID: 2394
  Gene Symbol: CSNK1G1
  Gene Name: casein kinase 1, gamma 1
  Uniprot ID: Q9HCP0
  ENSP ID: ENSP00000305777
MDHPSREKDERQRTTKPMAQRSAHCSRPSGSSSSSGVLMVGPNFRVGKKIGCGNFGELRLGKNLYTNEYVAIKLEPIKSRAPQLHLEYRFYKQLGSAGEGLPQVYYFGPCGKYNAMVLELLGPSLEDLFDLCDRTFTLKTVLMIAIQLLSRMEYVHSKNLIYRDVKPENFLIGRQGNKKEHVIHIIDFGLAKEYIDPETKKHIPYREHKSLTGTARYMSINTHLGKEQSRRDDLEALGHMFMYFLRGSLPWQGLKADTLKERYQKIGDTKRNTPIEALCENFPEEMATYLRYVRRLDFFEKPDYEYLRTLFTDLFEKKGYTFDYAYDWVGRPIPTPVGSVHVDSGASAITRESHTHRDRPSQQQPLRNQVVSSTNGELNVDDPTGAHSNAPITAHAEVEVVEEAKCCCFFKRKRKKTAQRHK

SEQ ID NO: 12089 - protein, 393 aa, Homo sapiens
  Payload ID: 2394
  Gene Symbol: CSNK1G1
  Gene Name: casein kinase 1, gamma 1
  Uniprot ID: Q9HCP0
  ENSP ID: ENSP00000475325
MDHPSREKDERQRTTKPMAQRSAHCSRPSGSSSSSGVLMVGPNFRVGKKIGCGNFGELRLGKNLYTNEYVAIKLEPIKSRAPQLHLEYRFYKQLGSAGEGLPQVYYFGPCGKYNAMVLELLGPSLEDLFDLCDRTFTLKTVLMIAIQLLSRMEYVHSKNLIYRDVKPENFLIGRQGNKKEHVIHIIDFGLAKEYIDPETKKHIPYREHKSLTGTARYMSINTHLGKEQSRRDDLEALGHMFMYFLRGSLPWQGLKADTLKERYQKIGDTKRNTPIEALCENFPEEMATYLRYVRRLDFFEKPDYEYLRTLFTDLFEKKGYTFDYAYDWVGRPIPTPVGSVHVDSGASAITRESHTHRDRPSQQQPLRNQSLRTVTAEHYDVNNSAIWHRGRGT

SEQ ID NO: 12090 - protein, 422 aa, Homo sapiens
  Payload ID: 2394
  Gene Symbol: CSNK1G1
  Gene Name: casein kinase 1, gamma 1
  ENSP ID: ENSP00000475686
MDHPSREKDERQRTTKPMAQRSAHCSRPSGSSSSSGVLMVGPNFRVGKKIGCGNFGELRLGKNLYTNEYVAIKLEPIKSRAPQLHLEYRFYKQLGSAGEGLPQVYYFGPCGKYNAMVLELLGPSLEDLFDLCDRTFTLKTVLMIAIQLLSRMEYVHSKNLIYRDVKPENFLIGRQGNKKEHVIHIIDFGLAKEYIDPETKKHIPYREHKSLTGTARYMSINTHLGKEQSRRDDLEALGHMFMYFLRGSLPWQGLKADTLKERYQKIGDTKRNTPIEALCENFPEEMATYLRYVRRLDFFEKPDYEYLRTLFTDLFEKKGYTFDYAYDWVGRPIPTPVGSVHVDSGASAITRESHTHRDRPSQQQPLRNQPRSLTSRVFCPAVRPLFPLPSTHINRNNVLEMKPGGRSSYTCKRSLIGSTLTR

SEQ ID NO: 12091 - protein, 475 aa, Homo sapiens
  Payload ID: 2394
  Gene Symbol: CSNK1G1
  Gene Name: casein kinase 1, gamma 1
  ENSP ID: ENSP00000475724
MDHPSREKDERQRTTKPMAQRSAHCSRPSGSSSSSGVLMVGPNFRVGKKIGCGNFGELRLGKNLYTNEYVAIKLEPIKSRAPQLHLEYRFYKQLGSAGEGLPQVYYFGPCGKYNAMVLELLGPSLEDLFDLCDRTFTLKTVLMIAIQLLSRMEYVHSKNLIYRDVKPENFLIGRQGNKKEHVIHIIDFGLAKEYIDPETKKHIPYREHKSLTGTARYMSINTHLGKEQSRRDDLEALGHMFMYFLRGSLPWQGLKADTLKERYQKIGDTKRNTPIEALCENFPEEMATYLRYVRRLDFFEKPDYEYLRTLFTDLFEKKGYTFDYAYDWVGRPIPTPVGSVHVDSGASAITRESHTHRDRPSQQQPLRNQNVSSERRGEWEIQPSRQTNTSYLTSHLAADRHGGSVQVVSSTNGELNVDDPTGAHSNAPITAHAEVEVVEEAKCIMFHKPWHWSQSSAVKMKFVVFLNMNVNFKCI

SEQ ID NO: 12092 - protein, 438 aa, Homo sapiens
  Payload ID: 2394
  Gene Symbol: CSNK1G1
  Gene Name: casein kinase 1, gamma 1
  ENSP ID: ENSP00000476088
MDHPSREKDERQRTTKPMAQRSAHCSRPSGSSSSSGVLMVGPNFRVGKKIGCGNFGELRLGKNLYTNEYVAIKLEPIKSRAPQLHLEYRFYKQLGSAGEGLPQVYYFGPCGKYNAMVLELLGPSLEDLFDLCDRTFTLKTVLMIAIQLLSRMEYVHSKNLIYRDVKPENFLIGRQGNKKEHVIHIIDFGLAKEYIDPETKKHIPYREHKSLTGTARYMSINTHLGKEQSRRDDLEALGHMFMYFLRGSLPWQGLKADTLKERYQKIGDTKRNTPIEALCENFPEEMATYLRYVRRLDFFEKPDYEYLRTLFTDLFEKKGYTFDYAYDWVGRPIPTPVGSVHVDSGASAITRESHTHRDRPSQQQPLRNQVVSSTNGELNVDDPTGAHSNAPITAHAEVEVVEEAKCIMFHKPWHWSQSSAVKMKFVVFLNMNVNFKCI

SEQ ID NO: 12093 - protein, 173 aa, Homo sapiens
  Payload ID: 2394
  Gene Symbol: CSNK1G1
  Gene Name: casein kinase 1, gamma 1
  ENSP ID: ENSP00000488990
ATYLRYVRRLDFFEKPDYEYLRTLFTDLFEKKGYTFDYAYDWVGRPIPTPVGSVHVDSGASAITRESHTHRDRPSQQQPLRNQNVSSERRGEWEIQPSRQTNTSYLTSHLAADRHGGSVQPRSLTSRVFCPAVRPLFPLPSTHINRNNVLEMKPGGRSSYTCKRSLIGSTLTR

SEQ ID NO: 12094 - protein, 114 aa, Homo sapiens
  Payload ID: 2394
  Gene Symbol: CSNK1G1
  Gene Name: casein kinase 1, gamma 1
  ENSP ID: ENSP00000489008
MDHPSREKDERQRTTKPMAQRSAHCSRPSGSSSSSGVLMVGPNFRVGKKIGCGNFGELRLGKNLYTNEYVAIKLVKVSHRCITLDHVGNIMPWCWSSLALAWRTCLTSVTEHLL

SEQ ID NO: 12095 - protein, 138 aa, Homo sapiens
  Payload ID: 2394
  Gene Symbol: CSNK1G1
  Gene Name: casein kinase 1, gamma 1
  ENSP ID: ENSP00000489046
MDHPSREKDERQRTTKPMAQRSAHCSRPSGSSSSSGVLMVGPNFRVGKKIGCGNFGELRLGKNLYTNEYVAIKLEPIKSRAPQLHLEYRFYKQLGSAGEGLPQVYYFGPCGKYNAMVLELLGPSLEDLFDLCDRTFTL

SEQ ID NO: 12096 - protein, 204 aa, Homo sapiens
  Payload ID: 2394
  Gene Symbol: CSNK1G1
  Gene Name: casein kinase 1, gamma 1
  ENSP ID: ENSP00000489050
QKIGDTKRNTPIEALCENFPEEMATYLRYVRRLDFFEKPDYEYLRTLFTDLFEKKGYTFDYAYDWVGRPIPTPVGSVHVDSGASAITRESHTHRDRPSQQQPLRNQNVSSERRGEWEIQPSRQTNTSYLTSHLAADRHGGSVQVVSSTNGELNVDDPTGAHSNAPITAHAEVEVVEEANCLKMLNLWCCCFFKRKRKKTAQRHK

SEQ ID NO: 12097 - protein, 67 aa, Homo sapiens
  Payload ID: 2394
  Gene Symbol: CSNK1G1
  Gene Name: casein kinase 1, gamma 1
  ENSP ID: ENSP00000489090
DLFEKKGYTFDYAYDWVGRPIPTPVGSVHVDSGASAITRESHTHRDRPSQQQPLRNQVDCSLANSPI

SEQ ID NO: 12098 - protein, 459 aa, Homo sapiens
  Payload ID: 2394
  Gene Symbol: CSNK1G1
  Gene Name: casein kinase 1, gamma 1
  ENSP ID: ENSP00000489116
MDHPSREKDERQRTTKPMAQRSAHCSRPSGSSSSSGVLMVGPNFRVGKKIGCGNFGELRLGKNLYTNEYVAIKLEPIKSRAPQLHLEYRFYKQLGSAGEGLPQVYYFGPCGKYNAMVLELLGPSLEDLFDLCDRTFTLKTVLMIAIQLLSRMEYVHSKNLIYRDVKPENFLIGRQGNKKEHVIHIIDFGLAKEYIDPETKKHIPYREHKSLTGTARYMSINTHLGKEQSRRDDLEALGHMFMYFLRGSLPWQGLKADTLKERYQKIGDTKRNTPIEALCENFPEEMATYLRYVRRLDFFEKPDYEYLRTLFTDLFEKKGYTFDYAYDWVGRPIPTPVGSVHVDSGASAITRESHTHRDRPSQQQPLRNQNVSSERRGEWEIQPSRQTNTSYLTSHLAADRHGGSVQVVSSTNGELNVDDPTGAHSNAPITAHAEVEVVEEAKCCCFFKRKRKKTAQRHK

SEQ ID NO: 12099 - protein, 430 aa, Homo sapiens
  Payload ID: 2394
  Gene Symbol: CSNK1G1
  Gene Name: casein kinase 1, gamma 1
  ENSP ID: ENSP00000489165
MDHPSREKDERQRTTKPMAQRSAHCSRPSGSSSSSGVLMVGPNFRVGKKIGCGNFGELRLGKNLYTNEYVAIKLEPIKSRAPQLHLEYRFYKQLGSAGEGLPQVYYFGPCGKYNAMVLELLGPSLEDLFDLCDRTFTLKTVLMIAIQLLSRMEYVHSKNLIYRDVKPENFLIGRQGNKKEHVIHIIDFGLAKEYIDPETKKHIPYREHKSLTGTARYMSINTHLGKEQSRRDDLEALGHMFMYFLRGSLPWQGLKADTLKERYQKIGDTKRNTPIEALCENFPEEMATYLRYVRRLDFFEKPDYEYLRTLFTDLFEKKGYTFDYAYDWVGRPIPTPVGSVHVDSGASAITRESHTHRDRPSQQQPLRNQVVSSTNGELNVDDPTGAHSNAPITAHAEVEVVEEANCLKMLNLWCCCFFKRKRKKTAQRHK

SEQ ID NO: 12100 - protein, 36 aa, Homo sapiens
  Payload ID: 2394
  Gene Symbol: CSNK1G1
  Gene Name: casein kinase 1, gamma 1
  ENSP ID: ENSP00000489172
  MOD_RES (1)..(1): Any amino acid
XGSVHVDSGASAITRESHTHRDRPSQQQPLRNQSTV

SEQ ID NO: 12101 - protein, 459 aa, Homo sapiens; identical to SEQ ID NO: 12098
  Payload ID: 2394
  Gene Symbol: CSNK1G1
  Gene Name: casein kinase 1, gamma 1
  ENSP ID: ENSP00000489233

SEQ ID NO: 12102 - protein, 183 aa, Homo sapiens
  Payload ID: 2394
  Gene Symbol: CSNK1G1
  Gene Name: casein kinase 1, gamma 1
  ENSP ID: ENSP00000489277
MDHPSREKDERQRTTKPMAQRSAHCSRPSGSSSSSGVLMVGPNFRVGKKIGCGNFGELRLGKNLYTNEYVAIKLEPIKSRAPQLHLEYRFYKQLGSAGEGLPQVYYFGPCGKYNAMVLELLGPSLEDLFDLCDRTFTLKTVLMIAIQLLSRMEYVHSKNLIYRDVKPENFLIGRQGNKKEHVI

SEQ ID NO: 12103 - protein, 158 aa, Homo sapiens
  Payload ID: 2394
  Gene Symbol: CSNK1G1
  Gene Name: casein kinase 1, gamma 1
  ENSP ID: ENSP00000489310
FFEKPDYEYLRTLFTDLFEKKGYTFDYAYDWVGRPIPTPVGSVHVDSGASAITRESHTHRDRPSQQQPLRNQVVSSTNGELNVDDPTGAHSNAPITAHAEVEVVEEAKYVHLSRGLLSHGLKNLFCLFLSVCCSSQTGFLMLVTTAFFLNCFNFCMVP

SEQ ID NO: 12104 - protein, 422 aa, Homo sapiens; identical to SEQ ID NO: 12090
  Payload ID: 2394
  Gene Symbol: CSNK1G1
  Gene Name: casein kinase 1, gamma 1
  ENSP ID: ENSP00000489415

SEQ ID NO: 12105 - protein, 77 aa, Homo sapiens
  Payload ID: 2394
  Gene Symbol: CSNK1G1
  Gene Name: casein kinase 1, gamma 1
  ENSP ID: ENSP00000489534
MDHPSREKDERQRTTKPMAQRSAHCSRPSGSSSSSGVLMVGPNFRVGKKIGCGNFGELRLGTNKITCSTASFRVQIL

SEQ ID NO: 12106 - protein, 415 aa, Homo sapiens
  Payload ID: 2395
  Gene Symbol: CSNK1G2
  Gene Name: casein kinase 1, gamma 2
  Uniprot ID: P78368
  ENSP ID: ENSP00000255641
MDFDKKGGKGETEEGRRMSKAGGGRSSHGIRSSGTSSGVLMVGPNFRVGKKIGCGNFGELRLGKNLYTNEYVAIKLEPIKSRAPQLHLEYRFYKQLSATEGVPQVYYFGPCGKYNAMVLELLGPSLEDLFDLCDRTFTLKTVLMIAIQLITRMEYVHTKSLIYRDVKPENFLVGRPGTKRQHAIHIIDFGLAKEYIDPETKKHIPYREHKSLTGTARYMSINTHLGKEQSRRDDLEALGHMFMYFLRGSLPWQGLKADTLKERYQKIGDTKRATPIEVLCENFPEEMATYLRYVRRLDFFEKPDYDYLRKLFTDLFDRSGFVFDYEYDWAGKPLPTPIGTVHTDLPSQPQLRDKTQPHSKNQALNSTNGELNADDPTAGHSNAPITAPAEVEVADETKCCCFFKRRKRKSLQRHK

SEQ ID NO: 12107 - protein, 83 aa, Homo sapiens
  Payload ID: 2395
  Gene Symbol: CSNK1G2
  Gene Name: casein kinase 1, gamma 2
  ENSP ID: ENSP00000465106
MDFDKKGGKGETEEGRRMSKAGGGRSSHGIRSSGTSSGVLMVGPNFRVGKKIGCGNFGELRLGWFQRCWGKAEGKHERLQGQG

SEQ ID NO: 12108 - protein, 76 aa, Homo sapiens
  Payload ID: 2395
  Gene Symbol: CSNK1G2
  Gene Name: casein kinase 1, gamma 2
  ENSP ID: ENSP00000467214
MDFDKKGGKGETEEGRRMSKAGGGRSSHGIRSSGTSSGVLMVGPNFRVGKKIGCGNFGELRLGKNLYTNEYVAIKL

SEQ ID NO: 12109 - protein, 299 aa, Homo sapiens
  Payload ID: 2395
  Gene Symbol: CSNK1G2
  Gene Name: casein kinase 1, gamma 2
  ENSP ID: ENSP00000468637
  MOD_RES (1)..(1): Any amino acid
XSKAGGGRSSHGIRSSGTSSGVLMVGPNFRVGKKIGCGNFGELRLGKNLYTNEYVAIKLVSRPLHPTPADVPPRDFRAATRSPGDSLLCPQEPIKSRAPQLHLEYRFYKQLSATEGVPQVYYFGPCGKYNAMVLELLGPSLEDLFDLCDRTFTLKTVLMIAIQLITRMEYVHTKSLIYRDVKPENFLVGRPGTKRQHAIHIIDFGLAKEYIDPETKKHIPYREHKSLTGTARYMSINTHLGKEQSRRDDLEALGHMFMYFLRGSLPWQGLKADTLKERYQKIGDTKRATPIEVLCENFP

SEQ ID NO: 12110 - protein, 100 aa, Homo sapiens
  Payload ID: 2395
  Gene Symbol: CSNK1G2
  Gene Name: casein kinase 1, gamma 2
  ENSP ID: ENSP00000480052
  MOD_RES (1)..(1): Any amino acid
XRPGRRAGTQGGSKADHRPPQADTLKERYQKIGDTKRATPIEVLCENFPEEMATYLRYVRRLDFFEKPDYDYLRKLFTDLFDRSGFVFDYEYDWAGKPLP

SEQ ID NO: 12111 - protein, 235 aa, Homo sapiens
  Payload ID: 2395
  Gene Symbol: CSNK1G2
  Gene Name: casein kinase 1, gamma 2
  ENSP ID: ENSP00000480185
  MOD_RES (1)..(1): Any amino acid
XSRAPQLHLEYRFYKQLSATGTGRPAGGAGAAQGQGGGCRRTPVRLSSAAEGVPQVYYFGPCGKYNAMVLELLGPSLEDLFDLCDRTFTLKTVLMIAIQLITRMEYVHTKSLIYRDVKPENFLVGRPGTKRQHAIHIIDFGLAKEYIDPETKKHIPYREHKSLTGTARYMSINTHLGKEQSRRDDLEALGHMFMYFLRGSLPWQGLKADTLKERYQKIGDTKRATPIEVLCENFP

SEQ ID NO: 12112 - protein, 206 aa, Homo sapiens
  Payload ID: 2395
  Gene Symbol: CSNK1G2
  Gene Name: casein kinase 1, gamma 2
  ENSP ID: ENSP00000480929
  MOD_RES (1)..(1): Any amino acid
XSRAPQLHLEYRFYKQLSATGTGRPAGGAGAAQGQGGGCRRTPVRLSSAAEGVPQVYYFGPCGKYNAMVLELLGPSLEDLFDLCDRTFTLKTVLMIAIQLITRMEYVHTKSLIYRDVKPENFLVGRPGTKRQHAIHIIDFGLAKEYIDPETKKHIPYREHKSLTGTARYMSINTHLGKGRHAQGAVPEDRGHQTRHAHRGALRELP

SEQ ID NO: 12113 - protein, 114 aa, Homo sapiens
  Payload ID: 2395
  Gene Symbol: CSNK1G2
  Gene Name: casein kinase 1, gamma 2
  ENSP ID: ENSP00000482716
FMYFLRGSLPWQGLKADTLKERYQKIGDTKRATPIEVLCENFPEEMATYLRYVRRLDFFEKPDYDYLRKLFTDLFDRSGFVFDYDRPPSAPSTPTCPPSLSSGTKPSRTAKTRR

SEQ ID NO: 12114 - protein, 423 aa, Homo sapiens
  Payload ID: 2396
  Gene Symbol: CSNK1G3
  Gene Name: casein kinase 1, gamma 3
  Uniprot ID: Q9Y6M4
  ENSP ID: ENSP00000334735
MENKKKDKDKSDDRMARPSGRSGHNTRGTGSSSSGVLMVGPNFRVGKKIGCGNFGELRLGKNLYTNEYVAIKLEPMKSRAPQLHLEYRFYKQLGSGDGIPQVYYFGPCGKYNAMVLELLGPSLEDLFDLCDRTFSLKTVLMIAIQLISRMEYVHSKNLIYRDVKPENFLIGRPGNKTQQVIHIIDFGLAKEYIDPETKKHIPYREHKSLTGTARYMSINTHLGKEQSRRDDLEALGHMFMYFLRGSLPWQGLKADTLKERYQKIGDTKRATPIEVLCENFPEMATYLRYVRRLDFFEKPDYDYLRKLFTDLFDRKGYMFDYEYDWIGKQLPTPVGAVQQDPALSSNREAHQHRDKMQQSKNQVVSSTNGELNTDDPTAGRSNAPITAPTEVEVMDETNCQKVLNMWCCCFFKRRKRKTIQRHK

SEQ ID NO: 12115 - protein, 455 aa, Homo sapiens
  Payload ID: 2396
  Gene Symbol: CSNK1G3
  Gene Name: casein kinase 1, gamma 3
  Uniprot ID: Q9Y6M4
  ENSP ID: ENSP00000353904
MENKKKDKDKSDDRMARPSGRSGHNTRGTGSSSSGVLMVGPNFRVGKKIGCGNFGELRLGKNLYTNEYVAIKLEPMKSRAPQLHLEYRFYKQLGSGDGIPQVYYFGPCGKYNAMVLELLGPSLEDLFDLCDRTFSLKTVLMIAIQLISRMEYVHSKNLIYRDVKPENFLIGRPGNKTQQVIHIIDFGLAKEYIDPETKKHIPYREHKSLTGTARYMSINTHLGKEQSRRDDLEALGHMFMYFLRGSLPWQGLKADTLKERYQKIGDTKRATPIEVLCENFPEMATYLRYVRRLDFFEKPDYDYLRKLFTDLFDRKGYMFDYEYDWIGKQLPTPVGAVQQDPALSSNREAHQHRDKMQQSKNQSADHRAAWDSQQANPHHLRAHLAADRHGGSVQVVSSTNGELNTDDPTAGRSNAPITAPTEVEVMDETNCQKVLNMWCCCFFKRRKRKTIQRHK

SEQ ID NO: 12116 - protein, 447 aa, Homo sapiens
  Payload ID: 2396
  Gene Symbol: CSNK1G3
  Gene Name: casein kinase 1, gamma 3
  Uniprot ID: Q9Y6M4
  ENSP ID: ENSP00000354942
MENKKKDKDKSDDRMARPSGRSGHNTRGTGSSSSGVLMVGPNFRVGKKIGCGNFGELRLGKNLYTNEYVAIKLEPMKSRAPQLHLEYRFYKQLGSGDGIPQVYYFGPCGKYNAMVLELLGPSLEDLFDLCDRTFSLKTVLMIAIQLISRMEYVHSKNLIYRDVKPENFLIGRPGNKTQQVIHIIDFGLAKEYIDPETKKHIPYREHKSLTGTARYMSINTHLGKEQSRRDDLEALGHMFMYFLRGSLPWQGLKADTLKERYQKIGDTKRATPIEVLCENFPEMATYLRYVRRLDFFEKPDYDYLRKLFTDLFDRKGYMFDYEYDWIGKQLPTPVGAVQQDPALSSNREAHQHRDKMQQSKNQSADHRAAWDSQQANPHHLRAHLAADRHGGSVQVVSSTNGELNTDDPTAGRSNAPITAPTEVEVMDETKCCCFFKRRKRKTIQRHK

SEQ ID NO: 12117 - protein, 311 aa, Homo sapiens
  Payload ID: 2396
  Gene Symbol: CSNK1G3
  Gene Name: casein kinase 1, gamma 3
  Uniprot ID: Q9Y6M4
  ENSP ID: ENSP00000421385
MVLELLGPSLEDLFDLCDRTFSLKTVLMIAIQLISRMEYVHSKNLIYRDVKPENFLIGRPGNKTQQVIHIIDFGLAKEYIDPETKKHIPYREHKSLTGTARYMSINTHLGKEQSRRDDLEALGHMFMYFLRGSLPWQGLKADTLKERYQKIGDTKRATPIEVLCENFPEEMATYLRYVRRLDFFEKPDYDYLRKLFTDLFDRKGYMFDYEYDWIGKQLPTPVGAVQQDPALSSNREAHQHRDKMQQSKNQVVSSTNGELNTDDPTAGRSNAPITAPTEVEVMDETNCQKVLNMWCCCFFKRRKRKTIQRHK

SEQ ID NO: 12118 - protein, 348 aa, Homo sapiens
  Payload ID: 2396
  Gene Symbol: CSNK1G3
  Gene Name: casein kinase 1, gamma 3
  Uniprot ID: Q9Y6M4
  ENSP ID: ENSP00000421998
MKSRAPQLHLEYRFYKQLGSGDGIPQVYYFGPCGKYNAMVLELLGPSLEDLFDLCDRTFSLKTVLMIAIQLISRMEYVHSKNLIYRDVKPENFLIGRPGNKTQQVIHIIDFGLAKEYIDPETKKHIPYREHKSLTGTARYMSINTHLGKEQSRRDDLEALGHMFMYFLRGSLPWQGLKADTLKERYQKIGDTKRATPIEVLCENFPEMATYLRYVRRLDFFEKPDYDYLRKLFTDLFDRKGYMFDYEYDWIGKQLPTPVGAVQQDPALSSNREAHQHRDKMQQSKNQVVSSTNGELNTDDPTAGRSNAPITAPTEVEVMDETNCQKVLNMWCCCFFKRRKRKTIQRHK

SEQ ID NO: 12119 - protein, 424 aa, Homo sapiens
  Payload ID: 2396
  Gene Symbol: CSNK1G3
  Gene Name: casein kinase 1, gamma 3
  Uniprot ID: Q9Y6M4
  ENSP ID: ENSP00000423838
MENKKKDKDKSDDRMARPSGRSGHNTRGTGSSSSGVLMVGPNFRVGKKIGCGNFGELRLGKNLYTNEYVAIKLEPMKSRAPQLHLEYRFYKQLGSGDGIPQVYYFGPCGKYNAMVLELLGPSLEDLFDLCDRTFSLKTVLMIAIQLISRMEYVHSKNLIYRDVKPENFLIGRPGNKTQQVIHIIDFGLAKEYIDPETKKHIPYREHKSLTGTARYMSINTHLGKEQSRRDDLEALGHMFMYFLRGSLPWQGLKADTLKERYQKIGDTKRATPIEVLCENFPEEMATYLRYVRRLDFFEKPDYDYLRKLFTDLFDRKGYMFDYEYDWIGKQLPTPVGAVQQDPALSSNREAHQHRDKMQQSKNQVVSSTNGELNTDDPTAGRSNAPITAPTEVEVMDETNCQKVLNMWCCCFFKRRKRKTIQRHK

SEQ ID NO: 12120 - protein, 423 aa, Homo sapiens; identical to SEQ ID NO: 12114
  Payload ID: 2396
  Gene Symbol: CSNK1G3
  Gene Name: casein kinase 1, gamma 3
  Uniprot ID: Q9Y6M4
  ENSP ID: ENSP00000429412

SEQ ID NO: 12121 - protein, 164 aa, Homo sapiens
  Payload ID: 2396
  Gene Symbol: CSNK1G3
  Gene Name: casein kinase 1, gamma 3
  ENSP ID: ENSP00000429914
  MOD_RES (1)..(1): Any amino acid
XADTLKERYQKIGDTKRATPIEVLCENFPEEMATYLRYVRRLDFFEKPDYDYLRKLFTDLFDRKGYMFDYEYDWIGKQLPTPVGAVQQDPALSSNREAHQHRDKMQQSKNQVVSSTNGELNTDDPTAGRSNAPITAPTEVEVMDETKCCCFFKRRKRKTIQRHK

SEQ ID NO: 12122 - protein, 391 aa, Homo sapiens
  Payload ID: 2397
  Gene Symbol: CSNK2A1
  Gene Name: casein kinase 2, alpha 1 polypeptide
  Uniprot ID: P68400
  ENSP ID: ENSP00000217244
MSGPVPSRARVYTDVNTHRPREYWDYESHVVEWGNQDDYQLVRKLGRGKYSEVFEAINITNNEKVVVKILKPVKKKKIKREIKILENLRGGPNIITLADIVKDPVSRTPALVFEHVNNTDFKQLYQTLTDYDIRFYMYEILKALDYCHSMGIMHRDVKPHNVMIDHEHRKLRLIDWGLAEFYHPGQEYNVRVASRYFKGPELLVDYQMYDYSLDMWSLGCMLASMIFRKEPFFHGHDNYDQLVRIAKVLGTEDLYDYIDKYNIELDPRFNDILGRHSRKRWERFVHSENQHLVSPEALDFLDKLLRYDHQSRLTAREAMEHPYFYTVVKDQARMGSSSMPGGSTPVSSANMMSGISSVPTPSPLGPLAGSPVIAAANPLGMPVPAAAGAQQ

SEQ ID NO: 12123 - protein, 391 aa, Homo sapiens; identical to SEQ ID NO: 12122
  Payload ID: 2397
  Gene Symbol: CSNK2A1
  Gene Name: casein kinase 2, alpha 1 polypeptide
  Uniprot ID: P68400
  ENSP ID: ENSP00000339247

SEQ ID NO: 12124 - protein, 255 aa, Homo sapiens
  Payload ID: 2397
  Gene Symbol: CSNK2A1
  Gene Name: casein kinase 2, alpha 1 polypeptide
  Uniprot ID: P68400
  ENSP ID: ENSP00000383076
MYEILKALDYCHSMGIMHRDVKPHNVMIDHEHRKLRLIDWGLAEFYHPGQEYNVRVASRYFKGPELLVDYQMYDYSLDMWSLGCMLASMIFRKEPFFHGHDNYDQLVRIAKVLGTEDLYDYIDKYNIELDPRFNDILGRHSRKRWERFVHSENQHLVSPEALDFLDKLLRYDHQSRLTAREAMEHPYFYTVVKDQARMGSSSMPGGSTPVSSANMMSGISSVPTPSPLGPLAGSPVIAAANPLGMPVPAAAGAQQ

SEQ ID NO: 12125 - protein, 385 aa, Homo sapiens
  Payload ID: 2397
  Gene Symbol: CSNK2A1
  Gene Name: casein kinase 2, alpha 1 polypeptide
  ENSP ID: ENSP00000383086
MSGPVPSRARVYTDVNTHRPREYWDYESHVVEWGNQDDYQLVRKLGRGKYSEVFEAINITNNEKVVVKILKPVKKKKIKREIKILENLRGGPNIITLADIVKDPVSRTPALVFEHVNNTDFKQLYQTLTDYDIRFYMYEILKALDYCHSMGIMHRDVKPHNVMIDHEHRKLRLIDWGLAEFYHPGQEYNVRVASRYFKGPELLVDYQMYDYSLDMWSLGCMLASMIFRKEPFFHGHDNYDQLVRIAKVLGTEDLYDYIDKYNIELDPRFNDILGRHSRKRWERFVHSENQHLVSPEALDFLDKLLRYDHQSRLTAREAMEHPYFYTVVKDQARMGSSSMPGGSTPVSSANMMSEMKFCRVAQAGLELLSSTVYPPWPPKVLRLEA

SEQ ID NO: 12126 - protein, 79 aa, Homo sapiens
  Payload ID: 2397
  Gene Symbol: CSNK2A1
  Gene Name: casein kinase 2, alpha 1 polypeptide
  ENSP ID: ENSP00000476486
MSGPVPSRARVYTDVNTHRPREYWDYESHVVEWGNQDDYQLVRKLGRGKYSEVFEAINITNNEKVVVKILKPVKKKKIK

SEQ ID NO: 12127 - protein, 74 aa, Homo sapiens
  Payload ID: 2397
  Gene Symbol: CSNK2A1
  Gene Name: casein kinase 2, alpha 1 polypeptide
  ENSP ID: ENSP00000476547
MSGPVPSRARVYTDVNTHRPREYWDYESHVVEWGNQDDYQLVRKLGRGKYSEVFEAINITNNEKVVVKILKPVK

SEQ ID NO: 12128 - protein, 27 aa, Homo sapiens
  Payload ID: 2397
  Gene Symbol: CSNK2A1
  Gene Name: casein kinase 2, alpha 1 polypeptide
  ENSP ID: ENSP00000477147
MYEILKALDYCHSMGIMHRDVKPHNVM

SEQ ID NO: 12129 - protein, 397 aa, Homo sapiens
  Payload ID: 2397
  Gene Symbol: CSNK2A1
  Gene Name: casein kinase 2, alpha 1 polypeptide
  ENSP ID: ENSP00000479630
MSGPVPSRARVYTDVNTHRPREYWDYESHVVEWGNQDDYQLVRKLGRGKYSEVFEAINITNNEKVVVKILKPVKKKKIKREIKILENLRGGPNIITLADIVKDPVSRTPALVFEHVNNTDFKQLYQTLTDYDIRFYMYEILKALDYCHSMGIMHRDVKPHNVMIDHEHRKLRLIDWGLAEFYHPGQEYNVRVASRYFKGPELLVDYQMYDYSLDMWSLGCMLASMIFRKEPFFHGHDNYDQLVRIAKVLGTEDLYDYIDKYNIELDPRFNDILGRHSRKRWERFVHSENQHLVSPEALDFLDKLLRYDHQSRLTAREAMEHPYFYTVVKDQARMGSSSMPGGSTPVSSANMMSGISSVPTPSPLGPLAGSPVIAAANPLGCLFQLPLRSAVTALSVS

SEQ ID NO: 12130 - protein, 118 aa, Homo sapiens
  Payload ID: 2397
  Gene Symbol: CSNK2A1
  Gene Name: casein kinase 2, alpha 1 polypeptide
  ENSP ID: ENSP00000481572
DYIDKYNIELDPRFNDILGRHSRKRWERFVHSENQHLVSPEALDFLDKLLRYDHQSRLTAREAMEHPYFYTVVKDQARMGSSSMPGGSTPVSSANMMSEPQFEGQRDIHHAAVRLGQL

SEQ ID NO: 12131 - protein, 391 aa, Homo sapiens [sequence omitted]

SEQ ID NO: 12132 - protein, 350 aa, Homo sapiens
  Payload ID: 2399
  Gene Symbol: CSNK2A2
  Gene Name: casein kinase 2, alpha prime polypeptide
  Uniprot ID: P19784
  ENSP ID: ENSP00000262506
MPGPAAGSRARVYAEVNSLRSREYWDYEAHVPSWGNQDDYQLVRKLGRGKYSEVFEAINITNNERVVVKILKPVKKKKIKREVKILENLRGGTNIIKLIDTVKDPVSKTPALVFEYINNTDFKQLYQILTDFDIRFYMYELLKALDYCHSKGIMHRDVKPHNVMIDHQQKKLRLIDWGLAEFYHPAQEYNVRVASRYFKGPELLVDYQMYDYSLDMWSLGCMLASMIFRREPFFHGQDNYDQLVRIAKVLGTEELYGYLKKYHIDLDPHFNDILGQHSRKRWENFIHSENRHLVSPEALDLLDKLLRYDHQQRLTAKEAMEHPYFYPVVKEQSQPCADNAVLSSGLTAAR

SEQ ID NO: 12133 - protein, 135 aa, Homo sapiens
  Payload ID: 2399
  Gene Symbol: CSNK2A2
  Gene Name: casein kinase 2, alpha prime polypeptide
  ENSP ID: ENSP00000454874
MPGPAAGSRARVYAEVNSLRSREYWDYEAHVPSWGNQDDYQLVRKLGRGKYSEVFEAINITNNERVVVKILKPVKKKKIKREVKILENLRGGTNIIKLIDTVKDPVSKTPALVFEYINNTDFKQLYQILTDFDIR

SEQ ID NO: 12134 - protein, 230 aa, Homo sapiens
  Payload ID: 2399
  Gene Symbol: CSNK2A2
  Gene Name: casein kinase 2, alpha prime polypeptide
  ENSP ID: ENSP00000456606
PVKKKKIKREVKILENLRGGTNIIKLIDTVKDPVSKTPALVFEYINNTDFKLRLIDWGLAEFYHPAQEYNVRVASRYFKGPELLVDYQMYDYSLDMWSLGCMLASMIFRREPFFHGQDNYDQLVRIAKVLGTEELYGYLKKYHIDLDPHFNDILGQHSRKRWENFIHSENRHLVSPEALDLLDKLLRYDHQQRLTAKEAMEHPYFYPVVKEQSQPCADNAVLSSGLTAAR

SEQ ID NO: 12135 - protein, 152 aa, Homo sapiens
  Payload ID: 2399
  Gene Symbol: CSNK2A2
  Gene Name: casein kinase 2, alpha prime polypeptide
  ENSP ID: ENSP00000457911
  MOD_RES (1)..(1): Any amino acid
XGPELLVDYQMYDYSLDMWSLGCMLASMIFRREPFFHGQDNYDQLVRIAKVLGTEELYGYLKKYHIDLDPHFNDILGQHSRKRWENFIHSENRHLVSPEALDLLDKLLRYDHQQRLTAKEAMEHPYFYPVVKEQSQPCADNAVLSSGLTAAR

SEQ ID NO: 12136 - protein, 215 aa, Homo sapiens
  Payload ID: 2400
  Gene Symbol: CSNK2B
  Gene Name: casein kinase 2, beta polypeptide
  Uniprot ID: P67870
  ENSP ID: ENSP00000365025
MSSSEEVSWISWFCGLRGNEFFCEVDEDYIQDKFNLTGLNEQVPHYRQALDMILDLEPDEELEDNPNQSDLIEQAAEMLYGLIHARYILTNRGIAQMLEKYQQGDFGYCPRVYCENQPMLPIGLSDIPGEAMVKLYCPKCMDVYTPKSSRHHHTDGAYFGTGFPHMLFMVHPEYRPKRPANQFVPRLYGFKIHPMAYQLQLQAASNFKSPVKTIR

SEQ ID NO: 12137 - protein, 215 aa, Homo sapiens; identical to SEQ ID NO: 12136
  Payload ID: 2400
  Gene Symbol: CSNK2B
  Gene Name: casein kinase 2, beta polypeptide
  Uniprot ID: P67870
  ENSP ID: ENSP00000365026

SEQ ID NO: 12138 - protein, 215 aa, Homo sapiens; identical to SEQ ID NO: 12136
  Payload ID: 2400
  Gene Symbol: CSNK2B
  Gene Name: casein kinase 2, beta polypeptide
  Uniprot ID: P67870
  ENSP ID: ENSP00000365042

SEQ ID NO: 12139 - protein, 234 aa, Homo sapiens
  Payload ID: 2400
  Gene Symbol: CSNK2B
  Gene Name: casein kinase 2, beta polypeptide
  ENSP ID: ENSP00000365046
MEKCKGTSRMAGTTSADVKMSSSEEVSWISWFCGLRGNEFFCEVDEDYIQDKFNLTGLNEQVPHYRQALDMILDLEPDEELEDNPNQSDLIEQAAEMLYGLIHARYILTNRGIAQMLEKYQQGDFGYCPRVYCENQPMLPIGLSDIPGEAMVKLYCPKCMDVYTPKSSRHHHTDGAYFGTGFPHMLFMVHPEYRPKRPANQFVPRLYGFKIHPMAYQLQLQAASNFKSPVKTIR

SEQ ID NO: 12140 - protein, 215 aa, Homo sapiens; identical to SEQ ID NO: 12136
  Payload ID: 2400
  Gene Symbol: CSNK2B
  Gene Name: casein kinase 2, beta polypeptide
  Uniprot ID: P67870
  ENSP ID: ENSP00000372919

SEQ ID NO: 12141 - protein, 228 aa, Homo sapiens
  Payload ID: 2400
  Gene Symbol: CSNK2B
  Gene Name: casein kinase 2, beta polypeptide
  ENSP ID: ENSP00000372923
MSSSEEVSWISWFCGLRGNEFFCEVDEDYIQDKFNLTGLNEQVPHYRQALDMILDLEPDEELEDNPNQSDLIEQAAEMLYGLIHARYILTNRGIAQMLEKYQQGDFGYCPRVYCENQPMLPIGLSDIPGEAMVKLYCPKCMDVYTPKSSRHHHTDGAYFGTGFPHMLFMVHPEYRPKRPANQFVPSSCSRHPDVPLLPRRRPFCRMHFRLREVYHQQLIPVHGDHHLL

SEQ ID NO: 12142 - protein, 215 aa, Homo sapiens; identical to SEQ ID NO: 12136
  Payload ID: 2400
  Gene Symbol: CSNK2B
  Gene Name: casein kinase 2, beta polypeptide
  Uniprot ID: P67870
  ENSP ID: ENSP00000372925

SEQ ID NO: 12143 - protein, 215 aa, Homo sapiens; identical to SEQ ID NO: 12136
  Payload ID: 2400
  Gene Symbol: CSNK2B
  Gene Name: casein kinase 2, beta polypeptide
  Uniprot ID: P67870
  ENSP ID: ENSP00000382980

SEQ ID NO: 12144 - protein, 234 aa, Homo sapiens; identical to SEQ ID NO: 12139
  Payload ID: 2400
  Gene Symbol: CSNK2B
  Gene Name: casein kinase 2, beta polypeptide
  ENSP ID: ENSP00000382984

SEQ ID NO: 12145 - protein, 228 aa, Homo sapiens; identical to SEQ ID NO: 12141
  Payload ID: 2400
  Gene Symbol: CSNK2B
  Gene Name: casein kinase 2, beta polypeptide
  ENSP ID: ENSP00000389767

SEQ ID NO: 12146 - protein, 215 aa, Homo sapiens; identical to SEQ ID NO: 12136
  Payload ID: 2400
  Gene Symbol: CSNK2B
  Gene Name: casein kinase 2, beta polypeptide
  Uniprot ID: P67870
  ENSP ID: ENSP00000390900

SEQ ID NO: 12147 - protein, 215 aa, Homo sapiens; identical to SEQ ID NO: 12136
  Payload ID: 2400
  Gene Symbol: CSNK2B
  Gene Name: casein kinase 2, beta polypeptide
  Uniprot ID: P67870
  ENSP ID: ENSP00000391038

SEQ ID NO: 12148 - protein, 215 aa, Homo sapiens; identical to SEQ ID NO: 12136
  Payload ID: 2400
  Gene Symbol: CSNK2B
  Gene Name: casein kinase 2, beta polypeptide
  Uniprot ID: P67870
  ENSP ID: ENSP00000393756

SEQ ID NO: 12149 - protein, 215 aa, Homo sapiens; identical to SEQ ID NO: 12136
  Payload ID: 2400
  Gene Symbol: CSNK2B
  Gene Name: casein kinase 2, beta polypeptide
  Uniprot ID: P67870
  ENSP ID: ENSP00000394855

SEQ ID NO: 12150 - protein, 215 aa, Homo sapiens; identical to SEQ ID NO: 12136
  Payload ID: 2400
  Gene Symbol: CSNK2B
  Gene Name: casein kinase 2, beta polypeptide
  Uniprot ID: P67870
  ENSP ID: ENSP00000395275

SEQ ID NO: 12151 - protein, 234 aa, Homo sapiens; identical to SEQ ID NO: 12139
  Payload ID: 2400
  Gene Symbol: CSNK2B
  Gene Name: casein kinase 2, beta polypeptide
  ENSP ID: ENSP00000395546

SEQ ID NO: 12152 - protein, 234 aa, Homo sapiens; identical to SEQ ID NO: 12139
  Payload ID: 2400
  Gene Symbol: CSNK2B
  Gene Name: casein kinase 2, beta polypeptide
  ENSP ID: ENSP00000396772

SEQ ID NO: 12153 - protein, 215 aa, Homo sapiens; identical to SEQ ID NO: 12136
  Payload ID: 2400
  Gene Symbol: CSNK2B
  Gene Name: casein kinase 2, beta polypeptide
  Uniprot ID: P67870
  ENSP ID: ENSP00000400188

SEQ ID NO: 12154 - protein, 215 aa, Homo sapiens; identical to SEQ ID NO: 12136
  Payload ID: 2400
  Gene Symbol: CSNK2B
  Gene Name: casein kinase 2, beta polypeptide
  Uniprot ID: P67870
  ENSP ID: ENSP00000407018

SEQ ID NO: 12155 - protein, 215 aa, Homo sapiens; identical to SEQ ID NO: 12136
  Payload ID: 2400
  Gene Symbol: CSNK2B
  Gene Name: casein kinase 2, beta polypeptide
  Uniprot ID: P67870
  ENSP ID: ENSP00000407379

SEQ ID NO: 12156 - protein, 228 aa, Homo sapiens; identical to SEQ ID NO: 12141
  Payload ID: 2400
  Gene Symbol: CSNK2B
  Gene Name: casein kinase 2, beta polypeptide
  ENSP ID: ENSP00000407844

SEQ ID NO: 12157 - protein, 228 aa, Homo sapiens; identical to SEQ ID NO: 12141
  Payload ID: 2400
  Gene Symbol: CSNK2B
  Gene Name: casein kinase 2, beta polypeptide
  ENSP ID: ENSP00000407864

SEQ ID NO: 12158 - protein, 215 aa, Homo sapiens; identical to SEQ ID NO: 12136
  Payload ID: 2400
  Gene Symbol: CSNK2B
  Gene Name: casein kinase 2, beta polypeptide
  Uniprot ID: P67870
  ENSP ID: ENSP00000409510

SEQ ID NO: 12159 - protein, 215 aa, Homo sapiens; identical to SEQ ID NO: 12136
  Payload ID: 2400
  Gene Symbol: CSNK2B
  Gene Name: casein kinase 2, beta polypeptide
  Uniprot ID: P67870
  ENSP ID: ENSP00000410802

SEQ ID NO: 12160 - protein, 234 aa, Homo sapiens; identical to SEQ ID NO: 12139
  Payload ID: 2400
  Gene Symbol: CSNK2B
  Gene Name: casein kinase 2, beta polypeptide
  ENSP ID: ENSP00000410942

SEQ ID NO: 12161 - protein, 215 aa, Homo sapiens; identical to SEQ ID NO: 12136
  Payload ID: 2400
  Gene Symbol: CSNK2B
  Gene Name: casein kinase 2, beta polypeptide
  Uniprot ID: P67870
  ENSP ID: ENSP00000411322

SEQ ID NO: 12162 - protein, 215 aa, Homo sapiens; identical to SEQ ID NO: 12136
  Payload ID: 2400
  Gene Symbol: CSNK2B
  Gene Name: casein kinase 2, beta polypeptide
  Uniprot ID: P67870
  ENSP ID: ENSP00000412520

SEQ ID NO: 12163 - protein, 234 aa, Homo sapiens; identical to SEQ ID NO: 12139
  Payload ID: 2400
  Gene Symbol: CSNK2B
  Gene Name: casein kinase 2, beta polypeptide
  ENSP ID: ENSP00000413092

SEQ ID NO: 12164 - protein, 215 aa, Homo sapiens; identical to SEQ ID NO: 12136
  Payload ID: 2400
  Gene Symbol: CSNK2B
  Gene Name: casein kinase 2, beta polypeptide
  Uniprot ID: P67870
  ENSP ID: ENSP00000413469

SEQ ID NO: 12165 - protein, 215 aa, Homo sapiens; identical to SEQ ID NO: 12136
  Payload ID: 2400
  Gene Symbol: CSNK2B
  Gene Name: casein kinase 2, beta polypeptide
  Uniprot ID: P67870
  ENSP ID: ENSP00000415237

SEQ ID NO: 12166 - protein, 215 aa, Homo sapiens; identical to SEQ ID NO: 12136
  Payload ID: 2400
  Gene Symbol: CSNK2B
  Gene Name: casein kinase 2, beta polypeptide
  Uniprot ID: P67870
  ENSP ID: ENSP00000415303

SEQ ID NO: 12167 - protein, 234 aa, Homo sapiens; identical to SEQ ID NO: 12139
  Payload ID: 2400
  Gene Symbol: CSNK2B
  Gene Name: casein kinase 2, beta polypeptide
  ENSP ID: ENSP00000415615

SEQ ID NO: 12168 - protein, 228 aa, Homo sapiens; identical to SEQ ID NO: 12141
  Payload ID: 2400
  Gene Symbol: CSNK2B
  Gene Name: casein kinase 2, beta polypeptide
  ENSP ID: ENSP00000477593

SEQ ID NO: 12169 - protein, 161 aa, Homo sapiens
  Payload ID: 2400
  Gene Symbol: CSNK2B
  Gene Name: casein kinase 2, beta polypeptide
  ENSP ID: ENSP00000477727
MSSSEEVSWISWFCGLRGNEFFCEVDEDYIQDKFNLTGLNEQVPHYRQALDMILDLEPDEELEDNPNQSDLIEQAAEMLYGLIHALPLSDSQIQWFYQALNLSLPLPNFHAGTEPDGLDPMVTLSLNLGLSFAELRRMYLFLNSSGLLVLPQAGLLTPHPS

SEQ ID NO: 12170 - protein, 304 aa, Homo sapiens
  Payload ID: 2400
  Gene Symbol: CSNK2B
  Gene Name: casein kinase 2, beta polypeptide
  ENSP ID: ENSP00000478364
MSSSEEVSWISWFCGLRGNEFFCEVDEDYIQDKFNLTGLNEQVPHYRQALDMILDLEPDEELEDNPNQSDLIEQAAEMLYGLIHARYILTNRGIAQMLEKYQQGDFGYCPRVYCENQPMLPIVPVPDIRTCHFCLVEDPSVGCISGSEKCTISSSSLCMVITIYYDVKVRFIVRGCGQYISYRCQEKRNTYFAEYWYQAQCCQYDYCNSWSSPQLQSSLPEPHDRPLALPLSDSQIQWFYQALNLSLPLPNFHAGTEPDGLDPMVTLSLNLGLSFAELCRMYLFLNSSGLLVLPQAGLLTPHPS

SEQ ID NO: 12171 - protein, 161 aa, Homo sapiens
  Payload ID: 2400
  Gene Symbol: CSNK2B
  Gene Name: casein kinase 2, beta polypeptide
  ENSP ID: ENSP00000478586
MSSSEEVSWISWFCGLRGNEFFCEVDEDYIQDKFNLTGLNEQVPHYRQALDMILDLEPDEELEDNPNQSDLIEQAAEMLYGLIHALPLSDSQIQWFYQALNLSLPLPNFHAGTEPDGLDPMVTLSLNLGLSFAELCRMYLFLNSSGLLVLPQAGLLTPHPS

SEQ ID NO: 12172 - protein, 304 aa, Homo sapiens; identical to SEQ ID NO: 12170
  Payload ID: 2400
  Gene Symbol: CSNK2B
  Gene Name: casein kinase 2, beta polypeptide
  ENSP ID: ENSP00000478717

SEQ ID NO: 12173 - protein, 161 aa, Homo sapiens; identical to SEQ ID NO: 12169
  Payload ID: 2400
  Gene Symbol: CSNK2B
  Gene Name: casein kinase 2, beta polypeptide
  ENSP ID: ENSP00000478919

SEQ ID NO: 12174 - protein, 304 aa, Homo sapiens
  Payload ID: 2400
  Gene Symbol: CSNK2B
  Gene Name: casein kinase 2, beta polypeptide
  ENSP ID: ENSP00000480237
MSSSEEVSWISWFCGLRGNEFFCEVDEDYIQDKFNLTGLNEQVPHYRQALDMILDLEPDEELEDNPNQSDLIEQAAEMLYGLIHARYILTNRGIAQMLEKYQQGDFGYCPRVYCENQPMLPIVPVPDIRTCHFCLVEDPSVGCISGSEKCTISSSSLCMVITIYYDVKVRFIVRGCGQYISYRCQEKRNTYFAEYWYQAQCCQYDYCNSWSSPQLQSSLPEPHDRPLALPLSDSQIQWFYQALNLSLPLPNFHAGTEPDGLDPMVTLSLNLGLSFAELRRMYLFLNSSGLLVLPQAGLLTPHPS

SEQ ID NO: 12175 - protein, 228 aa, Homo sapiens; identical to SEQ ID NO: 12141
  Payload ID: 2400
  Gene Symbol: CSNK2B
  Gene Name: casein kinase 2, beta polypeptide
  ENSP ID: ENSP00000480787

SEQ ID NO: 12176 - protein, 161 aa, Homo sapiens; identical to SEQ ID NO: 12171
  Payload ID: 2400
  Gene Symbol: CSNK2B
  Gene Name: casein kinase 2, beta polypeptide
  ENSP ID: ENSP00000483317

SEQ ID NO: 12177 - protein, 304 aa, Homo sapiens; identical to SEQ ID NO: 12174
  Payload ID: 2400
  Gene Symbol: CSNK2B
  Gene Name: casein kinase 2, beta polypeptide
  ENSP ID: ENSP00000483938

SEQ ID NO: 12178 - protein, 228 aa, Homo sapiens; identical to SEQ ID NO: 12141
  Payload ID: 2400
  Gene Symbol: CSNK2B
  Gene Name: casein kinase 2, beta polypeptide
  ENSP ID: ENSP00000484115

SEQ ID NO: 12179 - protein, 228 aa, Homo sapiens; identical to SEQ ID NO: 12141
  Payload ID: 2400
  Gene Symbol: CSNK2B
  Gene Name: casein kinase 2, beta polypeptide
  ENSP ID: ENSP00000484705

SEQ ID NO: 12180 - protein, 633 aa, Homo sapiens
  Payload ID: 2401
  Gene Symbol: CLPX
  Gene Name: caseinolytic mitochondrial matrix peptidase chaperone subunit
  Uniprot ID: O76031
  ENSP ID: ENSP00000300107
MPSCGACTCGAAAVRLITSSLASAQRGISGGRIHMSVLGRLGTFETQILQRAPLRSFTETPAYFASKDGISKDGSGDGNKKSASEGSSKKSGSGNSGKGGNQLRCPKCGDLCTHVETFVSSTRFVKCEKCHHFFVVLSEADSKKSIIKEPESAAEAVKLAFQQKPPPPPKKIYNYLDKYVVGQSFAKKVLSVAVYNHYKRIYNNIPANLRQQAEVEKQTSLTPRELEIRRREDEYRFTKLLQIAGISPHGNALGASMQQQVNQQIPQEKRGGEVLDSSHDDIKLEKSNILLLGPTGSGKTLLAQTLAKCLDVPFAICDCTTLTQAGYVGEDIESVIAKLLQDANYNVEKAQQGIVFLDEVDKIGSVPGIHQLRDVGGEGVQQGLLKLLEGTIVNVPEKNSRKLRGETVQVDTTNILFVASGAFNGLDRIISRRKNEKYLGFGTPSNLGKGRRAAAAADLANRSGESNTHQDIEEKDRLLRHVEARDLIEFGMIPEFVGRLPVVVPLHSLDEKTLVQILTEPRNAVIPQYQALFSMDKCELNVTEDALKAIARLALERKTGARGLRSIMEKLLLEPMFEVPNSDIVCVEVDKEVVEGKKEPGYIRAPTKESSEEEYDSGVEEEGWPRQADAANS

SEQ ID NO: 12181 - protein, 130 aa, Homo sapiens
  Payload ID: 2401
  Gene Symbol: CLPX
  Gene Name: caseinolytic mitochondrial matrix peptidase chaperone subunit
  ENSP ID: ENSP00000452611
MSVLGRLGTFETQILQRAPLRSFTETPAYFASKDGISKDGSGDGNKKSASEGSSKKSGSGNSGKGGNQLRCPKCGDLCTHVETFVSSTRFVKCEKCHHFFVVLSEADSKKSIIKEPESAAEAVKLAFQQK

SEQ ID NO: 12182 - protein, 268 aa, Homo sapiens
  Payload ID: 2401
  Gene Symbol: CLPX
  Gene Name: caseinolytic mitochondrial matrix peptidase chaperone subunit
  ENSP ID: ENSP00000453461
MPSCGACTCGAAAVRLITSSLASAQRGISGGRIHMSVLGRLGTFETQILQRAPLRSFTETPAYFASKDGISKDGSGDGNKKSASEGSSKKSGSGNSGKGGNQLRCPKCGDLCTHVETFVSSTRFVKCEKCHHFFVVLSEADSKKSIIKEPESAAEAVKLAFQQKPPPPPKKIYNYLDKYVVGQSFAKKVLSVAVYNHYKRIYNNIPANLRQQAEVEKQTSLTPRELEIRRREDEYRFTKLLQIAGISPHGNALGASMQQQVKLCWHKP

SEQ ID NO: 12183 - protein, 277 aa, Homo sapiens
  Payload ID: 2402
  Gene Symbol: CLPP
  Gene Name: caseinolytic mitochondrial matrix peptidase proteolytic subunit
  Uniprot ID: Q16740
  ENSP ID: ENSP00000245816
MWPGILVGGARVASCRYPALGPRLAAHFPAQRPPQRTLQNGLALQRCLHATATRALPLIPIVVEQTGRGERAYDIYSRLLRERIVCVMGPIDDSVASLVIAQLLFLQSESNKKPIHMYINSPGGVVTAGLAIYDTMQYILNPICTWCVGQAASMGSLLLAAGTPGMRHSLPNSRIMIHQPSGGARGQATDIAIQAEEIMKLKKQLYNIYAKHTKQSLQVIESAMERDRYMSPMEAQEFGILDKVLVHPPQDGEDEPTLVQKEPVEAAPAAEPVPAST

SEQ ID NO: 12184 - protein, 56 aa, Homo sapiens
  Payload ID: 2402
  Gene Symbol: CLPP
  Gene Name: caseinolytic mitochondrial matrix peptidase proteolytic subunit
  ENSP ID: ENSP00000469124
MGPIDDSVASLVIAQLLFLQSESNKKPIHMYINSPGPSHRHCHPGRGDHEAQEAAL

SEQ ID NO: 12185 - protein, 160 aa, Homo sapiens
  Payload ID: 2402
  Gene Symbol: CLPP
  Gene Name: caseinolytic mitochondrial matrix peptidase proteolytic subunit
  ENSP ID: ENSP00000470098
SFPSWWSRRVAASAPMTSTRGCCGSASCASWARSMTALPALLSHSSSSCNPRATRSPSTCGVVTAGLAIYDTMQYILNPICTWCVGQAASMGSLLLAAGTPGMRHSLPNSRIMIHQPSGGARGQATDIAIQAEEIMKLKKQLYNIYAKHTKQSLQVIESA

SEQ ID NO: 12186 - protein, 190 aa, Homo sapiens
  Payload ID: 2402
  Gene Symbol: CLPP
  Gene Name: caseinolytic mitochondrial matrix peptidase proteolytic subunit
  ENSP ID: ENSP00000472227
MGPIDDSVASLVIAQLLFLQSESNKKPIHMYINSPGGVVTAGLAIYDTMQYILNPICTWCVGQAASMGSLLLAAGTPGMRHSLPNSRIMIHQPSGGARGQATDIAIQAEEIMKLKKQLYNIYAKHTKQSLQVIESAMERDRYMSPMEAQEFGILDKVLVHPPQDGEDEPTLVQKEPVEAAPAAEPVPAST

SEQ ID NO: 12187 - protein, 1431 aa, Homo sapiens
  Payload ID: 2403
  Gene Symbol: CASKIN1
  Gene Name: CASK interacting protein 1
  Uniprot ID: Q8WXD9
  ENSP ID: ENSP00000345436
MGKEQELVQAVKAEDVGTAQRLLQRPRPGKAKLLGSTKKINVNFQDPDGFSALHHAALNGNTELISLLLEAQAAVDIKDNKGMRPLHYAAWQGRKEPMKLVLKAGSAVNIPSDEGHIPLHLAAQHGHYDVSEMLLQHQSNPCMVDNSGKTPLDLACEFGRVGVVQLLLSSNMCAALLEPRPGDATDPNGTSPLHLAAKNGHIDIIRLLLQAGIDINRQTKSGTALHEAALCGKTEVVRLLLDSGINAHVRNTYSQTALDIVHQFTTSQASREIKQLLREASAALQVRATKDYCNNYDLTSLNVKAGDIITVLEQHPDGRWKGCIHDNRTGNDRVGYFPSSLGEAIVKRAGSRAGTEPSLPQGSSSSGPSAPPEEIWVLRKPFAGGDRSGSISGMAGGRGSGGHALHAGSEGVKLLATVLSQKSVSESGPGDSPAKPPEGSAGVARSQPPVAHAGQVYGEQPPKKLEPASEGKSSEAVSQWLTAFQLQLYAPNFISAGYDLPTISRMTPEDLTAIGVTKPGHRKKIAAEISGLSIPDWLPEHKPANLAVWLSMIGLAQYYKVLVDNGYENIDFITDITWEDLQEIGITKLGHQKKLMLAVRKLAELQKAEYAKYEGGPLRRKAPQSLEVMAIESPPPPEPTPADCQSPKMTTFQDSELSDELQAAMTGPAEVGPTTEKPSSHLPPTPRATTRQDSSLGGRARHMSSSQELLGDGPPGPSSPMSRSQEYLLDEGPAPGTPPREARPGRHGHSIKRASVPPVPGKPRQVLPPGTSHFTPPQTPTKTRPGSPQALGGPHGPAPATAKVKPTPQLLPPTERPMSPRSLPQSPTHRGFAYVLPQPVEGEVGPAAPGPAPPPVPTAVPTLCLPPEADAEPGRPKKRAHSLNRYAASDSEPERDELLVPAAAGPYATVQRRVGRSHSVRAPAGADKNVNRSQSFAVRPRKKGPPPPPPKRSSSALASANLADEPVPDAEPEDGLLGVRAQCRRASDLAGSVDTGSAGSVKSIAAMLELSSIGGGGRAARRPPEGHPTPRPASPEPGRVATVLASVKHKEAIGPGGEVVNRRRTLSGPVTGLLATARRGPGESADPGPFVEDGTGRQRPRGPSKGEAGVEGPPLAKVEASATLKRRIRAKQNQQENVKFILTESDTVKRRPKAKEREAGPEPPPPLSVYHNGTGTVRRRPASEQAGPPELPPPPPPAEPPPTDLAHLPPLPPPEGEARKPAKPPVSPKPVLTQPVPKLQGSPTPTSKKVPLPGPGSPEVKRAHGTPPPVSPKPPPPPTAPKPVKAVAGLPSGSAGPSPAPSPARQPPAALAKPPGTPPSLGASPAKPPSPGAPALHVPAKPPRAAAAAAAAAAAPPAPPEGASPGDSARQKLEETSACLAAALQAVEEKIRQEDAQGPRDSAAEKSTGSILDDIGSMFDDLADQLDAMLE

SEQ ID NO: 12188 - protein, 1202 aa, Homo sapiens
  Payload ID: 2404
  Gene Symbol: CASKIN2
  Gene Name: CASK interacting protein 2
  Uniprot ID: Q8WXE0
  ENSP ID: ENSP00000325355
MGREQDLILAVKNGDVTGVQKLVAKVKATKTKLLGSTKRLNVNYQDADGFSALHHAALGGSLELIALLLEAQATVDIKDSNGMRPLHYAAWQGRLEPVRLLLRASAAVNAASLDGQIPLHLAAQYGHYEVSEMLLQHQSNPCLVNKAKKTPLDLACEFGRLKVAQLLLNSHLCVALLEGEAKDPCDPNYTTPLHLAAKNGHREVIRQLLRAGIEINRQTKTGTALHEAALYGKTEVVRLLLEGGVDVNIRNTYNQTALDIVNQFTTSQASREIKQLLREASGILKVRALKDFWNLHDPTALNVRAGDVITVLEQHPDGRWKGHIHESQRGTDRIGYFPPGIVEVVSKRVGIPAARLPSAPTPLRPGFSRTPQPPAEEPPHPLTYSQLPRVGLSPDSPAGDRNSVGSEGSVGSIRSAGSGQSSEGTNGHGPGLLIENAQPLPSAGEDQVLPGLHPPSLADNLSHRPLANCRSGEQIFTQDVRPEQLLEGKDAQAIHNWLSEFQLEGYTAHFLQAGYDVPTISRMTPEDLTAIGVTKPGHRKKIASEIAQLSIAEWLPSYIPTDLLEWLCALGLPQYHKQLVSSGYDSMGLVADLTWEELQEIGVNKLGHQKKLMLGVKRLAELRRGLLQGEALSEGGRRLAKGPELMAIEGLENGEGPATAGPRLLTFQGSELSPELQAAMAGGGPEPLPLPPARSPSQESIGARSRGSGHSQEQPAPQPSGGDPSPPQERNLPEGTERPPKLCSSLPGQGPPPYVFMYPQGSPSSPAPGPPPGAPWAFSYLAGPPATPPDPPRPKRRSHSLSRPGPTEGDAEGEAEGPVGSTLGSYATLTRRPGRSALVRTSPSVTPTPARGTPRSQSFALRARRKGPPPPPPKRLSSVSGPSPEPPPLDESPGPKEGATGPRRRTLSEPAGPSEPPGPPAPAGPASDTEEEEPGPEGTPPSRGSSGEGLPFAEEGNLTIKQRPKPAGPPPRETPVPPGLDFNLTESDTVKRRPKCREREPLQTALLAFGVASATPGPAAPLPSPTPGESPPASSLPQPEPSSLPAQGVPTPLAPSPAMQPPVPPCPGPGLESSAASRWNGETEPPAAPAALLKVPGAGTAPKPVSVACTQLAFSGPKLAPRLGPRPVPPPRPESTGTVGPGQAQQRLEQTSSSLAAALRAAEKSIGTKEQEGTPSASTKHILDDISTMFDALADQLDAMLD

SEQ ID NO: 12189 - protein, 1120 aa, Homo sapiens
  Payload ID: 2404
  Gene Symbol: CASKIN2
  Gene Name: CASK interacting protein 2
  Uniprot ID: Q8WXE0
  ENSP ID: ENSP00000406963
MRPLHYAAWQGRLEPVRLLLRASAAVNAASLDGQIPLHLAAQYGHYEVSEMLLQHQSNPCLVNKAKKTPLDLACEFGRLKVAQLLLNSHLCVALLEGEAKDPCDPNYTTPLHLAAKNGHREVIRQLLRAGIEINRQTKTGTALHEAALYGKTEVVRLLLEGGVDVNIRNTYNQTALDIVNQFTTSQASREIKQLLREASGILKVRALKDFWNLHDPTALNVRAGDVITVLEQHPDGRWKGHIHESQRGTDRIGYFPPGIVEVVSKRVGIPAARLPSAPTPLRPGFSRTPQPPAEEPPHPLTYSQLPRVGLSPDSPAGDRNSVGSEGSVGSIRSAGSGQSSEGTNGHGPGLLIENAQPLPSAGEDQVLPGLHPPSLADNLSHRPLANCRSGEQIFTQDVRPEQLLEGKDAQAIHNWLSEFQLEGYTAHFLQAGYDVPTISRMTPEDLTAIGVTKPGHRKKIASEIAQLSIAEWLPSYIPTDLLEWLCALGLPQYHKQLVSSGYDSMGLVADLTWEELQEIGVNKLGHQKKLMLGVKRLAELRRGLLQGEALSEGGRRLAKGPELMAIEGLENGEGPATAGPRLLTFQGSELSPELQAAMAGGGPEPLPLPPARSPSQESIGARSRGSGHSQEQPAPQPSGGDPSPPQERNLPEGTERPPKLCSSLPGQGPPPYVFMYPQGSPSSPAPGPPPGAPWAFSYLAGPPATPPDPPRPKRRSHSLSRPGPTEGDAEGEAEGPVGSTLGSYATLTRRPGRSALVRTSPSVTPTPARGTPRSQSFALRARRKGPPPPPPKRLSSVSGPSPEPPPLDESPGPKEGATGPRRRTLSEPAGPSEPPGPPAPAGPASDTEEEEPGPEGTPPSRGSSGEGLPFAEEGNLTIKQRPKPAGPPPRETPVPPGLDFNLTESDTVKRRPKCREREPLQTALLAFGVASATPGPAAPLPSPTPGESPPASSLPQPEPSSLPAQGVPTPLAPSPAMQPPVPPCPGPGLESSAASRWNGETEPPAAPAALLKVPGAGTAPKPVSVACTQLAFSGPKLAPRLGPRPVPPPRPESTGTVGPGQAQQRLEQTSSSLAAALRAAEKSIGTKEQEGTPSASTKHILDDISTMFDALADQLDAMLD

SEQ ID NO: 12190 - protein, 25 aa, Homo sapiens
  Payload ID: 2404
  Gene Symbol: CASKIN2
  Gene Name: CASK interacting protein 2
  ENSP ID: ENSP00000463211
MGREQDLILAVKNGDVTGVQKLVAK

SEQ ID NO: 12191 - protein, 323 aa, Homo sapiens
  Payload ID: 2404
  Gene Symbol: CASKIN2
  Gene Name: CASK interacting protein 2
  ENSP ID: ENSP00000464300
MGREQDLILAVKNGDVTGVQKLVAKVKATKTKLLGSTKRLNVNYQDADGFSALHHAALGGSLELIALLLEAQATVDIKDSNGMRPLHYAAWQGRLEPVRLLLRASAAVNAASLDGQIPLHLAAQYGHYEVSEMLLQHQSNPCLVNKAKKTPLDLACEFGRLKVAQLLLNSHLCVALLEGEAKDPCDPNYTTPLHLAAKNGHREVIRQLLRAGIEINRQTKTGTALHEAALYGKTEVVRLLLEGGVDVNIRNTYNQTALDIVNQFTTSQASREIKQLLREASGILKVRALKDFWNLHDPTALNVRAGDVITVRDPKQAFLCKYK

SEQ ID NO: 12192 - protein, 199 aa, Homo sapiens
  Payload ID: 2405
  Gene Symbol: CRADD
  Gene Name: CASP2 and RIPK1 domain containing adaptor with death domain
  Uniprot ID: P78560
  ENSP ID: ENSP00000327647
MEARDKQVLRSLRLELGAEVLVEGLVLQYLYQEGILTENHIQEINAQTTGLRKTMLLLDILPSRGPKAFDTFLDSLQEFPWVREKLKKAREEAMTDLPAGDRLTGIPSHILNSSPSDRQINQLAQRLGPEWEPMVLSLGLSQTDIYRCKANHPHNVQSQVVEAFIRWRQRFGKQATFQSLHNGLRAVEVDPSLLLHMLE

SEQ ID NO: 12193 - protein, 199 aa, Homo sapiens; identical to SEQ ID NO: 12192
  Payload ID: 2405
  Gene Symbol: CRADD
  Gene Name: CASP2 and RIPK1 domain containing adaptor with death domain
  Uniprot ID: P78560
  ENSP ID: ENSP00000439068

SEQ ID NO: 12194 - protein, 103 aa, Homo sapiens
  Payload ID: 2405
  Gene Symbol: CRADD
  Gene Name: CASP2 and RIPK1 domain containing adaptor with death domain
  Uniprot ID: P78560
  ENSP ID: ENSP00000448425
MEARDKQVLRSLRLELGAEVLVEGLVLQYLYQEGILTENHIQEINAQTTGLRKTMLLLDILPSRGPKAFDTFLDSLQEFPWVREKLKKAREEAMTDLPAGCWP

SEQ ID NO: 12195 - protein, 121 aa, Homo sapiens
  Payload ID: 2405
  Gene Symbol: CRADD
  Gene Name: CASP2 and RIPK1 domain containing adaptor with death domain
  ENSP ID: ENSP00000448685
MEARDKQVLRSLRLELGAEVLVEGLVLQYLYQEGILTENHIQEINAQTTGLRKTMLLLDILPSRGPKAFDTFLDSLQEFPWVREKLKKAREEAMTDLPAEMRKLRPKDSVTCLASQLTWRF

SEQ ID NO: 12196 - protein, 130 aa, Homo sapiens
  Payload ID: 2405
  Gene Symbol: CRADD
  Gene Name: CASP2 and RIPK1 domain containing adaptor with death domain
  ENSP ID: ENSP00000449570
MEARDKQVLRSLRLELGAEVLVEGLVLQYLYQEGILTENHIQEINAQTTGLRKTMLLLDILPSRGPKAFDTFLDSLQEFPWVREKLKKAREEAMTDLPAGLEEKGRTGRRMGWGAGEEKGQKCQTVGMRT

SEQ ID NO: 12197 - protein, 115 aa, Homo sapiens
  Payload ID: 2405
  Gene Symbol: CRADD
  Gene Name: CASP2 and RIPK1 domain containing adaptor with death domain
  ENSP ID: ENSP00000449664
MEARDKQVLRSLRLELGAEVLVEGLVLQYLYQEGILTENHIQEINAQTTGLRKTMLLLDILPSRGPKAFDTFLDSLQEFPWVREKLKKAREEAMTDLPAVAIIRLPRELSLPTLL

SEQ ID NO: 12198 - protein, 480 aa, Homo sapiens
  Payload ID: 2406
  Gene Symbol: CFLAR
  Gene Name: CASP8 and FADD-like apoptosis regulator
  Uniprot ID: O15519
  ENSP ID: ENSP00000312455
MSAEVIHQVEEALDTDEKEMLLFLCRDVAIDVVPPNVRDLLDILRERGKLSVGDLAELLYRVRRFDLLKRILKMDRKAVETHLLRNPHLVSDYRVLMAEIGEDLDKSDVSSLIFLMKDYMGRGKISKEKSFLDLVVELEKLNLVAPDQLDLLEKCLKNIHRIDLKTKIQKYKQSVQGAGTSYRNVLQAAIQKSLKDPSNNFRLHNGRSKEQRLKEQLGAQQEPVKKSIQESEAFLPQSIPEERYKMKSKPLGICLIIDCIGNETELLRDTFTSLGYEVQKFLHLSMHGISQILGQFACMPEHRDYDSFVCVLVSRGGSQSVYGVDQTHSGLPLHHIRRMFMGDSCPYLAGKPKMFFIQNYVVSEGQLEDSSLLEVDGPAMKNVEFKAQKRGLCTVHREADFFWSLCTADMSLLEQSHSSPSLYLQCLSQKLRQERKRPLLDLHIELNGYMYDWNSRVSAKEKYYVWLQHTLRKKLILSYT

SEQ ID NO: 12199 - protein, 321 aa, Homo sapiens
  Payload ID: 2406
  Gene Symbol: CFLAR
  Gene Name: CASP8 and FADD-like apoptosis regulator
  ENSP ID: ENSP00000339326
MAEIGEDLDKSDVSSLIFLMKDYMGRGKISKEKSFLDLVVELEKLNLVAPDQLDLLEKCLKNIHRIDLKTKIQKYKQSVQGAGTSYRNVLQAAIQKSLKDPSNNFREEPVKKSIQESEAFLPQSIPEERYKMKSKPLGICLIIDCIGNETELLRDTFTSLGYEVQKFLHLSMHGISQILGQFACMPEHRDYDSFVCVLVSRGGSQSVYGVDQTHSGLPLHHIRRMFMGDSCPYLAGKPKMFFIQNYVVSEGQLEDSSLLEVDGPAMKNVEFKAQKRGLCTVHREADFFWSLCTADMSLLEQSHSSPSLYLQCLSQKLRQER

SEQ ID NO: 12200 - protein, 221 aa, Homo sapiens
  Payload ID: 2406
  Gene Symbol: CFLAR
  Gene Name: CASP8 and FADD-like apoptosis regulator
  Uniprot ID: O15519
  ENSP ID: ENSP00000339335
MSAEVIHQVEEALDTDEKEMLLFLCRDVAIDVVPPNVRDLLDILRERGKLSVGDLAELLYRVRRFDLLKRILKMDRKAVETHLLRNPHLVSDYRVLMAEIGEDLDKSDVSSLIFLMKDYMGRGKISKEKSFLDLVVELEKLNLVAPDQLDLLEKCLKNIHRIDLKTKIQKYKQSVQGAGTSYRNVLQAAIQKSLKDPSNNFRMITPYAHCPDLKILGNCSM

SEQ ID NO: 12201 - protein, 292 aa, Homo sapiens
  Payload ID: 2406
  Gene Symbol: CFLAR
  Gene Name: CASP8 and FADD-like apoptosis regulator
  Uniprot ID: O15519
  ENSP ID: ENSP00000342809
MSAEVIHQVEEALDTDEKEMLLFLCRDVAIDVVPPNVRDLLDILRERGKLSVGDLAELLYRVRRFDLLKRILKMDRKAVETHLLRNPHLVSDYRVLMAEIGEDLDKSDVSSLIFLMKDYMGRGKISKEKSFLDLVVELEKLNLVAPDQLDLLEKCLKNIHRIDLKTKIQKYKQSVQGAGTSYRNVLQAAIQKSLKDPSNNFRLHNGRSKEQRLKEQLGAQQEPVKKSIQESEAFLPQSIPEERYKMKSKPLGICLIIDCIGNETGWSAMAQSQLTAISTSQVQAILLPQPPE

SEQ ID NO: 12202 - protein, 445 aa, Homo sapiens
  Payload ID: 2406
  Gene Symbol: CFLAR
  Gene Name: CASP8 and FADD-like apoptosis regulator
  Uniprot ID: O15519
  ENSP ID: ENSP00000345807
MSAEVIHQVEEALDTDEKEMLLFLCRDVAIDVVPPNVRDLLDILRERGKLSVGDLAELLYRVRRFDLLKRILKMDRKAVETHLLRNPHLVSDYRVLMAEIGEDLDKSDVSSLIFLMKDYMGRGKISKEKSFLDLVVELEKLNLVAPDQLDLLEKCLKNIHRIDLKTKIQKYKQSVQGAGTSYRNVLQAAIQKSLKDPSNNFRSIPEERYKMKSKPLGICLIIDCIGNETELLRDTFTSLGYEVQKFLHLSMHGISQILGQFACMPEHRDYDSFVCVLVSRGGSQSVYGVDQTHSGLPLHHIRRMFMGDSCPYLAGKPKMFFIQNYVVSEGQLEDSSLLEVDGPAMKNVEFKAQKRGLCTVHREADFFWSLCTADMSLLEQSHSSPSLYLQCLSQKLRQERKRPLLDLHIELNGYMYDWNSRVSAKEKYYVWLQHTLRKKLILSYT

SEQ ID NO: 12203 - protein, 250 aa, Homo sapiens
  Payload ID: 2406
  Gene Symbol: CFLAR
  Gene Name: CASP8 and FADD-like apoptosis regulator
  ENSP ID: ENSP00000378580
MSAEVIHQVEEALDTDEKEMLLFLCRDVAIDVVPPNVRDLLDILRERGKLSVGDLAELLYRVRRFDLLKRILKMDRKAVETHLLRNPHLVSDYRVLMAEIGEDLDKSDVSSLIFLMKDYMGRGKISKEKSFLDLVVELEKLNLVAPDQLDLLEKCLKNIHRIDLKTKIQKYKQSGGWNGTWMTKASFSLWLEIASLYILHIPDLPTPLPCIFMISAKCCQAVLNISVFKKESGICTGWQSYGHSGVLHVC

SEQ ID NO: 12204 - protein, 64 aa, Homo sapiens
  Payload ID: 2406
  Gene Symbol: CFLAR
  Gene Name: CASP8 and FADD-like apoptosis regulator
  ENSP ID: ENSP00000391029
MSAEVIHQVEEALDTDEKEMLLFLCRDVAIDVVPPNVRDLLDILRERGKLSVGDLAELLYRVRR

SEQ ID NO: 12205 - protein, 243 aa, Homo sapiens
  Payload ID: 2406
  Gene Symbol: CFLAR
  Gene Name: CASP8 and FADD-like apoptosis regulator
  ENSP ID: ENSP00000398551
MSAEVIHQVEEALDTDEKEMLLFLCRDVAIDVVPPNVRDLLDILRERGKLSVGDLAELLYRVRRFDLLKRILKMDRKAVETHLLRNPHLVSDYRVLMAEIGEDLDKSDVSSLIFLMKDYMGRGKISKEKSFLDLVVELEKLNLVAPDQLDLLEKCLKNIHRIDLKTKIQKYKQSVQGAGTSYRNVLQAAIQKSLKDPSNNFRAGVQWRDLGSPQPPPPGFKRFSHLSLPSSWDYRNVPPRPAP

SEQ ID NO: 12206 - protein, 480 aa, Homo sapiens; identical to SEQ ID NO: 12198
  Payload ID: 2406
  Gene Symbol: CFLAR
  Gene Name: CASP8 and FADD-like apoptosis regulator
  Uniprot ID: O15519
  ENSP ID: ENSP00000399420

SEQ ID NO: 12207 - protein, 221 aa, Homo sapiens; identical to SEQ ID NO: 12200
  Payload ID: 2406
  Gene Symbol: CFLAR
  Gene Name: CASP8 and FADD-like apoptosis regulator
  Uniprot ID: O15519
  ENSP ID: ENSP00000406775

SEQ ID NO: 12208 - protein, 62 aa, Homo sapiens
  Payload ID: 2406
  Gene Symbol: CFLAR
  Gene Name: CASP8 and FADD-like apoptosis regulator
  ENSP ID: ENSP00000409570
MSAEVIHQVEEALDTDEKEMLLFLCRDVAIDVVPPNVRDLLDILRERGKLSVGDLAELLYRV

SEQ ID NO: 12209 - protein, 462 aa, Homo sapiens
  Payload ID: 2406
  Gene Symbol: CFLAR
  Gene Name: CASP8 and FADD-like apoptosis regulator
  Uniprot ID: O15519
  ENSP ID: ENSP00000411535
MSAEVIHQVEEALDTDEKEMLLFLCRDVAIDVVPPNVRDLLDILRERGKLSVGDLAELLYRVRRFDLLKRILKMDRKAVETHLLRNPHLVSDYRVLMAEIGEDLDKSDVSSLIFLMKDYMGRGKISKEKSFLDLVVELEKLNLVAPDQLDLLEKCLKNIHRIDLKTKIQKYKQSVQGAGTSYRNVLQAAIQKSLKDPSNNFRLHNGRSKEQRLKEQLGAQQEPVKKSIQESEAFLPQSIPEERYKMKSKPLGICLIIDCIGNETELLRDTFTSLGYEVQKFLHLSMHGISQILGQFACMPEHRDYDSFVCVLVSRGGSQSVYGVDQTHSGLPLHHIRRMFMGDSCPYLAGKPKMFFIQNYVVSEGQLEDSSLLEVDGPAMKNVEFKAQKRGLCTVHREADFFWSLCTADMSLLEQSHSSPSLYLQCLSQKLRQERGTIPGSGITESKDMHFSSLGCILLDVL

SEQ ID NO: 12210 - protein, 129 aa, Homo sapiens
  Payload ID: 2406
  Gene Symbol: CFLAR
  Gene Name: CASP8 and FADD-like apoptosis regulator
  ENSP ID: ENSP00000411897
MSAEVIHQVEEALDTDEKEMLLFLCRDVAIDVVPPNVRDLLDILRERGKLSVGDLAELLYRVRRFDLLKRILKMDRKAVETHLLRNPHLVSDYRVLMAEIGEDLDKSDVSSLIFLMKDYMGRGKISKEK

SEQ ID NO: 12211 - protein, 118 aa, Homo sapiens
  Payload ID: 2406
  Gene Symbol: CFLAR
  Gene Name: CASP8 and FADD-like apoptosis regulator
  ENSP ID: ENSP00000412882
MSAEVIHQVEEALDTDEKEMLLFLCRDVAIDVVPPNVRDLLDILRERGKLSVGDLAELLYRVRRFDLLKRILKMDRKAVETHLLRNPHLVSDYRVLMAEIGEDLDKSDVSSLIFLMKD

SEQ ID NO: 12212 - protein, 384 aa, Homo sapiens
  Payload ID: 2406
  Gene Symbol: CFLAR
  Gene Name: CASP8 and FADD-like apoptosis regulator
  Uniprot ID: O15519
  ENSP ID: ENSP00000413270
MAEIGEDLDKSDVSSLIFLMKDYMGRGKISKEKSFLDLVVELEKLNLVAPDQLDLLEKCLKNIHRIDLKTKIQKYKQSVQGAGTSYRNVLQAAIQKSLKDPSNNFRLHNGRSKEQRLKEQLGAQQEPVKKSIQESEAFLPQSIPEERYKMKSKPLGICLIIDCIGNETELLRDTFTSLGYEVQKFLHLSMHGISQILGQFACMPEHRDYDSFVCVLVSRGGSQSVYGVDQTHSGLPLHHIRRMFMGDSCPYLAGKPKMFFIQNYVVSEGQLEDSSLLEVDGPAMKNVEFKAQKRGLCTVHREADFFWSLCTADMSLLEQSHSSPSLYLQCLSQKLRQERKRPLLDLHIELNGYMYDWNSRVSAKEKYYVWLQHTLRKKLILSYT

SEQ ID NO: 12213 - protein, 117 aa, Homo sapiens
  Payload ID: 2406
  Gene Symbol: CFLAR
  Gene Name: CASP8 and FADD-like apoptosis regulator
  ENSP ID: ENSP00000469608
MAEIGEDLDKSDVSSLIFLMKDYMGRGKISKEKSFLDLVVELEKLNLVAPDQLDLLEKCLKNIHRIDLKTKIQKYKQSVQGAGTSYRNVLQAAIQKSLKDPSNNFRVSLEKTYGIPA

SEQ ID NO: 12214 - protein, 168 aa, Homo sapiens
  Payload ID: 2406
  Gene Symbol: CFLAR
  Gene Name: CASP8 and FADD-like apoptosis regulator
  ENSP ID: ENSP00000469917
MAEIGEDLDKSDVSSLIFLMKDYMGRGKISKEKSFLDLVVELEKLNLVAPDQLDLLEKCLKNIHRIDLKTKIQKYKQSVQGAGTSYRNVLQAAIQKSLKDPSNNFRLHNGRSKEQRLKEQLGAQQEPVKKSIQESEAFLPQSIPEERYKMKSKPLGICLIIDCIGNET

SEQ ID NO: 12215 - protein, 117 aa, Homo sapiens
  Payload ID: 2406
  Gene Symbol: CFLAR
  Gene Name: CASP8 and FADD-like apoptosis regulator
  ENSP ID: ENSP00000471749
MAEIGEDLDKSDVSSLIFLMKDYMGRGKISKEKSFLDLVVELEKLNLVAPDQLDLLEKCLKNIHRIDLKTKIQKYKQSVQGAGTSYRNVLQAAIQKSLKDPSNNFRMITPYAHCPDL

SEQ ID NO: 12216 - protein, 366 aa, Homo sapiens
  Payload ID: 2406
  Gene Symbol: CFLAR
  Gene Name: CASP8 and FADD-like apoptosis regulator
  Uniprot ID: O15519
  ENSP ID: ENSP00000471805
MAEIGEDLDKSDVSSLIFLMKDYMGRGKISKEKSFLDLVVELEKLNLVAPDQLDLLEKCLKNIHRIDLKTKIQKYKQSVQGAGTSYRNVLQAAIQKSLKDPSNNFRLHNGRSKEQRLKEQLGAQQEPVKKSIQESEAFLPQSIPEERYKMKSKPLGICLIIDCIGNETELLRDTFTSLGYEVQKFLHLSMHGISQILGQFACMPEHRDYDSFVCVLVSRGGSQSVYGVDQTHSGLPLHHIRRMFMGDSCPYLAGKPKMFFIQNYVVSEGQLEDSSLLEVDGPAMKNVEFKAQKRGLCTVHREADFFWSLCTADMSLLEQSHSSPSLYLQCLSQKLRQERGTIPGSGITESKDMHFSSLGCILLDVL

SEQ ID NO: 12217 - protein, 88 aa, Homo sapiens
  Payload ID: 2407
  Gene Symbol: CASP1
  Gene Name: caspase 1, apoptosis-related cysteine peptidase
  Uniprot ID: P29466
  ENSP ID: ENSP00000344132
MADKVLKEKRKLFIRSMGEDNVSWRHPTMGSVFIGRLIEHMQEYACSCDVEEIFRKVRFSFEQPDGRAQMPTTERVTLTRCFYLFPGH

SEQ ID NO: 12218 - protein, 263 aa, Homo sapiens
  Payload ID: 2407
  Gene Symbol: CASP1
  Gene Name: caspase 1, apoptosis-related cysteine peptidase
  Uniprot ID: P29466
  ENSP ID: ENSP00000403260
MADKVLKEKRKLFIRSMGEAPQAVQDNPAMPTSSGSEGNVKLCSLEEAQRIWKQKSAEIYPIMDKSSRTRLALIICNEEFDSIPRRTGAEVDITGMTMLLQNLGYSVDVKKNLTASDMTTELEAFAHRPEHKTSDSTFLVFMSHGIREGICGKKHSEQVPDILQLNAIFNMLNTKNCPSLKDKPKVIIIQACRGDNVSWRHPTMGSVFIGRLIEHMQEYACSCDVEEIFRKVRFSFEQPDGRAQMPTTERVTLTRCFYLFPGH

SEQ ID NO: 12219 - protein, 404 aa, Homo sapiens
  Payload ID: 2407
  Gene Symbol: CASP1
  Gene Name: caspase 1, apoptosis-related cysteine peptidase
  Uniprot ID: P29466
  ENSP ID: ENSP00000410076
MADKVLKEKRKLFIRSMGEGTINGLLDELLQTRVLNKEEMEKVKRENATVMDKTRALIDSVIPKGAQACQICITYICEEDSYLAGTLGLSADQTSGNYLNMQDSQGVLSSFPAPQAVQDNPAMPTSSGSEGNVKLCSLEEAQRIWKQKSAEIYPIMDKSSRTRLALIICNEEFDSIPRRTGAEVDITGMTMLLQNLGYSVDVKKNLTASDMTTELEAFAHRPEHKTSDSTFLVFMSHGIREGICGKKHSEQVPDILQLNAIFNMLNTKNCPSLKDKPKVIIIQACRGDSPGVVWFKDSVGVSGNLSLPTTEEFEDDAIKKAHIEKDFIAFCSSTPDNVSWRHPTMGSVFIGRLIEHMQEYACSCDVEEIFRKVRFSFEQPDGRAQMPTTERVTLTRCFYLFPGH

SEQ ID NO: 12220 - protein, 110 aa, Homo sapiens
  Payload ID: 2407
  Gene Symbol: CASP1
  Gene Name: caspase 1, apoptosis-related cysteine peptidase
  ENSP ID: ENSP00000431947
MADKVLKEKRKLFIRSMGEGTINGLLDELLQTRVLNKEEMEKVKRENATVMDKTRALIDSVIPKGAQACQICITYICEEDSYLAGTLGLSADLSNNGQVKPHTSCSHYLQ

SEQ ID NO: 12221 - protein, 367 aa, Homo sapiens
  Payload ID: 2407
  Gene Symbol: CASP1
  Gene Name: caspase 1, apoptosis-related cysteine peptidase
  ENSP ID: ENSP00000432340
MGEGTINGLLDELLQTRVLNKEEMEKVKRENATVMDKTRALIDSVIPKGAQACQICITYICEEDSYLAGTLGLSAAPQAVQDNPAMPTSSGSEGNVKLCSLEEAQRIWKQKSAEIYPIMDKSSRTRLALIICNEEFDSIPRRTGAEVDITGMTMLLQNLGYSVDVKKNLTASDMTTELEAFAHRPEHKTSDSTFLVFMSHGIREGICGKKHSEQVPDILQLNAIFNMLNTKNCPSLKDKPKVIIIQACRGDSPGVVWFKDSVGVSGNLSLPTTEEFEDDAIKKAHIEKDFIAFCSSTPDNVSWRHPTMGSVFIGRLIEHMQEYACSCDVEEIFRKVRFSFEQPDGRAQMPTTERVTLTRCFYLFPGH

SEQ ID NO: 12222 - protein, 404 aa, Homo sapiens; identical to SEQ ID NO: 12219
  Payload ID: 2407
  Gene Symbol: CASP1
  Gene Name: caspase 1, apoptosis-related cysteine peptidase
  Uniprot ID: P29466
  ENSP ID: ENSP00000433138

SEQ ID NO: 12223 - protein, 311 aa, Homo sapiens
  Payload ID: 2407
  Gene Symbol: CASP1
  Gene Name: caspase 1, apoptosis-related cysteine peptidase
  Uniprot ID: P29466
  ENSP ID: ENSP00000434250
MADKVLKEKRKLFIRSMGEAPQAVQDNPAMPTSSGSEGNVKLCSLEEAQRIWKQKSAEIYPIMDKSSRTRLALIICNEEFDSIPRRTGAEVDITGMTMLLQNLGYSVDVKKNLTASDMTTELEAFAHRPEHKTSDSTFLVFMSHGIREGICGKKHSEQVPDILQLNAIFNMLNTKNCPSLKDKPKVIIIQACRGDSPGVVWFKDSVGVSGNLSLPTTEEFEDDAIKKAHIEKDFIAFCSSTPDNVSWRHPTMGSVFIGRLIEHMQEYACSCDVEEIFRKVRFSFEQPDGRAQMPTTERVTLTRCFYLFPGH

SEQ ID NO: 12224 - protein, 301 aa, Homo sapiens
  Payload ID: 2407
  Gene Symbol: CASP1
  Gene Name: caspase 1, apoptosis-related cysteine peptidase
  ENSP ID: ENSP00000434259
MEKVKRENATVMDKTRALIDSVIPKGAQACQICITYICEEDSYLAGTLGLSADQTSGNYLNMQDSQGVLSSFPAPQAVQDNPAMPTSSGSEGNVKLCSLEEAQRIWKQKSAEIYPIMDKSSRTRLALIICNEEFDSIPRRTGAEVDITGMTMLLQNLGYSVDVKKNLTASDMTTELEAFAHRPEHKTSDSTFLVFMSHGIREGICGKKHSEQVPDILQLNAIFNMLNTKNCPSLKDKPKVIIIQACRGDSPGVVWFKDSVGVSGNLSLPTTEEFEDDAIKKAHIEKDFIAFCSSTPGKSQS

SEQ ID NO: 12225 - protein, 88 aa, Homo sapiens; identical to SEQ ID NO: 12217
  Payload ID: 2407
  Gene Symbol: CASP1
  Gene Name: caspase 1, apoptosis-related cysteine peptidase
  Uniprot ID: P29466
  ENSP ID: ENSP00000434303

SEQ ID NO: 12226 - protein, 383 aa, Homo sapiens
  Payload ID: 2407
  Gene Symbol: CASP1
  Gene Name: caspase 1, apoptosis-related cysteine peptidase
  Uniprot ID: P29466
  ENSP ID: ENSP00000434779
MADKVLKEKRKLFIRSMGEGTINGLLDELLQTRVLNKEEMEKVKRENATVMDKTRALIDSVIPKGAQACQICITYICEEDSYLAGTLGLSAAPQAVQDNPAMPTSSGSEGNVKLCSLEEAQRIWKQKSAEIYPIMDKSSRTRLALIICNEEFDSIPRRTGAEVDITGMTMLLQNLGYSVDVKKNLTASDMTTELEAFAHRPEHKTSDSTFLVFMSHGIREGICGKKHSEQVPDILQLNAIFNMLNTKNCPSLKDKPKVIIIQACRGDSPGVVWFKDSVGVSGNLSLPTTEEFEDDAIKKAHIEKDFIAFCSSTPDNVSWRHPTMGSVFIGRLIEHMQEYACSCDVEEIFRKVRFSFEQPDGRAQMPTTERVTLTRCFYLFPGH

SEQ ID NO: 12227 - protein, 236 aa, Homo sapiens
  Payload ID: 2407
  Gene Symbol: CASP1
  Gene Name: caspase 1, apoptosis-related cysteine peptidase
  ENSP ID: ENSP00000435536
IYPIMDKSSRTRLALIICNEEFDSIPRRTGAEVDITGMTMLLQNLGYSVDVKKNLTASDMTTELEAFAHRPEHKTSDSTFLVFMSHGIREGICGKKHSEQVPDILQLNAIFNMLNTKNCPSLKDKPKVIIIQACRGDSPGVVWFKDSVGVSGNLSLPTTEEFEDDAIKKAHIEKDFIAFCSSTPDNVSWRHPTMGSVFIGRLIEHMQEYACSCDVEEIFRKEVKRSFCKGFWNYVC

SEQ ID NO: 12228 - protein, 263 aa, Homo sapiens; identical to SEQ ID NO: 12218
  Payload ID: 2407
  Gene Symbol: CASP1
  Gene Name: caspase 1, apoptosis-related cysteine peptidase
  Uniprot ID: P29466
  ENSP ID: ENSP00000436875

SEQ ID NO: 12229 - protein, 479 aa, Homo sapiens
  Payload ID: 2408
  Gene Symbol: CASP10
  Gene Name: caspase 10, apoptosis-related cysteine peptidase
  Uniprot ID: Q92851
  ENSP ID: ENSP00000237865
MKSQGQHWYSSSDKNCKVSFREKLLIIDSNLGVQDVENLKFLCIGLVPNKKLEKSSSASDVFEHLLAEDLLSEEDPFFLAELLYIIRQKKLLQHLNCTKEEVERLLPTRQRVSLFRNLLYELSEGIDSENLKDMIFLLKDSLPKTEMTSLSFLAFLEKQGKIDEDNLTCLEDLCKTVVPKLLRNIEKYKREKAIQIVTPPVDKEAESYQGEEELVSQTDVKTFLEALPRAAVYRMNRNHRGLCVIVNNHSFTSLKDRQGTHKDAEILSHVFQWLGFTVHIHNNVTKVEMEMVLQKQKCNPAHADGDCFVFCILTHGRFGAVYSSDEALIPIREIMSHFTALQCPRLAEKPKLFFIQACQGEEIQPSVSIEADALNPEQAPTSLQDSIPAEADFLLGLATVPGYVSFRHVEEGSWYIQSLCNHLKKLVPRHEDILSILTAVNDDVSRRVDKQGTKKQMPQPAFTLRKKLVFPVPLDALSL

SEQ ID NO: 12230 - protein, 521 aa, Homo sapiens
  Payload ID: 2408
  Gene Symbol: CASP10
  Gene Name: caspase 10, apoptosis-related cysteine peptidase
  Uniprot ID: Q92851
  ENSP ID: ENSP00000272879
MKSQGQHWYSSSDKNCKVSFREKLLIIDSNLGVQDVENLKFLCIGLVPNKKLEKSSSASDVFEHLLAEDLLSEEDPFFLAELLYIIRQKKLLQHLNCTKEEVERLLPTRQRVSLFRNLLYELSEGIDSENLKDMIFLLKDSLPKTEMTSLSFLAFLEKQGKIDEDNLTCLEDLCKTVVPKLLRNIEKYKREKAIQIVTPPVDKEAESYQGEEELVSQTDVKTFLEALPQESWQNKHAGSNGNRATNGAPSLVSRGMQGASANTLNSETSTKRAAVYRMNRNHRGLCVIVNNHSFTSLKDRQGTHKDAEILSHVFQWLGFTVHIHNNVTKVEMEMVLQKQKCNPAHADGDCFVFCILTHGRFGAVYSSDEALIPIREIMSHFTALQCPRLAEKPKLFFIQACQGEEIQPSVSIEADALNPEQAPTSLQDSIPAEADFLLGLATVPGYVSFRHVEEGSWYIQSLCNHLKKLVPRMLKFLEKTMEIRGRKRTVWGAKQISATSLPTAISAQTPRPPMRRWSSVS

SEQ ID NO: 12231 - protein, 522 aa, Homo sapiens
  Payload ID: 2408
  Gene Symbol: CASP10
  Gene Name: caspase 10, apoptosis-related cysteine peptidase
  Uniprot ID: Q92851
  ENSP ID: ENSP00000286186
MKSQGQHWYSSSDKNCKVSFREKLLIIDSNLGVQDVENLKFLCIGLVPNKKLEKSSSASDVFEHLLAEDLLSEEDPFFLAELLYIIRQKKLLQHLNCTKEEVERLLPTRQRVSLFRNLLYELSEGIDSENLKDMIFLLKDSLPKTEMTSLSFLAFLEKQGKIDEDNLTCLEDLCKTVVPKLLRNIEKYKREKAIQIVTPPVDKEAESYQGEEELVSQTDVKTFLEALPQESWQNKHAGSNGNRATNGAPSLVSRGMQGASANTLNSETSTKRAAVYRMNRNHRGLCVIVNNHSFTSLKDRQGTHKDAEILSHVFQWLGFTVHIHNNVTKVEMEMVLQKQKCNPAHADGDCFVFCILTHGRFGAVYSSDEALIPIREIMSHFTALQCPRLAEKPKLFFIQACQGEEIQPSVSIEADALNPEQAPTSLQDSIPAEADFLLGLATVPGYVSFRHVEEGSWYIQSLCNHLKKLVPRHEDILSILTAVNDDVSRRVDKQGTKKQMPQPAFTLRKKLVFPVPLDALSL

SEQ ID NO: 12232 - protein, 455 aa, Homo sapiens
  Payload ID: 2408
  Gene Symbol: CASP10
  Gene Name: caspase 10, apoptosis-related cysteine peptidase
  Uniprot ID: Q92851
  ENSP ID: ENSP00000314599
MKSQGQHWYSSSDKNCKVSFREKLLIIDSNLGVQDVENLKFLCIGLVPNKKLEKSSSASDVFEHLLAEDLLSEEDPFFLAELLYIIRQKKLLQHLNCTKEEVERLLPTRQRVSLFRNLLYELSEGIDSENLKDMIFLLKDSLPKTEMTSLSFLAFLEKQGKIDEDNLTCLEDLCKTVVPKLLRNIEKYKREKAIQIVTPPVDKEAESYQGEEELVSQTDVKTFLEALPQESWQNKHAGSNEILSHVFQWLGFTVHIHNNVTKVEMEMVLQKQKCNPAHADGDCFVFCILTHGRFGAVYSSDEALIPIREIMSHFTALQCPRLAEKPKLFFIQACQGEEIQPSVSIEADALNPEQAPTSLQDSIPAEADFLLGLATVPGYVSFRHVEEGSWYIQSLCNHLKKLVPRHEDILSILTAVNDDVSRRVDKQGTKKQMPQPAFTLRKKLVFPVPLDALSL

SEQ ID NO: 12233 - protein, 273 aa, Homo sapiens
  Payload ID: 2408
  Gene Symbol: CASP10
  Gene Name: caspase 10, apoptosis-related cysteine peptidase
  Uniprot ID: Q92851
  ENSP ID: ENSP00000353250
MKSQGQHWYSSSDKNCKVSFREKLLIIDSNLGVQDVENLKFLCIGLVPNKKLEKSSSASDVFEHLLAEDLLSEEDPFFLAELLYIIRQKKLLQHLNCTKEEVERLLPTRQRVSLFRNLLYELSEGIDSENLKDMIFLLKDSLPKTEMTSLSFLAFLEKQGKIDEDNLTCLEDLCKTVVPKLLRNIEKYKREKAIQIVTPPVDKEAESYQGEEELVSQTDVKTFLEALPQESWQNKHAGSNEGSCVQDESEPQRPLCHCQQPQLYLPEGQTRNP

SEQ ID NO: 12234 - protein, 247 aa, Homo sapiens
  Payload ID: 2408
  Gene Symbol: CASP10
  Gene Name: caspase 10, apoptosis-related cysteine peptidase
  Uniprot ID: Q92851
  ENSP ID: ENSP00000363781
MKSQGQHWYSSSDKNCKVSFREKLLIIDSNLGVQDVENLKFLCIGLVPNKKLEKSSSASDVFEHLLAEDLLSEEDPFFLAELLYIIRQKKLLQHLNCTKEEVERLLPTRQRVSLFRNLLYELSEGIDSENLKDMIFLLKDSLPKTEMTSLSFLAFLEKQGKIDEDNLTCLEDLCKTVVPKLLRNIEKYKREKAIQIVTPPVDKEAESYQGEEELVSQTDVKTFLEALPEGVFVFLNEGDRGNSPDDL

SEQ ID NO: 12235 - protein, 478 aa, Homo sapiens
  Payload ID: 2408
  Gene Symbol: CASP10
  Gene Name: caspase 10, apoptosis-related cysteine peptidase
  Uniprot ID: Q92851
  ENSP ID: ENSP00000396835
MKSQGQHWYSSSDKNCKVSFREKLLIIDSNLGVQDVENLKFLCIGLVPNKKLEKSSSASDVFEHLLAEDLLSEEDPFFLAELLYIIRQKKLLQHLNCTKEEVERLLPTRQRVSLFRNLLYELSEGIDSENLKDMIFLLKDSLPKTEMTSLSFLAFLEKQGKIDEDNLTCLEDLCKTVVPKLLRNIEKYKREKAIQIVTPPVDKEAESYQGEEELVSQTDVKTFLEALPRAAVYRMNRNHRGLCVIVNNHSFTSLKDRQGTHKDAEILSHVFQWLGFTVHIHNNVTKVEMEMVLQKQKCNPAHADGDCFVFCILTHGRFGAVYSSDEALIPIREIMSHFTALQCPRLAEKPKLFFIQACQGEEIQPSVSIEADALNPEQAPTSLQDSIPAEADFLLGLATVPGYVSFRHVEEGSWYIQSLCNHLKKLVPRMLKFLEKTMEIRGRKRTVWGAKQISATSLPTAISAQTPRPPMRRWSSVS

SEQ ID NO: 12236 - protein, 118 aa, Homo sapiens
  Payload ID: 2408
  Gene Symbol: CASP10
  Gene Name: caspase 10, apoptosis-related cysteine peptidase
  ENSP ID: ENSP00000401914
MKSQGQHWYSSSDKNCKVSFREKLLIIDSNLGVQDVENLKFLCIGLVPNKKLEKSSSASDVFEHLLAEDLLSEEDPFFLAELLYIIRQKKLLQHLNCTKEEVERLLPTRQRVSLFRPP

SEQ ID NO: 12237 - protein, 168 aa, Homo sapiens
  Payload ID: 2409
  Gene Symbol: CASP12
  Gene Name: caspase 12 (gene/pseudogene)
  Uniprot ID: Q6UXS9
  ENSP ID: ENSP00000421408
MADEKPSNGVLVHMVKLLIKTFLDGIFDDLMENNVLNTDEIHLIGKCLKFVVSNAENLVDDITETAQIAGKIFREHLWNSKKQLSSAFLEIQGAQPSGKLKLCPHAHFHELKTKRADEIYPVMEKERRTCLASTSATKNSTIFIIEMVLNLTFWGCEIYLKTLDTQWL

SEQ ID NO: 12238 - protein, 225 aa, Homo sapiens
  Payload ID: 2409
  Gene Symbol: CASP12
  Gene Name: caspase 12 (gene/pseudogene)
  ENSP ID: ENSP00000421815
MADEKPSNGVLVHMVKLLIKTFLDGIFDDLMENNVLNTDEIHLIGKCLKFVVSNAENLVDDITETAQIAGKIFREHLWNSKKQLSSDISSDGEREANMPGLNIRNKEFNYLHNRNGSELDLLGMDLLENLGYSVVIKENLTAQMVLGLFGSPLTVEKPVQILMVGSCKVTSVMMLLQRLMWKRTSLLSNLPHHVQHSFETPNILTQLPTIERLSMTRYFYLFPGN

SEQ ID NO: 12239 - protein, 223 aa, Homo sapiens
  Payload ID: 2409
  Gene Symbol: CASP12
  Gene Name: caspase 12 (gene/pseudogene)
  ENSP ID: ENSP00000423899
MADEKPSNGVLVHMVKLLIKTFLDGIFDDLMENNVLNTDEIHLIGKCLKFVVSNAENLVDDITETAQIAGKIFREHLWNSKKQLSSDISSDGEREANMPGLNIRNKEFNYLHNRNGSELDLLGMDLLENLGYSVVIKENLTAQMVLGLFGSPLTVEKPVQILMVGSCKVTSVMMLLQRLMWKRTSLLSNLPHHIMFLGDMKQMALSSFPKLSTTSESILGVII

SEQ ID NO: 12240 - protein, 294 aa, Homo sapiens
  Payload ID: 2409
  Gene Symbol: CASP12
  Gene Name: caspase 12 (gene/pseudogene)
  ENSP ID: ENSP00000423970
MADEKPSNGVLVHMVKLLIKTFLDGIFDDLMENNVLNTDEIHLIGKCLKFVVSNAENLVDDITETAQIAGKIFREHLWNSKKQLSSDISSDGEREANMPGLNIRNKEFNYLHNRNGSELDLLGMDLLENLGYSVVIKENLTAQEMETALRQFAAHPEHQSSDSTFLVFMSHSILNGICGTKHWDQEPDVLHDDTIFEIFNNRNCQSLKDKPKMVLGLFGSPLTVEKPVQILMVGSCKVTSVMMLLQRLMWKRTSLLSNLPHHVQHSFETPNILTQLPTIERLSMTRYFYLFPGN

SEQ ID NO: 12241 - protein, 340 aa, Homo sapiens
  Payload ID: 2409
  Gene Symbol: CASP12
  Gene Name: caspase 12 (gene/pseudogene)
  Uniprot ID: Q6UXS9
  ENSP ID: ENSP00000424038
MADEKPSNGVLVHMVKLLIKTFLDGIFDDLMENNVLNTDEIHLIGKCLKFVVSNAENLVDDITETAQIAGKIFREHLWNSKKQLSSDISSDGEREANMPGLNIRNKEFNYLHNRNGSELDLLGMDLLENLGYSVVIKENLTAQEMETALRQFAAHPEHQSSDSTFLVFMSHSILNGICGTKHWDQEPDVLHDDTIFEIFNNRNCQSLKDKPKVIIMQACRGNGAGIVWFTTDSGKASADTHGRLLQGNICNDAVTKAHVEKDFIAFKSSTPHNVSWRHETNGSVFISQIIYYFREYSWSHHLEEIFQKVQHSFETPNILTQLPTIERLSMTRYFYLFPGN

SEQ ID NO: 12242 - protein, 168 aa, Homo sapiens; identical to SEQ ID NO: 12237
  Payload ID: 2409
  Gene Symbol: CASP12
  Gene Name: caspase 12 (gene/pseudogene)
  Uniprot ID: Q6UXS9
  ENSP ID: ENSP00000424963

SEQ ID NO: 12243 - protein, 276 aa, Homo sapiens
  Payload ID: 2409
  Gene Symbol: CASP12
  Gene Name: caspase 12 (gene/pseudogene)
  ENSP ID: ENSP00000425652
MADEKPSNGVLVHMVKLLIKTFLDGIFDDLMENNVLNTDEIHLIGKCLKFVVSNAENLVDDITETAQIAGKIFREHLWNSKKQLSSDISSDGEREANMPGLNIRNKEFNYLHNRNGSELDLLGMDLLENLGYSVVIKENLTAQEMETALRQFAAHPEHQSSDSTFLVFMSHSILNGICGTKHWDQEPDVLHDDTIFEIFNNRNCQSLKDKPKVIIMQACRGNGAGIVWFTTDSGKASADTHGRLLQGNICNDAVTKAHVEKDFIAFKSSTPRSTFI

SEQ ID NO: 12244 - protein, 139 aa, Homo sapiens
  Payload ID: 2409
  Gene Symbol: CASP12
  Gene Name: caspase 12 (gene/pseudogene)
  ENSP ID: ENSP00000426427
MADISSDGEREANMPGLNIRNKEFNYLHNRNGSELDLLGMDLLENLGYSVVIKENLTAQMVLGLFGSPLTVEKPVQILMVGSCKVTSVMMLLQRLMWKRTSLLSNLPHHIMFLGDMKQMALSSFPKLSTTSESILGVII

SEQ ID NO: 12245 - protein, 256 aa, Homo sapiens
  Payload ID: 2409
  Gene Symbol: CASP12
  Gene Name: caspase 12 (gene/pseudogene)
  Uniprot ID: Q6UXS9
  ENSP ID: ENSP00000426566
MADISSDGEREANMPGLNIRNKEFNYLHNRNGSELDLLGMDLLENLGYSVVIKENLTAQEMETALRQFAAHPEHQSSDSTFLVFMSHSILNGICGTKHWDQEPDVLHDDTIFEIFNNRNCQSLKDKPKVIIMQACRGNGAGIVWFTTDSGKASADTHGRLLQGNICNDAVTKAHVEKDFIAFKSSTPHNVSWRHETNGSVFISQIIYYFREYSWSHHLEEIFQKVQHSFETPNILTQLPTIERLSMTRYFYLFPGN

SEQ ID NO: 12246 - protein, 340 aa, Homo sapiens; identical to SEQ ID NO: 12241
  Payload ID: 2409
  Gene Symbol: CASP12
  Gene Name: caspase 12 (gene/pseudogene)
  Uniprot ID: Q6UXS9
  ENSP ID: ENSP00000427128

SEQ ID NO: 12247 - protein, 141 aa, Homo sapiens
  Payload ID: 2409
  Gene Symbol: CASP12
  Gene Name: caspase 12 (gene/pseudogene)
  ENSP ID: ENSP00000427437
MADISSDGEREANMPGLNIRNKEFNYLHNRNGSELDLLGMDLLENLGYSVVIKENLTAQMVLGLFGSPLTVEKPVQILMVGSCKVTSVMMLLQRLMWKRTSLLSNLPHHVQHSFETPNILTQLPTIERLSMTRYFYLFPGN

SEQ ID NO: 12248 - protein, 340 aa, Homo sapiens; identical to SEQ ID NO: 12241
  Payload ID: 2409
  Gene Symbol: CASP12
  Gene Name: caspase 12 (gene/pseudogene)
  ENSP ID: ENSP00000482745

SEQ ID NO: 12249 - protein, 242 aa, Homo sapiens
  Payload ID: 2410
  Gene Symbol: CASP14
  Gene Name: caspase 14, apoptosis-related cysteine peptidase
  Uniprot ID: P31944
  ENSP ID: ENSP00000393417
MSNPRSLEEEKYDMSGARLALILCVTKAREGSEEDLDALEHMFRQLRFESTMKRDPTAEQFQEELEKFQQAIDSREDPVSCAFVVLMAHGREGFLKGEDGEMVKLENLFEALNNKNCQALRAKPKVYIIQACRGEQRDPGETVGGDEIVMVIKDSPQTIPTYTDALHVYSTVEGYIAYRHDQKGSCFIQTLVDVFTKRKGHILELLTEVTRRMAEAELVQEGKARKTNPEIQSTLRKRLYLQ

SEQ ID NO: 12250 - protein, 452 aa, Homo sapiens
  Payload ID: 2411
  Gene Symbol: CASP2
  Gene Name: caspase 2, apoptosis-related cysteine peptidase
  Uniprot ID: P42575
  ENSP ID: ENSP00000312664
MAAPSAGSWSTFQHKELMAADRGRRILGVCGMHPHHQETLKKNRVVLAKQLLLSELLEHLLEKDIITLEMRELIQAKVGSFSQNVELLNLLPKRGPQAFDAFCEALRETKQGHLEDMLLTTLSGLQHVLPPLSCDYDLSLPFPVCESCPLYKKLRLSTDTVEHSLDNKDGPVCLQVKPCTPEFYQTHFQLAYRLQSRPRGLALVLSNVHFTGEKELEFRSGGDVDHSTLVTLFKLLGYDVHVLCDQTAQEMQEKLQNFAQLPAHRVTDSCIVALLSHGVEGAIYGVDGKLLQLQEVFQLFDNANCPSLQNKPKMFFIQACRGDETDRGVDQQDGKNHAGSPGCEESDAGKEKLPKMRLPTRSDMICGYACLKGTAAMRNTKRGSWYIEALAQVFSERACDMHVADMLVKVNALIKDREGYAPGTEFHRCKEMSEYCSTLCRHLYLFPGHPPT

SEQ ID NO: 12251 - protein, 108 aa, Homo sapiens
  Payload ID: 2411
  Gene Symbol: CASP2
  Gene Name: caspase 2, apoptosis-related cysteine peptidase
  ENSP ID: ENSP00000340030
MAAPSAGSWSTFQHKELMAADRGRRILGVCGMHPHHQETLKKNRVVLAKQLLLSELLEHLLEKDIITLEMRELIQAKVGSFSQNVELLNLLPKRGPQAFDAFCEALHS

SEQ ID NO: 12252 - protein, 171 aa, Homo sapiens
  Payload ID: 2411
  Gene Symbol: CASP2
  Gene Name: caspase 2, apoptosis-related cysteine peptidase
  ENSP ID: ENSP00000376656
MAAPSAGSWSTFQHKELMAADRGRRILGVCGMHPHHQETLKKNRVVLAKQLLLSELLEHLLEKDIITLEMRELIQAKVGSFSQNVELLNLLPKRGPQAFDAFCEALRETKQGHLEDMLLTTLSGLQHVLPPLSCDYDLSLPFPVCESCPLYKKLRLSTEIGSCSVTQAGMQ

SEQ ID NO: 12253 - protein, 108 aa, Homo sapiens; identical to SEQ ID NO: 12251
  Payload ID: 2411
  Gene Symbol: CASP2
  Gene Name: caspase 2, apoptosis-related cysteine peptidase
  ENSP ID: ENSP00000481929

SEQ ID NO: 12254 - protein, 277 aa, Homo sapiens
  Payload ID: 2412
  Gene Symbol: CASP3
  Gene Name: caspase 3, apoptosis-related cysteine peptidase
  Uniprot ID: P42574
  ENSP ID: ENSP00000311032
MENTENSVDSKSIKNLEPKIIHGSESMDSGISLDNSYKMDYPEMGLCIIINNKNFHKSTGMTSRSGTDVDAANLRETFRNLKYEVRNKNDLTREEIVELMRDVSKEDHSKRSSFVCVLLSHGEEGIIFGTNGPVDLKKITNFFRGDRCRSLTGKPKLFIIQACRGTELDCGIETDSGVDDDMACHKIPVEADFLYAYSTAPGYYSWRNSKDGSWFIQSLCAMLKQYADKLEFMHILTRVNRKVATEFESFSFDATFHAKKQIPCIVSMLTKELYFYH

SEQ ID NO: 12255 - protein, 182 aa, Homo sapiens
  Payload ID: 2412
  Gene Symbol: CASP3
  Gene Name: caspase 3, apoptosis-related cysteine peptidase
  ENSP ID: ENSP00000377210
MENTENSVDSKSIKNLEPKIIHGSESMDSGISLDNSYKMDYPEMGLCIIINNKNFHKSTGMTSRSGTDVDAANLRETFRNLKYEVRNKNDLTREEIVELMRDVSKEDHSKRSSFVCVLLSHGEEGIIFGTNGPVDLKKITNFFRGDRCRSLTGKPKLFIIQVIILGEIQRMAPGSSSRFVPC

SEQ ID NO: 12256 - protein, 182 aa, Homo sapiens; identical to SEQ ID NO: 12255
  Payload ID: 2412
  Gene Symbol: CASP3
  Gene Name: caspase 3, apoptosis-related cysteine peptidase
  ENSP ID: ENSP00000377213

SEQ ID NO: 12257 - protein, 117 aa, Homo sapiens
  Payload ID: 2412
  Gene Symbol: CASP3
  Gene Name: caspase 3, apoptosis-related cysteine peptidase
  ENSP ID: ENSP00000407142
MENTENSVDSKSIKNLEPKIIHGSESMDSGISLDNSYKMDYPEMGLCIIINNKNFHKSTGMTSRSGTDVDAANLRETFRNLKYEVRNKNDLTREEIVELMRDVSKEDHSKRSSFVCV

SEQ ID NO: 12258 - protein, 182 aa, Homo sapiens; identical to SEQ ID NO: 12255
  Payload ID: 2412
  Gene Symbol: CASP3
  Gene Name: caspase 3, apoptosis-related cysteine peptidase
  ENSP ID: ENSP00000428372

SEQ ID NO: 12259 - protein, 277 aa, Homo sapiens; identical to SEQ ID NO: 12254
  Payload ID: 2412
  Gene Symbol: CASP3
  Gene Name: caspase 3, apoptosis-related cysteine peptidase
  Uniprot ID: P42574
  ENSP ID: ENSP00000428929

SEQ ID NO: 12260 - protein, 156 aa, Homo sapiens
  Payload ID: 2412
  Gene Symbol: CASP3
  Gene Name: caspase 3, apoptosis-related cysteine peptidase
  ENSP ID: ENSP00000478339
MSDALIKVSMENTENSVDSKSIKNLEPKIIHGSESMDSGISLDNSYKMDYPEMGLCIIINNKNFHKSTGMTSRSGTDVDAANLRETFRNLKYEVRNKNDLTREEIVELMRDVSKEDHSKRSSFVCVLLSHGEEGIIFGTNGPVDLKNNKLFQRGSL

SEQ ID NO: 12261 - protein, 321 aa, Homo sapiens
  Payload ID: 2413
  Gene Symbol: CASP4
  Gene Name: caspase 4, apoptosis-related cysteine peptidase
  Uniprot ID: P49662
  ENSP ID: ENSP00000376857
MADSMQEKQRMAGQMLLQTFFNIDQISPNKKAHPNMEAGPPESGESTDALKLCPHEEFLRLCKERAEEIYPIKERNNRTRLALIICNTEFDHLPPRNGADFDITGMKELLEGLDYSVDVEENLTARDMESALRAFATRPEHKSSDSTFLVLMSHGILEGICGTVHDEKKPDVLLYDTIFQIFNNRNCLSLKDKPKVIIVQACRGANRGELWVRDSPASLEVASSQSSENLEEDAVYKTHVEKDFIAFCSSTPHNVSWRDSTMGSIFITQLITCFQKYSWCCHLEEVFRKVQQSFETPRAKAQMPTIERLSMTRYFYLFPGN

SEQ ID NO: 12262 - protein, 377 aa, Homo sapiens
  Payload ID: 2413
  Gene Symbol: CASP4
  Gene Name: caspase 4, apoptosis-related cysteine peptidase
  Uniprot ID: P49662
  ENSP ID: ENSP00000388566
MAEGNHRKKPLKVLESLGKDFLTGVLDNLVEQNVLNWKEEEKKKYYDAKTEDKVRVMADSMQEKQRMAGQMLLQTFFNIDQISPNKKAHPNMEAGPPESGESTDALKLCPHEEFLRLCKERAEEIYPIKERNNRTRLALIICNTEFDHLPPRNGADFDITGMKELLEGLDYSVDVEENLTARDMESALRAFATRPEHKSSDSTFLVLMSHGILEGICGTVHDEKKPDVLLYDTIFQIFNNRNCLSLKDKPKVIIVQACRGANRGELWVRDSPASLEVASSQSSENLEEDAVYKTHVEKDFIAFCSSTPHNVSWRDSTMGSIFITQLITCFQKYSWCCHLEEVFRKVQQSFETPRAKAQMPTIERLSMTRYFYLFPGN

SEQ ID NO: 12263 - protein, 147 aa, Homo sapiens
  Payload ID: 2413
  Gene Symbol: CASP4
  Gene Name: caspase 4, apoptosis-related cysteine peptidase
  ENSP ID: ENSP00000401673
MAEGNHRKKPLKVLESLGKDFLTGVLDNLVEQNVLNWKEEEKKKYYDAKTEDKVRVMADSMQEKQRMAGQMLLQTFFNIDQISPNKKAHPNMEAGPPESGESTDALKLCPHEEFLRLCKERAEEIYPIKERNNRTRLALIICNTEFD

SEQ ID NO: 12264 - protein, 72 aa, Homo sapiens
  Payload ID: 2413
  Gene Symbol: CASP4
  Gene Name: caspase 4, apoptosis-related cysteine peptidase
  ENSP ID: ENSP00000432879
  MOD_RES (1)..(1): Any amino acid
XNVSWRDSTMGSIFITQLITCFQKYSWCCHLEEVFRKEATSSPALLNQLQGAPSLVQLAYLTFCISIKVKTN

SEQ ID NO: 12265 - protein, 330 aa, Homo sapiens
  Payload ID: 2413
  Gene Symbol: CASP4
  Gene Name: caspase 4, apoptosis-related cysteine peptidase
  ENSP ID: ENSP00000482808
MLKLKTKFGSWQTLCKRSNVWQDKCFFKPFNIDQISPNKKAHPNMEAGPPESGESTDALKLCPHEEFLRLCKERAEEIYPIKERNNRTRLALIICNTEFDHLPPRNGADFDITGMKELLEGLDYSVDVEENLTARDMESALRAFATRPEHKSSDSTFLVLMSHGILEGICGTVHDEKKPDVLLYDTIFQIFNNRNCLSLKDKPKVIIVQACRGANRGELWVRDSPASLEVASSQSSENLEEDAVYKTHVEKDFIAFCSSTPHNVSWRDSTMGSIFITQLITCFQKYSWCCHLEEVFRKVQQSFETPRAKAQMPTIERLSMTRYFYLFPGN

SEQ ID NO: 12266 - protein, 434 aa, Homo sapiens
  Payload ID: 2414
  Gene Symbol: CASP5
  Gene Name: caspase 5, apoptosis-related cysteine peptidase
  Uniprot ID: P51878
  ENSP ID: ENSP00000260315
MAEDSGKKKRRKNFEAMFKGILQSGLDNFVINHMLKNNVAGQTSIQTLVPNTDQKSTSVKKDNHKKKTVKMLEYLGKDVLHGVFNYLAKHDVLTLKEEEKKKYYDTKIEDKALILVDSLRKNRVAHQMFTQTLLNMDQKITSVKPLLQIEAGPPESAESTNILKLCPREEFLRLCKKNHDEIYPIKKREDRRRLALIICNTKFDHLPARNGAHYDIVGMKRLLQGLGYTVVDEKNLTARDMESVLRAFAARPEHKSSDSTFLVLMSHGILEGICGTAHKKKKPDVLLYDTIFQIFNNRNCLSLKDKPKVIIVQACRGEKHGELWVRDSPASLALISSQSSENLEADSVCKIHEEKDFIAFCSSTPHNVSWRDRTRGSIFITELITCFQKYSCCCHLMEIFRKVQKSFEVPQAKAQMPTIERATLTRDFYLFPGN

SEQ ID NO: 12267 - protein, 447 aa, Homo sapiens
  Payload ID: 2414
  Gene Symbol: CASP5
  Gene Name: caspase 5, apoptosis-related cysteine peptidase
  Uniprot ID: P51878
  ENSP ID: ENSP00000376849
MAAVPRVEGVFIFLIEDSGKKKRRKNFEAMFKGILQSGLDNFVINHMLKNNVAGQTSIQTLVPNTDQKSTSVKKDNHKKKTVKMLEYLGKDVLHGVFNYLAKHDVLTLKEEEKKKYYDTKIEDKALILVDSLRKNRVAHQMFTQTLLNMDQKITSVKPLLQIEAGPPESAESTNILKLCPREEFLRLCKKNHDEIYPIKKREDRRRLALIICNTKFDHLPARNGAHYDIVGMKRLLQGLGYTVVDEKNLTARDMESVLRAFAARPEHKSSDSTFLVLMSHGILEGICGTAHKKKKPDVLLYDTIFQIFNNRNCLSLKDKPKVIIVQACRGEKHGELWVRDSPASLALISSQSSENLEADSVCKIHEEKDFIAFCSSTPHNVSWRDRTRGSIFITELITCFQKYSCCCHLMEIFRKVQKSFEVPQAKAQMPTIERATLTRDFYLFPGN

SEQ ID NO: 12268 - protein, 376 aa, Homo sapiens
  Payload ID: 2414
  Gene Symbol: CASP5
  Gene Name: caspase 5, apoptosis-related cysteine peptidase
  Uniprot ID: P51878
  ENSP ID: ENSP00000388365
MAEDNHKKKTVKMLEYLGKDVLHGVFNYLAKHDVLTLKEEEKKKYYDTKIEDKALILVDSLRKNRVAHQMFTQTLLNMDQKITSVKPLLQIEAGPPESAESTNILKLCPREEFLRLCKKNHDEIYPIKKREDRRRLALIICNTKFDHLPARNGAHYDIVGMKRLLQGLGYTVVDEKNLTARDMESVLRAFAARPEHKSSDSTFLVLMSHGILEGICGTAHKKKKPDVLLYDTIFQIFNNRNCLSLKDKPKVIIVQACRGEKHGELWVRDSPASLALISSQSSENLEADSVCKIHEEKDFIAFCSSTPHNVSWRDRTRGSIFITELITCFQKYSCCCHLMEIFRKVQKSFEVPQAKAQMPTIERATLTRDFYLFPGN

SEQ ID NO: 12269 - protein, 117 aa, Homo sapiens
  Payload ID: 2414
  Gene Symbol: CASP5
  Gene Name: caspase 5, apoptosis-related cysteine peptidase
  ENSP ID: ENSP00000396053
  MOD_RES (1)..(1): Any amino acid
XKHGELWVRDSPASLALISSQSSENLEADSVCKIHEEKDFIAFCSSTPHNVSWRDRTRGSIFITELITCFQKYSCCCHLMEIFRKVQKSFEVPQAKAQMPTIERATLTRDFYLFPGN

SEQ ID NO: 12270 - protein, 292 aa, Homo sapiens
  Payload ID: 2414
  Gene Symbol: CASP5
  Gene Name: caspase 5, apoptosis-related cysteine peptidase
  Uniprot ID: P51878
  ENSP ID: ENSP00000398130
MAALLQIEAGPPESAESTNILKLCPREEFLRLCKKNHDEIYPIKKREDRRRLALIICNTKFDHLPARNGAHYDIVGMKRLLQGLGYTVVDEKNLTARDMESVLRAFAARPEHKSSDSTFLVLMSHGILEGICGTAHKKKKPDVLLYDTIFQIFNNRNCLSLKDKPKVIIVQACRGEKHGELWVRDSPASLALISSQSSENLEADSVCKIHEEKDFIAFCSSTPHNVSWRDRTRGSIFITELITCFQKYSCCCHLMEIFRKVQKSFEVPQAKAQMPTIERATLTRDFYLFPGN

SEQ ID NO: 12271 - protein, 108 aa, Homo sapiens
  Payload ID: 2414
  Gene Symbol: CASP5
  Gene Name: caspase 5, apoptosis-related cysteine peptidase
  Uniprot ID: P51878
  ENSP ID: ENSP00000408455
MAEDNHKKKTVKMLEYLGKDVLHGVFNYLAKHDVLTLKEEEKKKYYDTKIEDKALILVDSLRKNRVAHQMFTQTLLNMDQKITSVKHLSNKKERGPQTPGSHHMQYKV

SEQ ID NO: 12272 - protein, 165 aa, Homo sapiens
  Payload ID: 2414
  Gene Symbol: CASP5
  Gene Name: caspase 5, apoptosis-related cysteine peptidase
  ENSP ID: ENSP00000415241
MFKGILQSGLDNFVINHMLKNNVAGQTSIQTLVPNTDQKSTSVKKDNHKKKTVKMLEYLGKDVLHGVFNYLAKHDVLTLKEEEKKKYYDTKIEDKALILVDSLRKNRVAHQMFTQTLLNMDQKITSVKPLLQIEAGPPESAESTNILKLCPREEFLRLCKKNHDE

SEQ ID NO: 12273 - protein, 292 aa, Homo sapiens; identical to SEQ ID NO: 12270
  Payload ID: 2414
  Gene Symbol: CASP5
  Gene Name: caspase 5, apoptosis-related cysteine peptidase
  Uniprot ID: P51878
  ENSP ID: ENSP00000434471

SEQ ID NO: 12274 - protein, 447 aa, Homo sapiens; identical to SEQ ID NO: 12267
  Payload ID: 2414
  Gene Symbol: CASP5
  Gene Name: caspase 5, apoptosis-related cysteine peptidase
  Uniprot ID: P51878
  ENSP ID: ENSP00000436877

SEQ ID NO: 12275 - protein, 293 aa, Homo sapiens
  Payload ID: 2415
  Gene Symbol: CASP6
  Gene Name: caspase 6, apoptosis-related cysteine peptidase
  Uniprot ID: P55212
  ENSP ID: ENSP00000265164
MSSASGLRRGHPAGGEENMTETDAFYKREMFDPAEKYKMDHRRRGIALIFNHERFFWHLTLPERRGTCADRDNLTRRFSDLGFEVKCFNDLKAEELLLKIHEVSTVSHADADCFVCVFLSHGEGNHIYAYDAKIEIQTLTGLFKGDKCHSLVGKPKIFIIQACRGNQHDVPVIPLDVVDNQTEKLDTNITEVDAASVYTLPAGADFLMCYSVAEGYYSHRETVNGSWYIQDLCEMLGKYGSSLEFTELLTLVNRKVSQRRVDFCKDPSAIGKKQVPCFASMLTKKLHFFPKSN

SEQ ID NO: 12276 - protein, 204 aa, Homo sapiens
  Payload ID: 2415
  Gene Symbol: CASP6
  Gene Name: caspase 6, apoptosis-related cysteine peptidase
  Uniprot ID: P55212
  ENSP ID: ENSP00000285333
MSSASGLRRGHPAVSTVSHADADCFVCVFLSHGEGNHIYAYDAKIEIQTLTGLFKGDKCHSLVGKPKIFIIQACRGNQHDVPVIPLDVVDNQTEKLDTNITEVDAASVYTLPAGADFLMCYSVAEGYYSHRETVNGSWYIQDLCEMLGKYGSSLEFTELLTLVNRKVSQRRVDFCKDPSAIGKKQVPCFASMLTKKLHFFPKSN

SEQ ID NO: 12277 - protein, 80 aa, Homo sapiens
  Payload ID: 2415
  Gene Symbol: CASP6
  Gene Name: caspase 6, apoptosis-related cysteine peptidase
  ENSP ID: ENSP00000424080
MSSASGLRRGHPAGGEENMTETDAFYKREMFDPAEKYKMDHRRRGIALIFNHERFFWHLTLPERRGTCADRDNLTRSVNC

SEQ ID NO: 12278 - protein, 143 aa, Homo sapiens
  Payload ID: 2415
  Gene Symbol: CASP6
  Gene Name: caspase 6, apoptosis-related cysteine peptidase
  ENSP ID: ENSP00000427669
MTETDAFYKREMFDPAEKYKMDHRRRGIALIFNHERFFWHLTLPERRGTCADRDNLTRRFSDLGFEVKCFNDLKAEELLLKIHEVSTVSHADADCFVCVFLSHGEGNHIYAYDAKIEIQTLTGLFKGDKCHSLVGKPKIFIIQ

SEQ ID NO: 12279 - protein, 303 aa, Homo sapiens
  Payload ID: 2416
  Gene Symbol: CASP7
  Gene Name: caspase 7, apoptosis-related cysteine peptidase
  Uniprot ID: P55210
  ENSP ID: ENSP00000298701
MADDQGCIEEQGVEDSANEDSVDAKPDRSSFVPSLFSKKKKNVTMRSIKTTRDRVPTYQYNMNFEKLGKCIIINNKNFDKVTGMGVRNGTDKDAEALFKCFRSLGFDVIVYNDCSCAKMQDLLKKASEEDHTNAACFACILLSHGEENVIYGKDGVTPIKDLTAHFRGDRCKTLLEKPKLFFIQACRGTELDDGIQADSGPINDTDANPRYKIPVEADFLFAYSTVPGYYSWRSPGRGSWFVQALCSILEEHGKDLEIMQILTRVNDRVARHFESQSDDPHFHEKKQIPCVVSMLTKELYFSQ

SEQ ID NO: 12280 - protein, 303 aa, Homo sapiens; identical to SEQ ID NO: 12279
  Payload ID: 2416
  Gene Symbol: CASP7
  Gene Name: caspase 7, apoptosis-related cysteine peptidase
  Uniprot ID: P55210
  ENSP ID: ENSP00000358321

SEQ ID NO: 12281 - protein, 303 aa, Homo sapiens; identical to SEQ ID NO: 12279
  Payload ID: 2416
  Gene Symbol: CASP7
  Gene Name: caspase 7, apoptosis-related cysteine peptidase
  Uniprot ID: P55210
  ENSP ID: ENSP00000358324

SEQ ID NO: 12282 - protein, 388 aa, Homo sapiens
  Payload ID: 2416
  Gene Symbol: CASP7
  Gene Name: caspase 7, apoptosis-related cysteine peptidase
  ENSP ID: ENSP00000358327
MRAGTRVALGSSTPAERTTPSQGRCKPRPALPRAAPPSAAPRLLVSLSLKGPQTLAAERRRETVPVPAALPPWERWQMIRAVLKSRGLRIQQMKIQWMLSQTGPRLYRPSSAPDSGTLYFTSKKKKNVTMRSIKTTRDRVPTYQYNMNFEKLGKCIIINNKNFDKVTGMGVRNGTDKDAEALFKCFRSLGFDVIVYNDCSCAKMQDLLKKASEEDHTNAACFACILLSHGEENVIYGKDGVTPIKDLTAHFRGDRCKTLLEKPKLFFIQACRGTELDDGIQADSGPINDTDANPRYKIPVEADFLFAYSTVPGYYSWRSPGRGSWFVQALCSILEEHGKDLEIMQILTRVNDRVARHFESQSDDPHFHEKKQIPCVVSMLTKELYFSQ

SEQ ID NO: 12283 - protein, 253 aa, Homo sapiens
  Payload ID: 2416
  Gene Symbol: CASP7
  Gene Name: caspase 7, apoptosis-related cysteine peptidase
  Uniprot ID: P55210
  ENSP ID: ENSP00000358337
MADDQGCIEEQGVEDSANEDSVDAKPDRSSFVPSLFSKKKKNVTMRSIKTTRDRVPTYQYNMNFEKLGKCIIINNKNFDKVTGMGVRNGTDKDAEALFKCFRSLGFDVIVYNDCSCAKMQDLLKKASEEDHTNAACFACILLSHGEENMESCSVTQAGVQRRDLGRLQPPPPRLAEGPSLMMASRPTRGPSMTQMLILDTRSQWKLTSSSPIPRFQAITRGGAQEEAPGLCKPSAPSWRSTEKTWKSCRSSPG

SEQ ID NO: 12284 - protein, 278 aa, Homo sapiens
  Payload ID: 2416
  Gene Symbol: CASP7
  Gene Name: caspase 7, apoptosis-related cysteine peptidase
  Uniprot ID: P55210
  ENSP ID: ENSP00000398107
MQRGLFSDGDTSKKKKNVTMRSIKTTRDRVPTYQYNMNFEKLGKCIIINNKNFDKVTGMGVRNGTDKDAEALFKCFRSLGFDVIVYNDCSCAKMQDLLKKASEEDHTNAACFACILLSHGEENVIYGKDGVTPIKDLTAHFRGDRCKTLLEKPKLFFIQACRGTELDDGIQADSGPINDTDANPRYKIPVEADFLFAYSTVPGYYSWRSPGRGSWFVQALCSILEEHGKDLEIMQILTRVNDRVARHFESQSDDPHFHEKKQIPCVVSMLTKELYFSQ

SEQ ID NO: 12285 - protein, 222 aa, Homo sapiens
  Payload ID: 2416
  Gene Symbol: CASP7
  Gene Name: caspase 7, apoptosis-related cysteine peptidase
  ENSP ID: ENSP00000400094
MADDQGCIEEQGVEDSANEDSVDAKPDRSSFVPSLFSKKKKNVTMRSIKTTRDRVPTYQYNMNFEKLGKCIIINNKNFDKVTGMGVRNGTDKDAEALFKCFRSLGFDVIVYNDCSCAKMQDLLKKASEEDHTNAACFACILLSHGEENVIYGKDGVTPIKDLTAHFRGDRCKTLLEKPKLFFIQACRGTELDDGIQADSGPINDTDANPRYKIPVEADFLFA

SEQ ID NO: 12286 - protein, 253 aa, Homo sapiens; identical to SEQ ID NO: 12283
  Payload ID: 2416
  Gene Symbol: CASP7
  Gene Name: caspase 7, apoptosis-related cysteine peptidase
  Uniprot ID: P55210
  ENSP ID: ENSP00000478285

SEQ ID NO: 12287 - protein, 336 aa, Homo sapiens
  Payload ID: 2416
  Gene Symbol: CASP7
  Gene Name: caspase 7, apoptosis-related cysteine peptidase
  Uniprot ID: P55210
  ENSP ID: ENSP00000478999
MDCVGWPPGRKWHLEKNTSCGGSSGICASYVTQMADDQGCIEEQGVEDSANEDSVDAKPDRSSFVPSLFSKKKKNVTMRSIKTTRDRVPTYQYNMNFEKLGKCIIINNKNFDKVTGMGVRNGTDKDAEALFKCFRSLGFDVIVYNDCSCAKMQDLLKKASEEDHTNAACFACILLSHGEENVIYGKDGVTPIKDLTAHFRGDRCKTLLEKPKLFFIQACRGTELDDGIQADSGPINDTDANPRYKIPVEADFLFAYSTVPGYYSWRSPGRGSWFVQALCSILEEHGKDLEIMQILTRVNDRVARHFESQSDDPHFHEKKQIPCVVSMLTKELYFSQ

SEQ ID NO: 12288 - protein, 303 aa, Homo sapiens; identical to SEQ ID NO: 12279
  Payload ID: 2416
  Gene Symbol: CASP7
  Gene Name: caspase 7, apoptosis-related cysteine peptidase
  Uniprot ID: P55210
  ENSP ID: ENSP00000480584

SEQ ID NO: 12289 - protein, 1972 aa, Homo sapiens
  Payload ID: 2417
  Gene Symbol: CASP8AP2
  Gene Name: caspase 8 associated protein 2
  ENSP ID: ENSP00000478179
MAADDDNGDGTSLFDVFSASPLKNNDEGSLDIYAGLDSAVSDSASKSCVPSRNCLDLYEEILTEEGTAKEATYNDLQVEYGKCQLQMKELMKKFKEIQTQNFSLINENQSLKKNISALIKTARVEINRKDEEISNLHQRLSEFPHFRNNHKTARTFDTVKTKDLKSRSPHLDDCSKTDHRAKSDVSKDVHHSTSLPNLEKEGKPHSDKRSTSHLPTSVEKHCTNGVWSRSHYQVGEGSSNEDSRRGRKDIRHSQFNRGTERVRKDLSTGCGDGEPRILEASQRLQGHPEKYGKGEPKTESKSSKFKSNSDSDYKGERINSSWEKETPGERSHSRVDSQSDKKLERQSERSQNINRKEVKSQDKEERKVDQKPKSVVKDQDHWRRSERASLPHSKNEITFSHNSSKYHLEERRGWEDCKRDKSVNSHSFQDGRCPSSLSNSRTHKNIDSKEVDAMHQWENTPLKAERHRTEDKRKREQESKEENRHIRNEKRVPTEHLQKTNKETKKTTTDLKKQNEPKTDKGEVLDNGVSEGADNKELAMKAESGPNETKNKDLKLSFMKKLNLTLSPAKKQPVSQDNQHKITDIPKSSGVCDSESSMQVKTVAYVPSISEHILGEAAVSEHTMGETKSTLLEPKVALLAVTEPRIGISETNKEDENSLLVRSVDNTMHCEEPICGTETSFPSPMEIQQTESLFPSTGMKQTINNGRAAAPVVMDVLQTDVSQNFGLELDTKRNDNSDYCGISEGMEMKVALSTTVSETTESILQPSIEEADILPIMLSEDNNPKFEPSVIVTPLVESKSCHLEPCLPKETLDSSLQQTELMDHRMATGETNSVYHDDDNSVLSIDLNHLRPIPEAISPLNSPVRPVAKVLRNESPPQVPVYNNSHKDVFLPNSAHSTSKSQSDLNKENQKPIYKSDKCTEADTCKNSPLDELEEGEIRSDSETSKPQESFEKNSKRRVSADVRKSKTIPRRGKSTVCLDKDSRKTHVRIHQTNNKWNKRPDKSSRSSKTEKKDKVMSTSSLEKIVPIIAVPSSEQEIMHMLRMIRKHVRKNYMKFKAKFSLIQFHRIIESAILSFTSLIKHLNLHKISKSVTTLQKNLCDIIESKLKQVKKNGIVDRLFEQQLPDMKKKLWKFVDDQLDYLFAKLKKILVCDSKSFGRDSDEGKLEKTSKQNAQYSNSQKRSVDNSNRELLKEKLSKSEDPVHYKSLVGCKKSEENYQDQNNSSINTVKHDIKKNFNICFDNIKNSQSEERSLEVHCPSTPKSEKNEGSSIEDAQTSQHATLKPERSFEILTEQQASSLTFNLVSDAQMGEIFKSLLQGSDLLDSSVNCTEKSEWELKTPEKQLLETLKCESIPACTTEELVSGVASPCPKMISDDNWSLLSSEKGPSLSSGLSLPVHPDVLDESCMFEVSTNLPLSKDNVCSVEKSKPCVSSILLEDLAVSLTVPSPLKSDGHLSFLKPDMSSSSTPEEVISAHFSEDALLEEEDASEQDIHLALESDNSSSKSSCSSSWTSRSVAPGFQYHPNLPMHAVIMEKSNDHFIVKIRRATPSTSSGLKQSMMPDELLTSLPRHGKEADEGPEKEYISCQNTVFKSVEELENSNKNVDGSKSTHEEQSSMIQTQVPDIYEFLKDASDKMGHSDEVADECFKLHQVWETKVPESIEELPSMEEISHSVGEHLPNTYVDLTKDPVTETKNLGEFIEVTVLHIDQLGCSGGNLNQSAQILDNSLQADTVGAFIDLTQDASSEAKSEGNHPALAVEDLGCGVIQVDEDNCKEEKAQVANRPLKCIVEETYIDLTTESPSSCEVKKDELKSEPGSNCDNSELPGTLHNSHKKRRNISDLNHPHKKQRKETDLTNKEKTKKPTQDSCENTEAHQKKASKKKAPPVTKDPSSLKATPGIKDSSAALATSTSLSAKNVIKKKGEIIILWTRNDDREILLECQKRGPSFKTFAYLAAKLDKNPNQVTTQFLHL

SEQ ID NO: 12290 - protein, 361 aa, Homo sapiens
  Payload ID: 2417
  Gene Symbol: CASP8AP2
  Gene Name: caspase 8 associated protein 2
  ENSP ID: ENSP00000485346
MAADDDNGDGTSLFDVFSASPLKNNDEGSLDIYAGLDSAVSDSASKSCVPSRNCLDLYEEILTEEGTAKEATYNDLQVEYGKCQLQMKELMKKFKEIQTQNFSLINENQSLKKNISALIKTARVEINRKDEEISNLHQRLSEFPHFRNNHKTARTFDTVKTKDLKSRSPHLDDCSKTDHRAKSDVSKDVHHSTSLPNLEKEGKPHSDKRSTSHLPTSVEKHCTNGVWSRSHYQVGEGSSNEDSRRGRKDIRHSQFNRGTERVRKDLSTGCGDGEPRILEASQRLQGHPEKYGKGEPKTESKSSKFKSNSDSDYKGERINSSWEKETPGERSHSRVDSQSDKKLERQSERSQNINRKEVKSQ

SEQ ID NO: 12291 - protein, 361 aa, Homo sapiens; identical to SEQ ID NO: 12290
  Payload ID: 2417
  Gene Symbol: CASP8AP2
  Gene Name: caspase 8 associated protein 2
  ENSP ID: ENSP00000485349

SEQ ID NO: 12292 - protein, 395 aa, Homo sapiens
  Payload ID: 2418
  Gene Symbol: CASP8
  Gene Name: caspase 8, apoptosis-related cysteine peptidase
  Uniprot ID: Q14790
  ENSP ID: ENSP00000264274
MDFSRNLYDIGEQLDSEDLASLKFLSLDYIPQRKQEPIKDALMLFQRLQEKRMLEESNLSFLKELLFRINRLDLLITYLNTRKEEMERELQTPGRAQISAYRVMLYQISEEVSRSELRSFKFLLQEEISKCKLDDDMNLLDIFIEMEKRVILGEGKLDILKRVCAQINKSLLKIINDYEEFSKGALTTTFEELHFEIKPHDDCTVEQIYEILKIYQLMDHSNMDCFICCILSHGDKGIIYGTDGQEAPIYELTSQFTGLKCPSLAGKPKVFFIQACQGDNYQKGIPVETDSEEQPYLEMDLSSPQTRYIPDEADFLLGMATVNNCVSYRNPAEGTWYIQSLCQSLRERCPRGDDILTILTEVNYEVSNKDDKKNMGKQMPQPTFTLRKKLVFPSD

SEQ ID NO: 12293 - protein, 496 aa, Homo sapiens
  Payload ID: 2418
  Gene Symbol: CASP8
  Gene Name: caspase 8, apoptosis-related cysteine peptidase
  Uniprot ID: Q14790
  ENSP ID: ENSP00000264275
MDFSRNLYDIGEQLDSEDLASLKFLSLDYIPQRKQEPIKDALMLFQRLQEKRMLEESNLSFLKELLFRINRLDLLITYLNTRKEEMERELQTPGRAQISAYRFHFCRMSWAEANSQCQTQSVPFWRRVDHLLIRVMLYQISEEVSRSELRSFKFLLQEEISKCKLDDDMNLLDIFIEMEKRVILGEGKLDILKRVCAQINKSLLKIINDYEEFSKGEELCGVMTISDSPREQDSESQTLDKVYQMKSKPRGYCLIINNHNFAKAREKVPKLHSIRDRNGTHLDAGALTTTFEELHFEIKPHDDCTVEQIYEILKIYQLMDHSNMDCFICCILSHGDKGIIYGTDGQEAPIYELTSQFTGLKCPSLAGKPKVFFIQACQGDNYQKGIPVETDSEEQPYLEMDLSSPQTRYIPDEADFLLGMATVNNCVSYRNPAEGTWYIQSLCQSLRERCPRGDDILTILTEVNYEVSNKDDKKNMGKQMPQPTFTLRKKLVFPSD

SEQ ID NO: 12294 - protein, 464 aa, Homo sapiens
  Payload ID: 2418
  Gene Symbol: CASP8
  Gene Name: caspase 8, apoptosis-related cysteine peptidase
  Uniprot ID: Q14790
  ENSP ID: ENSP00000325722
MDFSRNLYDIGEQLDSEDLASLKFLSLDYIPQRKQEPIKDALMLFQRLQEKRMLEESNLSFLKELLFRINRLDLLITYLNTRKEEMERELQTPGRAQISAYRVMLYQISEEVSRSELRSFKFLLQEEISKCKLDDDMNLLDIFIEMEKRVILGEGKLDILKRVCAQINKSLLKIINDYEEFSKGEELCGVMTISDSPREQDSESQTLDKVYQMKSKPRGYCLIINNHNFAKAREKVPKLHSIRDRNGTHLDAGALTTTFEELHFEIKPHDDCTVEQIYEILKIYQLMDHSNMDCFICCILSHGDKGIIYGTDGQEAPIYELTSQFTGLKCPSLAGKPKVFFIQACQGDNYQKGIPVETDSEEQPYLEMDLSSPQTRYIPDEADFLLGMATVNNCVSYRNPAEGTWYIQSLCQSLRERCPRGDDILTILTEVNYEVSNKDDKKNMGKQMPQPTFTLRKKLVFPSD

SEQ ID NO: 12295 - protein, 538 aa, Homo sapiens
  Payload ID: 2418
  Gene Symbol: CASP8
  Gene Name: caspase 8, apoptosis-related cysteine peptidase
  Uniprot ID: Q14790
  ENSP ID: ENSP00000351273
MEGGRRARVVIESKRNFFLGAFPTPFPAEHVELGRLGDSETAMVPGKGGADYILLPFKKMDFSRNLYDIGEQLDSEDLASLKFLSLDYIPQRKQEPIKDALMLFQRLQEKRMLEESNLSFLKELLFRINRLDLLITYLNTRKEEMERELQTPGRAQISAYRVMLYQISEEVSRSELRSFKFLLQEEISKCKLDDDMNLLDIFIEMEKRVILGEGKLDILKRVCAQINKSLLKIINDYEEFSKERSSSLEGSPDEFSNGEELCGVMTISDSPREQDSESQTLDKVYQMKSKPRGYCLIINNHNFAKAREKVPKLHSIRDRNGTHLDAGALTTTFEELHFEIKPHDDCTVEQIYEILKIYQLMDHSNMDCFICCILSHGDKGIIYGTDGQEAPIYELTSQFTGLKCPSLAGKPKVFFIQACQGDNYQKGIPVETDSEEQPYLEMDLSSPQTRYIPDEADFLLGMATVNNCVSYRNPAEGTWYIQSLCQSLRERCPRGDDILTILTEVNYEVSNKDDKKNMGKQMPQPTFTLRKKLVFPSD

SEQ ID NO: 12296 - protein, 235 aa, Homo sapiens
  Payload ID: 2418
  Gene Symbol: CASP8
  Gene Name: caspase 8, apoptosis-related cysteine peptidase
  Uniprot ID: Q14790
  ENSP ID: ENSP00000376087
MDFSRNLYDIGEQLDSEDLASLKFLSLDYIPQRKQEPIKDALMLFQRLQEKRMLEESNLSFLKELLFRINRLDLLITYLNTRKEEMERELQTPGRAQISAYRVMLYQISEEVSRSELRSFKFLLQEEISKCKLDDDMNLLDIFIEMEKRVILGEGKLDILKRVCAQINKSLLKIINDYEEFSKERSSSLEGSPDEFSNDFGQSLPNEKQTSGILSDHQQSQFCKSTGESAQTSQH

SEQ ID NO: 12297 - protein, 464 aa, Homo sapiens; identical to SEQ ID NO: 12294
  Payload ID: 2418
  Gene Symbol: CASP8
  Gene Name: caspase 8, apoptosis-related cysteine peptidase
  Uniprot ID: Q14790
  ENSP ID: ENSP00000376091

SEQ ID NO: 12298 - protein, 278 aa, Homo sapiens [sequence omitted]

SEQ ID NO: 12299 - protein, 209 aa, Homo sapiens
  Payload ID: 2418
  Gene Symbol: CASP8
  Gene Name: caspase 8, apoptosis-related cysteine peptidase
  ENSP ID: ENSP00000388306
MDFSRNLYDIGEQLDSEDLASLKFLSLDYIPQRKQEPIKDALMLFQRLQEKRMLEESNLSFLKELLFRINRLDLLITYLNTRKEEMERELQTPGRAQISAYRVMLYQISEEVSRSELRSFKFLLQEEISKCKLDDDMNLLDIFIEMEKRVILGEGKLDILKRVCAQINKSLLKIINDYEEFSKDFGQSLPNEKQTSGILSDHQQSQFCK

SEQ ID NO: 12300 - protein, 83 aa, Homo sapiens
  Payload ID: 2418
  Gene Symbol: CASP8
  Gene Name: caspase 8, apoptosis-related cysteine peptidase
  ENSP ID: ENSP00000390346
NLLDIFIEMEKRVILGEGKLDILKRVCAQINKSLLKIINDYEEFSKDFGQSLPNEKQTSGILSDHQQSQFCKSTGESAQTSQH

SEQ ID NO: 12301 - protein, 116 aa, Homo sapiens
  Payload ID: 2418
  Gene Symbol: CASP8
  Gene Name: caspase 8, apoptosis-related cysteine peptidase
  ENSP ID: ENSP00000390641
MDFSRNLYDIGEQLDSEDLASLKFLSLDYIPQRKQEPIKDALMLFQRLQEKRMLEESNLSFLKELLFRINRLDLLITYLNTRKEEMERELQTPGRAQISAYRVMLYQISEEVSRSE

SEQ ID NO: 12302 - protein, 149 aa, Homo sapiens
  Payload ID: 2418
  Gene Symbol: CASP8
  Gene Name: caspase 8, apoptosis-related cysteine peptidase
  ENSP ID: ENSP00000391709
MLYQISEEVSRSELRSFKFLLQEEISKCKLDDDMNLLDIFIEMEKRVILGEGKLDILKRVCAQINKSLLKIINDYEEFSKGEELCGVMTISDSPREQDSESQTLDKVYQMKSKPRGYCLIINNHNFAKAREKVPKLHSIRDRNGTHLDA

SEQ ID NO: 12303 - protein, 258 aa, Homo sapiens
  Payload ID: 2418
  Gene Symbol: CASP8
  Gene Name: caspase 8, apoptosis-related cysteine peptidase
  ENSP ID: ENSP00000394434
NLLDIFIEMEKRVILGEGKLDILKRVCAQINKSLLKIINDYEEFSKGALTTTFEELHFEIKPHDDCTVEQIYEILKIYQLMDHSNMDCFICCILSHGDKGIIYGTDGQEAPIYELTSQFTGLKCPSLAGKPKVFFIQACQGDNYQKGIPVETDSEEQPYLEMDLSSPQTRYIPDEADFLLGMATVNNCVSYRNPAEGTWYIQSLCQSLRERCPRGDDILTILTEVNYEVSNKDDKKNMGKQMPQPTFTLRKKLVFPSD

SEQ ID NO: 12304 - protein, 124 aa, Homo sapiens
  Payload ID: 2418
  Gene Symbol: CASP8
  Gene Name: caspase 8, apoptosis-related cysteine peptidase
  ENSP ID: ENSP00000396869
MDFSRNLYDIGEQLDSEDLASLKFLSLDYIPQRKQEPIKDALMLFQRLQEKRMLEESNLSFLKELLFRINRLDLLITYLNTRKEEMERELQTPGRAQISAYRVMLYQISEEVSRSELRSFKFLL

SEQ ID NO: 12305 - protein, 198 aa, Homo sapiens
  Payload ID: 2418
  Gene Symbol: CASP8
  Gene Name: caspase 8, apoptosis-related cysteine peptidase
  ENSP ID: ENSP00000397528
MDFSRNLYDIGEQLDSEDLASLKFLSLDYIPQRKQEPIKDALMLFQRLQEKRMLEESNLSFLKELLFRINRLDLLITYLNTRKEEMERELQTPGRAQISAYRVMLYQISEEVSRSELRSFKFLLQEEISKCKLDDDMNLLDIFIEMEKRVILGEGKLDILKRVCAQINKSLLKIINDYEEFSKERSSSLEGSPDEFSN

SEQ ID NO: 12306 - protein, 58 aa, Homo sapiens
  Payload ID: 2418
  Gene Symbol: CASP8
  Gene Name: caspase 8, apoptosis-related cysteine peptidase
  ENSP ID: ENSP00000407378
MEGGRRARVVIESKRNFFLGAFPTPFPAEHVELGRLGDSETAMVPGKGGADGLQQKSL

SEQ ID NO: 12307 - protein, 479 aa, Homo sapiens
  Payload ID: 2418
  Gene Symbol: CASP8
  Gene Name: caspase 8, apoptosis-related cysteine peptidase
  Uniprot ID: Q14790
  ENSP ID: ENSP00000412523
MDFSRNLYDIGEQLDSEDLASLKFLSLDYIPQRKQEPIKDALMLFQRLQEKRMLEESNLSFLKELLFRINRLDLLITYLNTRKEEMERELQTPGRAQISAYRVMLYQISEEVSRSELRSFKFLLQEEISKCKLDDDMNLLDIFIEMEKRVILGEGKLDILKRVCAQINKSLLKIINDYEEFSKERSSSLEGSPDEFSNGEELCGVMTISDSPREQDSESQTLDKVYQMKSKPRGYCLIINNHNFAKAREKVPKLHSIRDRNGTHLDAGALTTTFEELHFEIKPHDDCTVEQIYEILKIYQLMDHSNMDCFICCILSHGDKGIIYGTDGQEAPIYELTSQFTGLKCPSLAGKPKVFFIQACQGDNYQKGIPVETDSEEQPYLEMDLSSPQTRYIPDEADFLLGMATVNNCVSYRNPAEGTWYIQSLCQSLRERCPRGDDILTILTEVNYEVSNKDDKKNMGKQMPQPTFTLRKKLVFPSD

SEQ ID NO: 12308 - protein, 266 aa, Homo sapiens
  Payload ID: 2419
  Gene Symbol: CASP9
  Gene Name: caspase 9, apoptosis-related cysteine peptidase
  Uniprot ID: P55211
  ENSP ID: ENSP00000255256
MDEADRRLLRRCRLRLVEELQVDQLWDALLSRELFRPHMIEDIQRAGSGSRRDQARQLIIDLETRGSQALPLFISCLEDTGQDMLASFLRTNRQAAKLSKPTLENLTPVVLRPEIRKPEVLRPETPRPVDIGSGGFGDVEQKDHGFEVASTSPEDESPGSNPEPDATPFQEGLRTFDQLDAISSLPTPSDIFVSYSTFPGFVSWRDPKSGSWYVETLDDIFEQWAHSEDLQSLLLRVANAVSVKGIYKQMPGCFNFLRKKLFFKTS

SEQ ID NO: 12309 - protein, 416 aa, Homo sapiens
  Payload ID: 2419
  Gene Symbol: CASP9
  Gene Name: caspase 9, apoptosis-related cysteine peptidase
  Uniprot ID: P55211
  ENSP ID: ENSP00000330237
MDEADRRLLRRCRLRLVEELQVDQLWDALLSRELFRPHMIEDIQRAGSGSRRDQARQLIIDLETRGSQALPLFISCLEDTGQDMLASFLRTNRQAAKLSKPTLENLTPVVLRPEIRKPEVLRPETPRPVDIGSGGFGDVGALESLRGNADLAYILSMEPCGHCLIINNVNFCRESGLRTRTGSNIDCEKLRRRFSSLHFMVEVKGDLTAKKMVLALLELAQQDHGALDCCVVVILSHGCQASHLQFPGAVYGTDGCPVSVEKIVNIFNGTSCPSLGGKPKLFFIQACGGEQKDHGFEVASTSPEDESPGSNPEPDATPFQEGLRTFDQLDAISSLPTPSDIFVSYSTFPGFVSWRDPKSGSWYVETLDDIFEQWAHSEDLQSLLLRVANAVSVKGIYKQMPGCFNFLRKKLFFKTS

SEQ ID NO: 12310 - protein, 333 aa, Homo sapiens
  Payload ID: 2419
  Gene Symbol: CASP9
  Gene Name: caspase 9, apoptosis-related cysteine peptidase
  Uniprot ID: P55211
  ENSP ID: ENSP00000365051
MLASFLRTNRQAAKLSKPTLENLTPVVLRPEIRKPEVLRPETPRPVDIGSGGFGDVGALESLRGNADLAYILSMEPCGHCLIINNVNFCRESGLRTRTGSNIDCEKLRRRFSSLHFMVEVKGDLTAKKMVLALLELAQQDHGALDCCVVVILSHGCQASHLQFPGAVYGTDGCPVSVEKIVNIFNGTSCPSLGGKPKLFFIQACGGEQKDHGFEVASTSPEDESPGSNPEPDATPFQEGLRTFDQLDAISSLPTPSDIFVSYSTFPGFVSWRDPKSGSWYVETLDDIFEQWAHSEDLQSLLLRVANAVSVKGIYKQMPGCFNFLRKKLFFKTS

SEQ ID NO: 12311 - protein, 152 aa, Homo sapiens
  Payload ID: 2419
  Gene Symbol: CASP9
  Gene Name: caspase 9, apoptosis-related cysteine peptidase
  ENSP ID: ENSP00000383588
  MOD_RES (1)..(1): Any amino acid
XADRRLLRRCRLRLVEELQVDQLWDALLSRELFRPHMIEDIQRAGSGSRRDQARQLIIDLETRGSQALPLFISCLEDTGQDMLASFLRTNRQAAKLSKPTLENLTPVVLRPEIRKPEVLRPETPRPVDIGSGGFGDVGALESLRGNADLTVL

SEQ ID NO: 12312 - protein, 266 aa, Homo sapiens
  Payload ID: 2419
  Gene Symbol: CASP9
  Gene Name: caspase 9, apoptosis-related cysteine peptidase
  ENSP ID: ENSP00000396540
MLASFLRTNRQAAKLSKPTLENLTPVVLRPEIRKPEVLRPETPRPVDIGSGGFGDVGALESLRGNADLAYILSMEPCGHCLIINNVNFCRESGLRTRTGSNIDCEKLRRRFSSLHFMVEVKGDLTAKKMVLALLELAQQDHGALDCCVVVILSHGCQASHLQFPGAVYGTDGCPVSVEKIVNIFNGTSCPSLGGKPKLFFIQACGGEQKDHGFEVASTSPEDESPGSNPEPDATPFQEGLRTFDQLDAISSLPTPSDIFVSYSTFP

SEQ ID NO: 12313 - protein, 198 aa, Homo sapiens
  Payload ID: 2419
  Gene Symbol: CASP9
  Gene Name: caspase 9, apoptosis-related cysteine peptidase
  ENSP ID: ENSP00000408691
  MOD_RES (1)..(1): Any amino acid
XCGHCLIINNVNFCRESGLRTRTGSNIDCEKLRRRFSSLHFMVEVKGDLTAKKMVLALLELAQQDHGALDCCVVVILSHGCQASHLQFPGAVYGTDGCPVSVEKIVNIFNGTSCPSLGGKPKLFFIQACGGGFVSWRDPKSGSWYVETLDDIFEQWAHSEDLQSLLLRVANAVSVKGIYKQMPGCFNFLRKKLFFKTS

SEQ ID NO: 12314 - protein, 254 aa, Homo sapiens
  Payload ID: 2419
  Gene Symbol: CASP9
  Gene Name: caspase 9, apoptosis-related cysteine peptidase
  ENSP ID: ENSP00000411304
MDEADRRLLRRCRLRLVEELQVDQLWDALLSRELFRPHMIEDIQRAGSGSRRDQARQLIIDLETRGSQALPLFISCLEDTGQDMLASFLRTNRQAAKLSKPTLENLTPVVLRPEIRKPEVLRPETPRPVDIGSGGFGDVGALESLRGNADLAYILSMEPCGHCLIINNVNFCRESGLRTRTGSNIDCEKLRRRFSSLHFMVEVKGDLTAKASHLQFPGAVYGTDGCPVSVEKIVNIFNGTSCPSLGGKPKLFFI

SEQ ID NO: 12315 - protein, 95 aa, Homo sapiens
  Payload ID: 2419
  Gene Symbol: CASP9
  Gene Name: caspase 9, apoptosis-related cysteine peptidase
  ENSP ID: ENSP00000449216
MDEADRRLLRRCRLRLVEELQVDQLWDALLSRELFRPHMIEDIQRAGSGSRRDQARQLIIDLETRGSQALPLFISCLEDTGQDMLASFLRTNRCS

SEQ ID NO: 12316 - protein, 421 aa, Homo sapiens
  Payload ID: 2419
  Gene Symbol: CASP9
  Gene Name: caspase 9, apoptosis-related cysteine peptidase
  ENSP ID: ENSP00000449584
MDEADRRLLRRCRLRLVEELQVDQLWDALLSRELFRPHMIEDIQRAGSGSRRDQARQLIIDLETRGSQALPLFISCLEDTGQDMLASFLRTNRQAAKLSKPTLENLTPVVLRPEIRKPEVLRPETPRPVDIGSGGFGDVGALESLRGNADLAYILSMEPCGHCLIINNVNFCRESGLRTRTGSNIDCEKLRRRFSSLHFMVEVKGDLTAKKMVLALLELAQQDHGALDCCVVVILSHGCQASHLQFPGAVYGTDGCPVSVEKIVNIFNGTSCPSLGGKPKLFFIQACGGEQKDHGFEVASTSPEDESPGSNPEPDATPFQEGLRTFDQLDAISSLPTPSDIFVSYSTFPGFVSWRDPKSGSWYVETLDDIFEQWAHSEDLQSLLLRVSAAFLCKGEGRLLRGSVSSWGWGFGVSRAGPNQG

SEQ ID NO: 12317 - protein, 47 aa, Homo sapiens
  Payload ID: 2419
  Gene Symbol: CASP9
  Gene Name: caspase 9, apoptosis-related cysteine peptidase
  ENSP ID: ENSP00000480785
MLASFLRTNRQAAKLSKPTLENLTPVVLRPEIRKPEVLRPETPRPVD

SEQ ID NO: 12318 - protein, 361 aa, Homo sapiens
  Payload ID: 2420
  Gene Symbol: CAAP1
  Gene Name: caspase activity and apoptosis inhibitor 1
  Uniprot ID: Q9H8G2
  ENSP ID: ENSP00000369431
MTGKKSSREKRRKRSSQEAAAALAAPDIVPALASGSSGSTSGCGSAGGCGSVSCCGNANFSGSVTGGGSGGSCWGGSSVERSERRKRRSTDSSSVSGSLQQETKYILPTLEKELFLAEHSDLEEGGLDLTVSLKPVSFYISDKKEMLQQCFCIIGEKKLQKMLPDVLKNCSIEEIKKLCQEQLELLSEKKILKILEGDNGMDSDMEEEADDGSKMGSDLVSQQDICIDSASSVRENKQPEGLELKQGKGEDSDVLSINADAYDSDIEGPCNEEAAAPEAPENTVQSEAGQIDDLEKDIEKSVNEILGLAESSPNEPKAATLAVPPPEDVQPSAQQLELLELEMRARAIKALMKAGDIKKPA

SEQ ID NO: 12319 - protein, 133 aa, Homo sapiens
  Payload ID: 2420
  Gene Symbol: CAAP1
  Gene Name: caspase activity and apoptosis inhibitor 1
  ENSP ID: ENSP00000427916
MTGKKSSREKRRKRSSQEAAAALAAPDIVPALASGSSGSTSGCGSAGGCGSVSCCGNANFSGSVTGGGSGGSCWGGSSVERSERRKRRSTDSSSVSGSLQQVRARPSGRFLELLLFRKKSGFQRDGAQAGAHC

SEQ ID NO: 12320 - protein, 111 aa, Homo sapiens
  Payload ID: 2420
  Gene Symbol: CAAP1
  Gene Name: caspase activity and apoptosis inhibitor 1
  ENSP ID: ENSP00000427938
MTGKKSSREKRRKRSSQEAAAALAAPDIVPALASGSSGSTSGCGSAGGCGSVSCCGNANFSGSVTGGGSGGSCWGGSSVERSERRKRRSTDSSSVSGSLQQEKGKIVMYSV

SEQ ID NO: 12321 - protein, 216 aa, Homo sapiens
  Payload ID: 2420
  Gene Symbol: CAAP1
  Gene Name: caspase activity and apoptosis inhibitor 1
  Uniprot ID: Q9H8G2
  ENSP ID: ENSP00000487373
MLQQCFCIIGEKKLQKMLPDVLKNCSIEEIKKLCQEQLELLSEKKILKILEGDNGMDSDMEEEADDGSKMGSDLVSQQDICIDSASSVRENKQPEGLELKQGKGEDSDVLSINADAYDSDIEGPCNEEAAAPEAPENTVQSEAGQIDDLEKDIEKSVNEILGLAESSPNEPKAATLAVPPPEDVQPSAQQLELLELEMRARAIKALMKAGDIKKPA

SEQ ID NO: 12322 - protein, 1032 aa, Homo sapiens
  Payload ID: 2421
  Gene Symbol: CARD10
  Gene Name: caspase recruitment domain family, member 10
  Uniprot ID: Q9BWT7
  ENSP ID: ENSP00000251973
MPGRAEAGEAEEEAGAGSGSEAEEDALWERIEGVRHRLARALNPAKLTPYLRQCRVIDEQDEEEVLSTYRFPCRVNRTGRLMDILRCRGKRGYEAFLEALEFYYPEHFTLLTGQEPAQRCSMILDEEGPEGLTQFLMTEVRRLREARKSQLQREQQLQARGRVLEEERAGLEQRLRDQQQAQERCQRLREDWEAGSLELLRLKDENYMIAMRLAQLSEEKNSAVLRSRDLQLAVDQLKLKVSRLEEECALLRRARGPPPGAEEKEKEKEKEKEPDNVDLVSELRAENQRLTASLRELQEGLQQEASRPGAPGSERILLDILEHDWREAQDSRQELCQKLHAVQGELQWAEELRDQYLQEMEDLRLKHRTLQKDCDLYKHRMATVLAQLEEIEKERDQAIQSRDRIQLQYSQSLIEKDQYRKQVRGLEAERDELLTTLTSLEGTKALLEVQLQRAQGGTCLKACASSHSLCSNLSSTWSLSEFPSPLGGPEATGEAAVMGGPEPHNSEEATDSEKEINRLSILPFPPSAGSILRRQREEDPAPPKRSFSSMSDITGSVTLKPWSPGLSSSSSSDSVWPLGKPEGLLARGCGLDFLNRSLAIRVSGRSPPGGPEPQDKGPDGLSFYGDRWSGAVVRRVLSGPGSARMEPREQRVEAAGLEGACLEAEAQQRTLLWNQGSTLPSLMDSKACQSFHEALEAWAKGPGAEPFYIRANLTLPERADPHALCVKAQEILRLVDSAYKRRQEWFCTRVDPLTLRDLDRGTVPNYQRAQQLLEVQEKCLPSSRHRGPRSNLKKRALDQLRLVRPKPVGAPAGDSPDQLLLEPCAEPERSLRPYSLVRPLLVSALRPVVLLPECLAPRLIRNLLDLPSSRLDFQVCPAESLSGEELCPSSAPGAPKAQPATPGLGSRIRAIQESVGKKHCLLELGARGVRELVQNEIYPIVIHVEVTEKNVREVRGLLGRPGWRDSELLRQCRGSEQVLWGLPCSWVQVPAHEWGHAEELAKVVRGRILQEQARLVWVECGSSRGCPSSSEA

SEQ ID NO: 12323 - protein, 1032 aa, Homo sapiens; identical to SEQ ID NO: 12322
  Payload ID: 2421
  Gene Symbol: CARD10
  Gene Name: caspase recruitment domain family, member 10
  Uniprot ID: Q9BWT7
  ENSP ID: ENSP00000384570

SEQ ID NO: 12324 - protein, 746 aa, Homo sapiens
  Payload ID: 2421
  Gene Symbol: CARD10
  Gene Name: caspase recruitment domain family, member 10
  Uniprot ID: Q9BWT7
  ENSP ID: ENSP00000385799
MGVGVGLGNGLRLLPWMEASRPGAPGSERILLDILEHDWREAQDSRQELCQKLHAVQGELQWAEELRDQYLQEMEDLRLKHRTLQKDCDLYKHRMATVLAQLEEIEKERDQAIQSRDRIQLQYSQSLIEKDQYRKQVRGLEAERDELLTTLTSLEGTKALLEVQLQRAQGGTCLKACASSHSLCSNLSSTWSLSEFPSPLGGPEATGEAAVMGGPEPHNSEEATDSEKEINRLSILPFPPSAGSILRRQREEDPAPPKRSFSSMSDITGSVTLKPWSPGLSSSSSSDSVWPLGKPEGLLARGCGLDFLNRSLAIRVSGRSPPGGPEPQDKGPDGLSFYGDRWSGAVVRRVLSGPGSARMEPREQRVEAAGLEGACLEAEAQQRTLLWNQGSTLPSLMDSKACQSFHEALEAWAKGPGAEPFYIRANLTLPERADPHALCVKAQEILRLVDSAYKRRQEWFCTRVDPLTLRDLDRGTVPNYQRAQQLLEVQEKCLPSSRHRGPRSNLKKRALDQLRLVRPKPVGAPAGDSPDQLLLEPCAEPERSLRPYSLVRPLLVSALRPVVLLPECLAPRLIRNLLDLPSSRLDFQVCPAESLSGEELCPSSAPGAPKAQPATPGLGSRIRAIQESVGKKHCLLELGARGVRELVQNEIYPIVIHVEVTEKNVREVRGLLGRPGWRDSELLRQCRGSEQVLWGLPCSWVQVPAHEWGHAEELAKVVRGRILQEQARLVWVECGSSRGCPSSSEA

SEQ ID NO: 12325 - protein, 192 aa, Homo sapiens
  Payload ID: 2421
  Gene Symbol: CARD10
  Gene Name: caspase recruitment domain family, member 10
  ENSP ID: ENSP00000393411
TSLYCPQMAGALETQVLSFSSMSDITGSVTLKPWSPGLSSSSSSDSVWPLGKPEGLLARGCGLDFLNRSLAIRVSGRSPPGGPEPQDKGPDGLSFYGDRWSGAVVRRVLSGPGSARMEPREQRVEAAGLEGACLEAEAQQRTLLWNQGSTLPSLMDSKACQSFHEALEAWAKGPGAEPFYIRANLTLPERAD

SEQ ID NO: 12326 - protein, 480 aa, Homo sapiens
  Payload ID: 2421
  Gene Symbol: CARD10
  Gene Name: caspase recruitment domain family, member 10
  ENSP ID: ENSP00000416239
MEDLRLKHRTLQKDCDLYKHRMATVLAQLEEIEKERDQAIQSRDRIQLQYSQSLIEKDQYRKQVRGLEAERDELLTTLTSLEGTKALLEVQLQRAQGGTCLKACASSHSLCSNLSSTWSLSEFPSPLGGPEATGEAAVMGGPEPHNSEEATDSEKEINRLSILPFPPSAGSILRRQREEDPAPPKRSFSSMSDITGSVTLKPWSPGLSSSSSSDSVWPLGKPEGLLARGCGLDFLNRSLAIRVSGRSPPGGPEPQDKGPDGLSFYGDRWSGAVVRRVLSGPGSARMEPREQRVEAAGLEGACLEAEAQQRTLLWNQGSTLPSLMDSKACQSFHEALEAWAKGPGAEPFYIRANLTLPERADPHALCVKAQEILRLVDSAYKRRQEWFCTRVDPLTLRDLDRGTVPNYQRAQQLLEVQEKCLPSSRHRGPRSNLKKRALDQLRLVRPKPVGAPAGDSPDQLLLEPCAEPERSLRPYSLVRP

SEQ ID NO: 12327 - protein, 271 aa, Homo sapiens
  Payload ID: 2422
  Gene Symbol: CARD11
  Gene Name: caspase recruitment domain family, member 11
  ENSP ID: ENSP00000347695
EEGTDASPSSCGSLPITNSFTKMPPRSRSSIMSITAEPPGNDSIVRRYKEDAPHRSTVEEDNDSGGFDALDLDDDSHERYSFGPSSIHSSSSSHQSEGLDAYDLEQVNLMFRKFSLERPFRPSVTSVGHVRGPGPSVQHTTLNGDSLTSQLTLLGGNARGSFVHSVKPGSLAEKAGLREGHQLLLLEGCIRGERQSVPLDTCTKEEAHWTIQRCSGPVTLHYKVNHEGYRKLVKDMEDGLITSGDSFYIRLNLNISSQLDACTMSLKCDDV

SEQ ID NO: 12328 - protein, 73 aa, Homo sapiens
  Payload ID: 2422
  Gene Symbol: CARD11
  Gene Name: caspase recruitment domain family, member 11
  ENSP ID: ENSP00000348779
MPGGGPEMDDYMETLKDEEDALWENVECNRHMLSRYINPAKLTPYLRQCKVIDEQDEDEVLNAPMLPSKINRA

SEQ ID NO: 12329 - protein, 1154 aa, Homo sapiens [sequence omitted]

SEQ ID NO: 12330 - protein, 1004 aa, Homo sapiens
  Payload ID: 2423
  Gene Symbol: CARD14
  Gene Name: caspase recruitment domain family, member 14
  Uniprot ID: Q9BXL6
  ENSP ID: ENSP00000344549
MGELCRRDSALTALDEETLWEMMESHRHRIVRCICPSRLTPYLRQAKVLCQLDEEEVLHSPRLTNSAMRAGHLLDLLKTRGKNGAIAFLESLKFHNPDVYTLVTGLQPDVDFSNFSGLMETSKLTECLAGAIGSLQEELNQEKGQKEVLLRRCQQLQEHLGLAETRAEGLHQLEADHSRMKREVSAHFHEVLRLKDEMLSLSLHYSNALQEKELAASRCRSLQEELYLLKQELQRANMVSSCELELQEQSLRTASDQESGDEELNRLKEENEKLRSLTFSLAEKDILEQSLDEARGSRQELVERIHSLRERAVAAERQREQYWEEKEQTLLQFQKSKMACQLYREKVNALQAQVCELQKERDQAYSARDSAQREISQSLVEKDSLRRQVFELTDQVCELRTQLRQLQAEPPGVLKQEARTREPCPREKQRLVRMHAICPRDDSDCSLVSSTESQLLSDLSATSSRELVDSFRSSSPAPPSQQSLYKRVAEDFGEEPWSFSSCLEIPEGDPGALPGAKAGDPHLDYELLDTADLPQLESSLQPVSPGRLDVSESGVLMRRRPARRILSQVTMLAFQGDALLEQISVIGGNLTGIFIHRVTPGSAADQMALRPGTQIVMVDYEASEPLFKAVLEDTTLEEAVGLLRRVDGFCCLSVKVNTDGYKRLLQDLEAKVATSGDSFYIRVNLAMEGRAKGELQVHCNEVLHVTDTMFQGCGCWHAHRVNSYTMKDTAAHGTIPNYSRAQQQLIALIQDMTQQCTVTRKPSSGGPQKLVRIVSMDKAKASPLRLSFDRGQLDPSRMEGSSTCFWAESCLTLVPYTLVRPHRPARPRPVLLVPRAVGKILSEKLCLLQGFKKCLAEYLSQEEYEAWSQRGDIIQEGEVSGGRCWVTRHAVESLMEKNTHALLDVQLDSVCTLHRMDIFPIVIHVSVNEKMAKKLKKGLQRLGTSEEQLLEAARQEEGDLDRAPCLYSSLAPDGWSDLDGLLSCVRQAIADEQKKVVWTEQSPR

SEQ ID NO: 12331 - protein, 1004 aa, Homo sapiens; identical to SEQ ID NO: 12330
  Payload ID: 2423
  Gene Symbol: CARD14
  Gene Name: caspase recruitment domain family, member 14
  Uniprot ID: Q9BXL6
  ENSP ID: ENSP00000458715

SEQ ID NO: 12332 - protein, 70 aa, Homo sapiens
  Payload ID: 2423
  Gene Symbol: CARD14
  Gene Name: caspase recruitment domain family, member 14
  ENSP ID: ENSP00000459244
MGELCRRDSALTALDEETLWEMMESHRHRIVRCICPSRLTPYLRQAKVLCQLDEEEVLHSPRLTNSAMRA

SEQ ID NO: 12333 - protein, 475 aa, Homo sapiens
  Payload ID: 2423
  Gene Symbol: CARD14
  Gene Name: caspase recruitment domain family, member 14
  ENSP ID: ENSP00000460405
  MOD_RES (1)..(1): Any amino acid
XYSNALQEKELAASRCRSLQEELYLLKQELQRANMVSSCELELQEQSLRTASDQESGDEELNRLKEENEKLRSLTFSLAEKDILEQSLDEARGSRQELVERIHSLRERAVAAERQREQYWEEKEQTLLQFQKSKMACQLYREKVNALQAQVCELQKERDQAYSARDSAQREISQSLVEKDSLRRQVFELTDQVCELRTQLRQLQAEPPGVLKQEARTREPCPREKQRLVRMHAICPRDDSDCSLVSSTESQLLSDLSATSSRELVDSFRSSSPAPPSQQSLYKRVAEDFGEEPWSFSSCLEIPEGDPGALPGAKAGDPHLDYELLDTADLPQLESSLQPVSPGRLDVSESGVLMRRRPARRILSQVTMLAFQGDALLEQISVIGGNLTGIFIHRVTPGSAADQMALRPGTQIVMVIRGYSRTWRPKWRPRGTHSTSGSTWPWRAGPKGSCRCIATRSCTSPTPCSRAAAAGMPTA

SEQ ID NO: 12334 - protein, 493 aa, Homo sapiens
  Payload ID: 2423
  Gene Symbol: CARD14
  Gene Name: caspase recruitment domain family, member 14
  ENSP ID: ENSP00000460883
MGELCRRDSALTALDEETLWEMMESHRHRIVRCICPSRLTPYLRQAKVLCQLDEEEVLHSPRLTNSAMRAGHLLDLLKTRGKNGAIAFLESLKFHNPDVYTLVTGLQPDVDFSNFSGLMETSKLTECLAGAIGSLQEELNQEKGQKEVLLRRCQQLQEHLGLAETRAEGLHQLEADHSRMKREVSAHFHEVLRLKDEMLSLSLHYSNALQEKELAASRCRSLQEELYLLKQELQRANMVSSCELELQEQSLRTASDQESGDEELNRLKEENEKLRSLTFSLAEKDILEQSLDEARGSRQELVERIHSLRERAVAAERQREQGEGECAAGPGVRAAEGARPGVLREGQCSEGDFPEPGGEGLPPQAGVRADGPGLRAAHTASPAAGRASGCAQAGSQDQGALSTGEAAAGADACHLPQRRQRLQPRQLHRVSALVGPECHVQPRAGGQLPLQQPRAPQPAVPVQAGGRGLRGRTLVFQQLPGDPGGRPGSPAGS

SEQ ID NO: 12335 - protein, 43 aa, Homo sapiens
  Payload ID: 2423
  Gene Symbol: CARD14
  Gene Name: caspase recruitment domain family, member 14
  ENSP ID: ENSP00000461447
MGELCRRDSALTALDEETLWEMMESHRHRIVRCICPSRLTPYL

SEQ ID NO: 12336 - protein, 740 aa, Homo sapiens
  Payload ID: 2423
  Gene Symbol: CARD14
  Gene Name: caspase recruitment domain family, member 14
  Uniprot ID: Q9BXL6
  ENSP ID: ENSP00000461806
MGELCRRDSALTALDEETLWEMMESHRHRIVRCICPSRLTPYLRQAKVLCQLDEEEVLHSPRLTNSAMRAGHLLDLLKTRGKNGAIAFLESLKFHNPDVYTLVTGLQPDVDFSNFSGLMETSKLTECLAGAIGSLQEELNQEKGQKEVLLRRCQQLQEHLGLAETRAEGLHQLEADHSRMKREVSAHFHEVLRLKDEMLSLSLHYSNALQEKELAASRCRSLQEELYLLKQELQRANMVSSCELELQEQSLRTASDQESGDEELNRLKEENEKLRSLTFSLAEKDILEQSLDEARGSRQELVERIHSLRERAVAAERQREQYWEEKEQTLLQFQKSKMACQLYREKVNALQAQVCELQKERDQAYSARDSAQREISQSLVEKDSLRRQVFELTDQVCELRTQLRQLQAEPPGVLKQEARTREPCPREKQRLVRMHAICPRDDSDCSLVSSTESQLLSDLSATSSRELVDSFRSSSPAPPSQQSLYKRVAEDFGEEPWSFSSCLEIPEGDPGALPGAKAGDPHLDYELLDTADLPQLESSLQPVSPGRLDVSESGVLMRRRPARRILSQVTMLAFQGDALLEQISVIGGNLTGIFIHRVTPGSAADQMALRPGTQIVMVDYEASEPLFKAVLEDTTLEEAVGLLRRVDGFCCLSVKVNTDGYKRLLQDLEAKVATSGDSFYIRVNLAMEGRAKGELQVHCNEVLHVTDTMFQGCGCWHAHRVNSYTMKDTAAHGTIPNYSR

SEQ ID NO: 12337 - protein, 97 aa, Homo sapiens
  Payload ID: 2424
  Gene Symbol: CARD16
  Gene Name: caspase recruitment domain family, member 16
  Uniprot ID: Q5EG05
  ENSP ID: ENSP00000364856
MADKVLKEKRKLFIHSMGEGTINGLLDELLQTRVLNQEEMEKVKRENATVMDKTRALIDSVIPKGAQACQICITYICEEDSYLAETLGLSAGPIPGN

SEQ ID NO: 12338 - protein, 197 aa, Homo sapiens
  Payload ID: 2424
  Gene Symbol: CARD16
  Gene Name: caspase recruitment domain family, member 16
  Uniprot ID: Q5EG05
  ENSP ID: ENSP00000364858
MADKVLKEKRKLFIHSMGEGTINGLLDELLQTRVLNQEEMEKVKRENATVMDKTRALIDSVIPKGAQACQICITYICEEDSYLAETLGLSAALQAVQDNPAMPTCSSPEGRIKLCFLEDAQRIWKQKLQRCHVQNTIIKWSERYTSGSFEMQWLFLRTNFIERFWRNILLLPLHKGSLYPRIPGLGKELQTGTHKLS

SEQ ID NO: 12339 - protein, 95 aa, Homo sapiens
  Payload ID: 2424
  Gene Symbol: CARD16
  Gene Name: caspase recruitment domain family, member 16
  ENSP ID: ENSP00000432485
MGEGTINGLLDELLQTRVLNQEEMEKVKRENATVMDKTRALIDSVIPKGAQACQICITYICEEDSYLAETLGLSAALQAVQDNPAMPTCSSPEGR

SEQ ID NO: 12340 - protein, 97 aa, Homo sapiens; identical to SEQ ID NO: 12337
  Payload ID: 2424
  Gene Symbol: CARD16
  Gene Name: caspase recruitment domain family, member 16
  Uniprot ID: Q5EG05
  ENSP ID: ENSP00000433700

SEQ ID NO: 12341 - protein, 110 aa, Homo sapiens
  Payload ID: 2425
  Gene Symbol: CARD17
  Gene Name: caspase recruitment domain family, member 17
  Uniprot ID: Q5XLA6
  ENSP ID: ENSP00000364859
MADKVLKEKRKQFIRSVGEGTINGLLGELLETRVLSQEEIEIVKCENATVMDKARALLDSVIRKGAPACQICITYICEEDSHLAGTLGLSAGPTSGNHLTTQDSQIVLPS

SEQ ID NO: 12342 - protein, 90 aa, Homo sapiens
  Payload ID: 2426
  Gene Symbol: CARD18
  Gene Name: caspase recruitment domain family, member 18
  Uniprot ID: P57730
  ENSP ID: ENSP00000436691
MADQLLRKKRRIFIHSVGAGTINALLDCLLEDEVISQEDMNKVRDENDTVMDKARVLIDLVTGKGPKSCCKFIKHLCEEDPQLASKMGLH

SEQ ID NO: 12343 - protein, 51 aa, Homo sapiens
  Payload ID: 2426
  Gene Symbol: CARD18
  Gene Name: caspase recruitment domain family, member 18
  ENSP ID: ENSP00000437035
MNKVRDENDTVMDKARVLIDLVTGKGPKSCCKFIKHLCEEDPQLASKMGLH

SEQ ID NO: 12344 - protein, 51 aa, Homo sapiens; identical to SEQ ID NO: 12343
  Payload ID: 2426
  Gene Symbol: CARD18
  Gene Name: caspase recruitment domain family, member 18
  ENSP ID: ENSP00000437187

SEQ ID NO: 12345 - protein, 183 aa, Homo sapiens
  Payload ID: 2427
  Gene Symbol: CARD19
  Gene Name: caspase recruitment domain family, member 19
  Uniprot ID: Q96LW7
  ENSP ID: ENSP00000364613
MTDQTYCDRLVQDTPFLTGHGRLSEQQVDRIILQLNRYYPQILTNKEAEKFRNPKASLRVRLCDLLSHLQRSGERDCQEFYRALYIHAQPLHSRLPSRHALQNSDCTELDSGSQSGELSNRGPMSFLAGLGLAVGLALLLYCYPPDPKGLPGTRRVLGFSPVIIDRHVSRYLLAFLADDLGGL

SEQ ID NO: 12346 - protein, 228 aa, Homo sapiens
  Payload ID: 2427
  Gene Symbol: CARD19
  Gene Name: caspase recruitment domain family, member 19
  Uniprot ID: Q96LW7
  ENSP ID: ENSP00000437237
MTDQTYCDRLVQDTPFLTGHGRLSEQQVDRIILQLNRYYPQILTNKEAEKFRNPKASLRVRLCDLLSHLQRSGERDCQEFYRALYIHAQPLHSRLPSRHALRKFHITNHACLVLARGGHPSLPLMAWMSSMTTQVCCSPGLASPLASAPPQRPPSGPEGRVWQAQAVQMLVSVSHFLPLPPSLSHGSFHTAWGILYVHSCPSFSNLIPRGSLHVCVDSNLVPTAAWRS

SEQ ID NO: 12347 - protein, 1037 aa, Homo sapiens
  Payload ID: 2428
  Gene Symbol: CARD6
  Gene Name: caspase recruitment domain family, member 6
  Uniprot ID: Q9BX69
  ENSP ID: ENSP00000254691
MATESTPSEIIERERKKLLEILQHDPDSILDTLTSRRLISEEEYETLENVTDLLKKSRKLLILVQKKGEATCQHFLKCLFSTFPQSAAICGLRHEVLKHENTVPPQSMGASSNSEDAFSPGIKQPEAPEITVFFSEKEHLDLETSEFFRDKKTSYRETALSARKNEKEYDTPEVTLSYSVEKVGCEVPATITYIKDGQRYEELDDSLYLGKEEYLGSVDTPEDAEATVEEEVYDDPEHVGYDGEEDFENSETTEFSGEEPSYEGSETSLSLEEEQEKSIEERKKVFKDVLLCLNMDRSRKVLPDFVKQFSLDRGCKWTPESPGDLAWNFLMKVQARDVTARDSILSHKVLDEDSKEDLLAGVENLEIRDIQTINPLDVLCATMLCSDSSLQRQVMSNMYQCQFALPLLLPDAENNKSILMLGAMKDIVKKQSTQFSGGPTEDTEKFLTLMKMPVISFVRLGYCSFSKSRILNTLLSPAQLKLHKIFLHQDLPLLVLPRQISDGLVEITWCFPDSDDRKENPFFQKPVALANLRGNLESFWTQFGFLMEVSSAVFFFTDCLGEKEWDLLMFLGEAAIERCYFVLSSQARESEEAQIFQRILNLKPAQLLFWERGDAGDRRKNMEGLQAALQEVMFSSCLRCVSVEDMAALARELGIQVDEDFENTQRIQVSSGENMAGTAEGEGQQRHSQLKSSSKSQALMPIQEPGTQCELSQNLQNLYGTPVFRPVLENSWLFPTRIGGNFNHVSLKASWVMGRPFGSEQRPKWFHPLPFQNAGAQGRGKSFGIQSFHPQIFYSGERFMKFSRVARGCHSNGTFGRLPRPICQHVQACPERPQMMGTLERSRAVASKIGHSYSLDSQPARAVGKPWPQQACTRVTELTEATGKLIRTSHIGKPHPQSFQPAAATQKLRPASQQGVQMKTQGGASNPALQIGSHPMCKSSQFKSDQSNPSTVKHSQPKPFHSVPSQPKSSQTKSCQSQPSQTKPSPCKSTQPKPSQPWPPQSKPSQPRPPQPKSSSTNPSQAKAHHSKAGQKRGGKH

SEQ ID NO: 12348 - protein, 310 aa, Homo sapiens
  Payload ID: 2428
  Gene Symbol: CARD6
  Gene Name: caspase recruitment domain family, member 6
  ENSP ID: ENSP00000371093
MATESTPSEIIERERKKLLEILQHDPDSILDTLTSRRLISEEEYETLENVTDLLKKSRKLLILVQKKGEATCQHFLKCLFSTFPQSAAICGLRHEVLKHENTVPPQSMGASSNSEDAFSPGIKQPEAPEITVFFSEKEHLDLETSEFFRDKKTSYRETALSARKNEKEYDTPEVTLSYSVEKVGCEVPATITYIKDGQRYEELDDSLYLGKEEYLGSVDTPEDAEATVEEEVYDDPEHVGYDGEEDFENSETTEFSGEEPSYEGSETSLSLEEEQEKSIEGWSRTHGLKRSSHVGLPKCWDYRREPPCLA

SEQ ID NO: 12349 - protein, 283 aa, Homo sapiens
  Payload ID: 2429
  Gene Symbol: CARD8
  Gene Name: caspase recruitment domain family, member 8
  ENSP ID: ENSP00000350423
MTRNILVPFFVWIQRSETAYSGHSQLSFDICIPTAPVQFSLQESFRPCLFQPFTSYMSSIFFSGDICSEENQIVSSYASKVCFEIEEDYKNRQFLGPEGNVDVELIDKSTNRYSVWFPTAGWYLWSATGLGFLVRDEVTVTIAFGSWSQHLALDLQHHEQWLVGGPLFDVTAEPEEAVAEIHLPHFISLQAGEVDVSWFLVAHFKNEGMVLEHPARVEPFYAVLESPSFSLMGILLRIASGTRLSIPITSNTLIYYHPHPEDIKFHLYLVPSDALLTKVRQSL

SEQ ID NO: 12350 - protein, 537 aa, Homo sapiens
  Payload ID: 2429
  Gene Symbol: CARD8
  Gene Name: caspase recruitment domain family, member 8
  Uniprot ID: Q9Y2G2
  ENSP ID: ENSP00000375767
MEKKECPEKSSSSEEELPRRDSGSSRNIDASKLIRLQGSRKLLVDNSIRELQYTKTGIFFQAEACVTNDTVYRELPCVSETLCDISHFFQEDDETEAEPLLFRAVPECQLSGGDIPSVSEEQESSEGQDSGDICSEENQIVSSYASKVCFEIEEDYKNRQFLGPEGNVDVELIDKSTNRYSVWFPTAGWYLWSATGLGFLVRDEVTVTIAFGSWSQHLALDLQHHEQWLVGGPLFDVTAEPEEAVAEIHLPHFISLQAGEVDVSWFLVAHFKNEGMVLEHPARVEPFYAVLESPSFSLMGILLRIASGTRLSIPITSNTLIYYHPHPEDIKFHLYLVPSDALLTKAIDDEEDRFHGVRLQTSPPMEPLNFGSSYIVSNSANLKVMPKELKLSYRSPGEIQHFSKFYAGQMKEPIQLEITEKRHGTLVWDTEVKPVDLQLVAASAPPPFSGAAFVKENHRQLQARMGDLKGVLDDLQDNEVLTENEKELVEQEKTRQSKNEALLSMVEKKGDLALDVLFRSISERDPYLVSYLRQQNL

SEQ ID NO: 12351 - protein, 487 aa, Homo sapiens
  Payload ID: 2429
  Gene Symbol: CARD8
  Gene Name: caspase recruitment domain family, member 8
  Uniprot ID: Q9Y2G2
  ENSP ID: ENSP00000391248
MEKKECPEKSSSSEEELPRRVYRELPCVSETLCDISHFFQEDDETEAEPLLFRAVPECQLSGGDIPSVSEEQESSEGQDSGDICSEENQIVSSYASKVCFEIEEDYKNRQFLGPEGNVDVELIDKSTNRYSVWFPTAGWYLWSATGLGFLVRDEVTVTIAFGSWSQHLALDLQHHEQWLVGGPLFDVTAEPEEAVAEIHLPHFISLQAGEVDVSWFLVAHFKNEGMVLEHPARVEPFYAVLESPSFSLMGILLRIASGTRLSIPITSNTLIYYHPHPEDIKFHLYLVPSDALLTKAIDDEEDRFHGVRLQTSPPMEPLNFGSSYIVSNSANLKVMPKELKLSYRSPGEIQHFSKFYAGQMKEPIQLEITEKRHGTLVWDTEVKPVDLQLVAASAPPPFSGAAFVKENHRQLQARMGDLKGVLDDLQDNEVLTENEKELVEQEKTRQSKNEALLSMVEKKGDLALDVLFRSISERDPYLVSYLRQQNL

SEQ ID NO: 12352 - protein, 70 aa, Homo sapiens
  Payload ID: 2429
  Gene Symbol: CARD8
  Gene Name: caspase recruitment domain family, member 8
  ENSP ID: ENSP00000427727
MEKKECPEKSSSSEEELPRRDSGSSRNIDASKLIRLQGSRKLLVDNSIRELQYTKTGIFFQAEACVTNDT

SEQ ID NO: 12353 - protein, 487 aa, Homo sapiens; identical to SEQ ID NO: 12351
  Payload ID: 2429
  Gene Symbol: CARD8
  Gene Name: caspase recruitment domain family, member 8
  Uniprot ID: Q9Y2G2
  ENSP ID: ENSP00000427858

SEQ ID NO: 12354 - protein, 70 aa, Homo sapiens; identical to SEQ ID NO: 12352
  Payload ID: 2429
  Gene Symbol: CARD8
  Gene Name: caspase recruitment domain family, member 8
  ENSP ID: ENSP00000427922

SEQ ID NO: 12355 - protein, 82 aa, Homo sapiens
  Payload ID: 2429
  Gene Symbol: CARD8
  Gene Name: caspase recruitment domain family, member 8
  ENSP ID: ENSP00000428662
MEKKECPEKSSSSEEELPRRVYRELPCVSETLCDISHFFQEDDETEAEPLLFRAVPECQLSGGDIPRRHLLRRESNSFLLCF

SEQ ID NO: 12356 - protein, 487 aa, Homo sapiens; identical to SEQ ID NO: 12351
  Payload ID: 2429
  Gene Symbol: CARD8
  Gene Name: caspase recruitment domain family, member 8
  Uniprot ID: Q9Y2G2
  ENSP ID: ENSP00000428736

SEQ ID NO: 12357 - protein, 132 aa, Homo sapiens
  Payload ID: 2429
  Gene Symbol: CARD8
  Gene Name: caspase recruitment domain family, member 8
  ENSP ID: ENSP00000428862
MEKKECPEKSSSSEEELPRRDSGSSRNIDASKLIRLQGSRKLLVDNSIRELQYTKTGIFFQAEACVTNDTVYRELPCVSETLCDISHFFQEDDETEAEPLLFRAVPECQLSGGDIPRRHLLRRESNSFLLCF

SEQ ID NO: 12358 - protein, 537 aa, Homo sapiens; identical to SEQ ID NO: 12350
  Payload ID: 2429
  Gene Symbol: CARD8
  Gene Name: caspase recruitment domain family, member 8
  Uniprot ID: Q9Y2G2
  ENSP ID: ENSP00000428883

SEQ ID NO: 12359 - protein, 70 aa, Homo sapiens
  Payload ID: 2429
  Gene Symbol: CARD8
  Gene Name: caspase recruitment domain family, member 8
  ENSP ID: ENSP00000428975
  MOD_RES (1)..(1): Any amino acid
XGQMKEPIQLEITEKRHGTLVWDTEVKPVDLQLVAASAPPPFSGVRMWPGCCPILPRTGCTCLCLNPWLP

SEQ ID NO: 12360 - protein, 138 aa, Homo sapiens
  Payload ID: 2429
  Gene Symbol: CARD8
  Gene Name: caspase recruitment domain family, member 8
  ENSP ID: ENSP00000429362
MEKKECPEKSSSSEEELPRRDSGSSRNIDASKLIRLQGSRKLLVDNSIRELQYTKTGIFFQAEACVTNDTVYRELPCVSETLCDISHFFQEDDETEAEPLLFRAVPECQLSGGDIPRYLFFLNLIHVSVSLLVSFTSK

SEQ ID NO: 12361 - protein, 132 aa, Homo sapiens
  Payload ID: 2429
  Gene Symbol: CARD8
  Gene Name: caspase recruitment domain family, member 8
  ENSP ID: ENSP00000429741
MEKKECPEKSSSSEEELPRRVYRELPCVSETLCDISHFFQEDDETEAEPLLFRAVPECQLSGGDIPSVSEEQESSEGQDSGDICSEENQIVSSYASKVCFEIEEDYKNRQFLGPEGNVDVELIDKSTNRYRR

SEQ ID NO: 12362 - protein, 392 aa, Homo sapiens
  Payload ID: 2429
  Gene Symbol: CARD8
  Gene Name: caspase recruitment domain family, member 8
  Uniprot ID: Q9Y2G2
  ENSP ID: ENSP00000429839
MEKKECPEKSSSSEEELPRRDSGSSRNIDASKLIRLQGSRKLLVDNSIRELQYTKTGIFFQAEACVTNDTVYRELPCVSETLCDISHFFQEDDETEAEPLLFRAVPECQLSGGDIPSVSEEQESSEGQDSGDICSEENQIVSSYASKVCFEIEEDYKNRQFLGPEGNVDVELIDKSTNRYSVWFPTAGWYLWSATGLGFLVRDEVTVTIAFGSWSQHLALDLQHHEQWLVGGPLFDVTAEPEEAVAEIHLPHFISLQAGEVDVSWFLVAHFKNEGMVLEHPARVEPFYAVLESPSFSLMGILLRIASGTRLSIPITSNTLIYYHPHPEDIKFHLYLVPSDALLTKAIDDEEDRFHGVRLQTSPPMEPLNFGSSYIVSNSANLKVMPKWISSL

SEQ ID NO: 12363 - protein, 82 aa, Homo sapiens; identical to SEQ ID NO: 12355
  Payload ID: 2429
  Gene Symbol: CARD8
  Gene Name: caspase recruitment domain family, member 8
  ENSP ID: ENSP00000430057

SEQ ID NO: 12364 - protein, 70 aa, Homo sapiens; identical to SEQ ID NO: 12352
  Payload ID: 2429
  Gene Symbol: CARD8
  Gene Name: caspase recruitment domain family, member 8
  ENSP ID: ENSP00000430108

SEQ ID NO: 12365 - protein, 39 aa, Homo sapiens
  Payload ID: 2429
  Gene Symbol: CARD8
  Gene Name: caspase recruitment domain family, member 8
  ENSP ID: ENSP00000430178
MEKKECPEKSSSSEEELPRRDSGSSRNIDASKLIRLQGS

SEQ ID NO: 12366 - protein, 24 aa, Homo sapiens
  Payload ID: 2429
  Gene Symbol: CARD8
  Gene Name: caspase recruitment domain family, member 8
  ENSP ID: ENSP00000430460
  MOD_RES (1)..(1): Any amino acid
XHPEDIKFHLYLVPSDALLTKTLF

SEQ ID NO: 12367 - protein, 82 aa, Homo sapiens; identical to SEQ ID NO: 12355
  Payload ID: 2429
  Gene Symbol: CARD8
  Gene Name: caspase recruitment domain family, member 8
  ENSP ID: ENSP00000430495

SEQ ID NO: 12368 - protein, 43 aa, Homo sapiens
  Payload ID: 2429
  Gene Symbol: CARD8
  Gene Name: caspase recruitment domain family, member 8
  ENSP ID: ENSP00000430567
MEKKECPEKSSSSEEELPRRVYRELPCVSETLCDISHFFQEDD

SEQ ID NO: 12369 - protein, 392 aa, Homo sapiens; identical to SEQ ID NO: 12362
  Payload ID: 2429
  Gene Symbol: CARD8
  Gene Name: caspase recruitment domain family, member 8
  Uniprot ID: Q9Y2G2
  ENSP ID: ENSP00000430747

SEQ ID NO: 12370 - protein, 146 aa, Homo sapiens
  Payload ID: 2429
  Gene Symbol: CARD8
  Gene Name: caspase recruitment domain family, member 8
  ENSP ID: ENSP00000430836
MEKKECPEKSSSSEEELPRRDSGSSRNIDASKLIRLQGSRKLLVDNSIRELQYTKTGIFFQAEACVTNDTVYRELPCVSETLCDISHFFQEDDETEAEPLLFRAVPECQLSGGDIPSLDPPSLRELSVMTGVFHSLLHSVIAVSDM

SEQ ID NO: 12371 - protein, 536 aa, Homo sapiens
  Payload ID: 2430
  Gene Symbol: CARD9
  Gene Name: caspase recruitment domain family, member 9
  Uniprot ID: Q9H257
  ENSP ID: ENSP00000360797
MSDYENDDECWSVLEGFRVTLTSVIDPSRITPYLRQCKVLNPDDEEQVLSDPNLVIRKRKVGVLLDILQRTGHKGYVAFLESLELYYPQLYKKVTGKEPARVFSMIIDASGESGLTQLLMTEVMKLQKKVQDLTALLSSKDDFIKELRVKDSLLRKHQERVQRLKEECEAGSRELKRCKEENYDLAMRLAHQSEEKGAALMRNRDLQLEIDQLKHSLMKAEDDCKVERKHTLKLRHAMEQRPSQELLWELQQEKALLQARVQELEASVQEGKLDRSSPYIQVLEEDWRQALRDHQEQANTIFSLRKDLRQGEARRLRCMEEKEMFELQCLALRKDSKMYKDRIEAILLQMEEVAIERDQAIATREELHAQHARGLQEKDALRKQVRELGEKADELQLQVFQCEAQLLAVEGRLRRQQLETLVLSSDLEDGSPRRSQELSLPQDLEDTQLSDKGCLAGGGSPKQPFAALHQEQVLRNPHDAGLSSGEPPEKERRRLKESFENYRRKRALRKMQKGWRQGEEDRENTTGSDNTDTEGS

SEQ ID NO: 12372 - protein, 492 aa, Homo sapiens
  Payload ID: 2430
  Gene Symbol: CARD9
  Gene Name: caspase recruitment domain family, member 9
  Uniprot ID: Q9H257
  ENSP ID: ENSP00000360799
MSDYENDDECWSVLEGFRVTLTSVIDPSRITPYLRQCKVLNPDDEEQVLSDPNLVIRKRKVGVLLDILQRTGHKGYVAFLESLELYYPQLYKKVTGKEPARVFSMIIDASGESGLTQLLMTEVMKLQKKVQDLTALLSSKDDFIKELRVKDSLLRKHQERVQRLKEECEAGSRELKRCKEENYDLAMRLAHQSEEKGAALMRNRDLQLEIDQLKHSLMKAEDDCKVERKHTLKLRHAMEQRPSQELLWELQQEKALLQARVQELEASVQEGKLDRSSPYIQVLEEDWRQALRDHQEQANTIFSLRKDLRQGEARRLRCMEEKEMFELQCLALRKDSKMYKDRIEAILLQMEEVAIERDQAIATREELHAQHARGLQEKDALRKQVRELGEKADELQLQVFQCEAQLLAVEGRLRRQQLETLVLSSDLEDGSPRRSQELSLPQDLEDTQLSDKGCLAGGGSPKQPFAALHQEQVLRNPHDAGPAGLPGIGAVC

SEQ ID NO: 12373 - protein, 366 aa, Homo sapiens
  Payload ID: 2430
  Gene Symbol: CARD9
  Gene Name: caspase recruitment domain family, member 9
  Uniprot ID: Q9H257
  ENSP ID: ENSP00000451368
MSDYENDDECWSVLEGFRVTLTSVIDPSRITPYLRQCKVLNPDDEEQVLSDPNLVIRKRKVGVLLDILQRTGHKGYVAFLESLELYYPQLYKKVTGKEPARVFSMIIDASGESGLTQLLMTEVMKLQKKVQDLTALLSSKDDFIKELRVKDSLLRKHQERVQRLKEECEAGSRELKRCKEENYDLAMRLAHQSEEKGAALMRNRDLQLEIDQLKHSLMKAEDDCKVERKHTLKLRHAMEQRPSQELLWELQQEKALLQARVQELEASVQEGKLDRSSPYIQVLEEDWRQALRDHQEQANTIFSLRKDLRQGEARRLRCMEEKEMFELQCLALRKDSKMYKDRIEAILLQMEEVAIERDQSTQMEGL

SEQ ID NO: 12374 - protein, 1166 aa, Homo sapiens
  Payload ID: 2431
  Gene Symbol: CASZ1
  Gene Name: castor zinc finger 1
  Uniprot ID: Q86V15
  ENSP ID: ENSP00000339445
MDLGTAEGTRCTDPPAGKPAMAPKRKGGLKLNAICAKLSRQVVVEKRADAGSHTEGSPSQPRDQERSGPESGAARAPRSEEDKRRAVIEKWVNGEYSEEPAPTPVLGRIAREGLELPPEGVYMVQPQGCSDEEDHAEEPSKDGGALEEKDSDGAASKEDSGPSTRQASGEASSLRDYAASTMTEFLGMFGYDDQNTRDELARKISFEKLHAGSTPEAATSSMLPTSEDTLSKRARFSKYEEYIRKLKAGEQLSWPAPSTKTEERVGKEVVGTLPGLRLPSSTAHLETKATILPLPSHSSVQMQNLVARASKYDFFIQKLKTGENLRPQNGSTYKKPSKYDLENVKYLHLFKPGEGSPDMGGAIAFKTGKVGRPSKYDVRGIQKPGPAKVPPTPSLAPAPLASVPSAPSAPGPGPEPPASLSFNTPEYLKSTFSKTDSITTGTVSTVKNGLPTDKPAVTEDVNIYQKYIARFSGSQHCGHIHCAYQYREHYHCLDPECNYQRFTSKQDVIRHYNMHKKRDNSLQHGFMRFSPLDDCSVYYHGCHLNGKSTHYHCMQVGCNKVYTSTSDVMTHENFHKKNTQLINDGFQRFRATEDCGTADCQFYGQKTTHFHCRRPGCTFTFKNKCDIEKHKSYHIKDDAYAKDGFKKFYKYEECKYEGCVYSKATNHFHCIRAGCGFTFTSTSQMTSHKRKHERRHIRSSGALGLPPSLLGAKDTEHEESSNDDLVDFSALSSKNSSLSASPTSQQSSASLAAATAATEAGPSATKPPNSKISGLLPQGLPGSIPLALALSNSGLPTPTPYFPILAGRGSTSLPVGTPSLLGAVSSGSAASATPDTPTLVASGAGDSAPVAAASVPAPPASIMERISASKGLISPMMARLAAAALKPSATFDPGSGQQVTPARFPPAQVKPEPGESTGAPGPHEASQDRSLDLTVKEPSNESNGHAVPANSSLLSSLMNKMSQGNPGLGSLLNIKAEAEGSPAAEPSPFLGKAVKALVQEKLAEPWKVYLRRFGTKDFCDGQCDFLHKAHFHCVVEECGALFSTLDGAIKHANFHFRTEGGAAKGNTEAAFPASAAETKPPMAPSSPPVPPVTTATVSSLEGPAPSPASVPSTPTLLAWKQLASTIPQMPQIPASVPHLPASPLATTSLENAKPQVKPGFLQFQEK

SEQ ID NO: 12375 - protein, 1759 aa, Homo sapiens
  Payload ID: 2431
  Gene Symbol: CASZ1
  Gene Name: castor zinc finger 1
  Uniprot ID: Q86V15
  ENSP ID: ENSP00000366221
MDLGTAEGTRCTDPPAGKPAMAPKRKGGLKLNAICAKLSRQVVVEKRADAGSHTEGSPSQPRDQERSGPESGAARAPRSEEDKRRAVIEKWVNGEYSEEPAPTPVLGRIAREGLELPPEGVYMVQPQGCSDEEDHAEEPSKDGGALEEKDSDGAASKEDSGPSTRQASGEASSLRDYAASTMTEFLGMFGYDDQNTRDELARKISFEKLHAGSTPEAATSSMLPTSEDTLSKRARFSKYEEYIRKLKAGEQLSWPAPSTKTEERVGKEVVGTLPGLRLPSSTAHLETKATILPLPSHSSVQMQNLVARASKYDFFIQKLKTGENLRPQNGSTYKKPSKYDLENVKYLHLFKPGEGSPDMGGAIAFKTGKVGRPSKYDVRGIQKPGPAKVPPTPSLAPAPLASVPSAPSAPGPGPEPPASLSFNTPEYLKSTFSKTDSITTGTVSTVKNGLPTDKPAVTEDVNIYQKYIARFSGSQHCGHIHCAYQYREHYHCLDPECNYQRFTSKQDVIRHYNMHKKRDNSLQHGFMRFSPLDDCSVYYHGCHLNGKSTHYHCMQVGCNKVYTSTSDVMTHENFHKKNTQLINDGFQRFRATEDCGTADCQFYGQKTTHFHCRRPGCTFTFKNKCDIEKHKSYHIKDDAYAKDGFKKFYKYEECKYEGCVYSKATNHFHCIRAGCGFTFTSTSQMTSHKRKHERRHIRSSGALGLPPSLLGAKDTEHEESSNDDLVDFSALSSKNSSLSASPTSQQSSASLAAATAATEAGPSATKPPNSKISGLLPQGLPGSIPLALALSNSGLPTPTPYFPILAGRGSTSLPVGTPSLLGAVSSGSAASATPDTPTLVASGAGDSAPVAAASVPAPPASIMERISASKGLISPMMARLAAAALKPSATFDPGSGQQVTPARFPPAQVKPEPGESTGAPGPHEASQDRSLDLTVKEPSNESNGHAVPANSSLLSSLMNKMSQGNPGLGSLLNIKAEAEGSPAAEPSPFLGKAVKALVQEKLAEPWKVYLRRFGTKDFCDGQCDFLHKAHFHCVVEECGALFSTLDGAIKHANFHFRTEGGAAKGNTEAAFPASAAETKPPMAPSSPPVPPVTTATVSSLEGPAPSPASVPSTPTLLAWKQLASTIPQMPQIPASVPHLPASPLATTSLENAKPQVKPGFLQFQENDPCLATDCKYANKFHFHCLFGNCKYVCKTSGKAESHCLDHINPNNNLVNVRDQFAYYSLQCLCPNQHCEFRMRGHYHCLRTGCYFVTNITTKLPWHIKKHEKAERRAANGFKYFTKREECGRLGCKYNQVNSHFHCIREGCQFSFLLKHQMTSHARKHMRRMLGKNFDRVPPSQGPPGLMDAETDECMDYTGCSPGAMSSESSTMDRSCSSTPVGNESTAAGNTISMPTASGAKKRFWIIEDMSPFGKRRKTASSRKMLDEGMMLEGFRRFDLYEDCKDAACQFSLKVTHYHCTRENCGYKFCGRTHMYKHAQHHDRVDNLVLDDFKRFKASLSCHFADCPFSGTSTHFHCLRCRFRCTDSTKVTAHRKHHGKQDVISAAGFCQFSSSADCAVPDCKYKLKCSHFHCTFPGCRHTVVGMSQMDSHKRKHEKQERGEPAAEGPAPGPPISLDGSLSLGAEPGSLLFLQSAAAGLGLALGDAGDPGPPDAAAPGPREGAAAAAAAAGESSQEDEEEELELPEEEAEDDEDEDDDEDDDDEDDDEDDDDEDLRTDSEESLPEAAAEAAGAGARTPALAALAALGAPGPAPTAASSP

SEQ ID NO: 12376 - protein, 231 aa, Homo sapiens
  Payload ID: 2431
  Gene Symbol: CASZ1
  Gene Name: castor zinc finger 1
  ENSP ID: ENSP00000467769
RMRGHYHCLRTGCYFVTNITTKLPWHIKKHEKAERRAANGFKYFTKREECGRLGCKYNQVNSHFHCIREGCQFSFLLKHQMTSHARKHMRRMLGKNFDRVPPSQGPPGLMDAETDECMDYTGCSPGAMSSESSTMDRSCSSTPVGNESTAAGCPAPPPPPLPPPAAAGDEAARTAPQPPATPSFSPATLRPPLPPLPCLFSPSCLSYSLLSATLGAGRGLAHPTCSPPSFP

SEQ ID NO: 12377 - protein, 511 aa, Homo sapiens
  Payload ID: 2432
  Gene Symbol: CECR1
  Gene Name: cat eye syndrome chromosome region, candidate 1
  Uniprot ID: Q9NZK5
  ENSP ID: ENSP00000262607
MLVDGPSERPALCFLLLAVAMSFFGSALSIDETRAHLLLKEKMMRLGGRLVLNTKEELANERLMTLKIAEMKEAMRTLIFPPSMHFFQAKHLIERSQVFNILRMMPKGAALHLHDIGIVTMDWLVRNVTYRPHCHICFTPRGIMQFRFAHPTPRPSEKCSKWILLEDYRKRVQNVTEFDDSLLRNFTLVTQHPEVIYTNQNVVWSKFETIFFTISGLIHYAPVFRDYVFRSMQEFYEDNVLYMEIRARLLPVYELSGEHHDEEWSVKTYQEVAQKFVETHPEFIGIKIIYSDHRSKDVAVIAESIRMAMGLRIKFPTVVAGFDLVGHEDTGHSLHDYKEALMIPAKDGVKLPYFFHAGETDWQGTSIDRNILDALMLNTTRIGHGFALSKHPAVRTYSWKKDIPIEVCPISNQVLKLVSDLRNHPVATLMATGHPMVISSDDPAMFGAKGLSYDFYEVFMGIGGMKADLRTLKQLAMNSIKYSTLLESEKNTFMEIWKKRWDKFIADVATK

SEQ ID NO: 12378 - protein, 270 aa, Homo sapiens
  Payload ID: 2432
  Gene Symbol: CECR1
  Gene Name: cat eye syndrome chromosome region, candidate 1
  Uniprot ID: Q9NZK5
  ENSP ID: ENSP00000332871
MDSLEWNWALVYELSGEHHDEEWSVKTYQEVAQKFVETHPEFIGIKIIYSDHRSKDVAVIAESIRMAMGLRIKFPTVVAGFDLVGHEDTGHSLHDYKEALMIPAKDGVKLPYFFHAGETDWQGTSIDRNILDALMLNTTRIGHGFALSKHPAVRTYSWKKDIPIEVCPISNQVLKLVSDLRNHPVATLMATGHPMVISSDDPAMFGAKGLSYDFYEVFMGIGGMKADLRTLKQLAMNSIKYSTLLESEKNTFMEIWKKRWDKFIADVATK

SEQ ID NO: 12379 - protein, 511 aa, Homo sapiens; identical to SEQ ID NO: 12377
  Payload ID: 2432
  Gene Symbol: CECR1
  Gene Name: cat eye syndrome chromosome region, candidate 1
  Uniprot ID: Q9NZK5
  ENSP ID: ENSP00000382731

SEQ ID NO: 12380 - protein, 511 aa, Homo sapiens; identical to SEQ ID NO: 12377
  Payload ID: 2432
  Gene Symbol: CECR1
  Gene Name: cat eye syndrome chromosome region, candidate 1
  Uniprot ID: Q9NZK5
  ENSP ID: ENSP00000382733

SEQ ID NO: 12381 - protein, 135 aa, Homo sapiens
  Payload ID: 2432
  Gene Symbol: CECR1
  Gene Name: cat eye syndrome chromosome region, candidate 1
  ENSP ID: ENSP00000392078
MLVDGPSERPALCFLLLAVAMSFFGSALSIDETRAHLLLKEKMMRLGGRLVLNTKEELANERLMTLKIAEMKEAMRTLIFPPSMHFFQAKHLIERSQVFNILRMMPKGAALHLHDIGIVTMDWLVRNVTYRPHCH

SEQ ID NO: 12382 - protein, 469 aa, Homo sapiens
  Payload ID: 2432
  Gene Symbol: CECR1
  Gene Name: cat eye syndrome chromosome region, candidate 1
  ENSP ID: ENSP00000406443
MMRLGGRLVLNTKEELANERLMTLKIAEMKEAMRTLIFPPSMHFFQAKHLIERSQVFNILRMMPKGAALHLHDIGIVTMDWLVRNVTYRPHCHICFTPRGIMQFRFAHPTPRPSEKCSKWILLEDYRKRVQNVTEFDDSLLRNFTLVTQHPEVIYTNQNVVWSKFETIFFTISGLIHYAPVFRDYVFRSMQEFYEDNVLYMEIRARLLPVYELSGEHHDEEWSVKTYQEVAQKFVETHPEFIGIKIIYSDHRSKDVAVIAESIRMAMGLRIKFPTVVAGFDLVGHEDTGHSLHDYKEALMIPAKDGVKLPYFFHAGETDWQGTSIDRNILDALMLNTTRIGHGFALSKHPAVRTYSWKKDIPIEVCPISNQVLKLVSDLRNHPVATLMATGHPMVISSDDPAMFGAKGLSYDFYEVFMGIGGMKADLRTLKQLAMNSIKYSTLLESEKNTFMEIWKKRWDKFIADVATK

SEQ ID NO: 12383 - protein, 152 aa, Homo sapiens
  Payload ID: 2432
  Gene Symbol: CECR1
  Gene Name: cat eye syndrome chromosome region, candidate 1
  ENSP ID: ENSP00000442482
MLVDGPSERPALCFLLLAVAMSFFGSALSIDETRAHLLLKEKMMRLGGRLVLNTKEELANERLMTLKIAEMKEAMRTLIFPPSMHFFQAKHLIERSQVFNILRMMPKGAALHLHDIGIVTMDWLVRNVTYRPHCHICFTPRGIMQFRFAHPT

SEQ ID NO: 12384 - protein, 391 aa, Homo sapiens
  Payload ID: 2432
  Gene Symbol: CECR1
  Gene Name: cat eye syndrome chromosome region, candidate 1
  ENSP ID: ENSP00000483418
MDWLVRNVTYRPHCHICFTPRGIMQFRFAHPTPRPSEKCSKWILLEDYRKRVQNVTEFDDSLLRNFTLVTQHPEVIYTNQNVVWSKFETIFFTISGLIHYAPVFRDYVFRSMQEFYEDNVLYMEIRARLLPVYELSGEHHDEEWSVKTYQEVAQKFVETHPEFIGIKIIYSDHRSKDVAVIAESIRMAMGLRIKFPTVVAGFDLVGHEDTGHSLHDYKEALMIPAKDGVKLPYFFHAGETDWQGTSIDRNILDALMLNTTRIGHGFALSKHPAVRTYSWKKDIPIEVCPISNQVLKLVSDLRNHPVATLMATGHPMVISSDDPAMFGAKGLSYDFYEVFMGIGGMKADLRTLKQLAMNSIKYSTLLESEKNTFMEIWKKRWDKFIADVATK

SEQ ID NO: 12385 - protein, 1301 aa, Homo sapiens
  Payload ID: 2433
  Gene Symbol: CECR2
  Gene Name: cat eye syndrome chromosome region, candidate 2
  ENSP ID: ENSP00000262608
MYKEDPVQGKSNGELSLSRESEGQKNVSSIPGKTGKRRGRPPKRKKLQEEILLSEKQEENSLASEPQTRHGSQGPGQGTWWLLCQTEEEWRQVTESFRERTSLRERQLYKLLSEDFLPEICNMIAQKGKRPQRTKAELHPRWMSDHLSIKPVKQEETPVLTRIEKQKRKEEEEERQILLAVQKKEQEQMLKEERKRELEEKVKAVEDRAKRRKLREERAWLLAQGKELPPELSHLDPNSPMREEKKTKDLFELDDDFTAMYKVLDVVKAHKDSWPFLEPVDESYAPNYYQIIKAPMDISSMEKKLNGGLYCTKEEFVNDMKTMFRNCRKYNGESSEYTKMSDNLERCFHRAMMKHFPGEDGDTDEEFWIREDEKREKRRSRAGRSGGSHVWTRSRDPEGSSRKQQPMENGGKSLPPTRRAPSSGDDQSSSSTQPPREVGTSNGRGFSHPLHCGGTPSQAPFLNQMRPAVPGTFGPLRGSDPATLYGSSGVPEPHPGEPVQQRQPFTMQPPVGINSLRGPRLGTPEEKQMCGGLTHLSNMGPHPGSLQLGQISGPSQDGSMYAPAQFQPGFIPPRHGGAPARPPDFPESSEIPPSHMYRSYKYLNRVHSAVWNGNHGATNQGPLGPDEKPHLGPGPSHQPRTLGHVMDSRVMRPPVPPNQWTEQSGFLPHGVPSSGYMRPPCKSAGHRLQPPPVPAPSSLFGAPAQALRGVQGGDSMMDSPEMIAMQQLSSRVCPPGVPYHPHQPAHPRLPGPFPQVAHPMSVTVSAPKPALGNPGRAPENSEAQEPENDQAEPLPGLEEKPPGVGTSEGVYLTQLPHPTPPLQTDCTRQSSPQERETVGPELKSSSSESADNCKAMKGKNPWPSDSSYPGPAAQGCVRDLSTVADRGALSENGVIGEASPCGSEGKGLGSSGSEKLLCPRGRTLQETMPCTGQNAATPPSTDPGLTGGTVSQFPPLYMPGLEYPNSAAHYHISPGLQGVGPVMGGKSPASHPQHFPPRGFQSNHPHSGGFPRYRPPQGMRYSYHPPPQPSYHHYQRTPYYACPQSFSDWQRPLHPQGSPSGPPASQPPPPRSLFSDKNAMASLQGCETLNAALTSPTRMDAVAAKVPNDGQNPGPEEEKLDESMERPESPKEFLDLDNHNAATKRQSSLSASEYLYGTPPPLSSGMGFGSSAFPPHSVMLQTGPPYTPQRPASHFQPRAYSSPVAALPPHHPGATQPNGLSQEGPIYRCQEEGLGHFQAVMMEQIGTRSGIRGPFQEMYRPSGMQMHPVQSQASFPKTPTAATSQEEVPPHKPPTLPLDQS

SEQ ID NO: 12386 - protein, 1484 aa, Homo sapiens
  Payload ID: 2433
  Gene Symbol: CECR2
  Gene Name: cat eye syndrome chromosome region, candidate 2
  Uniprot ID: Q9BXF3
  ENSP ID: ENSP00000341219
MCPEEGGAAGLGELRSWWEVPAIAHFCSLFRTAFRLPDFEIEELEAALHRDDVEFISDLIACLLQGCYQRRDITPQTFHSYLEDIINYRWELEEGKPNPLREASFQDLPLRTRVEILHRLCDYRLDADDVFDLLKGLDADSLRVEPLGEDNSGALYWYFYGTRMYKEDPVQGKSNGELSLSRESEGQKNVSSIPGKTGKRRGRPPKRKKLQEEILLSEKQEENSLASEPQTRHGSQGPGQGTWWLLCQTEEEWRQVTESFRERTSLRERQLYKLLSEDFLPEICNMIAQKGKRPQRTKAELHPRWMSDHLSIKPVKQEETPVLTRIEKQKRKEEEEERQILLAVQKKEQEQMLKEERKRELEEKVKAVEGMCSVRVVWRGACLSTSRPVDRAKRRKLREERAWLLAQGKELPPELSHLDPNSPMREEKKTKDLFELDDDFTAMYKVLDVVKAHKDSWPFLEPVDESYAPNYYQIIKAPMDISSMEKKLNGGLYCTKEEFVNDMKTMFRNCRKYNGESSEYTKMSDNLERCFHRAMMKHFPGEDGDTDEEFWIREDEKREKRRSRAGRSGGSHVWTRSRDPEGSSRKQQPMENGGKSLPPTRRAPSSGDDQSSSSTQPPREVGTSNGRGFSHPLHCGGTPSQAPFLNQMRPAVPGTFGPLRGSDPATLYGSSGVPEPHPGEPVQQRQPFTMQPPVGINSLRGPRLGTPEEKQMCGGLTHLSNMGPHPGSLQLGQISGPSQDGSMYAPAQFQPGFIPPRHGGAPARPPDFPESSEIPPSHMYRSYKYLNRVHSAVWNGNHGATNQGPLGPDEKPHLGPGPSHQPRTLGHVMDSRVMRPPVPPNQWTEQSGFLPHGVPSSGYMRPPCKSAGHRLQPPPVPAPSSLFGAPAQALRGVQGGDSMMDSPEMIAMQQLSSRVCPPGVPYHPHQPAHPRLPGPFPQVAHPMSVTVSAPKPALGNPGRAPENSEAQEPENDQAEPLPGLEEKPPGVGTSEGVYLTQLPHPTPPLQTDCTRQSSPQERETVGPELKSSSSESADNCKAMKGKNPWPSDSSYPGPAAQGCVRDLSTVADRGALSENGVIGEASPCGSEGKGLGSSGSEKLLCPRGRTLQETMPCTGQNAATPPSTDPGLTGGTVSQFPPLYMPGLEYPNSAAHYHISPGLQGVGPVMGGKSPASHPQHFPPRGFQSNHPHSGGFPRYRPPQGMRYSYHPPPQPSYHHYQRTPYYACPQSFSDWQRPLHPQGSPSGPPASQPPPPRSLFSDKNAMASLQGCETLNAALTSPTRMDAVAAKVPNDGQNPGPEEEKLDESMERPESPKEFLDLDNHNAATKRQSSLSASEYLYGTPPPLSSGMGFGSSAFPPHSVMLQTGPPYTPQRPASHFQPRAYSSPVAALPPHHPGATQPNGLSQEGPIYRCQEEGLGHFQAVMMEQIGTRSGIRGPFQEMYRPSGMQMHPVQSQASFPKTPTAATSQEEVPPHKPPTLPLDQS

SEQ ID NO: 12387 - protein, 218 aa, Homo sapiens
  Payload ID: 2433
  Gene Symbol: CECR2
  Gene Name: cat eye syndrome chromosome region, candidate 2
  ENSP ID: ENSP00000347357
SDKNAMASLQGCETLNAALTSPTRMDAVAAKVPNDGQNPGPEEEKLDESMERPESPKEFLDLDNHNAATKRQSSLSASEYLYGTPPPLSSGMGFGSSAFPPHSVMLQTGPPYTPQRPASHFQPRAYSSPVAALPPHHPGATQPNGLSQEGPIYRCQEEGLGHFQAVMMEQIGTRSGIRGPFQEMYRPSGFKRFSCLILPSSWDYRCPPPHLAEFCMIL

SEQ ID NO: 12388 - protein, 1300 aa, Homo sapiens
  Payload ID: 2433
  Gene Symbol: CECR2
  Gene Name: cat eye syndrome chromosome region, candidate 2
  ENSP ID: ENSP00000383428
MYKEDPVQGKSNGELSLSRESEGQKNVSSIPGKTGKRRGRPPKRKKLQEEILLSEKQEENSLASEPQTRHGSQGPGQGTWWLLCQTEEEWRQVTESFRERTSLRERQLYKLLSEDFLPEICNMIAQKGKRPQRTKAELHPRWMSDHLSIKPVKQEETPVLTRIEKQKRKEEEEERQILLAVQKKEQEQMLKEERKRELEEKVKAVEDRAKRRKLREERAWLLAQGKELPPELSHLDPNSPMREEKKTKDLFELDDDFTAMYKVLDVVKAHKDSWPFLEPVDESYAPNYYQIIKAPMDISSMEKKLNGGLYCTKEEFVNDMKTMFRNCRKYNGESSEYTKMSDNLERCFHRAMMKHFPGEDGDTDEEFWIREDEKREKRRSRAGRSGGSHVWTRSRDPEGSSRKQQPMENGGKSLPPTRRAPSSGDDQSSSSTQPPREVGTSNGRGFSHPLHCGGTPSQAPFLNQMRPAVPGTFGPLRGSDPATLYGSSGVPEPHPGEPVQQRQPFTMQPPVGINSLRGPRLGTPEEKQMCGGLTHLSNMGPHPGSLQLGQISGPSQDGSMYAPAQFQPGFIPPRHGGAPARPPDFPESSEIPPSHMYRSYKYLNRVHSAVWNGNHGATNQGPLGPDEKPHLGPGPSHQPRTLGHVMDSRVMRPPVPPNQWTEQSGFLPHGVPSSGYMRPPCKSAGHRLQPPPVPAPSSLFGAPAQALRGVQGGDSMMDSPEMIAMQQLSSRVCPPGVPYHPHQPAHPRLPGPFPQVAHPMSVTVSAPKPALGNPGRAPENSEAQEPENDQEPLPGLEEKPPGVGTSEGVYLTQLPHPTPPLQTDCTRQSSPQERETVGPELKSSSSESADNCKAMKGKNPWPSDSSYPGPAAQGCVRDLSTVADRGALSENGVIGEASPCGSEGKGLGSSGSEKLLCPRGRTLQETMPCTGQNAATPPSTDPGLTGGTVSQFPPLYMPGLEYPNSAAHYHISPGLQGVGPVMGGKSPASHPQHFPPRGFQSNHPHSGGFPRYRPPQGMRYSYHPPPQPSYHHYQRTPYYACPQSFSDWQRPLHPQGSPSGPPASQPPPPRSLFSDKNAMASLQGCETLNAALTSPTRMDAVAAKVPNDGQNPGPEEEKLDESMERPESPKEFLDLDNHNAATKRQSSLSASEYLYGTPPPLSSGMGFGSSAFPPHSVMLQTGPPYTPQRPASHFQPRAYSSPVAALPPHHPGATQPNGLSQEGPIYRCQEEGLGHFQAVMMEQIGTRSGIRGPFQEMYRPSGMQMHPVQSQASFPKTPTAATSQEEVPPHKPPTLPLDQS

SEQ ID NO: 12389 - protein, 1442 aa, Homo sapiens
  Payload ID: 2433
  Gene Symbol: CECR2
  Gene Name: cat eye syndrome chromosome region, candidate 2
  ENSP ID: ENSP00000477529
MPFKIQWFFKAVADGLSLEKELEAALHRDDVEFISDLIACLLQGCYQRRDITPQTFHSYLEDIINYRWELEEGKPNPLREASFQDLPLRTRVEILHRLCDYRLDADDVFDLLKGLDADSLRVEPLGEDNSGALYWYFYGTRMYKEDPVQGKSNGELSLSRESEGQKNVSSIPGKTGKRRGRPPKRKKLQEEILLSEKQEENSLASEPQTRHGSQGPGQGTWWLLCQTEEEWRQVTESFRERTSLRERQLYKLLSEDFLPEICNMIAQKGKRPQRTKAELHPRWMSDHLSIKPVKQEETPVLTRIEKQKRKEEEEERQILLAVQKKEQEQMLKEERKRELEEKVKAVEDRAKRRKLREERAWLLAQGKELPPELSHLDPNSPMREEKKTKDLFELDDDFTAMYKVLDVVKAHKDSWPFLEPVDESYAPNYYQIIKAPMDISSMEKKLNGGLYCTKEEFVNDMKTMFRNCRKYNGESSEYTKMSDNLERCFHRAMMKHFPGEDGDTDEEFWIREDEKREKRRSRAGRSGGSHVWTRSRDPEGSSRKQQPMENGGKSLPPTRRAPSSGDDQSSSSTQPPREVGTSNGRGFSHPLHCGGTPSQAPFLNQMRPAVPGTFGPLRGSDPATLYGSSGVPEPHPGEPVQQRQPFTMQPPVGINSLRGPRLGTPEEKQMCGGLTHLSNMGPHPGSLQLGQISGPSQDGSMYAPAQFQPGFIPPRHGGAPARPPDFPESSEIPPSHMYRSYKYLNRVHSAVWNGNHGATNQGPLGPDEKPHLGPGPSHQPRTLGHVMDSRVMRPPVPPNQWTEQSGFLPHGVPSSGYMRPPCKSAGHRLQPPPVPAPSSLFGAPAQALRGVQGGDSMMDSPEMIAMQQLSSRVCPPGVPYHPHQPAHPRLPGPFPQVAHPMSVTVSAPKPALGNPGRAPENSEAQEPENDQAEPLPGLEEKPPGVGTSEGVYLTQLPHPTPPLQTDCTRQSSPQERETVGPELKSSSSESADNCKAMKGKNPWPSDSSYPGPAAQGCVRDLSTVADRGALSENGVIGEASPCGSEGKGLGSSGSEKLLCPRGRTLQETMPCTGQNAATPPSTDPGLTGGTVSQFPPLYMPGLEYPNSAAHYHISPGLQGVGPVMGGKSPASHPQHFPPRGFQSNHPHSGGFPRYRPPQGMRYSYHPPPQPSYHHYQRTPYYACPQSFSDWQRPLHPQGSPSGPPASQPPPPRSLFSDKNAMASLQGCETLNAALTSPTRMDAVAAKVPNDGQNPGPEEEKLDESMERPESPKEFLDLDNHNAATKRQSSLSASEYLYGTPPPLSSGMGFGSSAFPPHSVMLQTGPPYTPQRPASHFQPRAYSSPVAALPPHHPGATQPNGLSQEGPIYRCQEEGLGHFQAVMMEQIGTRSGIRGPFQEMYRPSGMQMHPVQSQASFPKTPTAATSQEEVPPHKPPTLPLDQS

SEQ ID NO: 12390 - protein, 393 aa, Homo sapiens
  Payload ID: 2434
  Gene Symbol: CECR5
  Gene Name: cat eye syndrome chromosome region, candidate 5
  Uniprot ID: Q9BXW7
  ENSP ID: ENSP00000155674
MYAWFFLPSFSQSPPTFGFLLDIDGVLVRGHRVIPAALKAFRRLVNSQGQLRVPVVFVTNAGNILQHSKAQELSALLGCEVDADQVILSHSPMKLFSEYHEKRMLVSGQGPVMENAQGLGFRNVVTVDELRMAFPLLDMVDLERRLKTTPLPRNDFPRIEGVLLLGEPVRWETSLQLIMDVLLSNGSPGAGLATPPYPHLPVLASNMDLLWMAEAKMPRFGHGTFLLCLETIYQKVTGKELRYEGLMGKPSILTYQYAEDLIRRQAERRGWAAPIRKLYAVGDNPMSDVYGANLFHQYLQKATHDGAPELGAGGTRQQQPSASQSCISILVCTGVYNPRNPQSTEPVLGGGEPPFHGHRDLCFSPGLMEASHVVNDVNEAVQLVFRKEGWALE

SEQ ID NO: 12391 - protein, 423 aa, Homo sapiens
  Payload ID: 2434
  Gene Symbol: CECR5
  Gene Name: cat eye syndrome chromosome region, candidate 5
  Uniprot ID: Q9BXW7
  ENSP ID: ENSP00000337358
MAAWGCVAALGAARGLCWRAARAAAGLQGRPARRCYAVGPAQSPPTFGFLLDIDGVLVRGHRVIPAALKAFRRLVNSQGQLRVPVVFVTNAGNILQHSKAQELSALLGCEVDADQVILSHSPMKLFSEYHEKRMLVSGQGPVMENAQGLGFRNVVTVDELRMAFPLLDMVDLERRLKTTPLPRNDFPRIEGVLLLGEPVRWETSLQLIMDVLLSNGSPGAGLATPPYPHLPVLASNMDLLWMAEAKMPRFGHGTFLLCLETIYQKVTGKELRYEGLMGKPSILTYQYAEDLIRRQAERRGWAAPIRKLYAVGDNPMSDVYGANLFHQYLQKATHDGAPELGAGGTRQQQPSASQSCISILVCTGVYNPRNPQSTEPVLGGGEPPFHGHRDLCFSPGLMEASHVVNDVNEAVQLVFRKEGWALE

SEQ ID NO: 12392 - protein, 223 aa, Homo sapiens
  Payload ID: 2434
  Gene Symbol: CECR5
  Gene Name: cat eye syndrome chromosome region, candidate 5
  ENSP ID: ENSP00000382745
MAAWGCVAALGAARGLCWRAARAAAGLQGRPARRCYAVGPAQPLPRNDFPRIEGVLLLGEPVRWETSLQLIMDVLLSNGSPGAGLATPPYPHLPVLASNMDLLWMAEAKMPSDNPMSDVYGANLFHQYLQKATHDGAPELGAGGTRQQQPSASQSCISILVCTGVYNPRNPQSTEPVLGGGEPPFHGHRDLCFSPGLMEASHVVNDVNEAVQLVFRKEGWALE

SEQ ID NO: 12393 - protein, 578 aa, Homo sapiens
  Payload ID: 2435
  Gene Symbol: CECR6
  Gene Name: cat eye syndrome chromosome region, candidate 6
  Uniprot ID: Q9BXQ6
  ENSP ID: ENSP00000329318
MRPALGHPRSVSSASGSFPPPPAAARLQPLFLRGGSFRGRRGSGDSSTSTSTSRGGGGGRRGGGGGSPSSSTGAEREDDDESLSVSKPLVPNAALLGPPAQVGAPAGPAPVAFSSSAATSSSTSTPTSSCSMTAADFGGGAAAGAVGGPGSRSAGGAGGTGTGSGASCCPCCCCCGCPDRPGRRGRRRGCAPSPRCRWGYQALSVVLLLAQGGLLDLYLIAVTDLYWCSWIATDLVVVVGWAIFFAKNSRGRRGGAASGAHNHHLHHHHAAPPLHLPAPSAATAGAKARGARGGAGGAGGGLGAAAAAGEFAFAYLAWLIYSIAFTPKVVLILGTSILDLIELRAPFGTTGFRLTMALSVPLLYSLVRAISEAGAPPGSAGPLLLQPQRHRAAGCFLGTCLDLLDSFTLVELMLEGRVPLPAHLRYLLIAVYFLTLASPVLWLYELNAAAAAAASWGQASGPGSCSRLLRLLGGCLVDVPLLALRCLLVVSYQQPLSIFMLKNLFFLGCRGLEALEGCWDRGNRASPSRARGGYGAPPSAPPPPPPPPQGGSQLGHCISENEGGAHGYVNTLAVASQN

SEQ ID NO: 12394 - protein, 223 aa, Homo sapiens
  Payload ID: 2435
  Gene Symbol: CECR6
  Gene Name: cat eye syndrome chromosome region, candidate 6
  Uniprot ID: Q9BXQ6
  ENSP ID: ENSP00000382764
MALSVPLLYSLVRAISEAGAPPGSAGPLLLQPQRHRAAGCFLGTCLDLLDSFTLVELMLEGRVPLPAHLRYLLIAVYFLTLASPVLWLYELNAAAAAAASWGQASGPGSCSRLLRLLGGCLVDVPLLALRCLLVVSYQQPLSIFMLKNLFFLGCRGLEALEGCWDRGNRASPSRARGGYGAPPSAPPPPPPPPQGGSQLGHCISENEGGAHGYVNTLAVASQN

SEQ ID NO: 12395 - protein, 527 aa, Homo sapiens
  Payload ID: 2436
  Gene Symbol: CAT
  Gene Name: catalase
  Uniprot ID: P04040
  ENSP ID: ENSP00000241052
MADSRDPASDQMQHWKEQRAAQKADVLTTGAGNPVGDKLNVITVGPRGPLLVQDVVFTDEMAHFDRERIPERVVHAKGAGAFGYFEVTHDITKYSKAKVFEHIGKKTPIAVRFSTVAGESGSADTVRDPRGFAVKFYTEDGNWDLVGNNTPIFFIRDPILFPSFIHSQKRNPQTHLKDPDMVWDFWSLRPESLHQVSFLFSDRGIPDGHRHMNGYGSHTFKLVNANGEAVYCKFHYKTDQGIKNLSVEDAARLSQEDPDYGIRDLFNAIATGKYPSWTFYIQVMTFNQAETFPFNPFDLTKVWPHKDYPLIPVGKLVLNRNPVNYFAEVEQIAFDPSNMPPGIEASPDKMLQGRLFAYPDTHRHRLGPNYLHIPVNCPYRARVANYQRDGPMCMQDNQGGAPNYYPNSFGAPEQQPSALEHSIQYSGEVRRFNTANDDNVTQVRAFYVNVLNEEQRKRLCENIAGHLKDAQIFIQKKAVKNFTEVHPDYGSHIQALLDKYNAEKPKNAIHTFVQSGSHLAAREKANL

SEQ ID NO: 12396 - protein, 199 aa, Homo sapiens
  Payload ID: 2437
  Gene Symbol: COMT
  Gene Name: catechol-O-methyltransferase
  ENSP ID: ENSP00000207636
MPEAPPLLLAAVLLGLVLLVVLLLLLRHWGWGLCLIGWNEFILQPIHNLLMGDTKEQRILNHVLQHAEPGNAQSVLEAIDTYCEQKEWAMNVGDKKGKIVDAVIQEHQPSVLLELGAYCGYSAVRMARLLSPGARLITIEINPDCAAITQRMVDFAGVKDKVCRDGLLSVRTWALTGAVPGHPCGWSVPGHHPPAEEEV

SEQ ID NO: 12397 - protein, 271 aa, Homo sapiens
  Payload ID: 2437
  Gene Symbol: COMT
  Gene Name: catechol-O-methyltransferase
  Uniprot ID: P21964
  ENSP ID: ENSP00000354511
MPEAPPLLLAAVLLGLVLLVVLLLLLRHWGWGLCLIGWNEFILQPIHNLLMGDTKEQRILNHVLQHAEPGNAQSVLEAIDTYCEQKEWAMNVGDKKGKIVDAVIQEHQPSVLLELGAYCGYSAVRMARLLSPGARLITIEINPDCAAITQRMVDFAGVKDKVTLVVGASQDIIPQLKKKYDVDTLDMVFLDHWKDRYLPDTLLLEECGLLRKGTVLLADNVICPGAPDFLAHVRGSSCFECTHYQSFLEYREVVDGLEKAIYKGPGSEAGP

SEQ ID NO: 12398 - protein, 235 aa, Homo sapiens
  Payload ID: 2437
  Gene Symbol: COMT
  Gene Name: catechol-O-methyltransferase
  ENSP ID: ENSP00000383966
MPEAPPLLLAAVLLGLVLLVVLLLLLRHWGWGLCLIGWNEFILQPIHNLLMGDTKEQRILNHVLQHAEPGNAQSVLEAIDTYCEQKEWAMNVGDKKGKIVDAVIQEHQPSVLLELGAYCGYSAVRMARLLSPGARLITIEINPDCAAITQRMVDFAGVKDKVTLVVGASQDIIPQLKKKYDVDTLDMVFLDHWKDRYLPDTLLLEVSPNQDGIRASCCPEPIQSASASPKSQAFQ

SEQ ID NO: 12399 - protein, 271 aa, Homo sapiens; identical to SEQ ID NO: 12397
  Payload ID: 2437
  Gene Symbol: COMT
  Gene Name: catechol-O-methyltransferase
  Uniprot ID: P21964
  ENSP ID: ENSP00000384654

SEQ ID NO: 12400 - protein, 271 aa, Homo sapiens; identical to SEQ ID NO: 12397
  Payload ID: 2437
  Gene Symbol: COMT
  Gene Name: catechol-O-methyltransferase
  Uniprot ID: P21964
  ENSP ID: ENSP00000385150

SEQ ID NO: 12401 - protein, 271 aa, Homo sapiens; identical to SEQ ID NO: 12397
  Payload ID: 2437
  Gene Symbol: COMT
  Gene Name: catechol-O-methyltransferase
  Uniprot ID: P21964
  ENSP ID: ENSP00000385917

SEQ ID NO: 12402 - protein, 152 aa, Homo sapiens
  Payload ID: 2437
  Gene Symbol: COMT
  Gene Name: catechol-O-methyltransferase
  ENSP ID: ENSP00000387695
  MOD_RES (1)..(1): Any amino acid
XNPDCAAITQRMVDFAGVKDKVTLVVGASQDIIPQLKKKYDVDTLDMVFLDHWKDRYLPDTLLLEVQWSGVFQSADVFCIPDDQIGLLSPLAQPEKSRSPGPSLMHSLAQTGRQPPCSRPRPLSSSRVALCSTSFQLTLLGHFFFFLNENTS

SEQ ID NO: 12403 - protein, 223 aa, Homo sapiens
  Payload ID: 2437
  Gene Symbol: COMT
  Gene Name: catechol-O-methyltransferase
  ENSP ID: ENSP00000403958
MPEAPPLLLAAVLLGLVLLVVLLLLLRHWGWGLCLIGWNEFILQPIHNLLMGDTKEQRILNHVLQHAEPGNAQSVLEAIDTYCEQKEWAMNVGDKKGKIVDAVIQEHQPSVLLELGAYCGYSAVRMARLLSPGARLITIEINPDCAAITQRMVDFAGVKDKVTLVVGASQDIIPQLKKKYDVDTLDMVFLDHWKDRYLPDTLLLEECGLLRKGTVLLADNVIC

SEQ ID NO: 12404 - protein, 221 aa, Homo sapiens
  Payload ID: 2437
  Gene Symbol: COMT
  Gene Name: catechol-O-methyltransferase
  Uniprot ID: P21964
  ENSP ID: ENSP00000416778
MGDTKEQRILNHVLQHAEPGNAQSVLEAIDTYCEQKEWAMNVGDKKGKIVDAVIQEHQPSVLLELGAYCGYSAVRMARLLSPGARLITIEINPDCAAITQRMVDFAGVKDKVTLVVGASQDIIPQLKKKYDVDTLDMVFLDHWKDRYLPDTLLLEECGLLRKGTVLLADNVICPGAPDFLAHVRGSSCFECTHYQSFLEYREVVDGLEKAIYKGPGSEAGP

SEQ ID NO: 12405 - protein, 262 aa, Homo sapiens
  Payload ID: 2438
  Gene Symbol: COMTD1
  Gene Name: catechol-O-methyltransferase domain containing 1
  Uniprot ID: Q86VU5
  ENSP ID: ENSP00000361616
MTQPVPRLSVPAALALGSAALGAAFATGLFLGRRCPPWRGRREQCLLPPEDSRLWQYLLSRSMREHPALRSLRLLTLEQPQGDSMMTCEQAQLLANLARLIQAKKALDLGTFTGYSALALALALPADGRVVTCEVDAQPPELGRPLWRQAEAEHKIDLRLKPALETLDELLAAGEAGTFDVAVVDADKENCSAYYERCLQLLRPGGILAVLRVLWRGKVLQPPKGDVAAECVRNLNERIRRDVRVYISLLPLGDGLTLAFKI

SEQ ID NO: 12406 - protein, 260 aa, Homo sapiens
  Payload ID: 2438
  Gene Symbol: COMTD1
  Gene Name: catechol-O-methyltransferase domain containing 1
  ENSP ID: ENSP00000473626
  MOD_RES (1)..(1): Any amino acid
XPAGAPALRARRAGPGLSRTGRRLRHWPLPGEAVPPMARPARAVPASPRGQPPVAVSSEPLHAGAPGAAKPELTLEQPQGDSMMTCEQAQLLANLARLIQAKKALDLGTFTGYSALALALALPADGRVVTCEVDAQPPELGRPLWRQAEAEHKIDLRLKPALETLDELLAAGEAGTFDVAVVDADKENCSAYYERCLQLLRPGGILAVLRVLWRGKVLQPPKGDVAAECVRNLNERIRRDVRVYISLLPLGDGLTLAFKI

SEQ ID NO: 12407 - protein, 906 aa, Homo sapiens
  Payload ID: 2439
  Gene Symbol: CTNNA1
  Gene Name: catenin (cadherin-associated protein), alpha 1, 102kDa
  Uniprot ID: P35221
  ENSP ID: ENSP00000304669
MTAVHAGNINFKWDPKSLEIRTLAVERLLEPLVTQVTTLVNTNSKGPSNKKRGRSKKAHVLAASVEQATENFLEKGDKIAKESQFLKEELVAAVEDVRKQGDLMKAAAGEFADDPCSSVKRGNMVRAARALLSAVTRLLILADMADVYKLLVQLKVVEDGILKLRNAGNEQDLGIQYKALKPEVDKLNIMAAKRQQELKDVGHRDQMAAARGILQKNVPILYTASQACLQHPDVAAYKANRDLIYKQLQQAVTGISNAAQATASDDASQHQGGGGGELAYALNNFDKQIIVDPLSFSEERFRPSLEERLESIISGAALMADSSCTRDDRRERIVAECNAVRQALQDLLSEYMGNAGRKERSDALNSAIDKMTKKTRDLRRQLRKAVMDHVSDSFLETNVPLLVLIEAAKNGNEKEVKEYAQVFREHANKLIEVANLACSISNNEEGVKLVRMSASQLEALCPQVINAALALAAKPQSKLAQENMDLFKEQWEKQVRVLTDAVDDITSIDDFLAVSENHILEDVNKCVIALQEKDVDGLDRTAGAIRGRAARVIHVVTSEMDNYEPGVYTEKVLEATKLLSNTVMPRFTEQVEAAVEALSSDPAQPMDENEFIDASRLVYDGIRDIRKAVLMIRTPEELDDSDFETEDFDVRSRTSVQTEDDQLIAGQSARAIMAQLPQEQKAKIAEQVASFQEEKSKLDAEVSKWDDSGNDIIVLAKQMCMIMMEMTDFTRGKGPLKNTSDVISAAKKIAEAGSRMDKLGRTIADHCPDSACKQDLLAYLQRIALYCHQLNICSKVKAEVQNLGGELVVSGVDSAMSLIQAAKNLMNAVVQTVKASYVASTKYQKSQGMASLNLPAVSWKMKAPEKKPLVKREKQDETQTKIKRASQKKHVNPVQALSEFKAMDSI

SEQ ID NO: 12408 - protein, 841 aa, Homo sapiens
  Payload ID: 2439
  Gene Symbol: CTNNA1
  Gene Name: catenin (cadherin-associated protein), alpha 1, 102kDa
  ENSP ID: ENSP00000427821
MTAVHAGNINFKWDPKSLEIRTLAVERLLEPLVTQVTTLVNTNSKGPSNKKRGRSKKAHVLAASVEQATENFLEKGDKIAKESQFLKEELVAAVEDVRKQGDLMKAAAGEFADDPCSSVKRGNMVRAARALLSAVTRLLILADMADVYKLLVQLKVVEDGILKLRNAGNEQDLGIQYKALKPEVDKLNIMAAKRQQELKDVGHRDQMAAARGILQKNVPILYTASQACLQHPDVAAYKANRDLIYKQLQQAVTGISNAAQATASDDASQHQGGGGGELAYALNNFDKQIIVDPLSFSEERFRPSLEERLESIISGAALMADSSCTRDDRRERIVAECNAVRQALQDLLSEYMGNAGRKERSDALNSAIDKMTKKTRDLRRQLRKAVMDHVSDSFLETNVPLLVLIEAAKNGNEKEVKEYAQVFREHANKLIEVANLACSISNNEEGVKLVRMSASQLEALCPQVINAALALAAKPQSKLAQENMDLFKEQWEKQVRVLTDAVDDITSIDDFLAVSENHILEDVNKCVIALQEKDVDGLDRTAGAIRGRAARVIHVVTSEMDNYEPGVYTEKVLEATKLLSNTVMPRFTEQVEAAVEALSSDPAQPMDENEFIDASRLVYDGIRDIRKAVLMIRTPEELDDSDFETEDFDVRSRTSVQTEDDQLIAGQSARAIMAQLPQEQKAKIAEQVASFQEEKSKLDAEVSKWDDSGNDIIVLAKQMCMIMMEMTDFTRGKGPLKNTSDVISAAKKIAEAGSRMDKLGRTIADHCPDSACKQDLLAYLQRIALYCHQLNICSKVKAEVQNLGGELVVSGNCDTCGALQGLKGWPPPLCWPLTGWTAPCP

SEQ ID NO: 12409 - protein, 110 aa, Homo sapiens
  Payload ID: 2439
  Gene Symbol: CTNNA1
  Gene Name: catenin (cadherin-associated protein), alpha 1, 102kDa
  ENSP ID: ENSP00000428044
MTKKTRDLRRQLRKAVMDHVSDSFLETNVPLLVLIEAAKNGNEKEVKEYAQVFREHANKLIEVANLACSISNNEEGVKLVRMSASQLEALCPQVINAALALAAKPQSKLA

SEQ ID NO: 12410 - protein, 94 aa, Homo sapiens
  Payload ID: 2439
  Gene Symbol: CTNNA1
  Gene Name: catenin (cadherin-associated protein), alpha 1, 102kDa
  ENSP ID: ENSP00000428049
MTAVHAGNINFKWDPKSLEIRTLAVERLLEPLVTQVTTLVNTNSKGPSNKKRGRSKKAHVLAASVEQATENFLEKGDKIAKESQFLKEELVAAV

SEQ ID NO: 12411 - protein, 50 aa, Homo sapiens
  Payload ID: 2439
  Gene Symbol: CTNNA1
  Gene Name: catenin (cadherin-associated protein), alpha 1, 102kDa
  ENSP ID: ENSP00000428088
MTKKTRDLRRQLRKAVMDHVSDSFLETNVPLLVLIEAAKNGNEKEVKEYA

SEQ ID NO: 12412 - protein, 101 aa, Homo sapiens
  Payload ID: 2439
  Gene Symbol: CTNNA1
  Gene Name: catenin (cadherin-associated protein), alpha 1, 102kDa
  ENSP ID: ENSP00000428202
MTAVHAGNINFKWDPKSLEIRTLAVERLLEPLVTQVTTLVNTNSKGPSNKKRGRSKKAHVLAASVEQATENFLEKGDKIAKESQFLKEELVAAVEDVRKQG

SEQ ID NO: 12413 - protein, 117 aa, Homo sapiens
  Payload ID: 2439
  Gene Symbol: CTNNA1
  Gene Name: catenin (cadherin-associated protein), alpha 1, 102kDa
  ENSP ID: ENSP00000428439
MTAVHAGNINFKWDPKSLEIRTLAVERLLEPLVTQVTTLVNTNSKGPSNKKRGRSKKAHVLAASVEQATENFLEKGDKIAKESQFLKEELVAAVEDVRKQGDLMKAAAGEFADDPCS

SEQ ID NO: 12414 - protein, 22 aa, Homo sapiens
  Payload ID: 2439
  Gene Symbol: CTNNA1
  Gene Name: catenin (cadherin-associated protein), alpha 1, 102kDa
  ENSP ID: ENSP00000428686
  MOD_RES (1)..(1): Any amino acid
XVRMSASQLEALCPQRITFWKM

SEQ ID NO: 12415 - protein, 50 aa, Homo sapiens; identical to SEQ ID NO: 12411
  Payload ID: 2439
  Gene Symbol: CTNNA1
  Gene Name: catenin (cadherin-associated protein), alpha 1, 102kDa
  ENSP ID: ENSP00000428710

SEQ ID NO: 12416 - protein, 91 aa, Homo sapiens
  Payload ID: 2439
  Gene Symbol: CTNNA1
  Gene Name: catenin (cadherin-associated protein), alpha 1, 102kDa
  ENSP ID: ENSP00000428894
MTKKTRDLRRQLRKAVMDHVSDSFLETNVPLLVLIEAAKNGNEKEVKEYAQVFREHANKLIEVANLACSISNNEEGVKLVRMSASQLEALC

SEQ ID NO: 12417 - protein, 20 aa, Homo sapiens
  Payload ID: 2439
  Gene Symbol: CTNNA1
  Gene Name: catenin (cadherin-associated protein), alpha 1, 102kDa
  ENSP ID: ENSP00000429103
MTKKTRDLRRQLRKAVMDHV

SEQ ID NO: 12418 - protein, 129 aa, Homo sapiens
  Payload ID: 2439
  Gene Symbol: CTNNA1
  Gene Name: catenin (cadherin-associated protein), alpha 1, 102kDa
  ENSP ID: ENSP00000429142
KQLQQAVTGISNAAQATASDDASQHQGGGGGELAYALNNFDKQIIVDPLSFSEERFRPSLEERLESIISGAALMADSSCTRDDRRERIVAECNAVRQALQDLLSEYMGNQHVSIPSAVEMLIPPCIAHC

SEQ ID NO: 12419 - protein, 215 aa, Homo sapiens
  Payload ID: 2439
  Gene Symbol: CTNNA1
  Gene Name: catenin (cadherin-associated protein), alpha 1, 102kDa
  ENSP ID: ENSP00000429457
MTAVHAGNINFKWDPKSLEIRTLAVERLLEPLVTQVTTLVNTNSKGPSNKKRGRSKKAHVLAASVEQATENFLEKGDKIAKESQFLKEELVAAVEDVRKQGDLMKAAAGEFADDPCSSVKRGNMVRAARALLSAVTRLLILADMADVYKLLVQLKVVEDGILKLRNAGNEQDLGIQYKALKPEVDKLNIMAAKRQQELKDVGHRDQMAAARGILQ

SEQ ID NO: 12420 - protein, 32 aa, Homo sapiens
  Payload ID: 2439
  Gene Symbol: CTNNA1
  Gene Name: catenin (cadherin-associated protein), alpha 1, 102kDa
  ENSP ID: ENSP00000429569
MTKKTRDLRRQLRKAVMDHVSDSFLETNVPLL

SEQ ID NO: 12421 - protein, 123 aa, Homo sapiens
  Payload ID: 2439
  Gene Symbol: CTNNA1
  Gene Name: catenin (cadherin-associated protein), alpha 1, 102kDa
  ENSP ID: ENSP00000429636
MTAVHAGNINFKWDPKSLEIRTLAVERLLEPLVTQVTTLVNTNSKGPSNKKRGRSKKAHVLAASVEQATENFLEKGDKIAKESQFLKEELVAAVEDVRKQGDLMKAAAGEFADDPCSSVKRGN

SEQ ID NO: 12422 - protein, 75 aa, Homo sapiens
  Payload ID: 2439
  Gene Symbol: CTNNA1
  Gene Name: catenin (cadherin-associated protein), alpha 1, 102kDa
  ENSP ID: ENSP00000429738
MTKKTRDLRRQLRKAVMDHVSDSFLETNVPLLVLIEAAKNGNEKEVKEYAQVFREHANKLIEVANLACSISNNEE

SEQ ID NO: 12423 - protein, 136 aa, Homo sapiens
  Payload ID: 2439
  Gene Symbol: CTNNA1
  Gene Name: catenin (cadherin-associated protein), alpha 1, 102kDa
  ENSP ID: ENSP00000430076
MTDFTRGKGPLKNTSDVISAAKKIAEAGSRMDKLGRTIADHVDSAMSLIQAAKNLMNAVVQTVKASYVASTKYQKSQGMASLNLPAVSWKMKAPEKKPLVKREKQDETQTKIKRASQKKHVNPVQALSEFKAMDSI

SEQ ID NO: 12424 - protein, 139 aa, Homo sapiens
  Payload ID: 2439
  Gene Symbol: CTNNA1
  Gene Name: catenin (cadherin-associated protein), alpha 1, 102kDa
  ENSP ID: ENSP00000430078
MTAVHAGNINFKWDPKSLEIRTLAVERLLEPLVTQVTTLVNTNSKGPSNKKRGRSKKAHVLAASVEQATENFLEKGDKIAKESQFLKEELVAAVEDVRKQGDLMKAAAGEFADDPCSSVKRGNMVRAARALLSAVTRLL

SEQ ID NO: 12425 - protein, 39 aa, Homo sapiens
  Payload ID: 2439
  Gene Symbol: CTNNA1
  Gene Name: catenin (cadherin-associated protein), alpha 1, 102kDa
  ENSP ID: ENSP00000430177
MTKKTRDLRRQLRKAVMDHVSDSFLETNVPLLVLIEAAK

SEQ ID NO: 12426 - protein, 128 aa, Homo sapiens
  Payload ID: 2439
  Gene Symbol: CTNNA1
  Gene Name: catenin (cadherin-associated protein), alpha 1, 102kDa
  ENSP ID: ENSP00000430240
MTKKTRDLRRQLRKAVMDHVSDSFLETNVPLLVLIEAAKNGNEKEVKEYAQVFREHANKLIEVANLACSISNNEEGVKLVRMSASQLEALCPQVINAALALAAKPQSKLAQENMDLFKEQWEKQVRVL

SEQ ID NO: 12427 - protein, 156 aa, Homo sapiens
  Payload ID: 2439
  Gene Symbol: CTNNA1
  Gene Name: catenin (cadherin-associated protein), alpha 1, 102kDa
  ENSP ID: ENSP00000430304
MTAVHAGNINFKWDPKSLEIRTLAVERLLEPLVTQVTTLVNTNSKGPSNKKRGRSKKAHVLAASVEQATENFLEKGDKIAKESQFLKEELVAAVEDVRKQGDLMKAAAGEFADDPCSSVKRGNMVRAARALLSAVTRLLILADMADVYKLLVQLKV

SEQ ID NO: 12428 - protein, 105 aa, Homo sapiens
  Payload ID: 2439
  Gene Symbol: CTNNA1
  Gene Name: catenin (cadherin-associated protein), alpha 1, 102kDa
  ENSP ID: ENSP00000430379
MTKKTRDLRRQLRKAVMDHVSDSFLETNVPLLVLIEAAKNGNEKEVKEYAQVFREHANKLIEVANLACSISNNEEGVKLVRMSASQLEALCPQVINAALALAAKP

SEQ ID NO: 12429 - protein, 40 aa, Homo sapiens
  Payload ID: 2439
  Gene Symbol: CTNNA1
  Gene Name: catenin (cadherin-associated protein), alpha 1, 102kDa
  ENSP ID: ENSP00000430623
MTKKTRDLRRQLRKAVMDHVSDSFLETNVPLLVLIEAAKN

SEQ ID NO: 12430 - protein, 161 aa, Homo sapiens
  Payload ID: 2439
  Gene Symbol: CTNNA1
  Gene Name: catenin (cadherin-associated protein), alpha 1, 102kDa
  ENSP ID: ENSP00000430626
MKAAAGEFADDPCSSVKRGNMVRAARALLSAVTRLLILADMADVYKLLVQLKVVEDGILKLRNAGNEQDLGIQYKALKPEVDKLNIMAAKRQQELKDVGHRDQMAAARGILQKNVPILYTASQACLQHPDVAAYKANRDLIYKQLQQAVTGISNAAQATAS

SEQ ID NO: 12431 - protein, 55 aa, Homo sapiens
  Payload ID: 2439
  Gene Symbol: CTNNA1
  Gene Name: catenin (cadherin-associated protein), alpha 1, 102kDa
  ENSP ID: ENSP00000430671
MTAVHAGNINFKWDPKSLEIRTLAVERLLEPLVTQILHLSSEGKPKKGGVWILDC

SEQ ID NO: 12432 - protein, 36 aa, Homo sapiens
  Payload ID: 2439
  Gene Symbol: CTNNA1
  Gene Name: catenin (cadherin-associated protein), alpha 1, 102kDa
  ENSP ID: ENSP00000430841
MTKKTRDLRRQLRKAVMDHVSDSFLETNVPLLVLIE

SEQ ID NO: 12433 - protein, 71 aa, Homo sapiens
  Payload ID: 2439
  Gene Symbol: CTNNA1
  Gene Name: catenin (cadherin-associated protein), alpha 1, 102kDa
  ENSP ID: ENSP00000430981
MTKKTRDLRRQLRKAVMDHVSDSFLETNVPLLVLIEAAKNGNEKEVKEYAQVFREHANKLIEVANLACSIS

SEQ ID NO: 12434 - protein, 37 aa, Homo sapiens
  Payload ID: 2439
  Gene Symbol: CTNNA1
  Gene Name: catenin (cadherin-associated protein), alpha 1, 102kDa
  ENSP ID: ENSP00000431033
MTAVHAGNINFKWDPKSLEIRTLAVERLLEPLVTQVI

SEQ ID NO: 12435 - protein, 119 aa, Homo sapiens
  Payload ID: 2439
  Gene Symbol: CTNNA1
  Gene Name: catenin (cadherin-associated protein), alpha 1, 102kDa
  ENSP ID: ENSP00000431118
MTKKTRDLRRQLRKAVMDHVSDSFLETNVPLLVLIEAAKNGNEKEVKEYAQVFREHANKLIEVANLACSISNNEEGVKLVRMSASQLEALCPQVINAALALAAKPQSKLAQENMDLFKE

SEQ ID NO: 12436 - protein, 536 aa, Homo sapiens
  Payload ID: 2439
  Gene Symbol: CTNNA1
  Gene Name: catenin (cadherin-associated protein), alpha 1, 102kDa
  Uniprot ID: P35221
  ENSP ID: ENSP00000438476
MTKKTRDLRRQLRKAVMDHVSDSFLETNVPLLVLIEAAKNGNEKEVKEYAQVFREHANKLIEVANLACSISNNEEGVKLVRMSASQLEALCPQVINAALALAAKPQSKLAQENMDLFKEQWEKQVRVLTDAVDDITSIDDFLAVSENHILEDVNKCVIALQEKDVDGLDRTAGAIRGRAARVIHVVTSEMDNYEPGVYTEKVLEATKLLSNTVMPRFTEQVEAAVEALSSDPAQPMDENEFIDASRLVYDGIRDIRKAVLMIRTPEELDDSDFETEDFDVRSRTSVQTEDDQLIAGQSARAIMAQLPQEQKAKIAEQVASFQEEKSKLDAEVSKWDDSGNDIIVLAKQMCMIMMEMTDFTRGKGPLKNTSDVISAAKKIAEAGSRMDKLGRTIADHCPDSACKQDLLAYLQRIALYCHQLNICSKVKAEVQNLGGELVVSGVDSAMSLIQAAKNLMNAVVQTVKASYVASTKYQKSQGMASLNLPAVSWKMKAPEKKPLVKREKQDETQTKIKRASQKKHVNPVQALSEFKAMDSI

SEQ ID NO: 12437 - protein, 64 aa, Homo sapiens
  Payload ID: 2439
  Gene Symbol: CTNNA1
  Gene Name: catenin (cadherin-associated protein), alpha 1, 102kDa
  ENSP ID: ENSP00000482738
MTKKTRDLRRQLRKAVMDHVSDSFLETNVPLLVLIEAAKNGNEKEVKEYAQVFREHANKLIEGI

SEQ ID NO: 12438 - protein, 841 aa, Homo sapiens; identical to SEQ ID NO: 12408
  Payload ID: 2439
  Gene Symbol: CTNNA1
  Gene Name: catenin (cadherin-associated protein), alpha 1, 102kDa
  ENSP ID: ENSP00000486200

SEQ ID NO: 12439 - protein, 584 aa, Homo sapiens
  Payload ID: 2440
  Gene Symbol: CTNNA2
  Gene Name: catenin (cadherin-associated protein), alpha 2
  Uniprot ID: P26232
  ENSP ID: ENSP00000341500
MDGWRRPLQSVGKVCEKNMKTSEMHTMSGAQTGRKEKGDPLNIAIDKMTKKTRDLRRQLRKAVMDHISDSFLETNVPLLVLIEAAKSGNEKEVKEYAQVFREHANKLVEVANLACSISNNEEGVKLVRMAATQIDSLCPQVINAALTLAARPQSKVAQDNMDVFKDQWEKQVRVLTEAVDDITSVDDFLSVSENHILEDVNKCVIALQEGDVDTLDRTAGAIRGRAARVIHIINAEMENYEAGVYTEKVLEATKLLSETVMPRFAEQVEVAIEALSANVPQPFEENEFIDASRLVYDGVRDIRKAVLMIRTPEELEDDSDFEQEDYDVRSRTSVQTEDDQLIAGQSARAIMAQLPQEEKAKIAEQVEIFHQEKSKLDAEVAKWDDSGNDIIVLAKQMCMIMMEMTDFTRGKGPLKNTSDVINAAKKIAEAGSRMDKLARAVADQCPDSACKQDLLAYLQRIALYCHQLNICSKVKAEVQNLGGELIVSGLDSATSLIQAAKNLMNAVVLTVKASYVASTKYQKVYGTAAVNSPVVSWKMKAPEKKPLVKREKPEEFQTRVRRGSQKKHISPVQALSEFKAMDSF

SEQ ID NO: 12440 - protein, 569 aa, Homo sapiens
  Payload ID: 2440
  Gene Symbol: CTNNA2
  Gene Name: catenin (cadherin-associated protein), alpha 2
  ENSP ID: ENSP00000355398
MDHISDSFLETNVPLLVLIEAAKSGNEKEVKEYAQVFREHANKLVEVANLACSISNNEEGVKLVRMAATQIDSLCPQVINAALTLAARPQSKVAQDNMDVFKDQWEKQVRVLTEAVDDITSVDDFLSVSENHILEDVNKCVIALQEGDVDTLDRTAGAIRGRAARVIHIINAEMENYEAGVYTEKVLEATKLLSETVMPRFAEQVEVAIEALSANVPQPFEENEFIDASRLVYDGVRDIRKAVLMIRTPEELEDDSDFEQEDYDVRSRTSVQTEDDQLIAGQSARAIMAQLPQEEKAKIAEQVEIFHQEKSKLDAEVAKWDDSGNDIIVLAKQMCMIMMEMTDFTRGKGPLKNTSDVINAAKKIAEAGSRMDKLARAVADQCPDSACKQDLLAYLQRIALYCHQLNICSKVKAEVQNLGGELIVSGTGVQSTFTTFYEVDCDVIDGGRASQLSTHLPTCAEGAPIGSGSSDSSMLDSATSLIQAAKNLMNAVVLTVKASYVASTKYQKVYGTAAVNSPVVSWKMKAPEKKPLVKREKPEEFQTRVRRGSQKKHISPVQALSEFKAMDSF

SEQ ID NO: 12441 - protein, 953 aa, Homo sapiens
  Payload ID: 2440
  Gene Symbol: CTNNA2
  Gene Name: catenin (cadherin-associated protein), alpha 2
  Uniprot ID: P26232
  ENSP ID: ENSP00000384638
MTSATSPIILKWDPKSLEIRTLTVERLLEPLVTQVTTLVNTSNKGPSGKKKGRSKKAHVLAASVEQATQNFLEKGEQIAKESQDLKEELVAAVEDVRKQGETMRIASSEFADDPCSSVKRGTMVRAARALLSAVTRLLILADMADVMRLLSHLKIVEEALEAVKNATNEQDLANRFKEFGKEMVKLNYVAARRQQELKDPHCRDEMAAARGALKKNATMLYTASQAFLRHPDVAATRANRDYVFKQVQEAIAGISNAAQATSPTDEAKGHTGIGELAAALNEFDNKIILDPMTFSEARFRPSLEERLESIISGAALMADSSCTRDDRRERIVAECNAVRQALQDLLSEYMNNTGRKEKGDPLNIAIDKMTKKTRDLRRQLRKAVMDHISDSFLETNVPLLVLIEAAKSGNEKEVKEYAQVFREHANKLVEVANLACSISNNEEGVKLVRMAATQIDSLCPQVINAALTLAARPQSKVAQDNMDVFKDQWEKQVRVLTEAVDDITSVDDFLSVSENHILEDVNKCVIALQEGDVDTLDRTAGAIRGRAARVIHIINAEMENYEAGVYTEKVLEATKLLSETVMPRFAEQVEVAIEALSANVPQPFEENEFIDASRLVYDGVRDIRKAVLMIRTPEELEDDSDFEQEDYDVRSRTSVQTEDDQLIAGQSARAIMAQLPQEEKAKIAEQVEIFHQEKSKLDAEVAKWDDSGNDIIVLAKQMCMIMMEMTDFTRGKGPLKNTSDVINAAKKIAEAGSRMDKLARAVADQCPDSACKQDLLAYLQRIALYCHQLNICSKVKAEVQNLGGELIVSGTGVQSTFTTFYEVDCDVIDGGRASQLSTHLPTCAEGAPIGSGSSDSSMLDSATSLIQAAKNLMNAVVLTVKASYVASTKYQKVYGTAAVNSPVVSWKMKAPEKKPLVKREKPEEFQTRVRRGSQKKHISPVQALSEFKAMDSF

SEQ ID NO: 12442 - protein, 190 aa, Homo sapiens
  Payload ID: 2440
  Gene Symbol: CTNNA2
  Gene Name: catenin (cadherin-associated protein), alpha 2
  ENSP ID: ENSP00000386587
MRKLHWNLSCGDFKLCETGRKEKGDPLNIAIDKMTKKTRDLRRQLRKAVMDHISDSFLETNVPLLVLIEAAKSGNEKEVKEYAQVFREHANKLVEVANLACSISNNEEGVKLVRMAATQIDSLCPQVINAALTLAARPQSKVAQDNMDVFKDQWEKQVRVLTEAVDDITSVDDFLSVSENHILEDVNKCV

SEQ ID NO: 12443 - protein, 117 aa, Homo sapiens
  Payload ID: 2440
  Gene Symbol: CTNNA2
  Gene Name: catenin (cadherin-associated protein), alpha 2
  ENSP ID: ENSP00000387073
MTSATSPIILKWDPKSLEIRTLTVERLLEPLVTQVTTLVNTSNKGPSGKKKGRSKKAHVLAASVEQATQNFLEKGEQIAKESQDLKEELVAAVEDVRKQGETMRIASSEFADDPCSS

SEQ ID NO: 12444 - protein, 44 aa, Homo sapiens
  Payload ID: 2440
  Gene Symbol: CTNNA2
  Gene Name: catenin (cadherin-associated protein), alpha 2
  ENSP ID: ENSP00000387232
MTSATSPIILKWDPKSLEIRTLTVERLLEPLVTQCIFFSTGYFK

SEQ ID NO: 12445 - protein, 66 aa, Homo sapiens
  Payload ID: 2440
  Gene Symbol: CTNNA2
  Gene Name: catenin (cadherin-associated protein), alpha 2
  ENSP ID: ENSP00000400105
MTSATSPIILKWDPKSLEIRTLTVERLLEPLVTQVTTLVNTSNKGPSGKKKGRSKKAHVLAASVEQ

SEQ ID NO: 12446 - protein, 905 aa, Homo sapiens
  Payload ID: 2440
  Gene Symbol: CTNNA2
  Gene Name: catenin (cadherin-associated protein), alpha 2
  Uniprot ID: P26232
  ENSP ID: ENSP00000418191
MTSATSPIILKWDPKSLEIRTLTVERLLEPLVTQVTTLVNTSNKGPSGKKKGRSKKAHVLAASVEQATQNFLEKGEQIAKESQDLKEELVAAVEDVRKQGETMRIASSEFADDPCSSVKRGTMVRAARALLSAVTRLLILADMADVMRLLSHLKIVEEALEAVKNATNEQDLANRFKEFGKEMVKLNYVAARRQQELKDPHCRDEMAAARGALKKNATMLYTASQAFLRHPDVAATRANRDYVFKQVQEAIAGISNAAQATSPTDEAKGHTGIGELAAALNEFDNKIILDPMTFSEARFRPSLEERLESIISGAALMADSSCTRDDRRERIVAECNAVRQALQDLLSEYMNNTGRKEKGDPLNIAIDKMTKKTRDLRRQLRKAVMDHISDSFLETNVPLLVLIEAAKSGNEKEVKEYAQVFREHANKLVEVANLACSISNNEEGVKLVRMAATQIDSLCPQVINAALTLAARPQSKVAQDNMDVFKDQWEKQVRVLTEAVDDITSVDDFLSVSENHILEDVNKCVIALQEGDVDTLDRTAGAIRGRAARVIHIINAEMENYEAGVYTEKVLEATKLLSETVMPRFAEQVEVAIEALSANVPQPFEENEFIDASRLVYDGVRDIRKAVLMIRTPEELEDDSDFEQEDYDVRSRTSVQTEDDQLIAGQSARAIMAQLPQEEKAKIAEQVEIFHQEKSKLDAEVAKWDDSGNDIIVLAKQMCMIMMEMTDFTRGKGPLKNTSDVINAAKKIAEAGSRMDKLARAVADQCPDSACKQDLLAYLQRIALYCHQLNICSKVKAEVQNLGGELIVSGLDSATSLIQAAKNLMNAVVLTVKASYVASTKYQKVYGTAAVNSPVVSWKMKAPEKKPLVKREKPEEFQTRVRRGSQKKHISPVQALSEFKAMDSF

SEQ ID NO: 12447 - protein, 905 aa, Homo sapiens; identical to SEQ ID NO: 12446
  Payload ID: 2440
  Gene Symbol: CTNNA2
  Gene Name: catenin (cadherin-associated protein), alpha 2
  Uniprot ID: P26232
  ENSP ID: ENSP00000419295

SEQ ID NO: 12448 - protein, 476 aa, Homo sapiens
  Payload ID: 2440
  Gene Symbol: CTNNA2
  Gene Name: catenin (cadherin-associated protein), alpha 2
  ENSP ID: ENSP00000441705
MDHISDSFLETNVPLLVLIEAAKSGNEKEVKEYAQVFREHANKLVEVANLACSISNNEEGVKLVRMAATQIDSLCPQVINAALTLAARPQSKVAQDNMDVFKDQWEKQVRVLTEAVDDITSVDDFLSVSENHILEDVNKCVIALQEGDVDTLDRTAGAIRGRAARVIHIINAEMENYEAGVYTEKVLEATKLLSETVMPRFAEQVEVAIEALSANVPQPFEENEFIDASRLVYDGVRDIRKAVLMIRTPEELEDDSDFEQEDYDVRSRTSVQTEDDQLIAGQSARAIMAQLPQEEKAKIAEQVEIFHQEKSKLDAEVAKWDDSGNDIIVLAKQMCMIMMEMTDFTRGKGPLKNTSDVINAAKKIAEAGSRMDKLARAVADQLDSATSLIQAAKNLMNAVVLTVKASYVASTKYQKVYGTAAVNSPVVSWKMKAPEKKPLVKREKPEEFQTRVRRGSQKKHISPVQALSEFKAMDSF

SEQ ID NO: 12449 - protein, 537 aa, Homo sapiens
  Payload ID: 2440
  Gene Symbol: CTNNA2
  Gene Name: catenin (cadherin-associated protein), alpha 2
  Uniprot ID: P26232
  ENSP ID: ENSP00000444675
MTKKTRDLRRQLRKAVMDHISDSFLETNVPLLVLIEAAKSGNEKEVKEYAQVFREHANKLVEVANLACSISNNEEGVKLVRMAATQIDSLCPQVINAALTLAARPQSKVAQDNMDVFKDQWEKQVRVLTEAVDDITSVDDFLSVSENHILEDVNKCVIALQEGDVDTLDRTAGAIRGRAARVIHIINAEMENYEAGVYTEKVLEATKLLSETVMPRFAEQVEVAIEALSANVPQPFEENEFIDASRLVYDGVRDIRKAVLMIRTPEELEDDSDFEQEDYDVRSRTSVQTEDDQLIAGQSARAIMAQLPQEEKAKIAEQVEIFHQEKSKLDAEVAKWDDSGNDIIVLAKQMCMIMMEMTDFTRGKGPLKNTSDVINAAKKIAEAGSRMDKLARAVADQCPDSACKQDLLAYLQRIALYCHQLNICSKVKAEVQNLGGELIVSGLDSATSLIQAAKNLMNAVVLTVKASYVASTKYQKVYGTAAVNSPVVSWKMKAPEKKPLVKREKPEEFQTRVRRGSQKKHISPVQALSEFKAMDSF

SEQ ID NO: 12450 - protein, 860 aa, Homo sapiens
  Payload ID: 2440
  Gene Symbol: CTNNA2
  Gene Name: catenin (cadherin-associated protein), alpha 2
  Uniprot ID: P26232
  ENSP ID: ENSP00000486160
MTSATSPIILKWDPKSLEIRTLTVERLLEPLVTQVTTLVNTSNKGPSGKKKGRSKKAHVLAASVEQATQNFLEKGEQIAKESQDLKEELVAAVEDVRKQGETMRIASSEFADDPCSSVKRGTMVRAARALLSAVTRLLILADMADVMRLLSHLKIVEEALEAVKNATNEQDLANRFKEFGKEMVKLNYVAARRQQELKDPHCRDEMAAARGALKKNATMLYTASQAFLRHPDVAATRANRDYVFKQVQEAIAGISNAAQATSPTDEAKGHTGIGELAAALNEFDNKIILDPMTFSEARFRPSLEERLESIISGAALMADSSCTRDDRRERIVAECNAVRQALQDLLSEYMNNTGRKEKGDPLNIAIDKMTKKTRDLRRQLRKAVMDHISDSFLETNVPLLVLIEAAKSGNEKEVKEYAQVFREHANKLVEVANLACSISNNEEGVKLVRMAATQIDSLCPQVINAALTLAARPQSKVAQDNMDVFKDQWEKQVRVLTEAVDDITSVDDFLSVSENHILEDVNKCVIALQEGDVDTLDRTAGAIRGRAARVIHIINAEMENYEAGVYTEKVLEATKLLSETVMPRFAEQVEVAIEALSANVPQPFEENEFIDASRLVYDGVRDIRKAVLMIRTPEELEDDSDFEQEDYDVRSRTSVQTEDDQLIAGQSARAIMAQLPQEEKAKIAEQVEIFHQEKSKLDAEVAKWDDSGNDIIVLAKQMCMIMMEMTDFTRGKGPLKNTSDVINAAKKIAEAGSRMDKLARAVADQLDSATSLIQAAKNLMNAVVLTVKASYVASTKYQKVYGTAAVNSPVVSWKMKAPEKKPLVKREKPEEFQTRVRRGSQKKHISPVQALSEFKAMDSF

SEQ ID NO: 12451 - protein, 193 aa, Homo sapiens
  Payload ID: 2441
  Gene Symbol: CTNNA3
  Gene Name: catenin (cadherin-associated protein), alpha 3
  ENSP ID: ENSP00000330570
MSAETPITLNIDPQDLQVQTFTVEKLLEPLIIQVTTLVNCPQNPSSRKKGRSKRASVLLASVEEATWNLLDKGEKIAQEATVLKDELTASLEEVRKESEALKVSAERFTDDPCFLPKREAVVQAARALLAAVTRLLILADMIDVMCLLQHVSAFQRTFESLKNVANKSDLQKTYQKLGKELENLDYLAFKRQQ

SEQ ID NO: 12452 - protein, 895 aa, Homo sapiens
  Payload ID: 2441
  Gene Symbol: CTNNA3
  Gene Name: catenin (cadherin-associated protein), alpha 3
  Uniprot ID: Q9UI47
  ENSP ID: ENSP00000389714
MSAETPITLNIDPQDLQVQTFTVEKLLEPLIIQVTTLVNCPQNPSSRKKGRSKRASVLLASVEEATWNLLDKGEKIAQEATVLKDELTASLEEVRKESEALKVSAERFTDDPCFLPKREAVVQAARALLAAVTRLLILADMIDVMCLLQHVSAFQRTFESLKNVANKSDLQKTYQKLGKELENLDYLAFKRQQDLKSPNQRDEIAGARASLKENSPLLHSICSACLEHSDVASLKASKDTVCEEIQNALNVISNASQGIQNMTTPPEPQAATLGSALDELENLIVLNPLTVTEEEIRPSLEKRLEAIISGAALLADSSCTRDLHRERIIAECNAIRQALQDLLSEYMNNAGKKERSNTLNIALDNMCKKTRDLRRQLRKAIIDHVSDSFLDTTVPLLVLIEAAKNGREKEIKEYAAIFHEHTSRLVEVANLACSMSTNEDGIKIVKIAANHLETLCPQIINAALALAARPKSQAVKNTMEMYKRTWENHIHVLTEAVDDITSIDDFLAVSESHILEDVNKCIIALRDQDADNLDRAAGAIRGRAARVAHIVTGEMDSYEPGAYTEGVMRNVNFLTSTVIPEFVTQVNVALEALSKSSLNVLDDNQFVDISKKIYDTIHDIRCSVMMIRTPEELEDVSDLEEEHEVRSHTSIQTEGKTDRAKMTQLPEAEKEKIAEQVADFKKVKSKLDAEIEIWDDTSNDIIVLAKNMCMIMMEMTDFTRGKGPLKHTTDVIYAAKMISESGSRMDVLARQIANQCPDPSCKQDLLAYLEQIKFYSHQLKICSQVKAEIQNLGGELIMSALDSVTSLIQAAKNLMNAVVQTVKMSYIASTKIIRIQSPAGPRHPVVMWRMKAPAKKPLIKREKPEETCAAVRRGSAKKKIHPLQVMSEFRGRQIY

SEQ ID NO: 12453 - protein, 184 aa, Homo sapiens
  Payload ID: 2441
  Gene Symbol: CTNNA3
  Gene Name: catenin (cadherin-associated protein), alpha 3
  ENSP ID: ENSP00000441444
QDLKSPNQRDEIAGARASLKENSPLLHSICSACLEHSDVASLKASKDTVCEEIQNALNVISNASQGIQNMTTPPEPQAATLGSALDELENLIVLNPLTVTEEEIRPSLEKRLEAIISGAALLADSSCTRDLHRERIIAECNAIRQALQDLLSEYMNNLCNQKSDLGLTGVKIKLLEECIIFWSL

SEQ ID NO: 12454 - protein, 127 aa, Homo sapiens
  Payload ID: 2441
  Gene Symbol: CTNNA3
  Gene Name: catenin (cadherin-associated protein), alpha 3
  ENSP ID: ENSP00000477144
  MOD_RES (1)..(1): Any amino acid
XISGAALLADSSCTRDLHRERIIAECNAIRQALQDLLSEYMNNAGKKERSNTLNIALDNMCKKTRDLRRQLRKAIIDHVSDSFLDTTVPLLVLIEAAKNGREKEIKEYAAIFHEHTSRLVEVSMLEL

SEQ ID NO: 12455 - protein, 734 aa, Homo sapiens
  Payload ID: 2442
  Gene Symbol: CTNNAL1
  Gene Name: catenin (cadherin-associated protein), alpha-like 1
  Uniprot ID: Q9UBT7
  ENSP ID: ENSP00000320434
MAASPGPAGVGGAGAVYGSGSSGFALDSGLEIKTRSVEQTLLPLVSQITTLINHKDNTKKSDKTLQAIQRVGQAVNLAVGRFVKVGEAIANENWDLKEEINIACIEAKQAGETIAALTDITNLNHLESDGQITIFTDKTGVIKAARLLLSSVTKVLLLADRVVIKQIITSRNKVLATMERLEKVNSFQEFVQIFSQFGNEMVEFAHLSGDRQNDLKDEKKKAKMAAARAVLEKCTMMLLTASKTCLRHPNCESAHKNKEGVFDRMKVALDKVIEIVTDCKPNGETDISSISIFTGIKEFKMNIEALRENLYFQSKENLSVTLEVILERMEDFTDSAYTSHEHRERILELSTQARMELQQLISVWIQAQSKKTKSIAEELELSILKISHSLNELKKELHSTATQLAADLLKYHADHVVLKALKLTGVEGNLEALAEYACKLSEQKEQLVETCRLLRHISGTEPLEITCIHAEETFQVTGQQIISAAETLTLHPSSKIAKENLDVFCEAWESQISDMSTLLREINDVFEGRRGEKYGYLSLPKPMKNNANLKSLKPDKPDSEEQAKIAKLGLKLGLLTSDADCEIEKWEDQENEIVQYGRNMSSMAYSLYLFTRGEGPLKTSQDLIHQLEVFAAEGLKLTSSVQAFSKQLKDDDKLMLLLEINKLIPLCHQLQTVTKTSLQNKVFLKVDKCITKTRSMMALLVQLLSLCYKLLKKLQMENNGWVSVTNKDTMDSKT

SEQ ID NO: 12456 - protein, 183 aa, Homo sapiens
  Payload ID: 2442
  Gene Symbol: CTNNAL1
  Gene Name: catenin (cadherin-associated protein), alpha-like 1
  ENSP ID: ENSP00000363721
MAASPGPAGVGGAGAVYGSGSSGFALDSGLEIKTRSVEQTLLPLVSQITTLINHKDNTKKSDKTLQAIQRVGQAVNLAVGRFVKVGEAIANENWDLKEEINIACIEAKQAGETIAALTDITNLNHLESDGQITIFTDKTGVIKAARLLLSSVTKVLLLADRVVIKQIITSRNKRLTIYNLRHS

SEQ ID NO: 12457 - protein, 135 aa, Homo sapiens
  Payload ID: 2442
  Gene Symbol: CTNNAL1
  Gene Name: catenin (cadherin-associated protein), alpha-like 1
  ENSP ID: ENSP00000363722
MSSMAYSLYLFTRGEGPLKTSQDLIHQLEVFAAEGLKLTSSVQAFSKQLKDDDKLMLLLEINKLIPLCHQLQTVTKTSLQNKVFLKVDKCITKTRSMMALLVQLLSLCYKLLKKLQMENNGWVSVTNKDTMDSKT

SEQ ID NO: 12458 - protein, 718 aa, Homo sapiens
  Payload ID: 2442
  Gene Symbol: CTNNAL1
  Gene Name: catenin (cadherin-associated protein), alpha-like 1
  Uniprot ID: Q9UBT7
  ENSP ID: ENSP00000363723
MAASPGPAGVGGAGAVYGSGSSGFALDSGLEIKTRSVEQTLLPLVSQITTLINHKDNTKKSDKTLQAIQRVGQAVNLAVGRFVKVGEAIANENWDLKEEINIACIEAKQAGETIAALTDITNLNHLESDGQITIFTDKTGVIKAARLLLSSVTKVLLLADRVVIKQIITSRNKVLATMERLEKVNSFQEFVQIFSQFGNEMVEFAHLSGDRQNDLKDEKKKAKMAAARAVLEKCTMMLLTASKTCLRHPNCESAHKNKEGVFDRMKVALDKVIEIVTDCKPNGETDISSISIFTGIKEFKMNIEALRENLYFQSKENLSVTLEVILERMEDFTDSAYTSHEHRERILELSTQARMELQQLISVWIQAQSKKTKSIAEELELSILKISHSLNELKKELHSTATQLAADLLKYHADHVVLKALKLTGVEGNLEALAEYACKLSEQKEQLVETCRLLRHISGTEPLEITCIHAEETFQVTGQQIISAAETLTLHPSSKIAKENLDVFCEAWESQISDMSTLLREINDVFEGRRGEKYGYLSLPKPMKNNANLKSLKPDKPDSEEQAKIAKLGLKLGLLTSDADCEIEKWEDQENEIVQYGRNMSSMAYSLYLFTRGEGPLKTSQDLIHQLEVFAAEGLKLTSSVQAFSKQLKDDDKLMLLLEINKLIPLCHQLQTVTKTSLQNKVFLKVDKCITKTRSMMALLVQLLSLCYKLLKKSETRY

SEQ ID NO: 12459 - protein, 781 aa, Homo sapiens
  Payload ID: 2443
  Gene Symbol: CTNNB1
  Gene Name: catenin (cadherin-associated protein), beta 1, 88kDa
  Uniprot ID: P35222
  ENSP ID: ENSP00000344456
MATQADLMELDMAMEPDRKAAVSHWQQQSYLDSGIHSGATTTAPSLSGKGNPEEEDVDTSQVLYEWEQGFSQSFTQEQVADIDGQYAMTRAQRVRAAMFPETLDEGMQIPSTQFDAAHPTNVQRLAEPSQMLKHAVVNLINYQDDAELATRAIPELTKLLNDEDQVVVNKAAVMVHQLSKKEASRHAIMRSPQMVSAIVRTMQNTNDVETARCTAGTLHNLSHHREGLLAIFKSGGIPALVKMLGSPVDSVLFYAITTLHNLLLHQEGAKMAVRLAGGLQKMVALLNKTNVKFLAITTDCLQILAYGNQESKLIILASGGPQALVNIMRTYTYEKLLWTTSRVLKVLSVCSSNKPAIVEAGGMQALGLHLTDPSQRLVQNCLWTLRNLSDAATKQEGMEGLLGTLVQLLGSDDINVVTCAAGILSNLTCNNYKNKMMVCQVGGIEALVRTVLRAGDREDITEPAICALRHLTSRHQEAEMAQNAVRLHYGLPVVVKLLHPPSHWPLIKATVGLIRNLALCPANHAPLREQGAIPRLVQLLVRAHQDTQRRTSMGGTQQQFVEGVRMEEIVEGCTGALHILARDVHNRIVIRGLNTIPLFVQLLYSPIENIQRVAAGVLCELAQDKEAAEAIEAEGATAPLTELLHSRNEGVATYAAAVLFRMSEDKPQDYKKRLSVELTSSLFRTEPMAWNETADLGLDIGAQGEPLGYRQDDPSYRSFHSGGYGQDALGMDPMMEHEMGGHHPGADYPVDGLPDLGHAQDLMDGLPPGDSNQLAWFDTDL

SEQ ID NO: 12460 - protein, 781 aa, Homo sapiens; identical to SEQ ID NO: 12459
  Payload ID: 2443
  Gene Symbol: CTNNB1
  Gene Name: catenin (cadherin-associated protein), beta 1, 88kDa
  Uniprot ID: P35222
  ENSP ID: ENSP00000379486

SEQ ID NO: 12461 - protein, 781 aa, Homo sapiens; identical to SEQ ID NO: 12459
  Payload ID: 2443
  Gene Symbol: CTNNB1
  Gene Name: catenin (cadherin-associated protein), beta 1, 88kDa
  Uniprot ID: P35222
  ENSP ID: ENSP00000379488

SEQ ID NO: 12462 - protein, 781 aa, Homo sapiens; identical to SEQ ID NO: 12459
  Payload ID: 2443
  Gene Symbol: CTNNB1
  Gene Name: catenin (cadherin-associated protein), beta 1, 88kDa
  Uniprot ID: P35222
  ENSP ID: ENSP00000385604

SEQ ID NO: 12463 - protein, 13 aa, Homo sapiens
  Payload ID: 2443
  Gene Symbol: CTNNB1
  Gene Name: catenin (cadherin-associated protein), beta 1, 88kDa
  ENSP ID: ENSP00000387455
MATQADLMELDMA

SEQ ID NO: 12464 - protein, 59 aa, Homo sapiens
  Payload ID: 2443
  Gene Symbol: CTNNB1
  Gene Name: catenin (cadherin-associated protein), beta 1, 88kDa
  ENSP ID: ENSP00000400508
MELDMAMEPDRKAAVSHWQQQSYLDSGIHSGATTTAPSLSGKGNPEEEDVDTSQVLYEW

SEQ ID NO: 12465 - protein, 100 aa, Homo sapiens
  Payload ID: 2443
  Gene Symbol: CTNNB1
  Gene Name: catenin (cadherin-associated protein), beta 1, 88kDa
  ENSP ID: ENSP00000401599
MATQADLMELDMAMEPDRKAAVSHWQQQSYLDSGIHSGATTTAPSLSGKGNPEEEDVDTSQVLYEWEQGFSQSFTQEQVADIDGQYAMTRAQRVRAAMFP

SEQ ID NO: 12466 - protein, 108 aa, Homo sapiens
  Payload ID: 2443
  Gene Symbol: CTNNB1
  Gene Name: catenin (cadherin-associated protein), beta 1, 88kDa
  ENSP ID: ENSP00000409302
MATQADLMELDMAMEPDRKAAVSHWQQQSYLDSGIHSGATTTAPSLSGKGNPEEEDVDTSQVLYEWEQGFSQSFTQEQVADIDGQYAMTRAQRVRAAMFPETLDEGMQ

SEQ ID NO: 12467 - protein, 774 aa, Homo sapiens
  Payload ID: 2443
  Gene Symbol: CTNNB1
  Gene Name: catenin (cadherin-associated protein), beta 1, 88kDa
  ENSP ID: ENSP00000411226
MELDMAMEPDRKAAVSHWQQQSYLDSGIHSGATTTAPSLSGKGNPEEEDVDTSQVLYEWEQGFSQSFTQEQVADIDGQYAMTRAQRVRAAMFPETLDEGMQIPSTQFDAAHPTNVQRLAEPSQMLKHAVVNLINYQDDAELATRAIPELTKLLNDEDQVVVNKAAVMVHQLSKKEASRHAIMRSPQMVSAIVRTMQNTNDVETARCTAGTLHNLSHHREGLLAIFKSGGIPALVKMLGSPVDSVLFYAITTLHNLLLHQEGAKMAVRLAGGLQKMVALLNKTNVKFLAITTDCLQILAYGNQESKLIILASGGPQALVNIMRTYTYEKLLWTTSRVLKVLSVCSSNKPAIVEAGGMQALGLHLTDPSQRLVQNCLWTLRNLSDAATKQEGMEGLLGTLVQLLGSDDINVVTCAAGILSNLTCNNYKNKMMVCQVGGIEALVRTVLRAGDREDITEPAICALRHLTSRHQEAEMAQNAVRLHYGLPVVVKLLHPPSHWPLIKATVGLIRNLALCPANHAPLREQGAIPRLVQLLVRAHQDTQRRTSMGGTQQQFVEGVRMEEIVEGCTGALHILARDVHNRIVIRGLNTIPLFVQLLYSPIENIQRVAAGVLCELAQDKEAAEAIEAEGATAPLTELLHSRNEGVATYAAAVLFRMSEDKPQDYKKRLSVELTSSLFRTEPMAWNETADLGLDIGAQGEPLGYRQDDPSYRSFHSGGYGQDALGMDPMMEHEMGGHHPGADYPVDGLPDLGHAQDLMDGLPPGDSNQLAWFDTDL

SEQ ID NO: 12468 - protein, 149 aa, Homo sapiens
  Payload ID: 2443
  Gene Symbol: CTNNB1
  Gene Name: catenin (cadherin-associated protein), beta 1, 88kDa
  ENSP ID: ENSP00000412219
MATQADLMELDMAMEPDRKAAVSHWQQQSYLDSGIHSGATTTAPSLSGKGNPEEEDVDTSQVLYEWEQGFSQSFTQEQVADIDGQYAMTRAQRVRAAMFPETLDEGMQIPSTQFDAAHPTNVQRLAEPSQMLKHAVVNLINYQDDAELA

SEQ ID NO: 12469 - protein, 933 aa, Homo sapiens
  Payload ID: 2444
  Gene Symbol: CTNND1
  Gene Name: catenin (cadherin-associated protein), delta 1
  Uniprot ID: O60716
  ENSP ID: ENSP00000351527
MDDSEVESTASILASVKEQEAQFEKLTRALEEERRHVSAQLERVRVSPQDANPLMANGTLTRRHQNGRFVGDADLERQKFSDLKLNGPQDHSHLLYSTIPRMQEPGQIVETYTEEDPEGAMSVVSVETSDDGTTRRTETTVKKVVKTVTTRTVQPVAMGPDGLPVDASSVSNNYIQTLGRDFRKNGNGGPGPYVGQAGTATLPRNFHYPPDGYSRHYEDGYPGGSDNYGSLSRVTRIEERYRPSMEGYRAPSRQDVYGPQPQVRVGGSSVDLHRFHPEPYGLEDDQRSMGYDDLDYGMMSDYGTARRTGTPSDPRRRLRSYEDMIGEEVPSDQYYWAPLAQHERGSLASLDSLRKGGPPPPNWRQPELPEVIAMLGFRLDAVKSNAAAYLQHLCYRNDKVKTDVRKLKGIPVLVGLLDHPKKEVHLGACGALKNISFGRDQDNKIAIKNCDGVPALVRLLRKARDMDLTEVITGTLWNLSSHDSIKMEIVDHALHALTDEVIIPHSGWEREPNEDCKPRHIEWESVLTNTAGCLRNVSSERSEARRKLRECDGLVDALIFIVQAEIGQKDSDSKLVENCVCLLRNLSYQVHREIPQAERYQEAAPNVANNTGPHAASCFGAKKGKGKKPIEDPANDTVDFPKRTSPARGYELLFQPEVVRIYISLLKESKTPAILEASAGAIQNLCAGRWTYGRYIRSALRQEKALSAIADLLTNEHERVVKAASGALRNLAVDARNKELIGKHAIPNLVKNLPGGQQNSSWNFSEDTVISILNTINEVIAENLEAAKKLRETQGIEKLVLINKSGNRSEKEVRAAALVLQTIWGYKELRKPLEKEGWKKSDFQVNLNNASRSQSSHSYDDSTLPLIDRNQKSDKKPDREEIQMSNMGSNTKSLDNNYSTPNERGDHNRTLDRSGDLGDMEPLKGTTPLMQKI

SEQ ID NO: 12470 - protein, 941 aa, Homo sapiens
  Payload ID: 2444
  Gene Symbol: CTNND1
  Gene Name: catenin (cadherin-associated protein), delta 1
  Uniprot ID: O60716
  ENSP ID: ENSP00000354785
MDDSEVESTASILASVKEQEAQFEKLTRALEEERRHVSAQLERVRVSPQDANPLMANGTLTRRHQNGRFVGDADLERQKFSDLKLNGPQDHSHLLYSTIPRMQEPGQIVETYTEEDPEGAMSVVSVETSDDGTTRRTETTVKKVVKTVTTRTVQPVAMGPDGLPVDASSVSNNYIQTLGRDFRKNGNGGPGPYVGQAGTATLPRNFHYPPDGYSRHYEDGYPGGSDNYGSLSRVTRIEERYRPSMEGYRAPSRQDVYGPQPQVRVGGSSVDLHRFHPEPYGLEDDQRSMGYDDLDYGMMSDYGTARRTGTPSDPRRRLRSYEDMIGEEVPSDQYYWAPLAQHERGSLASLDSLRKGGPPPPNWRQPELPEVIAMLGFRLDAVKSNAAAYLQHLCYRNDKVKTDVRKLKGIPVLVGLLDHPKKEVHLGACGALKNISFGRDQDNKIAIKNCDGVPALVRLLRKARDMDLTEVITGTLWNLSSHDSIKMEIVDHALHALTDEVIIPHSGWEREPNEDCKPRHIEWESVLTNTAGCLRNVSSERSEARRKLRECDGLVDALIFIVQAEIGQKDSDSKLVENCVCLLRNLSYQVHREIPQAERYQEAAPNVANNTGPHAASCFGAKKGKGKKPIEDPANDTVDFPKRTSPARGYELLFQPEVVRIYISLLKESKTPAILEASAGAIQNLCAGRWTYGRYIRSALRQEKALSAIADLLTNEHERVVKAASGALRNLAVDARNKELIGKHAIPNLVKNLPGGQQNSSWNFSEDTVISILNTINEVIAENLEAAKKLRETQGIEKLVLINKSGNRSEKEVRAAALVLQTIWGYKELRKPLEKEGWKKSDFQVNLNNASRSQSSHSYDDSTLPLIDRNQKSDNNYSTPNERGDHNRTLDRSGDLGDMEPLKGTTPLMQDEGQESLEEELDVLVLDDEGGQVSYPSMQKI

SEQ ID NO: 12471 - protein, 962 aa, Homo sapiens
  Payload ID: 2444
  Gene Symbol: CTNND1
  Gene Name: catenin (cadherin-associated protein), delta 1
  Uniprot ID: O60716
  ENSP ID: ENSP00000354823
MDDSEVESTASILASVKEQEAQFEKLTRALEEERRHVSAQLERVRVSPQDANPLMANGTLTRRHQNGRFVGDADLERQKFSDLKLNGPQDHSHLLYSTIPRMQEPGQIVETYTEEDPEGAMSVVSVETSDDGTTRRTETTVKKVVKTVTTRTVQPVAMGPDGLPVDASSVSNNYIQTLGRDFRKNGNGGPGPYVGQAGTATLPRNFHYPPDGYSRHYEDGYPGGSDNYGSLSRVTRIEERYRPSMEGYRAPSRQDVYGPQPQVRVGGSSVDLHRFHPEPYGLEDDQRSMGYDDLDYGMMSDYGTARRTGTPSDPRRRLRSYEDMIGEEVPSDQYYWAPLAQHERGSLASLDSLRKGGPPPPNWRQPELPEVIAMLGFRLDAVKSNAAAYLQHLCYRNDKVKTDVRKLKGIPVLVGLLDHPKKEVHLGACGALKNISFGRDQDNKIAIKNCDGVPALVRLLRKARDMDLTEVITGTLWNLSSHDSIKMEIVDHALHALTDEVIIPHSGWEREPNEDCKPRHIEWESVLTNTAGCLRNVSSERSEARRKLRECDGLVDALIFIVQAEIGQKDSDSKLVENCVCLLRNLSYQVHREIPQAERYQEAAPNVANNTGPHAASCFGAKKGKGKKPIEDPANDTVDFPKRTSPARGYELLFQPEVVRIYISLLKESKTPAILEASAGAIQNLCAGRWTYGRYIRSALRQEKALSAIADLLTNEHERVVKAASGALRNLAVDARNKELIGKHAIPNLVKNLPGGQQNSSWNFSEDTVISILNTINEVIAENLEAAKKLRETQGIEKLVLINKSGNRSEKEVRAAALVLQTIWGYKELRKPLEKEGWKKSDFQVNLNNASRSQSSHSYDDSTLPLIDRNQKSDKKPDREEIQMSNMGSNTKSLDNNYSTPNERGDHNRTLDRSGDLGDMEPLKGTTPLMQDEGQESLEEELDVLVLDDEGGQVSYPSMQKI

SEQ ID NO: 12472 - protein, 939 aa, Homo sapiens
  Payload ID: 2444
  Gene Symbol: CTNND1
  Gene Name: catenin (cadherin-associated protein), delta 1
  Uniprot ID: O60716
  ENSP ID: ENSP00000354907
MDDSEVESTASILASVKEQEAQFEKLTRALEEERRHVSAQLERVRVSPQDANPLMANGTLTRRHQNGRFVGDADLERQKFSDLKLNGPQDHSHLLYSTIPRMQEPGQIVETYTEEDPEGAMSVVSVETSDDGTTRRTETTVKKVVKTVTTRTVQPVAMGPDGLPVDASSVSNNYIQTLGRDFRKNGNGGPGPYVGQAGTATLPRNFHYPPDGYSRHYEDGYPGGSDNYGSLSRVTRIEERYRPSMEGYRAPSRQDVYGPQPQVRVGGSSVDLHRFHPEPYGLEDDQRSMGYDDLDYGMMSDYGTARRTGTPSDPRRRLRSYEDMIGEEVPSDQYYWAPLAQHERGSLASLDSLRKGGPPPPNWRQPELPEVIAMLGFRLDAVKSNAAAYLQHLCYRNDKVKTDVRKLKGIPVLVGLLDHPKKEVHLGACGALKNISFGRDQDNKIAIKNCDGVPALVRLLRKARDMDLTEVITGTLWNLSSHDSIKMEIVDHALHALTDEVIIPHSGWEREPNEDCKPRHIEWESVLTNTAGCLRNVSSERSEARRKLRECDGLVDALIFIVQAEIGQKDSDSKLVENCVCLLRNLSYQVHREIPQAERYQEAAPNVANNTGPHAASCFGAKKGKDEWFSRGKKPIEDPANDTVDFPKRTSPARGYELLFQPEVVRIYISLLKESKTPAILEASAGAIQNLCAGRWTYGRYIRSALRQEKALSAIADLLTNEHERVVKAASGALRNLAVDARNKELIGKHAIPNLVKNLPGGQQNSSWNFSEDTVISILNTINEVIAENLEAAKKLRETQGIEKLVLINKSGNRSEKEVRAAALVLQTIWGYKELRKPLEKEGWKKSDFQVNLNNASRSQSSHSYDDSTLPLIDRNQKSDKKPDREEIQMSNMGSNTKSLDNNYSTPNERGDHNRTLDRSGDLGDMEPLKGTTPLMQKI

SEQ ID NO: 12473 - protein, 968 aa, Homo sapiens
  Payload ID: 2444
  Gene Symbol: CTNND1
  Gene Name: catenin (cadherin-associated protein), delta 1
  Uniprot ID: O60716
  ENSP ID: ENSP00000382004
MDDSEVESTASILASVKEQEAQFEKLTRALEEERRHVSAQLERVRVSPQDANPLMANGTLTRRHQNGRFVGDADLERQKFSDLKLNGPQDHSHLLYSTIPRMQEPGQIVETYTEEDPEGAMSVVSVETSDDGTTRRTETTVKKVVKTVTTRTVQPVAMGPDGLPVDASSVSNNYIQTLGRDFRKNGNGGPGPYVGQAGTATLPRNFHYPPDGYSRHYEDGYPGGSDNYGSLSRVTRIEERYRPSMEGYRAPSRQDVYGPQPQVRVGGSSVDLHRFHPEPYGLEDDQRSMGYDDLDYGMMSDYGTARRTGTPSDPRRRLRSYEDMIGEEVPSDQYYWAPLAQHERGSLASLDSLRKGGPPPPNWRQPELPEVIAMLGFRLDAVKSNAAAYLQHLCYRNDKVKTDVRKLKGIPVLVGLLDHPKKEVHLGACGALKNISFGRDQDNKIAIKNCDGVPALVRLLRKARDMDLTEVITGTLWNLSSHDSIKMEIVDHALHALTDEVIIPHSGWEREPNEDCKPRHIEWESVLTNTAGCLRNVSSERSEARRKLRECDGLVDALIFIVQAEIGQKDSDSKLVENCVCLLRNLSYQVHREIPQAERYQEAAPNVANNTGPHAASCFGAKKGKDEWFSRGKKPIEDPANDTVDFPKRTSPARGYELLFQPEVVRIYISLLKESKTPAILEASAGAIQNLCAGRWTYGRYIRSALRQEKALSAIADLLTNEHERVVKAASGALRNLAVDARNKELIGKHAIPNLVKNLPGGQQNSSWNFSEDTVISILNTINEVIAENLEAAKKLRETQGIEKLVLINKSGNRSEKEVRAAALVLQTIWGYKELRKPLEKEGWKKSDFQVNLNNASRSQSSHSYDDSTLPLIDRNQKSDKKPDREEIQMSNMGSNTKSLDNNYSTPNERGDHNRTLDRSGDLGDMEPLKGTTPLMQDEGQESLEEELDVLVLDDEGGQVSYPSMQKI

SEQ ID NO: 12474 - protein, 867 aa, Homo sapiens
  Payload ID: 2444
  Gene Symbol: CTNND1
  Gene Name: catenin (cadherin-associated protein), delta 1
  Uniprot ID: O60716
  ENSP ID: ENSP00000403518
MQEPGQIVETYTEEDPEGAMSVVSVETSDDGTTRRTETTVKKVVKTVTTRTVQPVAMGPDGLPVDASSVSNNYIQTLGRDFRKNGNGGPGPYVGQAGTATLPRNFHYPPDGYSRHYEDGYPGGSDNYGSLSRVTRIEERYRPSMEGYRAPSRQDVYGPQPQVRVGGSSVDLHRFHPEPYGLEDDQRSMGYDDLDYGMMSDYGTARRTGTPSDPRRRLRSYEDMIGEEVPSDQYYWAPLAQHERGSLASLDSLRKGGPPPPNWRQPELPEVIAMLGFRLDAVKSNAAAYLQHLCYRNDKVKTDVRKLKGIPVLVGLLDHPKKEVHLGACGALKNISFGRDQDNKIAIKNCDGVPALVRLLRKARDMDLTEVITGTLWNLSSHDSIKMEIVDHALHALTDEVIIPHSGWEREPNEDCKPRHIEWESVLTNTAGCLRNVSSERSEARRKLRECDGLVDALIFIVQAEIGQKDSDSKLVENCVCLLRNLSYQVHREIPQAERYQEAAPNVANNTGPHAASCFGAKKGKDEWFSRGKKPIEDPANDTVDFPKRTSPARGYELLFQPEVVRIYISLLKESKTPAILEASAGAIQNLCAGRWTYGRYIRSALRQEKALSAIADLLTNEHERVVKAASGALRNLAVDARNKELIGKHAIPNLVKNLPGGQQNSSWNFSEDTVISILNTINEVIAENLEAAKKLRETQGIEKLVLINKSGNRSEKEVRAAALVLQTIWGYKELRKPLEKEGWKKSDFQVNLNNASRSQSSHSYDDSTLPLIDRNQKSDKKPDREEIQMSNMGSNTKSLDNNYSTPNERGDHNRTLDRSGDLGDMEPLKGTTPLMQDEGQESLEEELDVLVLDDEGGQVSYPSMQKI

SEQ ID NO: 12475 - protein, 832 aa, Homo sapiens
  Payload ID: 2444
  Gene Symbol: CTNND1
  Gene Name: catenin (cadherin-associated protein), delta 1
  Uniprot ID: O60716
  ENSP ID: ENSP00000409930
MQEPGQIVETYTEEDPEGAMSVVSVETSDDGTTRRTETTVKKVVKTVTTRTVQPVAMGPDGLPVDASSVSNNYIQTLGRDFRKNGNGGPGPYVGQAGTATLPRNFHYPPDGYSRHYEDGYPGGSDNYGSLSRVTRIEERYRPSMEGYRAPSRQDVYGPQPQVRVGGSSVDLHRFHPEPYGLEDDQRSMGYDDLDYGMMSDYGTARRTGTPSDPRRRLRSYEDMIGEEVPSDQYYWAPLAQHERGSLASLDSLRKGGPPPPNWRQPELPEVIAMLGFRLDAVKSNAAAYLQHLCYRNDKVKTDVRKLKGIPVLVGLLDHPKKEVHLGACGALKNISFGRDQDNKIAIKNCDGVPALVRLLRKARDMDLTEVITGTLWNLSSHDSIKMEIVDHALHALTDEVIIPHSGWEREPNEDCKPRHIEWESVLTNTAGCLRNVSSERSEARRKLRECDGLVDALIFIVQAEIGQKDSDSKLVENCVCLLRNLSYQVHREIPQAERYQEAAPNVANNTGPHAASCFGAKKGKGKKPIEDPANDTVDFPKRTSPARGYELLFQPEVVRIYISLLKESKTPAILEASAGAIQNLCAGRWTYGRYIRSALRQEKALSAIADLLTNEHERVVKAASGALRNLAVDARNKELIGKHAIPNLVKNLPGGQQNSSWNFSEDTVISILNTINEVIAENLEAAKKLRETQGIEKLVLINKSGNRSEKEVRAAALVLQTIWGYKELRKPLEKEGWKKSDFQVNLNNASRSQSSHSYDDSTLPLIDRNQKSDKKPDREEIQMSNMGSNTKSLDNNYSTPNERGDHNRTLDRSGDLGDMEPLKGTTPLMQKI

SEQ ID NO: 12476 - protein, 933 aa, Homo sapiens; identical to SEQ ID NO: 12469
  Payload ID: 2444
  Gene Symbol: CTNND1
  Gene Name: catenin (cadherin-associated protein), delta 1
  Uniprot ID: O60716
  ENSP ID: ENSP00000413586

SEQ ID NO: 12477 - protein, 123 aa, Homo sapiens
  Payload ID: 2444
  Gene Symbol: CTNND1
  Gene Name: catenin (cadherin-associated protein), delta 1
  ENSP ID: ENSP00000431208
  MOD_RES (1)..(1): Any amino acid
XVLQTIWGYKELRKPLEKEGWKKSDFQVNLNNASRSQSSHSYDDSTLPLIDRNQKSDKKPDREEIQMSNMGSNTKSLDNNYSTPNERGDHNRTLDRSGDLGDMEPLKGTTPLMVNSLYILLSV

SEQ ID NO: 12478 - protein, 128 aa, Homo sapiens
  Payload ID: 2444
  Gene Symbol: CTNND1
  Gene Name: catenin (cadherin-associated protein), delta 1
  ENSP ID: ENSP00000431600
MANGTLTRRHQNGRFVGDADLERQKFSDLKLNGPQDHSHLLYSTIPRMQEPGQIVETYTEEDPEGAMSVVSVETSDDGTTRRTETTVKKVVKTVTTRTVQPVAMGPDGLPVDASSVSNNYIQTLGRDF

SEQ ID NO: 12479 - protein, 918 aa, Homo sapiens
  Payload ID: 2444
  Gene Symbol: CTNND1
  Gene Name: catenin (cadherin-associated protein), delta 1
  Uniprot ID: O60716
  ENSP ID: ENSP00000432041
MDDSEVESTASILASVKEQEAQFEKLTRALEEERRHVSAQLERVRVSPQDANPLMANGTLTRRHQNGRFVGDADLERQKFSDLKLNGPQDHSHLLYSTIPRMQEPGQIVETYTEEDPEGAMSVVSVETSDDGTTRRTETTVKKVVKTVTTRTVQPVAMGPDGLPVDASSVSNNYIQTLGRDFRKNGNGGPGPYVGQAGTATLPRNFHYPPDGYSRHYEDGYPGGSDNYGSLSRVTRIEERYRPSMEGYRAPSRQDVYGPQPQVRVGGSSVDLHRFHPEPYGLEDDQRSMGYDDLDYGMMSDYGTARRTGTPSDPRRRLRSYEDMIGEEVPSDQYYWAPLAQHERGSLASLDSLRKGGPPPPNWRQPELPEVIAMLGFRLDAVKSNAAAYLQHLCYRNDKVKTDVRKLKGIPVLVGLLDHPKKEVHLGACGALKNISFGRDQDNKIAIKNCDGVPALVRLLRKARDMDLTEVITGTLWNLSSHDSIKMEIVDHALHALTDEVIIPHSGWEREPNEDCKPRHIEWESVLTNTAGCLRNVSSERSEARRKLRECDGLVDALIFIVQAEIGQKDSDSKLVENCVCLLRNLSYQVHREIPQAERYQEAAPNVANNTGPHAASCFGAKKGKDEWFSRGKKPIEDPANDTVDFPKRTSPARGYELLFQPEVVRIYISLLKESKTPAILEASAGAIQNLCAGRWTYGRYIRSALRQEKALSAIADLLTNEHERVVKAASGALRNLAVDARNKELIGKHAIPNLVKNLPGGQQNSSWNFSEDTVISILNTINEVIAENLEAAKKLRETQGIEKLVLINKSGNRSEKEVRAAALVLQTIWGYKELRKPLEKEGWKKSDFQVNLNNASRSQSSHSYDDSTLPLIDRNQKSDNNYSTPNERGDHNRTLDRSGDLGDMEPLKGTTPLMQKI

SEQ ID NO: 12480 - protein, 832 aa, Homo sapiens; identical to SEQ ID NO: 12475
  Payload ID: 2444
  Gene Symbol: CTNND1
  Gene Name: catenin (cadherin-associated protein), delta 1
  Uniprot ID: O60716
  ENSP ID: ENSP00000432075

SEQ ID NO: 12481 - protein, 879 aa, Homo sapiens
  Payload ID: 2444
  Gene Symbol: CTNND1
  Gene Name: catenin (cadherin-associated protein), delta 1
  Uniprot ID: O60716
  ENSP ID: ENSP00000432243
MANGTLTRRHQNGRFVGDADLERQKFSDLKLNGPQDHSHLLYSTIPRMQEPGQIVETYTEEDPEGAMSVVSVETSDDGTTRRTETTVKKVVKTVTTRTVQPVAMGPDGLPVDASSVSNNYIQTLGRDFRKNGNGGPGPYVGQAGTATLPRNFHYPPDGYSRHYEDGYPGGSDNYGSLSRVTRIEERYRPSMEGYRAPSRQDVYGPQPQVRVGGSSVDLHRFHPEPYGLEDDQRSMGYDDLDYGMMSDYGTARRTGTPSDPRRRLRSYEDMIGEEVPSDQYYWAPLAQHERGSLASLDSLRKGGPPPPNWRQPELPEVIAMLGFRLDAVKSNAAAYLQHLCYRNDKVKTDVRKLKGIPVLVGLLDHPKKEVHLGACGALKNISFGRDQDNKIAIKNCDGVPALVRLLRKARDMDLTEVITGTLWNLSSHDSIKMEIVDHALHALTDEVIIPHSGWEREPNEDCKPRHIEWESVLTNTAGCLRNVSSERSEARRKLRECDGLVDALIFIVQAEIGQKDSDSKLVENCVCLLRNLSYQVHREIPQAERYQEAAPNVANNTGPHAASCFGAKKGKGKKPIEDPANDTVDFPKRTSPARGYELLFQPEVVRIYISLLKESKTPAILEASAGAIQNLCAGRWTYGRYIRSALRQEKALSAIADLLTNEHERVVKAASGALRNLAVDARNKELIGKHAIPNLVKNLPGGQQNSSWNFSEDTVISILNTINEVIAENLEAAKKLRETQGIEKLVLINKSGNRSEKEVRAAALVLQTIWGYKELRKPLEKEGWKKSDFQVNLNNASRSQSSHSYDDSTLPLIDRNQKSDKKPDREEIQMSNMGSNTKSLDNNYSTPNERGDHNRTLDRSGDLGDMEPLKGTTPLMQKI

SEQ ID NO: 12482 - protein, 4 aa, Homo sapiens
  Payload ID: 2444
  Gene Symbol: CTNND1
  Gene Name: catenin (cadherin-associated protein), delta 1
  ENSP ID: ENSP00000432299
MDDS

SEQ ID NO: 12483 - protein, 639 aa, Homo sapiens
  Payload ID: 2444
  Gene Symbol: CTNND1
  Gene Name: catenin (cadherin-associated protein), delta 1
  Uniprot ID: O60716
  ENSP ID: ENSP00000432623
MIGEEVPSDQYYWAPLAQHERGSLASLDSLRKGGPPPPNWRQPELPEVIAMLGFRLDAVKSNAAAYLQHLCYRNDKVKTDVRKLKGIPVLVGLLDHPKKEVHLGACGALKNISFGRDQDNKIAIKNCDGVPALVRLLRKARDMDLTEVITGTLWNLSSHDSIKMEIVDHALHALTDEVIIPHSGWEREPNEDCKPRHIEWESVLTNTAGCLRNVSSERSEARRKLRECDGLVDALIFIVQAEIGQKDSDSKLVENCVCLLRNLSYQVHREIPQAERYQEAAPNVANNTGPHAASCFGAKKGKGKKPIEDPANDTVDFPKRTSPARGYELLFQPEVVRIYISLLKESKTPAILEASAGAIQNLCAGRWTYGRYIRSALRQEKALSAIADLLTNEHERVVKAASGALRNLAVDARNKELIGKHAIPNLVKNLPGGQQNSSWNFSEDTVISILNTINEVIAENLEAAKKLRETQGIEKLVLINKSGNRSEKEVRAAALVLQTIWGYKELRKPLEKEGWKKSDFQVNLNNASRSQSSHSYDDSTLPLIDRNQKSDKKPDREEIQMSNMGSNTKSLDNNYSTPNERGDHNRTLDRSGDLGDMEPLKGTTPLMQDEGQESLEEELDVLVLDDEGGQVSYPSMQKI

SEQ ID NO: 12484 - protein, 610 aa, Homo sapiens
  Payload ID: 2444
  Gene Symbol: CTNND1
  Gene Name: catenin (cadherin-associated protein), delta 1
  Uniprot ID: O60716
  ENSP ID: ENSP00000433158
MIGEEVPSDQYYWAPLAQHERGSLASLDSLRKGGPPPPNWRQPELPEVIAMLGFRLDAVKSNAAAYLQHLCYRNDKVKTDVRKLKGIPVLVGLLDHPKKEVHLGACGALKNISFGRDQDNKIAIKNCDGVPALVRLLRKARDMDLTEVITGTLWNLSSHDSIKMEIVDHALHALTDEVIIPHSGWEREPNEDCKPRHIEWESVLTNTAGCLRNVSSERSEARRKLRECDGLVDALIFIVQAEIGQKDSDSKLVENCVCLLRNLSYQVHREIPQAERYQEAAPNVANNTGPHAASCFGAKKGKGKKPIEDPANDTVDFPKRTSPARGYELLFQPEVVRIYISLLKESKTPAILEASAGAIQNLCAGRWTYGRYIRSALRQEKALSAIADLLTNEHERVVKAASGALRNLAVDARNKELIGKHAIPNLVKNLPGGQQNSSWNFSEDTVISILNTINEVIAENLEAAKKLRETQGIEKLVLINKSGNRSEKEVRAAALVLQTIWGYKELRKPLEKEGWKKSDFQVNLNNASRSQSSHSYDDSTLPLIDRNQKSDKKPDREEIQMSNMGSNTKSLDNNYSTPNERGDHNRTLDRSGDLGDMEPLKGTTPLMQKI

SEQ ID NO: 12485 - protein, 914 aa, Homo sapiens
  Payload ID: 2444
  Gene Symbol: CTNND1
  Gene Name: catenin (cadherin-associated protein), delta 1
  Uniprot ID: O60716
  ENSP ID: ENSP00000433276
MANGTLTRRHQNGRFVGDADLERQKFSDLKLNGPQDHSHLLYSTIPRMQEPGQIVETYTEEDPEGAMSVVSVETSDDGTTRRTETTVKKVVKTVTTRTVQPVAMGPDGLPVDASSVSNNYIQTLGRDFRKNGNGGPGPYVGQAGTATLPRNFHYPPDGYSRHYEDGYPGGSDNYGSLSRVTRIEERYRPSMEGYRAPSRQDVYGPQPQVRVGGSSVDLHRFHPEPYGLEDDQRSMGYDDLDYGMMSDYGTARRTGTPSDPRRRLRSYEDMIGEEVPSDQYYWAPLAQHERGSLASLDSLRKGGPPPPNWRQPELPEVIAMLGFRLDAVKSNAAAYLQHLCYRNDKVKTDVRKLKGIPVLVGLLDHPKKEVHLGACGALKNISFGRDQDNKIAIKNCDGVPALVRLLRKARDMDLTEVITGTLWNLSSHDSIKMEIVDHALHALTDEVIIPHSGWEREPNEDCKPRHIEWESVLTNTAGCLRNVSSERSEARRKLRECDGLVDALIFIVQAEIGQKDSDSKLVENCVCLLRNLSYQVHREIPQAERYQEAAPNVANNTGPHAASCFGAKKGKDEWFSRGKKPIEDPANDTVDFPKRTSPARGYELLFQPEVVRIYISLLKESKTPAILEASAGAIQNLCAGRWTYGRYIRSALRQEKALSAIADLLTNEHERVVKAASGALRNLAVDARNKELIGKHAIPNLVKNLPGGQQNSSWNFSEDTVISILNTINEVIAENLEAAKKLRETQGIEKLVLINKSGNRSEKEVRAAALVLQTIWGYKELRKPLEKEGWKKSDFQVNLNNASRSQSSHSYDDSTLPLIDRNQKSDKKPDREEIQMSNMGSNTKSLDNNYSTPNERGDHNRTLDRSGDLGDMEPLKGTTPLMQDEGQESLEEELDVLVLDDEGGQVSYPSMQKI

SEQ ID NO: 12486 - protein, 908 aa, Homo sapiens
  Payload ID: 2444
  Gene Symbol: CTNND1
  Gene Name: catenin (cadherin-associated protein), delta 1
  Uniprot ID: O60716
  ENSP ID: ENSP00000433334
MANGTLTRRHQNGRFVGDADLERQKFSDLKLNGPQDHSHLLYSTIPRMQEPGQIVETYTEEDPEGAMSVVSVETSDDGTTRRTETTVKKVVKTVTTRTVQPVAMGPDGLPVDASSVSNNYIQTLGRDFRKNGNGGPGPYVGQAGTATLPRNFHYPPDGYSRHYEDGYPGGSDNYGSLSRVTRIEERYRPSMEGYRAPSRQDVYGPQPQVRVGGSSVDLHRFHPEPYGLEDDQRSMGYDDLDYGMMSDYGTARRTGTPSDPRRRLRSYEDMIGEEVPSDQYYWAPLAQHERGSLASLDSLRKGGPPPPNWRQPELPEVIAMLGFRLDAVKSNAAAYLQHLCYRNDKVKTDVRKLKGIPVLVGLLDHPKKEVHLGACGALKNISFGRDQDNKIAIKNCDGVPALVRLLRKARDMDLTEVITGTLWNLSSHDSIKMEIVDHALHALTDEVIIPHSGWEREPNEDCKPRHIEWESVLTNTAGCLRNVSSERSEARRKLRECDGLVDALIFIVQAEIGQKDSDSKLVENCVCLLRNLSYQVHREIPQAERYQEAAPNVANNTGPHAASCFGAKKGKGKKPIEDPANDTVDFPKRTSPARGYELLFQPEVVRIYISLLKESKTPAILEASAGAIQNLCAGRWTYGRYIRSALRQEKALSAIADLLTNEHERVVKAASGALRNLAVDARNKELIGKHAIPNLVKNLPGGQQNSSWNFSEDTVISILNTINEVIAENLEAAKKLRETQGIEKLVLINKSGNRSEKEVRAAALVLQTIWGYKELRKPLEKEGWKKSDFQVNLNNASRSQSSHSYDDSTLPLIDRNQKSDKKPDREEIQMSNMGSNTKSLDNNYSTPNERGDHNRTLDRSGDLGDMEPLKGTTPLMQDEGQESLEEELDVLVLDDEGGQVSYPSMQKI

SEQ ID NO: 12487 - protein, 832 aa, Homo sapiens; identical to SEQ ID NO: 12475
  Payload ID: 2444
  Gene Symbol: CTNND1
  Gene Name: catenin (cadherin-associated protein), delta 1
  Uniprot ID: O60716
  ENSP ID: ENSP00000434017

SEQ ID NO: 12488 - protein, 261 aa, Homo sapiens
  Payload ID: 2444
  Gene Symbol: CTNND1
  Gene Name: catenin (cadherin-associated protein), delta 1
  ENSP ID: ENSP00000434202
MANGTLTRRHQDHSHLLYSTIPRMQEPGQIVETYTEEDPEGAMSVVSVETSDDGTTRRTETTVKKVVKTVTTRTVQPVAMGPDGLPVDASSVSNNYIQTLGRDFRKNGNGGPGPYVGQAGTATLPRNFHYPPDGYSRHYEDGYPGGSDNYGSLSRVTRIEERYRPSMEGYRAPSRQDVYGPQPQVRVGGSSVDLHRFHPEPYGLEDDQRSMGYDDLDYGMMSDYGTARRTGTPSDPRRRLRSYEDMIGEEVPSDQYYWAPL

SEQ ID NO: 12489 - protein, 616 aa, Homo sapiens
  Payload ID: 2444
  Gene Symbol: CTNND1
  Gene Name: catenin (cadherin-associated protein), delta 1
  Uniprot ID: O60716
  ENSP ID: ENSP00000434672
MIGEEVPSDQYYWAPLAQHERGSLASLDSLRKGGPPPPNWRQPELPEVIAMLGFRLDAVKSNAAAYLQHLCYRNDKVKTDVRKLKGIPVLVGLLDHPKKEVHLGACGALKNISFGRDQDNKIAIKNCDGVPALVRLLRKARDMDLTEVITGTLWNLSSHDSIKMEIVDHALHALTDEVIIPHSGWEREPNEDCKPRHIEWESVLTNTAGCLRNVSSERSEARRKLRECDGLVDALIFIVQAEIGQKDSDSKLVENCVCLLRNLSYQVHREIPQAERYQEAAPNVANNTGPHAASCFGAKKGKDEWFSRGKKPIEDPANDTVDFPKRTSPARGYELLFQPEVVRIYISLLKESKTPAILEASAGAIQNLCAGRWTYGRYIRSALRQEKALSAIADLLTNEHERVVKAASGALRNLAVDARNKELIGKHAIPNLVKNLPGGQQNSSWNFSEDTVISILNTINEVIAENLEAAKKLRETQGIEKLVLINKSGNRSEKEVRAAALVLQTIWGYKELRKPLEKEGWKKSDFQVNLNNASRSQSSHSYDDSTLPLIDRNQKSDKKPDREEIQMSNMGSNTKSLDNNYSTPNERGDHNRTLDRSGDLGDMEPLKGTTPLMQKI

SEQ ID NO: 12490 - protein, 938 aa, Homo sapiens
  Payload ID: 2444
  Gene Symbol: CTNND1
  Gene Name: catenin (cadherin-associated protein), delta 1
  ENSP ID: ENSP00000434808
MDDSEVESTASILASVKEQEAQFEKLTRALEEERRHVSAQLERVRVSPQDANPLMANGTLTRRHQNGRFVGDADLERQKFSDLKLNGPQDHSHLLYSTIPRMQEPGQIVETYTEEDPEGAMSVVSVETSDDGTTRRTETTVKKVVKTVTTRTVQPVAMGPDGLPVDASSVSNNYIQTLGRDFRKNGNGGPGPYVGQAGTATLPRNFHYPPDGYSRHYEDGYPGGSDNYGSLSRVTRIEERYRPSMEGYRAPSRQDVYGPQPQVRVGGSSVDLHRFHPEPYGLEDDQRSMGYDDLDYGMMSDYGTARRTGTPSDPRRRLRSYEDMIGEEVPSDQYYWAPLAQHERGSLASLDSLRKGGPPPPNWRQPELPEVIAMLGFRLDAVKSNAAAYLQHLCYRNDKVKTDVRKLKGIPVLVGLLDHPKKEVHLGACGALKNISFGRDQDNKIAIKNCDGVPALVRLLRKARDMDLTEVITGTLWNLSSHDSIKMEIVDHALHALTDEVIIPHSGWEREPNEDCKPRHIEWESVLTNTAGCLRNVSSERSEARRKLRECDGLVDALIFIVQAEIGQKDSDSKLVENCVCLLRNLSYQVHREIPQAERYQEAAPNVANNTGPHAASCFGAKKGKDEWFSRGKKPIEDPANDTVDFPKRTSPARGYELLFQPEVVRIYISLLKESKTPAILEASAGAIQNLCAGRWTYGRYIRSALRQEKALSAIADLLTNEHERVVKAASGALRNLAVDARNKELIGKHAIPNLVKNLPGGQQNSSWNFSEDTVISILNTINEVIAENLEAAKKLRETQGIEKLVLINKSGNRSEKEVRAAALVLQTIWGYKELRKPLEKEGWKKSDFQVNLNNASRSQSSHSYDDSTLPLIDRNQKSDKKPDREEIQMSNMGSNTKSLDNNYSTPNERGDHNRTLDRSGDLGDMEPLKGTTPLMKI

SEQ ID NO: 12491 - protein, 645 aa, Homo sapiens
  Payload ID: 2444
  Gene Symbol: CTNND1
  Gene Name: catenin (cadherin-associated protein), delta 1
  Uniprot ID: O60716
  ENSP ID: ENSP00000434900
MIGEEVPSDQYYWAPLAQHERGSLASLDSLRKGGPPPPNWRQPELPEVIAMLGFRLDAVKSNAAAYLQHLCYRNDKVKTDVRKLKGIPVLVGLLDHPKKEVHLGACGALKNISFGRDQDNKIAIKNCDGVPALVRLLRKARDMDLTEVITGTLWNLSSHDSIKMEIVDHALHALTDEVIIPHSGWEREPNEDCKPRHIEWESVLTNTAGCLRNVSSERSEARRKLRECDGLVDALIFIVQAEIGQKDSDSKLVENCVCLLRNLSYQVHREIPQAERYQEAAPNVANNTGPHAASCFGAKKGKDEWFSRGKKPIEDPANDTVDFPKRTSPARGYELLFQPEVVRIYISLLKESKTPAILEASAGAIQNLCAGRWTYGRYIRSALRQEKALSAIADLLTNEHERVVKAASGALRNLAVDARNKELIGKHAIPNLVKNLPGGQQNSSWNFSEDTVISILNTINEVIAENLEAAKKLRETQGIEKLVLINKSGNRSEKEVRAAALVLQTIWGYKELRKPLEKEGWKKSDFQVNLNNASRSQSSHSYDDSTLPLIDRNQKSDKKPDREEIQMSNMGSNTKSLDNNYSTPNERGDHNRTLDRSGDLGDMEPLKGTTPLMQDEGQESLEEELDVLVLDDEGGQVSYPSMQKI

SEQ ID NO: 12492 - protein, 840 aa, Homo sapiens
  Payload ID: 2444
  Gene Symbol: CTNND1
  Gene Name: catenin (cadherin-associated protein), delta 1
  Uniprot ID: O60716
  ENSP ID: ENSP00000434949
MQEPGQIVETYTEEDPEGAMSVVSVETSDDGTTRRTETTVKKVVKTVTTRTVQPVAMGPDGLPVDASSVSNNYIQTLGRDFRKNGNGGPGPYVGQAGTATLPRNFHYPPDGYSRHYEDGYPGGSDNYGSLSRVTRIEERYRPSMEGYRAPSRQDVYGPQPQVRVGGSSVDLHRFHPEPYGLEDDQRSMGYDDLDYGMMSDYGTARRTGTPSDPRRRLRSYEDMIGEEVPSDQYYWAPLAQHERGSLASLDSLRKGGPPPPNWRQPELPEVIAMLGFRLDAVKSNAAAYLQHLCYRNDKVKTDVRKLKGIPVLVGLLDHPKKEVHLGACGALKNISFGRDQDNKIAIKNCDGVPALVRLLRKARDMDLTEVITGTLWNLSSHDSIKMEIVDHALHALTDEVIIPHSGWEREPNEDCKPRHIEWESVLTNTAGCLRNVSSERSEARRKLRECDGLVDALIFIVQAEIGQKDSDSKLVENCVCLLRNLSYQVHREIPQAERYQEAAPNVANNTGPHAASCFGAKKGKGKKPIEDPANDTVDFPKRTSPARGYELLFQPEVVRIYISLLKESKTPAILEASAGAIQNLCAGRWTYGRYIRSALRQEKALSAIADLLTNEHERVVKAASGALRNLAVDARNKELIGKHAIPNLVKNLPGGQQNSSWNFSEDTVISILNTINEVIAENLEAAKKLRETQGIEKLVLINKSGNRSEKEVRAAALVLQTIWGYKELRKPLEKEGWKKSDFQVNLNNASRSQSSHSYDDSTLPLIDRNQKSDNNYSTPNERGDHNRTLDRSGDLGDMEPLKGTTPLMQDEGQESLEEELDVLVLDDEGGQVSYPSMQKI

SEQ ID NO: 12493 - protein, 126 aa, Homo sapiens
  Payload ID: 2444
  Gene Symbol: CTNND1
  Gene Name: catenin (cadherin-associated protein), delta 1
  ENSP ID: ENSP00000435242
MIGEEVPSDQYYWAPLAQHERGSLASLDSLRKGGPPPPNWRQPELPEVIAMLGFRLDAVKSNAAAYLQHLCYRNDKVKTDVRKLKGIPVLVGLLDHPKKEVHLGACGALKNISFGRDQDNKIAIKN

SEQ ID NO: 12494 - protein, 838 aa, Homo sapiens
  Payload ID: 2444
  Gene Symbol: CTNND1
  Gene Name: catenin (cadherin-associated protein), delta 1
  Uniprot ID: O60716
  ENSP ID: ENSP00000435266
MQEPGQIVETYTEEDPEGAMSVVSVETSDDGTTRRTETTVKKVVKTVTTRTVQPVAMGPDGLPVDASSVSNNYIQTLGRDFRKNGNGGPGPYVGQAGTATLPRNFHYPPDGYSRHYEDGYPGGSDNYGSLSRVTRIEERYRPSMEGYRAPSRQDVYGPQPQVRVGGSSVDLHRFHPEPYGLEDDQRSMGYDDLDYGMMSDYGTARRTGTPSDPRRRLRSYEDMIGEEVPSDQYYWAPLAQHERGSLASLDSLRKGGPPPPNWRQPELPEVIAMLGFRLDAVKSNAAAYLQHLCYRNDKVKTDVRKLKGIPVLVGLLDHPKKEVHLGACGALKNISFGRDQDNKIAIKNCDGVPALVRLLRKARDMDLTEVITGTLWNLSSHDSIKMEIVDHALHALTDEVIIPHSGWEREPNEDCKPRHIEWESVLTNTAGCLRNVSSERSEARRKLRECDGLVDALIFIVQAEIGQKDSDSKLVENCVCLLRNLSYQVHREIPQAERYQEAAPNVANNTGPHAASCFGAKKGKDEWFSRGKKPIEDPANDTVDFPKRTSPARGYELLFQPEVVRIYISLLKESKTPAILEASAGAIQNLCAGRWTYGRYIRSALRQEKALSAIADLLTNEHERVVKAASGALRNLAVDARNKELIGKHAIPNLVKNLPGGQQNSSWNFSEDTVISILNTINEVIAENLEAAKKLRETQGIEKLVLINKSGNRSEKEVRAAALVLQTIWGYKELRKPLEKEGWKKSDFQVNLNNASRSQSSHSYDDSTLPLIDRNQKSDKKPDREEIQMSNMGSNTKSLDNNYSTPNERGDHNRTLDRSGDLGDMEPLKGTTPLMQKI

SEQ ID NO: 12495 - protein, 879 aa, Homo sapiens; identical to SEQ ID NO: 12481
  Payload ID: 2444
  Gene Symbol: CTNND1
  Gene Name: catenin (cadherin-associated protein), delta 1
  Uniprot ID: O60716
  ENSP ID: ENSP00000435379

SEQ ID NO: 12496 - protein, 887 aa, Homo sapiens
  Payload ID: 2444
  Gene Symbol: CTNND1
  Gene Name: catenin (cadherin-associated protein), delta 1
  Uniprot ID: O60716
  ENSP ID: ENSP00000435494
MANGTLTRRHQNGRFVGDADLERQKFSDLKLNGPQDHSHLLYSTIPRMQEPGQIVETYTEEDPEGAMSVVSVETSDDGTTRRTETTVKKVVKTVTTRTVQPVAMGPDGLPVDASSVSNNYIQTLGRDFRKNGNGGPGPYVGQAGTATLPRNFHYPPDGYSRHYEDGYPGGSDNYGSLSRVTRIEERYRPSMEGYRAPSRQDVYGPQPQVRVGGSSVDLHRFHPEPYGLEDDQRSMGYDDLDYGMMSDYGTARRTGTPSDPRRRLRSYEDMIGEEVPSDQYYWAPLAQHERGSLASLDSLRKGGPPPPNWRQPELPEVIAMLGFRLDAVKSNAAAYLQHLCYRNDKVKTDVRKLKGIPVLVGLLDHPKKEVHLGACGALKNISFGRDQDNKIAIKNCDGVPALVRLLRKARDMDLTEVITGTLWNLSSHDSIKMEIVDHALHALTDEVIIPHSGWEREPNEDCKPRHIEWESVLTNTAGCLRNVSSERSEARRKLRECDGLVDALIFIVQAEIGQKDSDSKLVENCVCLLRNLSYQVHREIPQAERYQEAAPNVANNTGPHAASCFGAKKGKGKKPIEDPANDTVDFPKRTSPARGYELLFQPEVVRIYISLLKESKTPAILEASAGAIQNLCAGRWTYGRYIRSALRQEKALSAIADLLTNEHERVVKAASGALRNLAVDARNKELIGKHAIPNLVKNLPGGQQNSSWNFSEDTVISILNTINEVIAENLEAAKKLRETQGIEKLVLINKSGNRSEKEVRAAALVLQTIWGYKELRKPLEKEGWKKSDFQVNLNNASRSQSSHSYDDSTLPLIDRNQKSDNNYSTPNERGDHNRTLDRSGDLGDMEPLKGTTPLMQDEGQESLEEELDVLVLDDEGGQVSYPSMQKI

SEQ ID NO: 12497 - protein, 879 aa, Homo sapiens; identical to SEQ ID NO: 12481
  Payload ID: 2444
  Gene Symbol: CTNND1
  Gene Name: catenin (cadherin-associated protein), delta 1
  Uniprot ID: O60716
  ENSP ID: ENSP00000435789

SEQ ID NO: 12498 - protein, 879 aa, Homo sapiens; identical to SEQ ID NO: 12481
  Payload ID: 2444
  Gene Symbol: CTNND1
  Gene Name: catenin (cadherin-associated protein), delta 1
  Uniprot ID: O60716
  ENSP ID: ENSP00000436323

SEQ ID NO: 12499 - protein, 933 aa, Homo sapiens; identical to SEQ ID NO: 12469
  Payload ID: 2444
  Gene Symbol: CTNND1
  Gene Name: catenin (cadherin-associated protein), delta 1
  Uniprot ID: O60716
  ENSP ID: ENSP00000436543

SEQ ID NO: 12500 - protein, 885 aa, Homo sapiens
  Payload ID: 2444
  Gene Symbol: CTNND1
  Gene Name: catenin (cadherin-associated protein), delta 1
  Uniprot ID: O60716
  ENSP ID: ENSP00000436744
MANGTLTRRHQNGRFVGDADLERQKFSDLKLNGPQDHSHLLYSTIPRMQEPGQIVETYTEEDPEGAMSVVSVETSDDGTTRRTETTVKKVVKTVTTRTVQPVAMGPDGLPVDASSVSNNYIQTLGRDFRKNGNGGPGPYVGQAGTATLPRNFHYPPDGYSRHYEDGYPGGSDNYGSLSRVTRIEERYRPSMEGYRAPSRQDVYGPQPQVRVGGSSVDLHRFHPEPYGLEDDQRSMGYDDLDYGMMSDYGTARRTGTPSDPRRRLRSYEDMIGEEVPSDQYYWAPLAQHERGSLASLDSLRKGGPPPPNWRQPELPEVIAMLGFRLDAVKSNAAAYLQHLCYRNDKVKTDVRKLKGIPVLVGLLDHPKKEVHLGACGALKNISFGRDQDNKIAIKNCDGVPALVRLLRKARDMDLTEVITGTLWNLSSHDSIKMEIVDHALHALTDEVIIPHSGWEREPNEDCKPRHIEWESVLTNTAGCLRNVSSERSEARRKLRECDGLVDALIFIVQAEIGQKDSDSKLVENCVCLLRNLSYQVHREIPQAERYQEAAPNVANNTGPHAASCFGAKKGKDEWFSRGKKPIEDPANDTVDFPKRTSPARGYELLFQPEVVRIYISLLKESKTPAILEASAGAIQNLCAGRWTYGRYIRSALRQEKALSAIADLLTNEHERVVKAASGALRNLAVDARNKELIGKHAIPNLVKNLPGGQQNSSWNFSEDTVISILNTINEVIAENLEAAKKLRETQGIEKLVLINKSGNRSEKEVRAAALVLQTIWGYKELRKPLEKEGWKKSDFQVNLNNASRSQSSHSYDDSTLPLIDRNQKSDKKPDREEIQMSNMGSNTKSLDNNYSTPNERGDHNRTLDRSGDLGDMEPLKGTTPLMQKI

SEQ ID NO: 12501 - protein, 618 aa, Homo sapiens
  Payload ID: 2444
  Gene Symbol: CTNND1
  Gene Name: catenin (cadherin-associated protein), delta 1
  Uniprot ID: O60716
  ENSP ID: ENSP00000437051
MIGEEVPSDQYYWAPLAQHERGSLASLDSLRKGGPPPPNWRQPELPEVIAMLGFRLDAVKSNAAAYLQHLCYRNDKVKTDVRKLKGIPVLVGLLDHPKKEVHLGACGALKNISFGRDQDNKIAIKNCDGVPALVRLLRKARDMDLTEVITGTLWNLSSHDSIKMEIVDHALHALTDEVIIPHSGWEREPNEDCKPRHIEWESVLTNTAGCLRNVSSERSEARRKLRECDGLVDALIFIVQAEIGQKDSDSKLVENCVCLLRNLSYQVHREIPQAERYQEAAPNVANNTGPHAASCFGAKKGKGKKPIEDPANDTVDFPKRTSPARGYELLFQPEVVRIYISLLKESKTPAILEASAGAIQNLCAGRWTYGRYIRSALRQEKALSAIADLLTNEHERVVKAASGALRNLAVDARNKELIGKHAIPNLVKNLPGGQQNSSWNFSEDTVISILNTINEVIAENLEAAKKLRETQGIEKLVLINKSGNRSEKEVRAAALVLQTIWGYKELRKPLEKEGWKKSDFQVNLNNASRSQSSHSYDDSTLPLIDRNQKSDNNYSTPNERGDHNRTLDRSGDLGDMEPLKGTTPLMQDEGQESLEEELDVLVLDDEGGQVSYPSMQKI

SEQ ID NO: 12502 - protein, 832 aa, Homo sapiens; identical to SEQ ID NO: 12475
  Payload ID: 2444
  Gene Symbol: CTNND1
  Gene Name: catenin (cadherin-associated protein), delta 1
  Uniprot ID: O60716
  ENSP ID: ENSP00000437156

SEQ ID NO: 12503 - protein, 861 aa, Homo sapiens
  Payload ID: 2444
  Gene Symbol: CTNND1
  Gene Name: catenin (cadherin-associated protein), delta 1
  Uniprot ID: O60716
  ENSP ID: ENSP00000437327
MQEPGQIVETYTEEDPEGAMSVVSVETSDDGTTRRTETTVKKVVKTVTTRTVQPVAMGPDGLPVDASSVSNNYIQTLGRDFRKNGNGGPGPYVGQAGTATLPRNFHYPPDGYSRHYEDGYPGGSDNYGSLSRVTRIEERYRPSMEGYRAPSRQDVYGPQPQVRVGGSSVDLHRFHPEPYGLEDDQRSMGYDDLDYGMMSDYGTARRTGTPSDPRRRLRSYEDMIGEEVPSDQYYWAPLAQHERGSLASLDSLRKGGPPPPNWRQPELPEVIAMLGFRLDAVKSNAAAYLQHLCYRNDKVKTDVRKLKGIPVLVGLLDHPKKEVHLGACGALKNISFGRDQDNKIAIKNCDGVPALVRLLRKARDMDLTEVITGTLWNLSSHDSIKMEIVDHALHALTDEVIIPHSGWEREPNEDCKPRHIEWESVLTNTAGCLRNVSSERSEARRKLRECDGLVDALIFIVQAEIGQKDSDSKLVENCVCLLRNLSYQVHREIPQAERYQEAAPNVANNTGPHAASCFGAKKGKGKKPIEDPANDTVDFPKRTSPARGYELLFQPEVVRIYISLLKESKTPAILEASAGAIQNLCAGRWTYGRYIRSALRQEKALSAIADLLTNEHERVVKAASGALRNLAVDARNKELIGKHAIPNLVKNLPGGQQNSSWNFSEDTVISILNTINEVIAENLEAAKKLRETQGIEKLVLINKSGNRSEKEVRAAALVLQTIWGYKELRKPLEKEGWKKSDFQVNLNNASRSQSSHSYDDSTLPLIDRNQKSDKKPDREEIQMSNMGSNTKSLDNNYSTPNERGDHNRTLDRSGDLGDMEPLKGTTPLMQDEGQESLEEELDVLVLDDEGGQVSYPSMQKI

SEQ ID NO: 12504 - protein, 1225 aa, Homo sapiens
  Payload ID: 2445
  Gene Symbol: CTNND2
  Gene Name: catenin (cadherin-associated protein), delta 2
  Uniprot ID: Q9UQB3
  ENSP ID: ENSP00000307134
MFARKPPGAAPLGAMPVPDQPSSASEKTSSLSPGLNTSNGDGSETETTSAILASVKEQELQFERLTRELEAERQIVASQLERCKLGSETGSMSSMSSAEEQFQWQSQDGQKDIEDELTTGLELVDSCIRSLQESGILDPQDYSTGERPSLLSQSALQLNSKPEGSFQYPASYHSNQTLALGETTPSQLPARGTQARATGQSFSQGTTSRAGHLAGPEPAPPPPPPPREPFAPSLGSAFHLPDAPPAAAAAALYYSSSTLPAPPRGGSPLAAPQGGSPTKLQRGGSAPEGATYAAPRGSSPKQSPSRLAKSYSTSSPINIVVSSAGLSPIRVTSPPTVQSTISSSPIHQLSSTIGTYATLSPTKRLVHASEQYSKHSQELYATATLQRPGSLAAGSRASYSSQHGHLGPELRALQSPEHHIDPIYEDRVYQKPPMRSLSQSQGDPLPPAHTGTYRTSTAPSSPGVDSVPLQRTGSQHGPQNAAAATFQRASYAAGPASNYADPYRQLQYCPSVESPYSKSGPALPPEGTLARSPSIDSIQKDPREFGWRDPELPEVIQMLQHQFPSVQSNAAAYLQHLCFGDNKIKAEIRRQGGIQLLVDLLDHRMTEVHRSACGALRNLVYGKANDDNKIALKNCGGIPALVRLLRKTTDLEIRELVTGVLWNLSSCDALKMPIIQDALAVLTNAVIIPHSGWENSPLQDDRKIQLHSSQVLRNATGCLRNVSSAGEEARRRMRECDGLTDALLYVIQSALGSSEIDSKTVENCVCILRNLSYRLAAETSQGQHMGTDELDGLLCGEANGKDAESSGCWGKKKKKKKSQDQWDGVGPLPDCAEPPKGIQMLWHPSIVKPYLTLLSECSNPDTLEGAAGALQNLAAGSWKWSVYIRAAVRKEKGLPILVELLRIDNDRVVCAVATALRNMALDVRNKELIGKYAMRDLVHRLPGGNNSNNTASKAMSDDTVTAVCCTLHEVITKNMENAKALRDAGGIEKLVGISKSKGDKHSPKVVKAASQVLNSMWQYRDLRSLYKKDGWSQYHFVASSSTIERDRQRPYSSSRTPSISPVRVSPNNRSASAPASPREMISLKERKTDYECTGSNATYHGAKGEHTSRKDAMTAQNTGISTLYRNSYGAPAEDIKHNQVSAQPVPQEPSRKDYETYQPFQNSTRNYDESFFEDQVHHRPPASEYTMHLGLKSTGNYVDFYSAARPYSELNYETSHYPASPDSWV

SEQ ID NO: 12505 - protein, 320 aa, Homo sapiens [sequence omitted]

SEQ ID NO: 12506 - protein, 231 aa, Homo sapiens
  Payload ID: 2445
  Gene Symbol: CTNND2
  Gene Name: catenin (cadherin-associated protein), delta 2
  ENSP ID: ENSP00000421000
MFARKPPGAAPLGAMPVPDQPSSASEKTSSLSPGLNTSNGDGSETETTSAILASVKEQELQFERLTRELEAERQIVASQLERCKLGSETGSMSSMSSAEEQFQWQSQDGQKDIEDELTTGLELVDSCIRSLQESGILDPQDYSTGERPSLLSQSALQLNSKPEGSFQYPASYHSNQTLALGETTPSQLPARGTQARATGQSFSQLVPEPHTAASMGTWAQSCGPCSPQNTT

SEQ ID NO: 12507 - protein, 912 aa, Homo sapiens
  Payload ID: 2445
  Gene Symbol: CTNND2
  Gene Name: catenin (cadherin-associated protein), delta 2
  ENSP ID: ENSP00000421093
MFARKPPGAAPLGAMPVPDQPSSASEKTSSLSPGLNTSNGDGSETETTSAILASVKEQELQFERLTRELEAERQIVASQLERCKLGSETGSMSSMSSAEEQFQWQSQDGQKDIEDELTTGLELVDSCIRSLQESGILDPQDYSTGETGSRASYSSQHGHLGPELRALQSPEHHIDPIYEDRVYQKPPMRSLSQSQGDPLPPAHTGTYRTSTAPSSPGVDSVPLQRTGSQHGPQNAAAATFQRASYAAGPASNYADPYRQLQYCPSVESPYSKSGPALPPEGTLARSPSIDSIQKDPREFGWRDPELPEVIQMLQHQFPSVQSNAAAYLQHLCFGDNKIKAEIRRQGGIQLLVDLLDHRMTEVHRSACGALRNLVYGKANDDNKIALKNCGGIPALVRLLRKTTDLEIRELVTGVLWNLSSCDALKMPIIQDALAVLTNAVIIPHSGWENSPLQDDRKIQLHSSQVLRNATGCLRNVSSAGEEARRRMRECDGLTDALLYVIQSALGSSEIDSKTVENCVCILRNLSYRLAAETSQGQHMGTDELDGLLCGEANGKDAESSGCWGKKKKKKKSQDQWDGVGPLPDCAEPPKGIQMLWHPSIVKPYLTLLSECSNPDTLEGAAGALQNLAAGSWKGWAEDVAGMAYALRSLPEGAPCLPQWSVYIRAAVRKEKGLPILVELLRIDNDRVVCAVATALRNMALDVRNKELIGKYAMRDLVHRLPGGNNSNNTASKAMSDDTVTAVCCTLHEVITKNMENAKALRDAGGIEKLVGISKSKGDKHSPKVVKAASQVLNSMWQYRDLRSLYKKDGWSQYHFVASSSTIERDRQRPYSSSRTPSISPVRVSPNNRSASAPASPREMISLKERKTDYECTGSNATYHGAKGEHTSRKDAMTGAHSASMCRPYKGTPQRCS

SEQ ID NO: 12508 - protein, 209 aa, Homo sapiens
  Payload ID: 2445
  Gene Symbol: CTNND2
  Gene Name: catenin (cadherin-associated protein), delta 2
  ENSP ID: ENSP00000422389
MPVPDQPSSASEKTSSLSPGLNTSNGDGSETETTSAILASVKEQELQFERLTRELEAERQIVASQLERCKLGSETGSMSSMSSAEEQFQWQSQDGQKDIEDELTTGLELVDSCIRSLQESGILDPQDYSTGETGSRASYSSQHGHLGPELRALQSPEHHIDPIYEDRVYQKPPMRSLSQSQGDPLPPAHTGTYRTSTAPSSPGVDSVPL

SEQ ID NO: 12509 - protein, 169 aa, Homo sapiens
  Payload ID: 2445
  Gene Symbol: CTNND2
  Gene Name: catenin (cadherin-associated protein), delta 2
  ENSP ID: ENSP00000424296
MPVPDQPSSASEKTSSLSPGLNTSNGDGSETETTSAILASVKEQELQFERLTRELEAERQIVASQLERCKLGSETGSMSSMSSAEEQFQWQSQDGQKDIEDELTTGLELVDSCIRSLQESGILDPQDYSTGERPSLLSQSALQLNSKPEGSFQYPASYHSNQTLALGET

SEQ ID NO: 12510 - protein, 1134 aa, Homo sapiens
  Payload ID: 2445
  Gene Symbol: CTNND2
  Gene Name: catenin (cadherin-associated protein), delta 2
  ENSP ID: ENSP00000426510
MSSMSSAEEQFQWQSQDGQKDIEDELTTGLELVDSCIRSLQESGILDPQDYSTGERPSLLSQSALQLNSKPEGSFQYPASYHSNQTLALGETTPSQLPARGTQARATGQSFSQGTTSRAGHLAGPEPAPPPPPPPREPFAPSLGSAFHLPDAPPAAAAAALYYSSSTLPAPPRGGSPLAAPQGGSPTKLQRGGSAPEGATYAAPRGSSPKQSPSRLAKSYSTSSPINIVVSSAGLSPIRVTSPPTVQSTISSSPIHQLSSTIGTYATLSPTKRLVHASEQYSKHSQELYATATLQRPGSLAAGSRASYSSQHGHLGPELRALQSPEHHIDPIYEDRVYQKPPMRSLSQSQGDPLPPAHTGTYRTSTAPSSPGVDSVPLQRTGSQHGPQNAAAATFQRASYAAGPASNYADPYRQLQYCPSVESPYSKSGPALPPEGTLARSPSIDSIQKDPREFGWRDPELPEVIQMLQHQFPSVQSNAAAYLQHLCFGDNKIKAEIRRQGGIQLLVDLLDHRMTEVHRSACGALRNLVYGKANDDNKIALKNCGGIPALVRLLRKTTDLEIRELVTGVLWNLSSCDALKMPIIQDALAVLTNAVIIPHSGWENSPLQDDRKIQLHSSQVLRNATGCLRNVSSAGEEARRRMRECDGLTDALLYVIQSALGSSEIDSKTVENCVCILRNLSYRLAAETSQGQHMGTDELDGLLCGEANGKDAESSGCWGKKKKKKKSQDQWDGVGPLPDCAEPPKGIQMLWHPSIVKPYLTLLSECSNPDTLEGAAGALQNLAAGSWKWSVYIRAAVRKEKGLPILVELLRIDNDRVVCAVATALRNMALDVRNKELIGKYAMRDLVHRLPGGNNSNNTASKAMSDDTVTAVCCTLHEVITKNMENAKALRDAGGIEKLVGISKSKGDKHSPKVVKAASQVLNSMWQYRDLRSLYKKDGWSQYHFVASSSTIERDRQRPYSSSRTPSISPVRVSPNNRSASAPASPREMISLKERKTDYECTGSNATYHGAKGEHTSRKDAMTAQNTGISTLYRNSYGAPAEDIKHNQVSAQPVPQEPSRKDYETYQPFQNSTRNYDESFFEDQVHHRPPASEYTMHLGLKSTGNYVDFYSAARPYSELNYETSHYPASPDSWV

SEQ ID NO: 12511 - protein, 181 aa, Homo sapiens
  Payload ID: 2445
  Gene Symbol: CTNND2
  Gene Name: catenin (cadherin-associated protein), delta 2
  ENSP ID: ENSP00000426625
MSSMSSAEEQFQWQSQDGQKDIEDELTTGLELVDSCIRSLQESGILDPQDYSTGERPSLLSQSALQLNSKPEGSFQYPASYHSNQTLALGETTPSQLPARGTQARATGQSFSQGTTSRAGHLAGPEPAPPPPPPPREPFAPSLGSAFHLPDAPPAAAAAALYYSSSTLPAPPRGGSPLAAP

SEQ ID NO: 12512 - protein, 888 aa, Homo sapiens
  Payload ID: 2445
  Gene Symbol: CTNND2
  Gene Name: catenin (cadherin-associated protein), delta 2
  ENSP ID: ENSP00000426887
MSSMSSAEEQFQWQSQDGQKDIEDELTTGLELVDSCIRSLQESGILDPQDYSTGETGSRASYSSQHGHLGPELRALQSPEHHIDPIYEDRVYQKPPMRSLSQSQGDPLPPAHTGTYRTSTAPSSPGVDSVPLQRTGSQHGPQNAAAATFQRASYAAGPASNYADPYRQLQYCPSVESPYSKSGPALPPEGTLARSPSIDSIQKDPREFGWRDPELPEVIQMLQHQFPSVQSNAAAYLQHLCFGDNKIKAEIRRQGGIQLLVDLLDHRMTEVHRSACGALRNLVYGKANDDNKIALKNCGGIPALVRLLRKTTDLEIRELVTGVLWNLSSCDALKMPIIQDALAVLTNAVIIPHSGWENSPLQDDRKIQLHSSQVLRNATGCLRNVSSAGEEARRRMRECDGLTDALLYVIQSALGSSEIDSKTVENCVCILRNLSYRLAAETSQGQHMGTDELDGLLCGEANGKDAESSGCWGKKKKKKKSQDQWDGVGPLPDCAEPPKGIQMLWHPSIVKPYLTLLSECSNPDTLEGAAGALQNLAAGSWKWSVYIRAAVRKEKGLPILVELLRIDNDRVVCAVATALRNMALDVRNKELIGKYAMRDLVHRLPGGNNSNNTASKAMSDDTVTAVCCTLHEVITKNMENAKALRDAGGIEKLVGISKSKGDKHSPKVVKAASQVLNSMWQYRDLRSLYKKDGWSQYHFVASSSTIERDRQRPYSSSRTPSISPVRVSPNNRSASAPASPREMISLKERKTDYECTGSNATYHGAKGEHTSRKDAMTAQNTGISTLYRNSYGAPAEDIKHNQVSAQPVPQEPSRKDYETYQPFQNSTRNYDESFFEDQVHHRPPASEYTMHLGLKSTGNYVDFYSAARPYSELNYETSHYPASPDSWV

SEQ ID NO: 12513 - protein, 81 aa, Homo sapiens
  Payload ID: 2446
  Gene Symbol: CTNNBIP1
  Gene Name: catenin, beta interacting protein 1
  Uniprot ID: Q9NSA3
  ENSP ID: ENSP00000366466
MNREGAPGKSPEEMYIQQKVRVLLMLRKMGSNLTASEEEFLRTYAGVVNSQLSQLPPHSIDQGAEDVVMAFSRSETEDRRQ

SEQ ID NO: 12514 - protein, 81 aa, Homo sapiens; identical to SEQ ID NO: 12513
  Payload ID: 2446
  Gene Symbol: CTNNBIP1
  Gene Name: catenin, beta interacting protein 1
  Uniprot ID: Q9NSA3
  ENSP ID: ENSP00000366468

SEQ ID NO: 12515 - protein, 81 aa, Homo sapiens; identical to SEQ ID NO: 12513
  Payload ID: 2446
  Gene Symbol: CTNNBIP1
  Gene Name: catenin, beta interacting protein 1
  Uniprot ID: Q9NSA3
  ENSP ID: ENSP00000366474

SEQ ID NO: 12516 - protein, 81 aa, Homo sapiens; identical to SEQ ID NO: 12513
  Payload ID: 2446
  Gene Symbol: CTNNBIP1
  Gene Name: catenin, beta interacting protein 1
  Uniprot ID: Q9NSA3
  ENSP ID: ENSP00000383696

SEQ ID NO: 12517 - protein, 563 aa, Homo sapiens
  Payload ID: 2447
  Gene Symbol: CTNNBL1
  Gene Name: catenin, beta like 1
  Uniprot ID: Q8WYA6
  ENSP ID: ENSP00000355050
MDVGELLSYQPNRGTKRPRDDEEEEQKMRRKQTGTRERGRYREEEMTVVEEADDDKKRLLQIIDRDGEEEEEEEEPLDESSVKKMILTFEKRSYKNQELRIKFPDNPEKFMESELDLNDIIQEMHVVATMPDLYHLLVELNAVQSLLGLLGHDNTDVSIAVVDLLQELTDIDTLHESEEGAEVLIDALVDGQVVALLVQNLERLDESVKEEADGVHNTLAIVENMAEFRPEMCTEGAQQGLLQWLLKRLKAKMPFDANKLYCSEVLAILLQDNDENRELLGELDGIDVLLQQLSVFKRHNPSTAEEQEMMENLFDSLCSCLMLSSNRERFLKGEGLQLMNLMLREKKISRSSALKVLDHAMIGPEGTDNCHKFVDILGLRTIFPLFMKSPRKIKKVGTTEKEHEEHVCSILASLLRNLRGQQRTRLLNKFTENDSEKVDRLMELHFKYLGAMQVADKKIEGEKHDMVRRGEIIDNDTEEEFYLRRLDAGLFVLQHICYIMAEICNANVPQIRQRVHQILNMRGSSIKIVRHIIKEYAENIGDGRSPEFRENEQKRILGLLENF

SEQ ID NO: 12518 - protein, 311 aa, Homo sapiens
  Payload ID: 2447
  Gene Symbol: CTNNBL1
  Gene Name: catenin, beta like 1
  Uniprot ID: Q8WYA6
  ENSP ID: ENSP00000362568
MPFDANKLYCSEVLAILLQDNDENRELLGELDGIDVLLQQLSVFKRHNPSTAEEQEMMENLFDSLCSCLMLSSNRERFLKGEGLQLMNLMLREKKISRSSALKVLDHAMIGPEGTDNCHKFVDILGLRTIFPLFMKSPRKIKKVGTTEKEHEEHVCSILASLLRNLRGQQRTRLLNKFTENDSEKVDRLMELHFKYLGAMQVADKKIEGEKHDMVRRGEIIDNDTEEEFYLRRLDAGLFVLQHICYIMAEICNANVPQIRQRVHQILNMRGSSIKIVRHIIKEYAENIGDGRSPEFRENEQKRILGLLENF

SEQ ID NO: 12519 - protein, 376 aa, Homo sapiens
  Payload ID: 2447
  Gene Symbol: CTNNBL1
  Gene Name: catenin, beta like 1
  Uniprot ID: Q8WYA6
  ENSP ID: ENSP00000362572
MVDGQVVALLVQNLERLDESVKEEADGVHNTLAIVENMAEFRPEMCTEGAQQGLLQWLLKRLKAKMPFDANKLYCSEVLAILLQDNDENRELLGELDGIDVLLQQLSVFKRHNPSTAEEQEMMENLFDSLCSCLMLSSNRERFLKGEGLQLMNLMLREKKISRSSALKVLDHAMIGPEGTDNCHKFVDILGLRTIFPLFMKSPRKIKKVGTTEKEHEEHVCSILASLLRNLRGQQRTRLLNKFTENDSEKVDRLMELHFKYLGAMQVADKKIEGEKHDMVRRGEIIDNDTEEEFYLRRLDAGLFVLQHICYIMAEICNANVPQIRQRVHQILNMRGSSIKIVRHIIKEYAENIGDGRSPEFRENEQKRILGLLENF

SEQ ID NO: 12520 - protein, 536 aa, Homo sapiens
  Payload ID: 2447
  Gene Symbol: CTNNBL1
  Gene Name: catenin, beta like 1
  Uniprot ID: Q8WYA6
  ENSP ID: ENSP00000384355
MRRKQTGTRERGRYREEEMTVVEEADDDKKRLLQIIDRDGEEEEEEEEPLDESSVKKMILTFEKRSYKNQELRIKFPDNPEKFMESELDLNDIIQEMHVVATMPDLYHLLVELNAVQSLLGLLGHDNTDVSIAVVDLLQELTDIDTLHESEEGAEVLIDALVDGQVVALLVQNLERLDESVKEEADGVHNTLAIVENMAEFRPEMCTEGAQQGLLQWLLKRLKAKMPFDANKLYCSEVLAILLQDNDENRELLGELDGIDVLLQQLSVFKRHNPSTAEEQEMMENLFDSLCSCLMLSSNRERFLKGEGLQLMNLMLREKKISRSSALKVLDHAMIGPEGTDNCHKFVDILGLRTIFPLFMKSPRKIKKVGTTEKEHEEHVCSILASLLRNLRGQQRTRLLNKFTENDSEKVDRLMELHFKYLGAMQVADKKIEGEKHDMVRRGEIIDNDTEEEFYLRRLDAGLFVLQHICYIMAEICNANVPQIRQRVHQILNMRGSSIKIVRHIIKEYAENIGDGRSPEFRENEQKRILGLLENF

SEQ ID NO: 12521 - protein, 166 aa, Homo sapiens
  Payload ID: 2447
  Gene Symbol: CTNNBL1
  Gene Name: catenin, beta like 1
  ENSP ID: ENSP00000394464
MRRKQTGTRERGRYREEEMTVVEEADDDKKRLLQIIDRDGEEEEEEEEPLDESSVKKMILTFEKRSYKNQELRIKFPDNPEKFMESELDLNDIIQEMHVVATMPDLYHLLVELNAVQSLLGLLGHDNTDVSIAVVDLLQELTDIDTLHESEEGAEVLIDALVDGQV

SEQ ID NO: 12522 - protein, 568 aa, Homo sapiens
  Payload ID: 2447
  Gene Symbol: CTNNBL1
  Gene Name: catenin, beta like 1
  ENSP ID: ENSP00000478532
MDVGELLSYQPNRGTKRPRDDEEEEQKMRRKQTGTRERGRYREEEMTVVEEADDDKKRLLQIIDRDGEEEEEEEEPLDESSVKKMILTFEKRSYKNQELRIKFPDNPEKFMESELDLNDIIQEMHVVATMPDLYHLLVELNAVQSLLGLLGHDNTDILSDLTSVAVVDLLQELTDIDTLHESEEGAEVLIDALVDGQVVALLVQNLERLDESVKEEADGVHNTLAIVENMAEFRPEMCTEGAQQGLLQWLLKRLKAKMPFDANKLYCSEVLAILLQDNDENRELLGELDGIDVLLQQLSVFKRHNPSTAEEQEMMENLFDSLCSCLMLSSNRERFLKGEGLQLMNLMLREKKISRSSALKVLDHAMIGPEGTDNCHKFVDILGLRTIFPLFMKSPRKIKKVGTTEKEHEEHVCSILASLLRNLRGQQRTRLLNKFTENDSEKVDRLMELHFKYLGAMQVADKKIEGEKHDMVRRGEIIDNDTEEEFYLRRLDAGLFVLQHICYIMAEICNANVPQIRQRVHQILNMRGSSIKIVRHIIKEYAENIGDGRSPEFRENEQKRILGLLENF

SEQ ID NO: 12523 - protein, 536 aa, Homo sapiens; identical to SEQ ID NO: 12520
  Payload ID: 2447
  Gene Symbol: CTNNBL1
  Gene Name: catenin, beta like 1
  Uniprot ID: Q8WYA6
  ENSP ID: ENSP00000487198

SEQ ID NO: 12524 - protein, 173 aa, Homo sapiens
  Payload ID: 2448
  Gene Symbol: CAMP
  Gene Name: cathelicidin antimicrobial peptide
  ENSP ID: ENSP00000296435
MGTMKTQRDGHSLGRWSLVLLLLGLVMPLAIIAQVLSYKEAVLRAIDGINQRSSDANLYRLLDLDPRPTMDGDPDTPKPVSFTVKETVCPRTTQQSPEDCDFKKDGLVKRCMGTVTLNQARGSFDISCDKDNKRFALLGDFFRKSKEKIGKEFKRIVQRIKDFLRNLVPRTES

SEQ ID NO: 12525 - protein, 480 aa, Homo sapiens
  Payload ID: 2449
  Gene Symbol: CTSA
  Gene Name: cathepsin A
  Uniprot ID: P10619
  ENSP ID: ENSP00000191018
MIRAAPPPLFLLLLLLLLLVSWASRGEAAPDQDEIQRLPGLAKQPSFRQYSGYLKGSGSKHLHYWFVESQKDPENSPVVLWLNGGPGCSSLDGLLTEHGPFLVQPDGVTLEYNPYSWNLIANVLYLESPAGVGFSYSDDKFYATNDTEVAQSNFEALQDFFRLFPEYKNNKLFLTGESYAGIYIPTLAVLVMQDPSMNLQGLAVGNGLSSYEQNDNSLVYFAYYHGLLGNRLWSSLQTHCCSQNKCNFYDNKDLECVTNLQEVARIVGNSGLNIYNLYAPCAGGVPSHFRYEKDTVVVQDLGNIFTRLPLKRMWHQALLRSGDKVRMDPPCTNTTAASTYLNNPYVRKALNIPEQLPQWDMCNFLVNLQYRRLYRSMNSQYLKLLSSQKYQILLYNGDVDMACNFMGDEWFVDSLNQKMEVQRRPWLVKYGDSGEQIAGFVKEFSHIAFLTIKGAGHMVPTDKPLAAFTMFSRFLNKQPY

SEQ ID NO: 12526 - protein, 481 aa, Homo sapiens
  Payload ID: 2449
  Gene Symbol: CTSA
  Gene Name: cathepsin A
  ENSP ID: ENSP00000346952
MTSSPRAPPGEQGRGGAEMIRAAPPPLFLLLLLLLLLVSWASRGEAAPDQDEIQRLPGLAKQPSFRQYSGYLKGSGSKHLHYWFVESQKDPENSPVVLWLNGGPGCSSLDGLLTEHGPFLIANVLYLESPAGVGFSYSDDKFYATNDTEVAQSNFEALQDFFRLFPEYKNNKLFLTGESYAGIYIPTLAVLVMQDPSMNLQGLAVGNGLSSYEQNDNSLVYFAYYHGLLGNRLWSSLQTHCCSQNKCNFYDNKDLECVTNLQEVARIVGNSGLNIYNLYAPCAGGVPSHFRYEKDTVVVQDLGNIFTRLPLKRMWHQALLRSGDKVRMDPPCTNTTAASTYLNNPYVRKALNIPEQLPQWDMCNFLVNLQYRRLYRSMNSQYLKLLSSQKYQILLYNGDVDMACNFMGDEWFVDSLNQKMEVQRRPWLVKYGDSGEQIAGFVKEFSHIAFLTIKGAGHMVPTDKPLAAFTMFSRFLNKQPY

SEQ ID NO: 12527 - protein, 480 aa, Homo sapiens; identical to SEQ ID NO: 12525
  Payload ID: 2449
  Gene Symbol: CTSA
  Gene Name: cathepsin A
  Uniprot ID: P10619
  ENSP ID: ENSP00000361537

SEQ ID NO: 12528 - protein, 498 aa, Homo sapiens
  Payload ID: 2449
  Gene Symbol: CTSA
  Gene Name: cathepsin A
  ENSP ID: ENSP00000361562
MTSSPRAPPGEQGRGGAEMIRAAPPPLFLLLLLLLLLVSWASRGEAAPDQDEIQRLPGLAKQPSFRQYSGYLKGSGSKHLHYWFVESQKDPENSPVVLWLNGGPGCSSLDGLLTEHGPFLVQPDGVTLEYNPYSWNLIANVLYLESPAGVGFSYSDDKFYATNDTEVAQSNFEALQDFFRLFPEYKNNKLFLTGESYAGIYIPTLAVLVMQDPSMNLQGLAVGNGLSSYEQNDNSLVYFAYYHGLLGNRLWSSLQTHCCSQNKCNFYDNKDLECVTNLQEVARIVGNSGLNIYNLYAPCAGGVPSHFRYEKDTVVVQDLGNIFTRLPLKRMWHQALLRSGDKVRMDPPCTNTTAASTYLNNPYVRKALNIPEQLPQWDMCNFLVNLQYRRLYRSMNSQYLKLLSSQKYQILLYNGDVDMACNFMGDEWFVDSLNQKMEVQRRPWLVKYGDSGEQIAGFVKEFSHIAFLTIKGAGHMVPTDKPLAAFTMFSRFLNKQPY

SEQ ID NO: 12529 - protein, 202 aa, Homo sapiens
  Payload ID: 2449
  Gene Symbol: CTSA
  Gene Name: cathepsin A
  ENSP ID: ENSP00000408533
QDFFRLFPEYKNNKLFLTGESYAGIYIPTLAVLVMQDPSMNLQGLAVGNGLSSYEQNDNSLVYFAYYHGLLGNRLWSSLQTHCCSQNKCNFYDNKDLECVTNLQEVARIVGNSGLNIYNLYAPCAGGVPSHFRTLLWSRIWATSSLACHSSGCGIRHCCAQGIKCAWTPPAPTQQLLPPTSTTRTCGRPSTSRSSCHNGTCA

SEQ ID NO: 12530 - protein, 109 aa, Homo sapiens
  Payload ID: 2449
  Gene Symbol: CTSA
  Gene Name: cathepsin A
  ENSP ID: ENSP00000475524
MIRAAPPPLFLLLLLLLLLVSWASRGEAAPDQDEIQRLPGLAKQPSFRQYSGYLKGSGSKHLHYWFVESQKDPENSPVVLWLNGGPGCSSLDGLLTEHGPFLVQPDGVT

SEQ ID NO: 12531 - protein, 82 aa, Homo sapiens
  Payload ID: 2449
  Gene Symbol: CTSA
  Gene Name: cathepsin A
  ENSP ID: ENSP00000475827
MTSSPRAPPGEQGRGGAEMIRAAPPPLFLLLLLLLLLVSWASRGEAAPDQDEIQRLPGLAKQPSFRQYSGYLKGSGSKHLHY

SEQ ID NO: 12532 - protein, 231 aa, Homo sapiens
  Payload ID: 2449
  Gene Symbol: CTSA
  Gene Name: cathepsin A
  ENSP ID: ENSP00000476235
MTSSPRAPPGEQGRGGAEMIRAAPPPLFLLLLLLLLLVSWASRGEAAPDQDEIQRLPGLAKQPSFRQYSGYLKGSGSKHLHYWFVESQKDPENSPVVLWLNGGPGCSSLDGLLTEHGPFLVQPDGVTLEYNPYSWNLIANVLYLESPAGVGFSYSDDKFYATNDTEVAQSNFEALQDFFRLFPEYKNNKLFLTGESYAGIYIPTLAVLVMQDPSMNLQVQGAGCGQWTLLL

SEQ ID NO: 12533 - protein, 339 aa, Homo sapiens
  Payload ID: 2450
  Gene Symbol: CTSB
  Gene Name: cathepsin B
  Uniprot ID: P07858
  ENSP ID: ENSP00000342070
MWQLWASLCCLLVLANARSRPSFHPLSDELVNYVNKRNTTWQAGHNFYNVDMSYLKRLCGTFLGGPKPPQRVMFTEDLKLPASFDAREQWPQCPTIKEIRDQGSCGSCWAFGAVEAISDRICIHTNAHVSVEVSAEDLLTCCGSMCGDGCNGGYPAEAWNFWTRKGLVSGGLYESHVGCRPYSIPPCEHHVNGSRPPCTGEGDTPKCSKICEPGYSPTYKQDKHYGYNSYSVSNSEKDIMAEIYKNGPVEGAFSVYSDFLLYKSGVYQHVTGEMMGGHAIRILGWGVENGTPYWLVANSWNTDWGDNGFFKILRGQDHCGIESEVVAGIPRTDQYWEKI

SEQ ID NO: 12534 - protein, 339 aa, Homo sapiens; identical to SEQ ID NO: 12533
  Payload ID: 2450
  Gene Symbol: CTSB
  Gene Name: cathepsin B
  Uniprot ID: P07858
  ENSP ID: ENSP00000345672

SEQ ID NO: 12535 - protein, 339 aa, Homo sapiens; identical to SEQ ID NO: 12533
  Payload ID: 2450
  Gene Symbol: CTSB
  Gene Name: cathepsin B
  Uniprot ID: P07858
  ENSP ID: ENSP00000409917

SEQ ID NO: 12536 - protein, 70 aa, Homo sapiens
  Payload ID: 2450
  Gene Symbol: CTSB
  Gene Name: cathepsin B
  ENSP ID: ENSP00000431143
MWQLWASLCCLLVLANARSRPSFHPLSDELVNYVNKRNTTWQAGHNFYNVDMSYLKRLCGTFLGGPKPPQ

SEQ ID NO: 12537 - protein, 136 aa, Homo sapiens
  Payload ID: 2450
  Gene Symbol: CTSB
  Gene Name: cathepsin B
  ENSP ID: ENSP00000431518
MWQLWASLCCLLVLANARSRPSFHPLSDELVNYVNKRNTTWQAGHNFYNVDMSYLKRLCGTFLGGPKPPQRVMFTEDLKLPASFDAREQWPQCPTIKEIRDQGSCGSCWAFGAVEAISDRICIHTNAHVSVEVSAE

SEQ ID NO: 12538 - protein, 32 aa, Homo sapiens
  Payload ID: 2450
  Gene Symbol: CTSB
  Gene Name: cathepsin B
  ENSP ID: ENSP00000432077
MWQLWASLCCLLVLANARSRPSFHPLSDELVN

SEQ ID NO: 12539 - protein, 339 aa, Homo sapiens; identical to SEQ ID NO: 12533
  Payload ID: 2450
  Gene Symbol: CTSB
  Gene Name: cathepsin B
  Uniprot ID: P07858
  ENSP ID: ENSP00000432244

SEQ ID NO: 12540 - protein, 20 aa, Homo sapiens
  Payload ID: 2450
  Gene Symbol: CTSB
  Gene Name: cathepsin B
  ENSP ID: ENSP00000432408
MWQLWASLCCLLVLANARSR

SEQ ID NO: 12541 - protein, 339 aa, Homo sapiens; identical to SEQ ID NO: 12533
  Payload ID: 2450
  Gene Symbol: CTSB
  Gene Name: cathepsin B
  Uniprot ID: P07858
  ENSP ID: ENSP00000433215

SEQ ID NO: 12542 - protein, 68 aa, Homo sapiens
  Payload ID: 2450
  Gene Symbol: CTSB
  Gene Name: cathepsin B
  ENSP ID: ENSP00000433379
MWQLWASLCCLLVLANARSRPSFHPLSDELVNYVNKRNTTWQAGHNFYNVDMSYLKRLCGTFLGGPKP

SEQ ID NO: 12543 - protein, 55 aa, Homo sapiens
  Payload ID: 2450
  Gene Symbol: CTSB
  Gene Name: cathepsin B
  ENSP ID: ENSP00000433929
MWQLWASLCCLLVLANARSRPSFHPLSDELVNYVNKRNTTWQAGHNFYNVDMSYL

SEQ ID NO: 12544 - protein, 170 aa, Homo sapiens
  Payload ID: 2450
  Gene Symbol: CTSB
  Gene Name: cathepsin B
  ENSP ID: ENSP00000433995
MWQLWASLCCLLVLANARSRPSFHPLSDELVNYVNKRNTTWQAGHNFYNVDMSYLKRLCGTFLGGPKPPQRVMFTEDLKLPASFDAREQWPQCPTIKEIRDQGSCGSCWAFGAVEAISDRICIHTNAHVSVEVSAEDLLTCCGSMCGDGCNGGYPAEAWNFWTRKGLVSG

SEQ ID NO: 12545 - protein, 339 aa, Homo sapiens; identical to SEQ ID NO: 12533
  Payload ID: 2450
  Gene Symbol: CTSB
  Gene Name: cathepsin B
  Uniprot ID: P07858
  ENSP ID: ENSP00000434217

SEQ ID NO: 12546 - protein, 143 aa, Homo sapiens
  Payload ID: 2450
  Gene Symbol: CTSB
  Gene Name: cathepsin B
  ENSP ID: ENSP00000434725
MWQLWASLCCLLVLANARSRPSFHPLSDELVNYVNKRNTTWQAGHNFYNVDMSYLKRLCGTFLGGPKPPQRVMFTEDLKLPASFDAREQWPQCPTIKEIRDQGSCGSCWAFGAVEAISDRICIHTNAHVSVEVSAEDLLTCCG

SEQ ID NO: 12547 - protein, 165 aa, Homo sapiens
  Payload ID: 2450
  Gene Symbol: CTSB
  Gene Name: cathepsin B
  ENSP ID: ENSP00000435074
MWQLWASLCCLLVLANARSRPSFHPLSDELVNYVNKRNTTWQAGHNFYNVDMSYLKRLCGTFLGGPKPPQRVMFTEDLKLPASFDAREQWPQCPTIKEIRDQGSCGSCWAFGAVEAISDRICIHTNAHVSVEVSAEDLLTCCGSMCGDGCNGGYPAEAWNFWTRK

SEQ ID NO: 12548 - protein, 339 aa, Homo sapiens; identical to SEQ ID NO: 12533
  Payload ID: 2450
  Gene Symbol: CTSB
  Gene Name: cathepsin B
  Uniprot ID: P07858
  ENSP ID: ENSP00000435105

SEQ ID NO: 12549 - protein, 70 aa, Homo sapiens; identical to SEQ ID NO: 12536
  Payload ID: 2450
  Gene Symbol: CTSB
  Gene Name: cathepsin B
  ENSP ID: ENSP00000435260

SEQ ID NO: 12550 - protein, 101 aa, Homo sapiens
  Payload ID: 2450
  Gene Symbol: CTSB
  Gene Name: cathepsin B
  ENSP ID: ENSP00000435650
MWQLWASLCCLLVLANARSRPSFHPLSDELVNYVNKRNTTWQAGHNFYNVDMSYLKRLCGTFLGGPKPPQRVMFTEDLKLPASFDAREQWPQCPTIKEIRD

SEQ ID NO: 12551 - protein, 92 aa, Homo sapiens
  Payload ID: 2450
  Gene Symbol: CTSB
  Gene Name: cathepsin B
  ENSP ID: ENSP00000435886
MWQLWASLCCLLVLANARSRPSFHPLSDELVNYVNKRNTTWQAGHNFYNVDMSYLKRLCGTFLGGPKPPQRVMFTEDLKLPASFDAREQWPQ

SEQ ID NO: 12552 - protein, 98 aa, Homo sapiens
  Payload ID: 2450
  Gene Symbol: CTSB
  Gene Name: cathepsin B
  ENSP ID: ENSP00000436074
MWQLWASLCCLLVLANARSRPSFHPLSDELVNYVNKRNTTWQAGHNFYNVDMSYLKRLCGTFLGGPKPPQRVMFTEDLKLPASFDAREQWPQCPTIKE

SEQ ID NO: 12553 - protein, 143 aa, Homo sapiens; identical to SEQ ID NO: 12546
  Payload ID: 2450
  Gene Symbol: CTSB
  Gene Name: cathepsin B
  ENSP ID: ENSP00000436122

SEQ ID NO: 12554 - protein, 175 aa, Homo sapiens
  Payload ID: 2450
  Gene Symbol: CTSB
  Gene Name: cathepsin B
  ENSP ID: ENSP00000436159
MWQLWASLCCLLVLANARSRPSFHPLSDELVNYVNKRNTTWQAGHNFYNVDMSYLKRLCGTFLGGPKPPQRVMFTEDLKLPASFDAREQWPQCPTIKEIRDQGSCGSCWAFGAVEAISDRICIHTNAHVSVEVSAEDLLTCCGSMCGDGCNGGYPAEAWNFWTRKGLVSGGLYES

SEQ ID NO: 12555 - protein, 110 aa, Homo sapiens
  Payload ID: 2450
  Gene Symbol: CTSB
  Gene Name: cathepsin B
  ENSP ID: ENSP00000436456
MWQLWASLCCLLVLANARSRPSFHPLSDELVNYVNKRNTTWQAGHNFYNVDMSYLKRLCGTFLGGPKPPQRVMFTEDLKLPASFDAREQWPQCPTIKEIRDQGSCGSCWL

SEQ ID NO: 12556 - protein, 148 aa, Homo sapiens
  Payload ID: 2450
  Gene Symbol: CTSB
  Gene Name: cathepsin B
  ENSP ID: ENSP00000436627
MWQLWASLCCLLVLANARSRPSFHPLSDELVNYVNKRNTTWQAGHNFYNVDMSYLKRLCGTFLGGPKPPQRVMFTEDLKLPASFDAREQWPQCPTIKEIRDQGSCGSCWAFGAVEAISDRICIHTNAHVSVEVSAEDLLTCCGSMCGD

SEQ ID NO: 12557 - protein, 76 aa, Homo sapiens
  Payload ID: 2450
  Gene Symbol: CTSB
  Gene Name: cathepsin B
  ENSP ID: ENSP00000473301
SGVYQHVTGEMMGGHAIRILGWGVENGTPYWLVANSWNTDWGDNGFFKILRGQDHCGIESEVVAGIPRTDQYWEKI

SEQ ID NO: 12558 - protein, 463 aa, Homo sapiens
  Payload ID: 2451
  Gene Symbol: CTSC
  Gene Name: cathepsin C
  Uniprot ID: P53634
  ENSP ID: ENSP00000227266
MGAGPSLLLAALLLLLSGDGAVRCDTPANCTYLDLLGTWVFQVGSSGSQRDVNCSVMGPQEKKVVVYLQKLDTAYDDLGNSGHFTIIYNQGFEIVLNDYKWFAFFKYKEEGSKVTTYCNETMTGWVHDVLGRNWACFTGKKVGTASENVYVNIAHLKNSQEKYSNRLYKYDHNFVKAINAIQKSWTATTYMEYETLTLGDMIRRSGGHSRKIPRPKPAPLTAEIQQKILHLPTSWDWRNVHGINFVSPVRNQASCGSCYSFASMGMLEARIRILTNNSQTPILSPQEVVSCSQYAQGCEGGFPYLIAGKYAQDFGLVEEACFPYTGTDSPCKMKEDCFRYYSSEYHYVGGFYGGCNEALMKLELVHHGPMAVAFEVYDDFLHYKKGIYHHTGLRDPFNPFELTNHAVLLVGYGTDSASGMDYWIVKNSWGTGWGENGYFRIRRGTDECAIESIAVAATPIPKL

SEQ ID NO: 12559 - protein, 137 aa, Homo sapiens
  Payload ID: 2451
  Gene Symbol: CTSC
  Gene Name: cathepsin C
  Uniprot ID: P53634
  ENSP ID: ENSP00000432541
MGAGPSLLLAALLLLLSGDGAVRCDTPANCTYLDLLGTWVFQVGSSGSQRDVNCSVMGPQEKKVVVYLQKLDTAYDDLGNSGHFTIIYNQGFEIVLNDYKWFAFFKDVTDFISHLFMQLGTVGIYDLPHLRNKLVIK

SEQ ID NO: 12560 - protein, 244 aa, Homo sapiens
  Payload ID: 2451
  Gene Symbol: CTSC
  Gene Name: cathepsin C
  ENSP ID: ENSP00000432556
  MOD_RES (1)..(1): Any amino acid
XVVDSPLARSARLPGPQEKKVVVYLQKLDTAYDDLGNSGHFTIIYNQGFEIVLNDYKWFAFFKYKEEGSKVTTYCNETMTGWVHDVLGRNWACFTGKKVGTASENVYVNIAHLKNSQEKYSNRLYKYDHNFVKAINAIQKSWTATTYMEYETLTLGDMIRRSGGHSRKIPRPKPAPLTAEIQQKILHLPTSWDWRNVHGINFVSPVRNQASCGSCYSFASMGMLEARIRILTNNSQTPILSPQE

SEQ ID NO: 12561 - protein, 36 aa, Homo sapiens
  Payload ID: 2451
  Gene Symbol: CTSC
  Gene Name: cathepsin C
  ENSP ID: ENSP00000433229
  MOD_RES (1)..(1): Any amino acid
XDVTDFISHLFMQLGTVGIYDLPHLRNKLAMNRRWG

SEQ ID NO: 12562 - protein, 141 aa, Homo sapiens
  Payload ID: 2451
  Gene Symbol: CTSC
  Gene Name: cathepsin C
  Uniprot ID: P53634
  ENSP ID: ENSP00000433539
MGAGPSLLLAALLLLLSGDGAVRCDTPANCTYLDLLGTWVFQVGSSGSQRDVNCSVMGPQEKKVVVYLQKLDTAYDDLGNSGHFTIIYNQGFEIVLNDYKWFAFFKDVTDFISHLFMQLGTVGIYDLPHLRNKLAMNRRWG

SEQ ID NO: 12563 - protein, 412 aa, Homo sapiens
  Payload ID: 2452
  Gene Symbol: CTSD
  Gene Name: cathepsin D
  Uniprot ID: P07339
  ENSP ID: ENSP00000236671
MQPSSLLPLALCLLAAPASALVRIPLHKFTSIRRTMSEVGGSVEDLIAKGPVSKYSQAVPAVTEGPIPEVLKNYMDAQYYGEIGIGTPPQCFTVVFDTGSSNLWVPSIHCKLLDIACWIHHKYNSDKSSTYVKNGTSFDIHYGSGSLSGYLSQDTVSVPCQSASSASALGGVKVERQVFGEATKQPGITFIAAKFDGILGMAYPRISVNNVLPVFDNLMQQKLVDQNIFSFYLSRDPDAQPGGELMLGGTDSKYYKGSLSYLNVTRKAYWQVHLDQVEVASGLTLCKEGCEAIVDTGTSLMVGPVDEVRELQKAIGAVPLIQGEYMIPCEKVSTLPAITLKLGGKGYKLSPEDYTLKVSQAGKTLCLSGFMGMDIPPPSGPLWILGDVFIGRYYTVFDRDNNRVGFAEAARL

SEQ ID NO: 12564 - protein, 199 aa, Homo sapiens
  Payload ID: 2452
  Gene Symbol: CTSD
  Gene Name: cathepsin D
  ENSP ID: ENSP00000356164
MSEVGGSVEDLIAKGPVSKYSQAVPAVTEGPIPEVLKNYMDAQYYGEIGIGTPPQCFTVVFDTGSSNLWVPSIHCKLLDIACWIHHKYNSDKSSTYVKNGTSFDIHYGSGSLSGYLSQDTVSVPCQSASSASALGGVKVERQVFGEATKQPGITFIAAKFDGILGMAYPRISVNNVLPVFDNLMQQKLVDQNIFSFYLS

SEQ ID NO: 12565 - protein, 189 aa, Homo sapiens
  Payload ID: 2452
  Gene Symbol: CTSD
  Gene Name: cathepsin D
  ENSP ID: ENSP00000402586
NVTRKAYWQVHLDQSPEGRRVQPSQGRGSQGGALGPQGTLQSRQGLHALTPRRVEVASGLTLCKEGCEAIVDTGTSLMVGPVDEVRELQKAIGAVPLIQGEYMIPCEKVSTLPAITLKLGGKGYKLSPEDYTLKVSQAGKTLCLSGFMGMDIPPPSGPLWILGDVFIGRYYTVFDRDNNRVGFAEAARL

SEQ ID NO: 12566 - protein, 276 aa, Homo sapiens
  Payload ID: 2452
  Gene Symbol: CTSD
  Gene Name: cathepsin D
  ENSP ID: ENSP00000404902
MQPSSLLPLALCLLAAPASALVRIPLHKFTSIRRTMSEVGGSVEDLIAKGPVSKYSQAVPAVTEGPIPEVLKNYMDAQYYGEIGIGTPPQCFTVVFDTGSSNLWVPSIHCKLLDIACWIHHKYNSDKSSTYVKNGTSFDIHYGSGSLSGYLSQDTVSVPCQSASSASALGGVKVERQVFGEATKQPGITFIAAKFDGILGMAYPRISVNNVLPVFDNLMQQKLVDQNIFSFYLSRDPDAQPGGELMLGGTDSKYYKGSLSYLNVTRKAYWQVHLDQ

SEQ ID NO: 12567 - protein, 299 aa, Homo sapiens
  Payload ID: 2452
  Gene Symbol: CTSD
  Gene Name: cathepsin D
  ENSP ID: ENSP00000415036
MPRPVVDRIPLHKFTSIRRTMSEVGGSVEDLIAKGPVSKYSQAVPAVTEGPIPEVLKNYMDAQYYGEIGIGTPPQCFTVVFDTGSSNLWVPSIHCKLLDIACWIHHKYNSDKSSTYVKNGTSFDIHYGSGSLSGYLSQDTVSVPCQSASSASALGGVKVERQVFGEATKQPGITFIAAKFDGILGMAYPRISVNNVLPVFDNLMQQKLVDQNIFSFYLSRDPDAQPGGELMLGGTDSKYYKGSLSYLNVTRKAYWQVHLDQVEVASGLTLCKEGCEAIVDTGTSLMVGPVDEVRELQKA

SEQ ID NO: 12568 - protein, 396 aa, Homo sapiens
  Payload ID: 2453
  Gene Symbol: CTSE
  Gene Name: cathepsin E
  Uniprot ID: P14091
  ENSP ID: ENSP00000350911
MKTLLLLLLVLLELGEAQGSLHRVPLRRHPSLKKKLRARSQLSEFWKSHNLDMIQFTESCSMDQSAKEPLINYLDMEYFGTISIGSPPQNFTVIFDTGSSNLWVPSVYCTSPACKTHSRFQPSQSSTYSQPGQSFSIQYGTGSLSGIIGADQVSVEGLTVVGQQFGESVTEPGQTFVDAEFDGILGLGYPSLAVGGVTPVFDNMMAQNLVDLPMFSVYMSSNPEGGAGSELIFGGYDHSHFSGSLNWVPVTKQAYWQIALDNIQVGGTVMFCSEGCQAIVDTGTSLITGPSDKIKQLQNAIGAAPVDGEYAVECANLNVMPDVTFTINGVPYTLSPTAYTLLDFVDGMQFCSSGFQGLDIHPPAGPLWILGDVFIRQFYSVFDRGNNRVGLAPAVP

SEQ ID NO: 12569 - protein, 363 aa, Homo sapiens
  Payload ID: 2453
  Gene Symbol: CTSE
  Gene Name: cathepsin E
  Uniprot ID: P14091
  ENSP ID: ENSP00000353350
MKTLLLLLLVLLELGEAQGSLHRVPLRRHPSLKKKLRARSQLSEFWKSHNLDMIQFTESCSMDQSAKEPLINYLDMEYFGTISIGSPPQNFTVIFDTGSSNLWVPSVYCTSPACKTHSRFQPSQSSTYSQPGQSFSIQYGTGSLSGIIGADQVSVEGLTVVGQQFGESVTEPGQTFVDAEFDGILGLGYPSLAVGGVTPVFDNMMAQNLVDLPMFSVYMSSNPEGGAGSELIFGGYDHSHFSGSLNWVPVTKQAYWQIALDNMLWSVPTLTSCRMSPSPLTESPIPSAQLPTPYWTSWMECSSAAVAFKDLTSTLQLGPSGSWGMSSFDSFTQSLTVGITVWDWPQQSPKEGPCVCACLSDRP

SEQ ID NO: 12570 - protein, 484 aa, Homo sapiens [sequence omitted]

SEQ ID NO: 12571 - protein, 282 aa, Homo sapiens
  Payload ID: 2454
  Gene Symbol: CTSF
  Gene Name: cathepsin F
  ENSP ID: ENSP00000433082
  MOD_RES (1)..(1): Any amino acid
XQNHPDNRNETFSSVISLLNEDPLSQDLPVKMASIFKNFVITYNRTYESKEARWRLSVFVNNMVRAQKIQALDRGTAQYGVTKFSDLTEEEFRTIYLNTLLRKEPGNKMKQAKSVGDLAPPEWDWRSKGAVTKVKDQGMCGSCWAFSVTGNVEGQWFLNQGTLLSLSEQELLDCDKMDKACMGGLPSNAYSAIKNLGGLETEDDYSYQGHMQSCNFSAEKAKVYINDSVELSQNEQKLAAWLAKRGPISVAINAFGMQFYRHGISRPLRPLCSPWLIDHAVL

SEQ ID NO: 12572 - protein, 82 aa, Homo sapiens
  Payload ID: 2454
  Gene Symbol: CTSF
  Gene Name: cathepsin F
  ENSP ID: ENSP00000434936
  MOD_RES (1)..(1): Any amino acid
XRTIYLNTLLRKEPGNKMKQAKSVGDLAPPEWDWRSKGAVTKVKDQGMCGSCWAFSVTGNVEGQWFLNQGTLLSLSEQALGL

SEQ ID NO: 12573 - protein, 120 aa, Homo sapiens
  Payload ID: 2454
  Gene Symbol: CTSF
  Gene Name: cathepsin F
  ENSP ID: ENSP00000435822
MVCRLPVSKKTLLCSFQVLDELGRHVLLRKDCGPVDTKVPGAGEPKSAFTQGSAMISSLSQNHPDNRNETFSSVISLLNEDPLSQDLPVKMASIFKNFVITYNRTYESKEEARWRLSVFV

SEQ ID NO: 12574 - protein, 255 aa, Homo sapiens
  Payload ID: 2455
  Gene Symbol: CTSG
  Gene Name: cathepsin G
  Uniprot ID: P08311
  ENSP ID: ENSP00000216336
MQPLLLLLAFLLPTGAEAGEIIGGRESRPHSRPYMAYLQIQSPAGQSRCGGFLVREDFVLTAAHCWGSNINVTLGAHNIQRRENTQQHITARRAIRHPQYNQRTIQNDIMLLQLSRRVRRNRNVNPVALPRAQEGLRPGTLCTVAGWGRVSMRRGTDTLREVQLRVQRDRQCLRIFGSYDPRRQICVGDRRERKAAFKGDSGGPLLCNNVAHGIVSYGKSSGVPPEVFTRVSSFLPWIRTTMRSFKLLDQMETPL

SEQ ID NO: 12575 - protein, 335 aa, Homo sapiens
  Payload ID: 2456
  Gene Symbol: CTSH
  Gene Name: cathepsin H
  Uniprot ID: P09668
  ENSP ID: ENSP00000220166
MWATLPLLCAGAWLLGVPVCGAAELCVNSLEKFHFKSWMSKHRKTYSTEEYHHRLQTFASNWRKINAHNNGNHTFKMALNQFSDMSFAEIKHKYLWSEPQNCSATKSNYLRGTGPYPPSVDWRKKGNFVSPVKNQGACGSCWTFSTTGALESAIAIATGKMLSLAEQQLVDCAQDFNNHGCQGGLPSQAFEYILYNKGIMGEDTYPYQGKDGYCKFQPGKAIGFVKDVANITIYDEEAMVEAVALYNPVSFAFEVTQDFMMYRTGIYSSTSCHKTPDKVNHAVLAVGYGEKNGIPYWIVKNSWGPQWGMNGYFLIERGKNMCGLAACASYPIPLV

SEQ ID NO: 12576 - protein, 62 aa, Homo sapiens
  Payload ID: 2456
  Gene Symbol: CTSH
  Gene Name: cathepsin H
  ENSP ID: ENSP00000431879
MWATLPLLCAGAWLLGVPVCGAAELCVNSLEKFHFKSWMSKKTKAHCVLVAESVGEHQCMCF

SEQ ID NO: 12577 - protein, 41 aa, Homo sapiens
  Payload ID: 2456
  Gene Symbol: CTSH
  Gene Name: cathepsin H
  ENSP ID: ENSP00000432893
MWATLPLLCAGAWLLGVPVCGAAELCVNSLGTQRARRPRGC

SEQ ID NO: 12578 - protein, 118 aa, Homo sapiens
  Payload ID: 2456
  Gene Symbol: CTSH
  Gene Name: cathepsin H
  ENSP ID: ENSP00000432935
MWATLPLLCAGAWLLGVPVCGAAELCVNSLVAGLSPPLGPWSLRSPSQPERCCPWRNSSWWTAPRTSIITAAKGVSPARLSSISCTTRGSWVKTPTPTRARMVIASSNLERPSALSRM

SEQ ID NO: 12579 - protein, 134 aa, Homo sapiens
  Payload ID: 2456
  Gene Symbol: CTSH
  Gene Name: cathepsin H
  ENSP ID: ENSP00000435329
MALNQFSDMSFAEIKHKYLWSEPQNCSATKSNYLRGTGPYPPSVDWRKKGNFVSPVKNQGACGSCWTFSTTGALESAIAIATGKMLSLAEQQLVDCAQDFNNHGCQGGLPSQAFEYILYNKGIMGEDTYPYQGK

SEQ ID NO: 12580 - protein, 323 aa, Homo sapiens
  Payload ID: 2456
  Gene Symbol: CTSH
  Gene Name: cathepsin H
  ENSP ID: ENSP00000483303
MWATLPLLCAAELCVNSLEKFHFKSWMSKHRKTYSTEEYHHRLQTFASNWRKINAHNNGNHTFKMALNQFSDMSFAEIKHKYLWSEPQNCSATKSNYLRGTGPYPPSVDWRKKGNFVSPVKNQGACGSCWTFSTTGALESAIAIATGKMLSLAEQQLVDCAQDFNNHGCQGGLPSQAFEYILYNKGIMGEDTYPYQGKDGYCKFQPGKAIGFVKDVANITIYDEEAMVEAVALYNPVSFAFEVTQDFMMYRTGIYSSTSCHKTPDKVNHAVLAVGYGEKNGIPYWIVKNSWGPQWGMNGYFLIERGKNMCGLAACASYPIPLV

SEQ ID NO: 12581 - protein, 329 aa, Homo sapiens
  Payload ID: 2457
  Gene Symbol: CTSK
  Gene Name: cathepsin K
  Uniprot ID: P43235
  ENSP ID: ENSP00000271651
MWGLKVLLLPVVSFALYPEEILDTHWELWKKTHRKQYNNKVDEISRRLIWEKNLKYISIHNLEASLGVHTYELAMNHLGDMTSEEVVQKMTGLKVPLSHSRSNDTLYIPEWEGRAPDSVDYRKKGYVTPVKNQGQCGSCWAFSSVGALEGQLKKKTGKLLNLSPQNLVDCVSENDGCGGGYMTNAFQYVQKNRGIDSEDAYPYVGQEESCMYNPTGKAAKCRGYREIPEGNEKALKRAVARVGPVSVAIDASLTSFQFYSKGVYYDESCNSDNLNHAVLAVGYGIQKGNKHWIIKNSWGENWGNKGYILMARNKNNACGIANLASFPKM

SEQ ID NO: 12582 - protein, 258 aa, Homo sapiens
  Payload ID: 2457
  Gene Symbol: CTSK
  Gene Name: cathepsin K
  ENSP ID: ENSP00000405083
MHKENEEIYNVSENRKHCPIFPCPLLTRSGKVPEFRHEREERLEEMIRRQNLDGNLSFVMWGLKVLLLPVVSFALYPEEILDTHWELWKKTHRKQYNNKVDEISRRLIWEKNLKYISIHNLEASLGVHTYELAMNHLGDMTSEEVVQKMTGLKVPLSHSRSNDTLYIPEWEGRAPDSVDYRKKGYVTPVKNQGQCGSCWAFSSVGALEGQLKKKTGKLLNLSPQNLVDCVSENDGCGGGYMTNAFQYVQKNRGIDSED

SEQ ID NO: 12583 - protein, 225 aa, Homo sapiens
  Payload ID: 2458
  Gene Symbol: CTSL
  Gene Name: cathepsin L
  ENSP ID: ENSP00000340470
MNPTLILAAFCLGIASATLTFDHSLEAQWTKWKAMHNRLYGMNEEGWRRAVWEKNMKMIELHNQEYREGKHSFTMAMNAFGDMTSEEFRQVMNGFQNRKPRKGKVFQEPLFYEAPRSVDWREKGYVTPVKNQGQCGSCWAFSATGALEGQMFRKTGRLISLSEQNLVDCSGPQGNEGCNGGLMDYAFQYVQDNGGLDSEESYPYEATVSGAPCHHSSSAFGRWTL

SEQ ID NO: 12584 - protein, 333 aa, Homo sapiens [sequence omitted]

SEQ ID NO: 12585 - protein, 333 aa, Homo sapiens [sequence omitted]

SEQ ID NO: 12586 - protein, 321 aa, Homo sapiens
  Payload ID: 2459
  Gene Symbol: CTSO
  Gene Name: cathepsin O
  Uniprot ID: P43234
  ENSP ID: ENSP00000414904
MDVRALPWLPWLLWLLCRGGGDADSRAPFTPTWPRSREREAAAFRESLNRHRYLNSLFPSENSTAFYGINQFSYLFPEEFKAIYLRSKPSKFPRYSAEVHMSIPNVSLPLRFDWRDKQVVTQVRNQQMCGGCWAFSVVGAVESAYAIKGKPLEDLSVQQVIDCSYNNYGCNGGSTLNALNWLNKMQVKLVKDSEYPFKAQNGLCHYFSGSHSGFSIKGYSAYDFSDQEDEMAKALLTFGPLVVIVDAVSWQDYLGGIIQHHCSSGEANHAVLITGFDKTGSTPYWIVRNSWGSSWGVDGYAHVKMGSNVCGIADSVSSIFV

SEQ ID NO: 12587 - protein, 321 aa, Homo sapiens; identical to SEQ ID NO: 12586
  Payload ID: 2459
  Gene Symbol: CTSO
  Gene Name: cathepsin O
  Uniprot ID: P43234
  ENSP ID: ENSP00000460395

SEQ ID NO: 12588 - protein, 331 aa, Homo sapiens
  Payload ID: 2460
  Gene Symbol: CTSS
  Gene Name: cathepsin S
  Uniprot ID: P25774
  ENSP ID: ENSP00000357981
MKRLVCVLLVCSSAVAQLHKDPTLDHHWHLWKKTYGKQYKEKNEEAVRRLIWEKNLKFVMLHNLEHSMGMHSYDLGMNHLGDMTSEEVMSLMSSLRVPSQWQRNITYKSNPNRILPDSVDWREKGCVTEVKYQGSCGACWAFSAVGALEAQLKLKTGKLVSLSAQNLVDCSTEKYGNKGCNGGFMTTAFQYIIDNKGIDSDASYPYKAMDQKCQYDSKYRAATCSKYTELPYGREDVLKEAVANKGPVSVGVDARHPSFFLYRSGVYYEPSCTQNVNHGVLVVGYGDLNGKEYWLVKNSWGHNFGEEGYIRMARNKGNHCGIASFPSYPEI

SEQ ID NO: 12589 - protein, 281 aa, Homo sapiens
  Payload ID: 2460
  Gene Symbol: CTSS
  Gene Name: cathepsin S
  Uniprot ID: P25774
  ENSP ID: ENSP00000408414
MKRLVCVLLVCSSAVAQLHKDPTLDHHWHLWKKTYGKQYKEKNEEAVRRLIWEKNLKFVMLHNLEHSMGMHSYDLGMNHLGDMGSCGACWAFSAVGALEAQLKLKTGKLVSLSAQNLVDCSTEKYGNKGCNGGFMTTAFQYIIDNKGIDSDASYPYKAMDQKCQYDSKYRAATCSKYTELPYGREDVLKEAVANKGPVSVGVDARHPSFFLYRSGVYYEPSCTQNVNHGVLVVGYGDLNGKEYWLVKNSWGHNFGEEGYIRMARNKGNHCGIASFPSYPEI

SEQ ID NO: 12590 - protein, 96 aa, Homo sapiens
  Payload ID: 2460
  Gene Symbol: CTSS
  Gene Name: cathepsin S
  ENSP ID: ENSP00000475176
  MOD_RES (1)..(1): Any amino acid
XVLKEAVANKGPVSVGVDARHPSFFLYRSGVYYEPSCTQNVNHGVLVVGYGDLNGKEYWLVKNSWGHNFGEEGYIRMARNKGNHCGIASFPSYPEI

SEQ ID NO: 12591 - protein, 5 aa, Homo sapiens
  Payload ID: 2460
  Gene Symbol: CTSS
  Gene Name: cathepsin S
  ENSP ID: ENSP00000475557
  MOD_RES (1)..(1): Any amino acid
XYPEI

SEQ ID NO: 12592 - protein, 117 aa, Homo sapiens
  Payload ID: 2460
  Gene Symbol: CTSS
  Gene Name: cathepsin S
  ENSP ID: ENSP00000475812
IIDNKGIDSDASYPYKAMDQKCQYDSKYRAATCSKYTELPYGREDVLKEAVANKGPVSVGVDARHPSFFLYRSDGVLLCCQAGVRWHDLSSLQPLPPGFKQFSCLSLLSSWDYRCLL

SEQ ID NO: 12593 - protein, 334 aa, Homo sapiens
  Payload ID: 2461
  Gene Symbol: CTSV
  Gene Name: cathepsin V
  Uniprot ID: O60911
  ENSP ID: ENSP00000259470
MNLSLVLAAFCLGIASAVPKFDQNLDTKWYQWKATHRRLYGANEEGWRRAVWEKNMKMIELHNGEYSQGKHGFTMAMNAFGDMTNEEFRQMMGCFRNQKFRKGKVFREPLFLDLPKSVDWRKKGYVTPVKNQKQCGSCWAFSATGALEGQMFRKTGKLVSLSEQNLVDCSRPQGNQGCNGGFMARAFQYVKENGGLDSEESYPYVAVDEICKYRPENSVANDTGFTVVAPGKEKALMKAVATVGPISVAMDAGHSSFQFYKSGIYFEPDCSSKNLDHGVLVVGYGFEGANSNNSKYWLVKNSWGPEWGSNGYVKIAKDKNNHCGIATAASYPNV

SEQ ID NO: 12594 - protein, 334 aa, Homo sapiens; identical to SEQ ID NO: 12593
  Payload ID: 2461
  Gene Symbol: CTSV
  Gene Name: cathepsin V
  Uniprot ID: O60911
  ENSP ID: ENSP00000445052

SEQ ID NO: 12595 - protein, 376 aa, Homo sapiens
  Payload ID: 2462
  Gene Symbol: CTSW
  Gene Name: cathepsin W
  Uniprot ID: P56202
  ENSP ID: ENSP00000311300
MALTAHPSCLLALLVAGLAQGIRGPLRAQDLGPQPLELKEAFKLFQIQFNRSYLSPEEHAHRLDIFAHNLAQAQRLQEEDLGTAEFGVTPFSDLTEEEFGQLYGYRRAAGGVPSMGREIRSEEPEESVPFSCDWRKVASAISPIKDQKNCNCCWAMAAAGNIETLWRISFWDFVDVSVQELLDCGRCGDGCHGGFVWDAFITVLNNSGLASEKDYPFQGKVRAHRCHPKKYQKVAWIQDFIMLQNNEHRIAQYLATYGPITVTINMKPLQLYRKGVIKATPTTCDPQLVDHSVLLVGFGSVKSEEGIWAETVSSQSQPQPPHPTPYWILKNSWGAQWGEKGYFRLHRGSNTCGITKFPLTARVQKPDMKPRVSCPP

SEQ ID NO: 12596 - protein, 211 aa, Homo sapiens
  Payload ID: 2462
  Gene Symbol: CTSW
  Gene Name: cathepsin W
  ENSP ID: ENSP00000434267
ALTAHPSCLLALLVAGLAQGIRGPLRAQDLGPQPLELKEAFKLFQIQFNRSYLSPEEHAHRLDIFAHNLAQAQRLQEEDLGTAEFGVTPFSDLTEEEFGQLYGYRRAAGGVPSMGREIRSEEPEESVPFSCDWRKVASAISPIKDQKNCNCCWAMAAAGNIETLWRISFWDFVDVSVQGGLASEKDYPFQGKVRAHRCHPKKYQKVAWIQD

SEQ ID NO: 12597 - protein, 364 aa, Homo sapiens
  Payload ID: 2462
  Gene Symbol: CTSW
  Gene Name: cathepsin W
  ENSP ID: ENSP00000436568
MALTAHPSCLLALLVAGLAQGIRGPLRAQDLGPQPLELKEAFKLFQIQFNRSYLSPEEHAHRLDIFAHNLAQAQRLQEEDLGTAEFGVTPFSDLTEEEFGQLYGYRRAAGGVPSMGREIRSEEPEESVPFSCDWRKVASAISPIKDQKNCNCCWAMAAAGNIETLWRISFWDFVDVSVQELLDCGRCGDGCHGGFVWDAFITVLNNSGLASEKDYPFQGKVRAHRCHPKKYQKVAWIQDFIMLQNNEHRIAQYLATYGPITVTINMKPLQLYRKGVIKATPTTCDPQLVDHSVLLVGFGSVKSEEGIWAETVSSQSQPQPPHPTPYWILKNSWGAQWGEKVSVIYWGRGQGRTGLFPPSRPYVP

SEQ ID NO: 12598 - protein, 303 aa, Homo sapiens
  Payload ID: 2463
  Gene Symbol: CTSZ
  Gene Name: cathepsin Z
  Uniprot ID: Q9UBR2
  ENSP ID: ENSP00000217131
MARRGPGWRPLLLLVLLAGAAQGGLYFRRGQTCYRPLRGDGLAPLGRSTYPRPHEYLSPADLPKSWDWRNVDGVNYASITRNQHIPQYCGSCWAHASTSAMADRINIKRKGAWPSTLLSVQNVIDCGNAGSCEGGNDLSVWDYAHQHGIPDETCNNYQAKDQECDKFNQCGTCNEFKECHAIRNYTLWRVGDYGSLSGREKMMAEIYANGPISCGIMATERLANYTGGIYAEYQDTTYINHVVSVAGWGISDGTEYWIVRNSWGEPWGERGWLRIVTSTYKDGKGARYNLAIEEHCTFGDPIV

SEQ ID NO: 12599 - protein, 780 aa, Homo sapiens
  Payload ID: 2464
  Gene Symbol: CATSPER1
  Gene Name: cation channel, sperm associated 1
  Uniprot ID: Q8NEC5
  ENSP ID: ENSP00000309052
MDQNSVPEKAQNEADTNNADRFFRSHSSPPHHRPGHSRALHHYELHHHGVPHQRGESHHPPEFQDFHDQALSSHVHQSHHHSEARNHGRAHGPTGFGLAPSQGAVPSHRSYGEDYHDELQRDGRRHHDGSQYGGFHQQSDSHYHRGSHHGRPQYLGENLSHYSSGVPHHGEASHHGGSYLPHGPNPYSESFHHSEASHLSGLQHDESQHHQVPHRGWPHHHQVHHHGRSRHHEAHQHGKSPHHGETISPHSSVGSYQRGISDYHSEYHQGDHHPSEYHHGDHPHHTQHHYHQTHRHRDYHQHQDHHGAYHSSYLHGDYVQSTSQLSIPHTSRSLIHDAPGPAASRTGVFPYHVAHPRGSAHSMTRSSSTIRSRVTQMSKKVHTQDISTKHSEDWGKEEGQFQKRKTGRLQRTRKKGHSTNLFQWLWEKLTFLIQGFREMIRNLTQSLAFETFIFFVVCLNTVMLVAQTFAEVEIRGEWYFMALDSIFFCIYVVEALLKIIALGLSYFFDFWNNLDFFIMAMAVLDFLLMQTHSFAIYHQSLFRILKVFKSLRALRAIRVLRRLSFLTSVQEVTGTLGQSLPSIAAILILMFTCLFLFSAVLRALFRKSDPKRFQNIFTTIFTLFTLLTLDDWSLIYMDSRAQGAWYIIPILVIYIIIQYFIFLNLVITVLVDSFQTALFKGLEKAKQERAARIQEKLLEDSLTELRAAEPKEVASEGTMLKRLIEKKFGTMTEKQQELLFHYLQLVASVEQEQQKFRSQAAVIDEIVDTTFEAGEEDFRN

SEQ ID NO: 12600 - protein, 530 aa, Homo sapiens
  Payload ID: 2465
  Gene Symbol: CATSPER2
  Gene Name: cation channel, sperm associated 2
  Uniprot ID: Q96P56
  ENSP ID: ENSP00000321463
MAAYQQEEQMQLPRADAIRSRLIDTFSLIEHLQGLSQAVPRHTIRELLDPSRQKKLVLGDQHQLVRFSIKPQRIEQISHAQRLLSRLHVRCSQRPPLSLWAGWVLECPLFKNFIIFLVFLNTIILMVEIELLESTNTKLWPLKLTLEVAAWFILLIFILEILLKWLSNFSVFWKSAWNVFDFVVTMLSLLPEVVVLVGVTGQSVWLQLLRICRVLRSLKLLAQFRQIQIIILVLVRALKSMTFLLMLLLIFFYIFAVTGVYVFSEYTRSPRQDLEYHVFFSDLPNSLVTVFILFTLDHWYALLQDVWKVPEVSRIFSSIYFILWLLLGSIIFRSIIVAMMVTNFQNIRKELNEEMARREVQLKADMFKRQIIQRRKNMSHEALTSSHSKIEDSSRGASQQRESLDLSEVSEVESNYGATEEDLITSASKTEETLSKKREYQSSSCVSSTSSSYSSSSESRFSESIGRLDWETLVHENLPGLMEMDQDDRVWPRDSLFRYFELLEKLQYNLEERKKLQEFAVQALMNLEDK

SEQ ID NO: 12601 - protein, 534 aa, Homo sapiens
  Payload ID: 2465
  Gene Symbol: CATSPER2
  Gene Name: cation channel, sperm associated 2
  ENSP ID: ENSP00000371180
MVLGSDMAAYQQEEQMQLPRADAIRSRLIDTFSLIEHLQGLSQAVPRHTIRELLDPSRQKKLVLGDQHQLVRFSIKPQRIEQISHAQRLLSRLHVRCSQRPPLSLWAGWVLECPLFKNFIIFLVFLNTIILMVEIELLESTNTKLWPLKLTLEVAAWFILLIFILEILLKWLSNFSVFWKSAWNVFDFVVTMLSLLPEVVVLVGVTGQSVWLQLLRICRVLRSLKLLAQFRQIQIIILVLVRALKSMTFLLMLLLIFFYIFAVTGVYVFSEYTRSPRQDLEYHVFFSDLPNSLVTVFILFTLDHWYALLQDVWKVPEVSRIFSSIYFILWLLLGSIIFRSIIVAMMVTNFQNIRKELNEEMARREVQLKADMFKRQIIQRRKNMSHEALTSSHSKIEDRGASQQRESLDLSEVSEVESNYGATEEDLITSASKTEETLSKKREYQSSSCVSSTSSSYSSSSESRFSESIGRLDWETLVHENLPGLMEMDQDDRVWPRDSLFRYFELLEKLQYNLEERKKLQEFAVQALMNLEDK

SEQ ID NO: 12602 - protein, 528 aa, Homo sapiens
  Payload ID: 2465
  Gene Symbol: CATSPER2
  Gene Name: cation channel, sperm associated 2
  Uniprot ID: Q96P56
  ENSP ID: ENSP00000380088
MAAYQQEEQMQLPRADAIRSRLIDTFSLIEHLQGLSQAVPRHTIRELLDPSRQKKLVLGDQHQLVRFSIKPQRIEQISHAQRLLSRLHVRCSQRPPLSLWAGWVLECPLFKNFIIFLVFLNTIILMVEIELLESTNTKLWPLKLTLEVAAWFILLIFILEILLKWLSNFSVFWKSAWNVFDFVVTMLSLLPEVVVLVGVTGQSVWLQLLRICRVLRSLKLLAQFRQIQIIILVLVRALKSMTFLLMLLLIFFYIFAVTGVYVFSEYTRSPRQDLEYHVFFSDLPNSLVTVFILFTLDHWYALLQDVWKVPEVSRIFSSIYFILWLLLGSIIFRSIIVAMMVTNFQNIRKELNEEMARREVQLKADMFKRQIIQRRKNMSHEALTSSHSKIEDRGASQQRESLDLSEVSEVESNYGATEEDLITSASKTEETLSKKREYQSSSCVSSTSSSYSSSSESRFSESIGRLDWETLVHENLPGLMEMDQDDRVWPRDSLFRYFELLEKLQYNLEERKKLQEFAVQALMNLEDK

SEQ ID NO: 12603 - protein, 64 aa, Homo sapiens
  Payload ID: 2465
  Gene Symbol: CATSPER2
  Gene Name: cation channel, sperm associated 2
  ENSP ID: ENSP00000386595
MAAYQQEEQMQLPRADAIRSRLIDTFSLIEHLQGLSQAVPRHTIRELLDPSRQKKLVLGDQHQL

SEQ ID NO: 12604 - protein, 74 aa, Homo sapiens
  Payload ID: 2465
  Gene Symbol: CATSPER2
  Gene Name: cation channel, sperm associated 2
  ENSP ID: ENSP00000388242
  MOD_RES (1)..(1): Any amino acid
XRFSESIGRLDWETLVHENLPGLMEMDQDDRVWPRDSLFRYFELLEKLQYNLEERKKLQEFAGKKKAGHGGSHL

SEQ ID NO: 12605 - protein, 414 aa, Homo sapiens
  Payload ID: 2465
  Gene Symbol: CATSPER2
  Gene Name: cation channel, sperm associated 2
  Uniprot ID: Q96P56
  ENSP ID: ENSP00000389746
MAAYQQEEQMQLPRADAIRSRLIDTFSLIEHLQGLSQAVPRHTIRELLDPSRQKKLVLGDQHQLVRFSIKPQRIEQISHAQRLLSRLHVRCSQRPPLSLWAGWVLECPLFKNFIIFLVFLNTIILMVEIELLESTNTKLWPLKLTLEVAAWFILLIFILEILLKWLSNFSVFWKSAWNVFDFVVTMLSLLPEVVVLVGVTGQSVWLQLLRICRVLRSLKLLAQFRQIQIIILVLVRALKSMTFLLMLLLIFFYIFAVTGVYVFSEYTRSPRQDLEYHVFFSDLPNSLVTVFILFTLDHWYALLQDVWKVPEVSRIFSSIYFILWLLLGSIIFRSIIVAMMVTNFQNIRKELNEEMARREVQLKADMFKRQIIQRRKNMSHEALTSSHSKIEDRSFGLGDSCARKSARANGNGSG

SEQ ID NO: 12606 - protein, 79 aa, Homo sapiens
  Payload ID: 2465
  Gene Symbol: CATSPER2
  Gene Name: cation channel, sperm associated 2
  ENSP ID: ENSP00000407694
MAAYQQEEQMQLPRADAIRSRLIDTFSLIEHLQGLSQAVPRHTIRELLDPSRQKKLVLGDQHQLVRFSIKPQRIEQISH

SEQ ID NO: 12607 - protein, 13 aa, Homo sapiens
  Payload ID: 2465
  Gene Symbol: CATSPER2
  Gene Name: cation channel, sperm associated 2
  ENSP ID: ENSP00000408240
  MOD_RES (1)..(1): Any amino acid
XLTSSHSKIEDRS

SEQ ID NO: 12608 - protein, 398 aa, Homo sapiens
  Payload ID: 2466
  Gene Symbol: CATSPER3
  Gene Name: cation channel, sperm associated 3
  Uniprot ID: Q86XQ3
  ENSP ID: ENSP00000282611
MSQHRHQRHSRVISSSPVDTTSVGFCPTFKKFKRNDDECRAFVKRVIMSRFFKIIMISTVTSNAFFMALWTSYDIRYRLFRLLEFSEIFFVSICTSELSMKVYVDPINYWKNGYNLLDVIIIIVMFLPYALRQLMGKQFTYLYIADGMQSLRILKLIGYSQGIRTLITAVGQTVYTVASVLLLLFLLMYIFAILGFCLFGSPDNGDHDNWGNLAAAFFTLFSLATVDGWTDLQKQLDNREFALSRAFTIIFILLASFIFLNMFVGVMIMHTEDSIRKFERELMLEQQEMLMGEKQVILQRQQEEISRLMHIQKNADCTSFSELVENFKKTLSHTDPMVLDDFGTSLPFIDIYFSTLDYQDTTVHKLQELYYEIVHVLSLMLEDLPQEKPQSLEKVDEK

SEQ ID NO: 12609 - protein, 483 aa, Homo sapiens
  Payload ID: 2467
  Gene Symbol: CATSPER4
  Gene Name: cation channel, sperm associated 4
  ENSP ID: ENSP00000341006
MRDNEKAWWQQWTSHTGLEGWGGTQEDRMGFGGAVAALRGRPSPLQSTIHESYGRPEEQVLINRQEITNKADAWDMQEFITHMYIKQLLRHPAFQLLLALLLVINAITIALRTNSYLDQKHYELFSTIDDIVLTILLCEVLLGWLNGFWIFWKDGWNILNFIIVFILLLRFFINEINIPSINYTLRALRLVHVCMAVEPLARIIRVILQSVPDMANIMVLILFFMLVFSVFGVTLFGAFVPKHFQNIQVALYTLFICITQDGWVDIYSDFQTEKREYAMEIGGAIYFTIFITIGAFIGINLFVIVVTTNLEQMMKAGEQGQQQRITFSETGAEEEEENDQLPLVHCVVARSEKSGLLQEPLAGGPLSNLSENTCDNFCLVLEAIQENLRQYKEIRDELNMIVEEVRAIRFNQEQESEVLNRRSSTSGSLETTSSKDIRQMSQQQDLLSALVSMEKVCLPSPTQWVLALTLCSAQPSRASGPFV

SEQ ID NO: 12610 - protein, 472 aa, Homo sapiens
  Payload ID: 2467
  Gene Symbol: CATSPER4
  Gene Name: cation channel, sperm associated 4
  Uniprot ID: Q7RTX7
  ENSP ID: ENSP00000390423
MRDNEKAWWQQWTSHTGLEGWGGTQEDRMGFGGAVAALRGRPSPLQSTIHESYGRPEEQVLINRQEITNKADAWDMQEFITHMYIKQLLRHPAFQLLLALLLVINAITIALRTNSYLDQKHYELFSTIDDIVLTILLCEVLLGWLNGFWIFWKDGWNILNFIIVFILLLRFFINEINIPSINYTLRALRLVHVCMAVEPLARIIRVILQSVPDMANIMVLILFFMLVFSVFGVTLFGAFVPKHFQNIQVALYTLFICITQDGWVDIYSDFQTEKREYAMEIGGAIYFTIFITIGAFIGINLFVIVVTTNLEQMMKAGEQGQQQRITFSETGAEEEEENDQLPLVHCVVARSEKSGLLQEPLAGGPLSNLSENTCDNFCLVLEAIQENLRQYKEIRDELNMIVEEVRAIRFNQEQESEVLNRRSSTSGSLETTSSKDIRQMSQQQDLLSALVSMEKVHDSSSQILLKKHKSSH

SEQ ID NO: 12611 - protein, 384 aa, Homo sapiens
  Payload ID: 2467
  Gene Symbol: CATSPER4
  Gene Name: cation channel, sperm associated 4
  Uniprot ID: Q7RTX7
  ENSP ID: ENSP00000429464
MRDNEKAWWQQWTSHTGLEGWGGTQEDRMGFGGAVAALRGRPSPLQSTIHESYGRPEEQVLINRQEITNKADAWDMQEFITHMYIKQLLRHPAFQLLLALLLVINAITIALRTNSYLDQKHYELFSTIDDIVLTILLCEVLLGWLNGFWIFWKDGWNILNFIIVFILLLRFFINEINIPSINYTLRALRLVHVCMAVEPLARIIRVILQSVPDMANIMVLILFFMLHFQNIQVALYTLFICITQDGWVDIYSDFQTEKREYAMEIGGAIYFTIFITIGAFIGINLFVIVVTTNLEQMMKAGEQGQQQRITFSETGAEEEEENDQLPLVHCVVARSEKSGLLQEPLAGGPLSNLSENTCDNFCLVLEAIQENLRQYKEIRDELNM

SEQ ID NO: 12612 - protein, 373 aa, Homo sapiens
  Payload ID: 2467
  Gene Symbol: CATSPER4
  Gene Name: cation channel, sperm associated 4
  ENSP ID: ENSP00000477936
MDLPYRPRGVGGTQEDRMGFGGAVAALRGRPSPLQSTIHESYGRPEEQVLINRQEITNKADAWDMQEFITHMYIKQLLRHPAFQLLLALLLVINAITIALRTNSYLDQKHYELFSTIDDIVLTILLCEVLLGWLNGFWIFWKDGWNILNFIIVFILLLRFFINEINIPSINYTLRALRLVHVCMAVEPLARIIRVILQSVPDMANIMVLILFFMLHFQNIQVALYTLFICITQDGWVDIYSDFQTEKREYAMEIGGAIYFTIFITIGAFIGINLFVIVVTTNLEQMMKAGEQGQQQRITFSETGAEEEEENDQLPLVHCVVARSEKSGLLQEPLAGGPLSNLSENTCDNFCLVLEAIQENLRQYKEIRDELNM

SEQ ID NO: 12613 - protein, 1116 aa, Homo sapiens
  Payload ID: 2468
  Gene Symbol: CATSPERB
  Gene Name: catsper channel auxiliary subunit beta
  Uniprot ID: Q9H7T0
  ENSP ID: ENSP00000256343
MESPLIYVSVLLLNIFEFSSGIVYNKDDTEKRFACSNKGFPQENEIIKLYLFLENLKIQCFFQTENEIASKAMLSVFTSGGLAPSLGIMNSTYNGIFHFNLTLFSDRILWLVDIPRENITQSTDIAAVEEWLVRITLHHGLNIYATEGTLLDVIREPILQWTPGDVIPESEISKLYPHVVDLKVTKCPCANDVALLGFIVDTIVDGVYIGITFGGFWHDYDTTWFNMTQTIYSQLQEEYEDLSLVDMVLTNHFLVILTSLGLFVSEDLRYPSRHSLSFSRADFCGFERVDYVKGKLWYNERCFANREHFEVDYVTVTFERNRTLSESSSCFYSQEPFLEWVPCLPHIFKGIKIFPTVLTFLVDQERGTGVYLFYNKVRKTAIASVSTLRNNEPNSQSKFPIFRFPSSFSSPVGMVFHPRSHFLYAYGNQIWLSVDGGNTFQLIANFHDDIIKKTFHSFYTSAITFVSQRGKVYSTKAGMGRYSAVGSVTERIFTLYYDHLGFLHKLTLGRFEASGPPTAFGNSRNLFGQPPDMGFETALAPQHTSLDEIIFFAYVPENEPQETIYSKKFGNIHYGKVIHSGKTGRAYIRKVLQHTTPKGFLSSVIAEMKEPFGLEEVNESSCLSSSLLINKAGNVYKLTLDSQVVQALFEDTDIEKTVVLPGYSSFLITSILDNKNALAIATMPESAPNNMTFLKSTWFLYNFGQRNGRTWKIYSKPCNYWFQHDDSPSLNIVKYIDLGNSYVLKAKVIRNAKGFRMLEIPLLTVFVGNPNLLEVTAEVTFDDTDSYVITISAASKVLHQGSTSLAFIMWSASTECFVTTMVPTLKSSCSYLRSMHHIPSKFIPFEDWISGVHKDSQGFNLIKTLPINYRPPSNMGIAIPLTDNFYHADPSKPIPRNMFHMSKKTGKFKQCANVSTREECNCTKDQKFSHAVAFSDCREKVPRFKFPITQYPVSLEIINEDGRVPLQSPYLVTVTEVNMRHNWKLKHTVPENIKRMKQLVEPILGAAVYNPSGLNLSIKGSELFHFRVTVISGVTFCNLIEEFQIYVDEAPLPFPGHTLIAVATAVVLGGLIFIAFMFQLQGIHPWRTFQRWIRRNQEKFSSISLSELIHRSKSEE

SEQ ID NO: 12614 - protein, 150 aa, Homo sapiens
  Payload ID: 2468
  Gene Symbol: CATSPERB
  Gene Name: catsper channel auxiliary subunit beta
  ENSP ID: ENSP00000450878
MESPLIYVSVLLLNIFEFSSGIVYNKDDTEKRFACSNKGFPQENEIIKLYLFLENLFSDRILWLVDIPRENITQSTDIAAVEEWLVRITLHHGLNIYATEGTLLDVIREPILQWTPGDVIPESEISKLYPHVVDLKVTKCPCANDVALLG

SEQ ID NO: 12615 - protein, 73 aa, Homo sapiens
  Payload ID: 2468
  Gene Symbol: CATSPERB
  Gene Name: catsper channel auxiliary subunit beta
  ENSP ID: ENSP00000451047
MESPLIYVSVLLLNIFEFSSGIVYNKDDTEKRFACSNKGFPQENEIIKLYLFLENLKIQCFFQTENEIASKAM

SEQ ID NO: 12616 - protein, 67 aa, Homo sapiens
  Payload ID: 2468
  Gene Symbol: CATSPERB
  Gene Name: catsper channel auxiliary subunit beta
  ENSP ID: ENSP00000451083
NEPNSQSKFPIFRFPSSFSSPVGMVFHPRSHFLYAYGNQEWEDTVQSEVLLREFSHYTMITWDSYIS

SEQ ID NO: 12617 - protein, 74 aa, Homo sapiens
  Payload ID: 2468
  Gene Symbol: CATSPERB
  Gene Name: catsper channel auxiliary subunit beta
  ENSP ID: ENSP00000451455
MESPLIYVSVLLLNIFEFSSGIVYNKDDTEKRFACSNKGFPQENEIIKLYLFLENLKIQCFFQTENEIASKAML

SEQ ID NO: 12618 - protein, 100 aa, Homo sapiens
  Payload ID: 2468
  Gene Symbol: CATSPERB
  Gene Name: catsper channel auxiliary subunit beta
  ENSP ID: ENSP00000452224
MESPLIYVSVLLLNIFEFSSGIVYNKDDTEKRFACSNKGFPQENEIIKLYLFLENLKIQCFFQTENEIASKAMLSVFTSGGLAPSLGIMNSTYNGIFHFN

SEQ ID NO: 12619 - protein, 1116 aa, Homo sapiens; identical to SEQ ID NO: 12613
  Payload ID: 2468
  Gene Symbol: CATSPERB
  Gene Name: catsper channel auxiliary subunit beta
  Uniprot ID: Q9H7T0
  ENSP ID: ENSP00000478546

SEQ ID NO: 12620 - protein, 73 aa, Homo sapiens; identical to SEQ ID NO: 12615
  Payload ID: 2468
  Gene Symbol: CATSPERB
  Gene Name: catsper channel auxiliary subunit beta
  ENSP ID: ENSP00000488258

SEQ ID NO: 12621 - protein, 67 aa, Homo sapiens; identical to SEQ ID NO: 12616
  Payload ID: 2468
  Gene Symbol: CATSPERB
  Gene Name: catsper channel auxiliary subunit beta
  ENSP ID: ENSP00000488380

SEQ ID NO: 12622 - protein, 150 aa, Homo sapiens; identical to SEQ ID NO: 12614
  Payload ID: 2468
  Gene Symbol: CATSPERB
  Gene Name: catsper channel auxiliary subunit beta
  ENSP ID: ENSP00000488739

SEQ ID NO: 12623 - protein, 74 aa, Homo sapiens; identical to SEQ ID NO: 12617
  Payload ID: 2468
  Gene Symbol: CATSPERB
  Gene Name: catsper channel auxiliary subunit beta
  ENSP ID: ENSP00000488745

SEQ ID NO: 12624 - protein, 100 aa, Homo sapiens; identical to SEQ ID NO: 12618
  Payload ID: 2468
  Gene Symbol: CATSPERB
  Gene Name: catsper channel auxiliary subunit beta
  ENSP ID: ENSP00000488766

SEQ ID NO: 12625 - protein, 798 aa, Homo sapiens
  Payload ID: 2469
  Gene Symbol: CATSPERD
  Gene Name: catsper channel auxiliary subunit delta
  Uniprot ID: Q86XM0
  ENSP ID: ENSP00000371037
MLMLMLVAAVTMWLRPLVTAQLCRSRTVRTGKVFNLIQDVQGDRLYFHPTTTRLIKHPCEKNIALYLGKQVFFTMDNFETSLLPFTIPTSMQVGVPEVTSAHFAGSLLLLVVDQKVYIYDYENNSWSMSLGIKHPVTHVSGDNCCYTGSLFCVHVSNLVFAYFRGDQISQTYIYYSNTGGFSFWKYHYDRQAEIIGSLGGIFHFFSLSQVAMLVVNQGKGMFKYSDHPLNRSFGLSFDYNGTLDILIAPGQRGILLLWFENSLLFSHNAGQLVDTVRVKKGDQTLFSSIFEAKITIHNIAVTENELAVITREDNLYYGNLGIVPSSIIKFADQYIWSEDVALMFRSPGTLEILTPLRDTAFPAFDFQKCLVNIQALLMDPELHVGKCKIEFLTGEFIYRMYTIDMHSQLELTASLIPQPGTSLIPLVMVSNPHSLGFQATFYENGYTSDGNTKYKLDIFLKQQQHWGRTDSNFTSSLKKATMSTLTVDIANKEISCVDIKPLSTLISVGCDLDKKIVIQNKVSACSMGILDPLTLQDNYSFIIEKEFYDPGFQGQQSSEDLHVFYSYQQLGCPLLVYYDTLWKPVVELWRKDSFQEVIDAEYVLLEVNGQFSYSYSLTAQSAMCTSQPQNWTTMIKEFGGPFFWNRENYVSCHDPNNNAPLRWPDVQYQILGGRTANQIIFGHNGFYVFYISIVDPYYSYCQLETIFSIYVYGAFPVQLVSAGVVILLIISSILGSVWLAYKTPKLLRTARGRRIKKCATQLCRRCKTVCQFRASATARAGTEPPGRHRTPHGGRSDH

SEQ ID NO: 12626 - protein, 292 aa, Homo sapiens
  Payload ID: 2470
  Gene Symbol: CATSPERG
  Gene Name: catsper channel auxiliary subunit gamma
  ENSP ID: ENSP00000311314
MCGPAMFPAGPPWPRVRVVQVLWALLAVLLASWRLWAIKDFQECTWQVVLNEFKRVGESGVSDSFFEQEPVDTVSSLFHMLVDSPIDPSEKYLGFPYYLKINYSCEEKSPVNFYRWKIEQLQIQMEAAPFRSKEPCMAEEVCSMSWYTPMPIKKGSVVMRVDISSNGLGTFIPDKRFQMNINGFLKRDRDNNIQFTVGEELFNLMPQYFVGVSSRPLWHTVDQSPVLILGGIPNEKYVLMTDTSFKDFSLVEAPIPHSMRETAAVAVGFVSWPASASRSCALCISIAMALST

SEQ ID NO: 12627 - protein, 660 aa, Homo sapiens
  Payload ID: 2470
  Gene Symbol: CATSPERG
  Gene Name: catsper channel auxiliary subunit gamma
  ENSP ID: ENSP00000386950
MCGPAMFPAGPPWPRVRVVQVLWALLAVLLASWRLWAIKDFQECTWQVVLNEFKRVGESGVSDSFFEQEPVDTVSSLFHMLVDSPIDPSEKYLGFPYYLKINYSCEEKPSEDLVRMGHLTGLKPLVLVTFQSPVNFYRWKIEQLQIQMEAAPFRSKEPCMAEEVCSMSWYTPMPIKKGSVVMRVDISSNGLGTFIPDKRFQMNINGFLKRDRDNNIQFTVGEELFNLMPQYFVGVSSRPLWHTVDQSPVLILGGIPNEKYVLMTDTSFKDFSLVELSIDSCWVGSFYCPHSGFTATIYDTIATESTLFIRQNQLVYYFTGTYTTLYERNRGSGSWIRVLASECIKKLCPVYFHSNGSEYIMALTTGKHEGYVHFGTIRDGQVSFEMLPRQWSVCEQIGVTTCSIIWSEYIAGEYTLLLLVESGYGNASKRFQVVSYNTASDDLELLYHIPEFIPEARGLEFLMILGTESYTSTAMAPKGIFCNPYNNLIFIWGNFLLQSSNKENFIYLADFPKELSIKYMARSFRGAVAIVTETEEIWYLLEGSYRVYQLFPSKGWQVHISLKLMQQSSLYASNETMLTLFYEDSKLYQLVYLMNNQKGQLVKRLVPVEQLLMYQQHTSHYDLERKGGYLMLSFIDFCPFSVMRLRSLPSPQRYTRQERY

SEQ ID NO: 12628 - protein, 1159 aa, Homo sapiens
  Payload ID: 2470
  Gene Symbol: CATSPERG
  Gene Name: catsper channel auxiliary subunit gamma
  Uniprot ID: Q6ZRH7
  ENSP ID: ENSP00000386962
MCGPAMFPAGPPWPRVRVVQVLWALLAVLLASWRLWAIKDFQECTWQVVLNEFKRVGESGVSDSFFEQEPVDTVSSLFHMLVDSPIDPSEKYLGFPYYLKINYSCEEKPSEDLVRMGHLTGLKPLVLVTFQSPVNFYRWKIEQLQIQMEAAPFRSKEPCMAEEVCSMSWYTPMPIKKGSVVMRVDISSNGLGTFIPDKRFQMNINGFLKRDRDNNIQFTVGEELFNLMPQYFVGVSSRPLWHTVDQSPVLILGGIPNEKYVLMTDTSFKDFSLVELSIDSCWVGSFYCPHSGFTATIYDTIATESTLFIRQNQLVYYFTGTYTTLYERNRGSGSWIRVLASECIKKLCPVYFHSNGSEYIMALTTGKHEGYVHFGTIRDGQVSFEMLPRQWSVCEQIGVTTCSIIWSEYIAGEYTLLLLVESGYGNASKRFQVVSYNTASDDLELLYHIPEFIPEARGLEFLMILGTESYTSTAMAPKGIFCNPYNNLIFIWGNFLLQSSNKENFIYLADFPKELSIKYMARSFRGAVAIVTETEEIWYLLEGSYRVYQLFPSKGWQVHISLKLMQQSSLYASNETMLTLFYEDSKLYQLVYLMNNQKGQLVKRLVPVEQLLMYQQHTSHYDLERKGGYLMLSFIDFCPFSVMRLRSLPSPQRYTRQERYRARPPRVLERSGFHNENSLAIYQGLVYYLLWLHSVYDKPYADPVHDPTWRWWANNKQDQDYYFFLASNWRSAGGVSIEMDSYEKIYNLESAYELPERIFLDKGTEYSFAIFLSAQGHSFRTQSELGTAFQLHSQVDVGVVLADPGCIEASVKQEVLINRNSVLFSITLKDKKLCYDQGISGHHLMETSMTVNVVGSSGLCFQETHLGPHMQGNLMVPVFIGCPPGKRLAFDITYTLEYSRLKNKHYFDCVNVNPEMPCFLFRDIFYPFFLIQDLVTGDSGSFQGSYVLLVVGGGPTLDSLKDYSEDEIYRFNSPLDKTNSLIWTTRTTRTTKDSAFHIMSHESPGIEWLCLENAPCYDNVPQGIFAPEFFFKVLVSNRGVDTSTYCNYQLTFLLHIHGLPLSPKRALFIIMVSASVFVGLVIFYIAFCLLWPLVVKGCTMIRWKINNLIASESYYTYASISGISSMPSLRHSRMGSMFSSRMTEDRAEPKEAVERQLMT

SEQ ID NO: 12629 - protein, 1119 aa, Homo sapiens
  Payload ID: 2470
  Gene Symbol: CATSPERG
  Gene Name: catsper channel auxiliary subunit gamma
  ENSP ID: ENSP00000387057
MCGPAMFPAGPPWPRVRVVQVLWALLAVLLASWRLWAIKDFQECTWQVVLNEFKRVGESGVSDSFFEQEPVDTVSSLFHMLVDSPIDPSEKYLGFPYYLKINYSCEEKPSEDLVRMGHLTGLKPLVLVTFQSPVNFYRWKIEQLQIQMEAAPFRSKEPCMAEEVCSMSWYTPMPIKKGSVVMRVDISSNGLGTFIPDKRFQMNINGFLKRDRDNNIQFTVGEELFNLMPQYFVGVSSRPLWHTVDQSPVLILGGIPNEKYVLMTDTSFKDFSLVELSIDSCWVGSFYCPHSGFTATIYDTIATESTLFIRQNQLVYYFTGTYTTLYERNRGSGSWIRVLASECIKKLCPVYFHSNGSEYIMALTTGKHEGYVHFGTIRDGQVSFEMLPRQWSVCEQIGASDDLELLYHIPEFIPEARGLEFLMILGTESYTSTAMAPKGIFCNPYNNLIFIWGNFLLQSSNKENFIYLADFPKELSIKYMARSFRGAVAIVTETEEIWYLLEGSYRVYQLFPSKGWQVHISLKLMQQSSLYASNETMLTLFYEDSKLYQLVYLMNNQKGQLVKRLVPVEQLLMYQQHTSHYDLERKGGYLMLSFIDFCPFSVMRLRSLPSPQRYTRQERYRARPPRVLERSGFHNENSLAIYQGLVYYLLWLHSVYDKPYADPVHDPTWRWWANNKQDQDYYFFLASNWRSAGGVSIEMDSYEKIYNLESAYELPERIFLDKGTEYSFAIFLSAQGHSFRTQSELGTAFQLHSQVDVGVVLADPGCIEASVKQEVLINRNSVLFSITLKDKKLCYDQGISGHHLMETSMTVNVVGSSGLCFQETHLGPHMQGNLMVPVFIGCPPGKRLAFDITYTLEYSRLKNKHYFDCVNVNPEMPCFLFRDIFYPFFLIQDLVTGDSGSFQGSYVLLVVGGGPTLDSLKDYSEDEIYRFNSPLDKTNSLIWTTRTTRTTKDSAFHIMSHESPGIEWLCLENAPCYDNVPQGIFAPEFFFKVLVSNRGVDTSTYCNYQLTFLLHIHGLPLSPKRALFIIMVSASVFVGLVIFYIAFCLLWPLVVKGCTMIRWKINNLIASESYYTYASISGISSMPSLRHSRMGSMFSSRMTEDRAEPKEAVERQLMT

SEQ ID NO: 12630 - protein, 165 aa, Homo sapiens
  Payload ID: 2470
  Gene Symbol: CATSPERG
  Gene Name: catsper channel auxiliary subunit gamma
  ENSP ID: ENSP00000395093
RWKIEQLQIQMEAAPFRSKEPCMAEEVCSMSWYTPMPIKKGSVVMRVDISSNGLGTFIPDKRFQMNINGFLKRDRDNNIQFTVGEELFNLMPQYFVGVSSRPLWHTVDQSPVLILGGIPNEKYVLMTDTSFKDFSLVEAVGFVSWPASASRSCALCISIAMALST

SEQ ID NO: 12631 - protein, 136 aa, Homo sapiens
  Payload ID: 2470
  Gene Symbol: CATSPERG
  Gene Name: catsper channel auxiliary subunit gamma
  ENSP ID: ENSP00000467947
MCGPAMFPAGPPWPRVRVVQVLWALLAVLLASWRLWAIKDFQECTWQVVLNEFKRVGESGVSDSFFEQEPVDTVSSLFHMLVDSPIDPSEKYLGFPYYLKINYSCEEKSPVNFYRWKIEQLQIQMEAAPFRSKGSR

SEQ ID NO: 12632 - protein, 159 aa, Homo sapiens
  Payload ID: 2470
  Gene Symbol: CATSPERG
  Gene Name: catsper channel auxiliary subunit gamma
  ENSP ID: ENSP00000468028
MCGPAMFPAGPPWPRVRVVQVLWALLAVLLASWRLWAIKDFQECTWQVVLNEFKRVGESGVSDSFFEQEPVDTVSSLFHMLVDSPIDPSEKYLGFPYYLKINYSCEEKTESCAVAQTGVQWRDLGSLQPPPPVFKRCSCLGLPSSWNYSPLRTWCAWAT

SEQ ID NO: 12633 - protein, 180 aa, Homo sapiens
  Payload ID: 2470
  Gene Symbol: CATSPERG
  Gene Name: catsper channel auxiliary subunit gamma
  ENSP ID: ENSP00000470225
  MOD_RES (1)..(1): Any amino acid
XRNRGSGSWIRVLASECIKKLCPVYFHSNGSEYIMALTTGKHEGYVHFGTIRASDDLELLYHIPEFIPEARGLEFLMILGTESYTSTAMAPKGIFCNPYNNLIFIWGNFLLQSSNKENFIYLADFPKELSIKYMARSFRGAVAIVTETEEIWYLLEGSYRVYQLFPSKGWQVHISLKLMQ

SEQ ID NO: 12634 - protein, 265 aa, Homo sapiens
  Payload ID: 2471
  Gene Symbol: CDX1
  Gene Name: caudal type homeobox 1
  Uniprot ID: P47902
  ENSP ID: ENSP00000231656
MYVGYVLDKDSPVYPGPARPASLGLGPQAYGPPAPPPAPPQYPDFSSYSHVEPAPAPPTAWGAPFPAPKDDWAAAYGPGPAAPAASPASLAFGPPPDFSPVPAPPGPGPGLLAQPLGGPGTPSSPGAQRPTPYEWMRRSVAAGGGGGSGKTRTKDKYRVVYTDHQRLELEKEFHYSRYITIRRKSELAANLGLTERQVKIWFQNRRAKERKVNKKKQQQQQPPQPPMAHDITATPAGPSLGGLCPSNTSLLATSSPMPVKEEFLP

SEQ ID NO: 12635 - protein, 154 aa, Homo sapiens [sequence omitted]

SEQ ID NO: 12636 - protein, 313 aa, Homo sapiens
  Payload ID: 2472
  Gene Symbol: CDX2
  Gene Name: caudal type homeobox 2
  Uniprot ID: Q99626
  ENSP ID: ENSP00000370408
MYVSYLLDKDVSMYPSSVRHSGGLNLAPQNFVSPPQYPDYGGYHVAAAAAAAANLDSAQSPGPSWPAAYGAPLREDWNGYAPGGAAAAANAVAHGLNGGSPAAAMGYSSPADYHPHHHPHHHPHHPAAAPSCASGLLQTLNPGPPGPAATAAAEQLSPGGQRRNLCEWMRKPAQQSLGSQVKTRTKDKYRVVYTDHQRLELEKEFHYSRYITIRRKAELAATLGLSERQVKIWFQNRRAKERKINKKKLQQQQQQQPPQPPPPPPQPPQPQPGPLRSVPEPLSPVSSLQASVPGSVPGVLGPTGGVLNPTVTQ

SEQ ID NO: 12637 - protein, 284 aa, Homo sapiens
  Payload ID: 2473
  Gene Symbol: CDX4
  Gene Name: caudal type homeobox 4
  Uniprot ID: O14627
  ENSP ID: ENSP00000362613
MYGSCLLEKEAGMYPGTLMSPGGDGTAGTGGTGGGGSPMPASNFAAAPAFSHYMGYPHMPSMDPHWPSLGVWGSPYSPPREDWSVYPGPSSTMGTVPVNDVTSSPAAFCSTDYSNLGPVGGGTSGSSLPGQAGGSLVPTDAGAAKASSPSRSRHSPYAWMRKTVQVTGKTRTKEKYRVVYTDHQRLELEKEFHCNRYITIQRKSELAVNLGLSERQVKIWFQNRRAKERKMIKKKISQFENSGGSVQSDSDSISPGELPNTFFTTPSAVRGFQPIEIQQVIVSE

SEQ ID NO: 12638 - protein, 178 aa, Homo sapiens
  Payload ID: 2474
  Gene Symbol: CAV1
  Gene Name: caveolin 1, caveolae protein, 22kDa
  Uniprot ID: Q03135
  ENSP ID: ENSP00000339191
MSGGKYVDSEGHLYTVPIREQGNIYKPNNKAMADELSEKQVYDAHTKEIDLVNRDPKHLNDDVVKIDFEDVIAEPEGTHSFDGIWKASFTTFTVTKYWFYRLLSALFGIPMALIWGIYFAILSFLHIWAVVPCIKSFLIEIQCISRVYSIYVHTVCDPLFEAVGKIFSNVRINLQKEI

SEQ ID NO: 12639 - protein, 147 aa, Homo sapiens
  Payload ID: 2474
  Gene Symbol: CAV1
  Gene Name: caveolin 1, caveolae protein, 22kDa
  Uniprot ID: Q03135
  ENSP ID: ENSP00000377110
MADELSEKQVYDAHTKEIDLVNRDPKHLNDDVVKIDFEDVIAEPEGTHSFDGIWKASFTTFTVTKYWFYRLLSALFGIPMALIWGIYFAILSFLHIWAVVPCIKSFLIEIQCISRVYSIYVHTVCDPLFEAVGKIFSNVRINLQKEI

SEQ ID NO: 12640 - protein, 147 aa, Homo sapiens; identical to SEQ ID NO: 12639
  Payload ID: 2474
  Gene Symbol: CAV1
  Gene Name: caveolin 1, caveolae protein, 22kDa
  Uniprot ID: Q03135
  ENSP ID: ENSP00000377111

SEQ ID NO: 12641 - protein, 167 aa, Homo sapiens
  Payload ID: 2474
  Gene Symbol: CAV1
  Gene Name: caveolin 1, caveolae protein, 22kDa
  ENSP ID: ENSP00000377113
MSGGKYVDSEGNIYKPNNKAMADELSEKQVYDAHTKEIDLVNRDPKHLNDDVVKIDFEDVIAEPEGTHSFDGIWKASFTTFTVTKYWFYRLLSALFGIPMALIWGIYFAILSFLHIWAVVPCIKSFLIEIQCISRVYSIYVHTVCDPLFEAVGKIFSNVRINLQKEI

SEQ ID NO: 12642 - protein, 147 aa, Homo sapiens; identical to SEQ ID NO: 12639
  Payload ID: 2474
  Gene Symbol: CAV1
  Gene Name: caveolin 1, caveolae protein, 22kDa
  Uniprot ID: Q03135
  ENSP ID: ENSP00000384348

SEQ ID NO: 12643 - protein, 138 aa, Homo sapiens
  Payload ID: 2474
  Gene Symbol: CAV1
  Gene Name: caveolin 1, caveolae protein, 22kDa
  ENSP ID: ENSP00000389033
MADELSEKQVYDAHTKEIDLVNRDPKHLNDDVVKIDFEDVIAEPEGTHSFDGIWKASFTTFTVTKYWFYRLLSALFGIPMALIWGIYFAILSFLHIWAVVPCIKSFLIEIQCISRVYSIYVHTVCDPLFEAVGKIFSN

SEQ ID NO: 12644 - protein, 86 aa, Homo sapiens
  Payload ID: 2474
  Gene Symbol: CAV1
  Gene Name: caveolin 1, caveolae protein, 22kDa
  ENSP ID: ENSP00000409541
MSGGKYVDSEVGIRGGAPARACGECPLLLSASPNIPTAALAPALSPLRSTPLALAPLRNGPGRGGEEKPGMFYVFLMERGPREPLS

SEQ ID NO: 12645 - protein, 147 aa, Homo sapiens; identical to SEQ ID NO: 12639
  Payload ID: 2474
  Gene Symbol: CAV1
  Gene Name: caveolin 1, caveolae protein, 22kDa
  Uniprot ID: Q03135
  ENSP ID: ENSP00000479447

SEQ ID NO: 12646 - protein, 162 aa, Homo sapiens
  Payload ID: 2475
  Gene Symbol: CAV2
  Gene Name: caveolin 2
  Uniprot ID: P51636
  ENSP ID: ENSP00000222693
MGLETEKADVQLFMDDDSYSHHSGLEYADPEKFADSDQDRDPHRLNSHLKLGFEDVIAEPVTTHSFDKVWICSHALFEISKYVMYKFLTVFLAIPLAFIAGILFATLSCLHIWILMPFVKTCLMVLPSVQTIWKSVTDVIIAPLCTSVGRCFSSVSLQLSQD

SEQ ID NO: 12647 - protein, 112 aa, Homo sapiens
  Payload ID: 2475
  Gene Symbol: CAV2
  Gene Name: caveolin 2
  Uniprot ID: P51636
  ENSP ID: ENSP00000345679
MGLETEKADVQLFMDDDSYSHHSGLEYADPEKFADSDQDRDPHRLNSHLKDFNAFCKDLPNGSAFSADNMEECDRCYHCSIVYERRTMLLFCQPATEPGLNTWTPGLEIGIL

SEQ ID NO: 12648 - protein, 113 aa, Homo sapiens
  Payload ID: 2475
  Gene Symbol: CAV2
  Gene Name: caveolin 2
  ENSP ID: ENSP00000377120
MGLETEKADVQLFMDDDSYSHHSGLEYADPEKFADSDQDRDPHRLNSHLKLGFEDVIAEPVTTHSFDKVWICSHALFEISKYVMYKFLTVFLAIPLAFIAGILFATLSCLHIW

SEQ ID NO: 12649 - protein, 151 aa, Homo sapiens
  Payload ID: 2476
  Gene Symbol: CAV3
  Gene Name: caveolin 3
  Uniprot ID: P56539
  ENSP ID: ENSP00000341940
MMAEEHTDLEAQIVKDIHCKEIDLVNRDPKNINEDIVKVDFEDVIAEPVGTYSFDGVWKVSYTTFTVSKYWCYRLLSTLLGVPLALLWGFLFACISFCHIWAVVPCIKSYLIEIQCISHIYSLCIRTFCNPLFAALGQVCSSIKVVLRKEV

SEQ ID NO: 12650 - protein, 151 aa, Homo sapiens; identical to SEQ ID NO: 12649
  Payload ID: 2476
  Gene Symbol: CAV3
  Gene Name: caveolin 3
  Uniprot ID: P56539
  ENSP ID: ENSP00000380525

SEQ ID NO: 12651 - protein, 982 aa, Homo sapiens [sequence omitted]

SEQ ID NO: 12652 - protein, 321 aa, Homo sapiens
  Payload ID: 2477
  Gene Symbol: CBLB
  Gene Name: Cbl proto-oncogene B, E3 ubiquitin protein ligase
  ENSP ID: ENSP00000377598
GITASSNVNGRHSRVGSDPVLMRKHRRHDLPLEGAKVFSNGHLGSEEYDVPPRLSPPPPVTTLLPSIKCTGPLANSLSEKTRDPVEEDDDEYKIPSSHPVSLNSQPSHCHNVKPPVRSCDNGHCMLNGTHGPSSEKKSNIPDLSIYLKGEDAFDALPPSLPPPPPPARHSLIEHSKPPGSSSRPSSGQDLFLLPSDPFVDLASGQVPLPPARRLPGENVKTNRTSQDYDQLPSCSDGSQAPARPPKPRPRRTAPEIHHRKPHGPEAALENVDAKIAKLMGEGYAFEEVKRALEIAQNNVEVARSILREFAFPPPVSPRLNL

SEQ ID NO: 12653 - protein, 197 aa, Homo sapiens
  Payload ID: 2477
  Gene Symbol: CBLB
  Gene Name: Cbl proto-oncogene B, E3 ubiquitin protein ligase
  ENSP ID: ENSP00000384170
MLNGTHGPSSEKKSNIPDLSIYLKGEDAFDALPPSLPPPPPPARHSLIEHSKPPGSSSRPSSGQDLFLLPSDPFVDLASGQVPLPPARRLPGENVKTNRTSQDYDQLPSCSDGSQAPARPPKPRPRRTAPEIHHRKPHGPEAALENVDAKIAKLMGEGYAFEEVKRALEIAQNNVEVARSILREFAFPPPVSPRLNL

SEQ ID NO: 12654 - protein, 770 aa, Homo sapiens
  Payload ID: 2477
  Gene Symbol: CBLB
  Gene Name: Cbl proto-oncogene B, E3 ubiquitin protein ligase
  Uniprot ID: Q13191
  ENSP ID: ENSP00000384816
MANSMNGRNPGGRGGNPRKGRILGIIDAIQDAVGPPKQAAADRRTVEKTWKLMDKVVRLCQNPKLQLKNSPPYILDILPDTYQHLRLILSKYDDNQKLAQLSENEYFKIYIDSLMKKSKRAIRLFKEGKERMYEEQSQDRRNLTKLSLIFSHMLAEIKAIFPNGQFQGDNFRITKADAAEFWRKFFGDKTIVPWKVFRQCLHEVHQISSGLEAMALKSTIDLTCNDYISVFEFDIFTRLFQPWGSILRNWNFLAVTHPGYMAFLTYDEVKARLQKYSTKPGSYIFRLSCTRLGQWAIGYVTGDGNILQTIPHNKPLFQALIDGSREGFYLYPDGRSYNPDLTGLCEPTPHDHIKVTQEQYELYCEMGSTFQLCKICAENDKDVKIEPCGHLMCTSCLTAWQESDGQGCPFCRCEIKGTEPIIVDPFDPRDEGSRCCSIIDPFGMPMLDLDDDDDREESLMMNRLANVRKCTDRQNSPVTSPGSSPLAQRRKPQPDPLQIPHLSLPPVPPRLDLIQKGIVRSPCGSPTGSPKSSPCMVRKQDKPLPAPPPPLRDPPPPPPERPPPIPPDNRLSRHIHHVESVPSRDPPMPLEAWCPRDVFGTNQLVGCRLLGEGSPKPGITASSNVNGRHSRVGSDPVLMRKHRRHDLPLEGAKVFSNGHLGSEEYDVPPRLSPPPPVTTLLPSIKCTGPLANSLSEKTRDPVEEDDDEYKIPSSHPVSLNSQPSHCHNVKPPVRSCDNGHCMLNGTHGPSSEKKSNIPDLSIYLKGTYRI

SEQ ID NO: 12655 - protein, 810 aa, Homo sapiens
  Payload ID: 2477
  Gene Symbol: CBLB
  Gene Name: Cbl proto-oncogene B, E3 ubiquitin protein ligase
  ENSP ID: ENSP00000384938
MANSMNGRNPGGRGGNPRKGRILGIIDAIQDAVGPPKQAAADRRTVEKTWKLMDKVVRLCQNPKLQLKNSPPYILDILPDTYQHLRLILSKYDDNQKLAQLSENEYFKIYIDSLMKKSKRAIRLFKEGKERMYEEQSQDRRNLTKLSLIFSHMLAEIKAIFPNGQFQGDNFRITKADAAEFWRKFFGDKTIVPWKVFRQCLHEVHQISSGLEAMALKSTIDLTCNDYISVFEFDIFTRLFQPWGSILRNWNFLAVTHPGYMAFLTYDEVKARLQKYSTKPGSYIFRLSCTRLGQWAIGYVTGDGNILQTIPHNKPLFQALIDGSREGFYLYPDGRSYNPDLTGLCEPTPHDHIKVTQEQYELYCEMGSTFQLCKICAENDKDVKIEPCGHLMCTSCLTAWQESDGQGCPFCRCEIKGTEPIIVDPFDPRDEGSRCCSIIDPFGMPMLDLDDDDDREESLMMNRLANVRKCTDRQNSPVTSPGSSPLAQRRKPQPDPLQIPHLSLPPVPPRLDLIQKGIVRSPCGSPTGSPKSSPCMVRKQDKPLPAPPPPLRDPPPPPPERPPPIPPDNRLSRHIHHVESVPSRDPPMPLEAWCPRDVFGTNQLVGCRLLGEGSPKPGITASSNVNGRHSRVGSDPVLMRKHRRHDLPLEGAKVFSNGHLGSEEYDVPPRLSPPPPVTTLLPSIKCTGPLANSLSEKTRDPVEEDDDEYKIPSSHPVSLNSQPSHCHNVKPPVRSCDNGHCMLNGTHGPSSEKKSNIPDLSIYLKGDVFDSASDPVPLPPARPPTRDNPKHGSSLNRTPSDYDLLIPPLG

SEQ ID NO: 12656 - protein, 139 aa, Homo sapiens
  Payload ID: 2477
  Gene Symbol: CBLB
  Gene Name: Cbl proto-oncogene B, E3 ubiquitin protein ligase
  ENSP ID: ENSP00000393906
MANSMNGRNPGGRGGNPRKGRILGIIDAIQDAVGPPKQAAADRRTVEKTWKLMDKVVRLCQNPKLQLKNSPPYILDILPDTYQHLRLILSKYDDNQKLAQLSENEYFKIYIDSLMKKSKRAIRLFKEGKERMYEEQSQD

SEQ ID NO: 12657 - protein, 139 aa, Homo sapiens; identical to SEQ ID NO: 12656
  Payload ID: 2477
  Gene Symbol: CBLB
  Gene Name: Cbl proto-oncogene B, E3 ubiquitin protein ligase
  ENSP ID: ENSP00000400949

SEQ ID NO: 12658 - protein, 161 aa, Homo sapiens
  Payload ID: 2477
  Gene Symbol: CBLB
  Gene Name: Cbl proto-oncogene B, E3 ubiquitin protein ligase
  ENSP ID: ENSP00000409750
MALAPGPDAHAHLPPLIELKFQMANSMNGRNPGGRGGNPRKGRILGIIDAIQDAVGPPKQAAADRRTVEKTWKLMDKVVRLCQNPKLQLKNSPPYILDILPDTYQHLRLILSKYDDNQKLAQLSENEYFKIYIDSLMKKSKRAIRLFKEGKERMYEEQSQD

SEQ ID NO: 12659 - protein, 474 aa, Homo sapiens
  Payload ID: 2478
  Gene Symbol: CBLC
  Gene Name: Cbl proto-oncogene C, E3 ubiquitin protein ligase
  Uniprot ID: Q9ULV8
  ENSP ID: ENSP00000270279
MALAVAPWGRQWEEARALGRAVRMLQRLEEQCVDPRLSVSPPSLRDLLPRTAQLLREVAHSRRAAGGGGPGGPGGSGDFLLIYLANLEAKSRQVAALLPPRGRRSANDELFRAGSRLRRQLAKLAIIFSHMHAELHALFPGGKYCGHMYQLTKAPAHTFWRESCGARCVLPWAEFESLLGTCHPVEPGCTALALRTTIDLTCSGHVSIFEFDVFTRLFQPWPTLLKNWQLLAVNHPGYMAFLTYDEVQERLQACRDKPGSYIFRPSCTRLGQWAIGYVSSDGSILQTIPANKPLSQVLLEGQKDGFYLYPDGKTHNPDLTELGQAEPQQRIHVSEEQLQLYWAMDSTFELCKICAESNKDVKIEPCGHLLCSCCLAAWQHSDSQTCPFCRCEIKGWEAVSIYQFHGQATAEDSGNSSDQEGRELELGQVPLSAPPLPPRPDLPPRKPRNAQPKVRLLKGNSPPAALGPQDPAPA

SEQ ID NO: 12660 - protein, 428 aa, Homo sapiens
  Payload ID: 2478
  Gene Symbol: CBLC
  Gene Name: Cbl proto-oncogene C, E3 ubiquitin protein ligase
  Uniprot ID: Q9ULV8
  ENSP ID: ENSP00000340250
MALAVAPWGRQWEEARALGRAVRMLQRLEEQCVDPRLSVSPPSLRDLLPRTAQLLREVAHSRRAAGGGGPGGPGGSGDFLLIYLANLEAKSRQVAALLPPRGRRSANDELFRAGSRLRRQLAKLAIIFSHMHAELHALFPGGKYCGHMYQLTKAPAHTFWRESCGARCVLPWAEFESLLGTCHPVEPGCTALALRTTIDLTCSGHVSIFEFDVFTRLFQPWPTLLKNWQLLAVNHPGYMAFLTYDEVQERLQACRDKPGSYLYPDGKTHNPDLTELGQAEPQQRIHVSEEQLQLYWAMDSTFELCKICAESNKDVKIEPCGHLLCSCCLAAWQHSDSQTCPFCRCEIKGWEAVSIYQFHGQATAEDSGNSSDQEGRELELGQVPLSAPPLPPRPDLPPRKPRNAQPKVRLLKGNSPPAALGPQDPAPA

SEQ ID NO: 12661 - protein, 906 aa, Homo sapiens
  Payload ID: 2479
  Gene Symbol: CBL
  Gene Name: Cbl proto-oncogene, E3 ubiquitin protein ligase
  Uniprot ID: P22681
  ENSP ID: ENSP00000264033
MAGNVKKSSGAGGGSGSGGSGSGGLIGLMKDAFQPHHHHHHHLSPHPPGTVDKKMVEKCWKLMDKVVRLCQNPKLALKNSPPYILDLLPDTYQHLRTILSRYEGKMETLGENEYFRVFMENLMKKTKQTISLFKEGKERMYEENSQPRRNLTKLSLIFSHMLAELKGIFPSGLFQGDTFRITKADAAEFWRKAFGEKTIVPWKSFRQALHEVHPISSGLEAMALKSTIDLTCNDYISVFEFDIFTRLFQPWSSLLRNWNSLAVTHPGYMAFLTYDEVKARLQKFIHKPGSYIFRLSCTRLGQWAIGYVTADGNILQTIPHNKPLFQALIDGFREGFYLFPDGRNQNPDLTGLCEPTPQDHIKVTQEQYELYCEMGSTFQLCKICAENDKDVKIEPCGHLMCTSCLTSWQESEGQGCPFCRCEIKGTEPIVVDPFDPRGSGSLLRQGAEGAPSPNYDDDDDERADDTLFMMKELAGAKVERPPSPFSMAPQASLPPVPPRLDLLPQRVCVPSSASALGTASKAASGSLHKDKPLPVPPTLRDLPPPPPPDRPYSVGAESRPQRRPLPCTPGDCPSRDKLPPVPSSRLGDSWLPRPIPKVPVSAPSSSDPWTGRELTNRHSLPFSLPSQMEPRPDVPRLGSTFSLDTSMSMNSSPLVGPECDHPKIKPSSSANAIYSLAARPLPVPKLPPGEQCEGEEDTEYMTPSSRPLRPLDTSQSSRACDCDQQIDSCTYEAMYNIQSQAPSITESSTFGEGNLAAAHANTGPEESENEDDGYDVPKPPVPAVLARRTLSDISNASSSFGWLSLDGDPTTNVTEGSQVPERPPKPFPRRINSERKAGSCQQGSGPAASAATASPQLSSEIENLMSQGYSYQDIQKALVIAQNNIEMAKNILREFVSISSPAHVAT

SEQ ID NO: 12662 - protein, 882 aa, Homo sapiens
  Payload ID: 2479
  Gene Symbol: CBL
  Gene Name: Cbl proto-oncogene, E3 ubiquitin protein ligase
  ENSP ID: ENSP00000489218
MAGNVKKSSGAGGGSGSGGSGSGGLIGLMKDAFQPHHHHHHHLSPHPPGTVDKKMVEKCWKLMDKVVRLCQNPKLALKNSPPYILDLLPDTYQHLRTILSRYEGKMETLGENEYFRVFMENLMKKTKQTISLFKEGKERMYEENSQPRRNLTKLSLIFSHMLAELKGIFPSGLFQGDTFRITKADAAEFWRKAFGEKTIVPWKSFRQALHEVHPISSGLEAMALKSTIDLTCNDYISVFEFDIFTRLFQPWSSLLRNWNSLAVTHPGYMAFLTYDEVKARLQKFIHKPGSYIFRLSCTRLGQWAIGYVTADGNILQTIPHNKPLFQALIDGFREGFYLFPDGRNQNPDLTGLCEPTPQDHIKVTQEQYELYCEMGSTFQLCKICAENDKDVKIEPCGHLMCTSCLTSWQESEGQGCPFCRCEIKGTEPIVVDPFDPRGSGSLLRQGAEGAPSPNYDDDDDERADDTLFMMKELAGAKVERPPSPFSMAPQASLPPVPPRLDLLPQRVCVPSSASALGTASKAASGSLHKDKPLPVPPTLRDLPPPPPPDRPYSVGAESRPQRRPLPCTPGDCPSRDKLPPVPSSRLGDSWLPRPIPKVPVSAPSSSDPWTGRELTNRHSLPFSLPSQMEPRPDVPRLGSTFSLDTSMSMNSSPLVGPECDHPKIKPSSSANAIYSLAARPLPVPKLPPGEQCEGEEDTEYMTPSSRPLRPLDTSQSSRACDCDQQIDSCTYEAMYNIQSQAPSITESSTFGEGNLAAAHANTGPEESENEDDGYDVPKPPVPAVLARRTLSDISNASSSFGWLSLDGDPTTNVTEGSQVPERPPKPFPRRINSERKAGSCQQGSGPAASAATASPQLSKQSPKANLRSPDLAAEEISRVLIA

SEQ ID NO: 12663 - protein, 862 aa, Homo sapiens
  Payload ID: 2479
  Gene Symbol: CBL
  Gene Name: Cbl proto-oncogene, E3 ubiquitin protein ligase
  ENSP ID: ENSP00000489324
MAGNVKKSSGAGGGSGSGGSGSGGLIGLMKDAFQPHHHHHHHLSPHPPGTVDKKMVEKCWKLMDKVVRLCQNPKLALKNSPPYILDLLPDTYQHLRTILSRYEGKMETLGENEYFRVFMENLMKKTKQTISLFKEGKERMYEENSQPRRNLTKLSLIFSHMLAELKGIFPSGLFQGDTFRITKADAAEFWRKAFGEKTIVPWKSFRQALHEVHPISSGLEAMALKSTIDLTCNDYISVFEFDIFTRLFQPWSSLLRNWNSLAVTHPGYMAFLTYDEVKARLQKFIHKPGSYIFRLSCTRLGQWAIGYVTADGNILQTIPHNKPLFQALIDGFREGFYLFPDGRNQNPDLTGLCEPTPQDHIKVTQEQYELYCEMGSTFQLCKICAENDKDVKIEPCGHLMCTSCLTSWQESEGQGCPFCRCEIKGTEPIVVDPFDPRGSGSLLRQGAEGAPSPNYDDDDDERADDTLFMMKELAGAKAASGSLHKDKPLPVPPTLRDLPPPPPPDRPYSVGAESRPQRRPLPCTPGDCPSRDKLPPVPSSRLGDSWLPRPIPKVPVSAPSSSDPWTGRELTNRHSLPFSLPSQMEPRPDVPRLGSTFSLDTSMSMNSSPLVGPECDHPKIKPSSSANAIYSLAARPLPVPKLPPGEQCEGEEDTEYMTPSSRPLRPLDTSQSSRACDCDQQIDSCTYEAMYNIQSQAPSITESSTFGEGNLAAAHANTGPEESENEDDGYDVPKPPVPAVLARRTLSDISNASSSFGWLSLDGDPTTNVTEGSQVPERPPKPFPRRINSERKAGSCQQGSGPAASAATASPQLSSEIENLMSQGYSYQDIQKALVIAQNNIEMAKNILREFVSISSPAHVAT

SEQ ID NO: 12664 - protein, 89 aa, Homo sapiens
  Payload ID: 2479
  Gene Symbol: CBL
  Gene Name: Cbl proto-oncogene, E3 ubiquitin protein ligase
  ENSP ID: ENSP00000489556
AAAHANTGPEESENEDDGYDVPKPPVPAVLARRTLSDISNASSSFGWLSLDGDPTTNVTEGSQVPERPPKPFPRRINSERKAGSCQQVS

SEQ ID NO: 12665 - protein, 490 aa, Homo sapiens
  Payload ID: 2480
  Gene Symbol: CBLL1
  Gene Name: Cbl proto-oncogene-like 1, E3 ubiquitin protein ligase
  Uniprot ID: Q75N03
  ENSP ID: ENSP00000222597
MDHTDNELQGTNSSGSLGGLDVRRRIPIKLISKQANKAKPAPRTQRTINRMPAKAPPGDEGFDYNEEERYDCKGGELFANQRRFPGHLFWDFQINILGEKDDTPVHFCDKCGLPIKIYGRMIPCKHVFCYDCAILHEKKGDKMCPGCSDPVQRIEQCTRGSLFMCSIVQGCKRTYLSQRDLQAHINHRHMRAGKPVTRASLENVHPPIAPPPTEIPERFIMPPDKHHMSHIPPKQHIMMPPPPLQHVPHEHYNQPHEDIRAPPAELSMAPPPPRSVSQETFRISTRKHSNLITVPIQDDSNSGAREPPPPAPAPAHHHPEYQGQPVVSHPHHIMPPQQHYAPPPPPPPPISHPMPHPPQAAGTPHLVYSQAPPPPMTSAPPPITPPPGHIIAQMPPYMNHPPPGPPPPQHGGPPVTAPPPHHYNPNSLPQFTEDQGTLSPPFTQPGGMSPGIWPAPRGPPPPPRLQGPPSQTPLPGPHHPDQTRYRPYYQ

SEQ ID NO: 12666 - protein, 123 aa, Homo sapiens
  Payload ID: 2480
  Gene Symbol: CBLL1
  Gene Name: Cbl proto-oncogene-like 1, E3 ubiquitin protein ligase
  ENSP ID: ENSP00000401175
MDHTDNELQGTNSSGSLGGLDVRRRIPIKLISKQANKAKPAPRTQRTINRMPAKAPPGDEEGFDYNEEERYDCKGGELFANQRRFPGHLFWDFQINILGEKDDTPVHFCDKCGLPIKIYGRML

SEQ ID NO: 12667 - protein, 491 aa, Homo sapiens
  Payload ID: 2480
  Gene Symbol: CBLL1
  Gene Name: Cbl proto-oncogene-like 1, E3 ubiquitin protein ligase
  Uniprot ID: Q75N03
  ENSP ID: ENSP00000401277
MDHTDNELQGTNSSGSLGGLDVRRRIPIKLISKQANKAKPAPRTQRTINRMPAKAPPGDEEGFDYNEEERYDCKGGELFANQRRFPGHLFWDFQINILGEKDDTPVHFCDKCGLPIKIYGRMIPCKHVFCYDCAILHEKKGDKMCPGCSDPVQRIEQCTRGSLFMCSIVQGCKRTYLSQRDLQAHINHRHMRAGKPVTRASLENVHPPIAPPPTEIPERFIMPPDKHHMSHIPPKQHIMMPPPPLQHVPHEHYNQPHEDIRAPPAELSMAPPPPRSVSQETFRISTRKHSNLITVPIQDDSNSGAREPPPPAPAPAHHHPEYQGQPVVSHPHHIMPPQQHYAPPPPPPPPISHPMPHPPQAAGTPHLVYSQAPPPPMTSAPPPITPPPGHIIAQMPPYMNHPPPGPPPPQHGGPPVTAPPPHHYNPNSLPQFTEDQGTLSPPFTQPGGMSPGIWPAPRGPPPPPRLQGPPSQTPLPGPHHPDQTRYRPYYQ

SEQ ID NO: 12668 - protein, 67 aa, Homo sapiens
  Payload ID: 2480
  Gene Symbol: CBLL1
  Gene Name: Cbl proto-oncogene-like 1, E3 ubiquitin protein ligase
  ENSP ID: ENSP00000401374
MDHTDNELQGTNSSGSLGGLDVRRRIPIKLISKQANKAKPAPRTQRTINRMPAKAPPGDEVLGPKES

SEQ ID NO: 12669 - protein, 322 aa, Homo sapiens
  Payload ID: 2480
  Gene Symbol: CBLL1
  Gene Name: Cbl proto-oncogene-like 1, E3 ubiquitin protein ligase
  ENSP ID: ENSP00000410615
MPAKAPPGDEEGFDYNEEERYDCKGGELFANQRRFPGHLFWDFQINILGEKDDTPVHFCDKCGLPIKIYGRMIPCKHVFCYDCAILHEKKGDKMCPGCSDPVQRIEQCTRGSLFMCSIVQGCKRTYLSQRDLQAHINHRHMRAGKPVTRASLENVHPPIAPPPTEIPERFIMPPDKHHMSHIPPKQHIMMPPPPLQHVPHEHYNQPHEDIRAPPAELSMAPPPPRSVSQETFRISTRKHSNLITVPIQDDSNSGAREPPPPAPAPAHHHPEYQGQPVVSHPHHIMPPQQHYAPPPPPPPPISHPMPHPPQAAGTPHLVYSQA

SEQ ID NO: 12670 - protein, 193 aa, Homo sapiens
  Payload ID: 2481
  Gene Symbol: CITED1
  Gene Name: Cbp/p300-interacting transactivator, with Glu/Asp-rich carboxy-terminal domain, 1
  Uniprot ID: Q99966
  ENSP ID: ENSP00000246139
MPTTSRPALDVKGGTSPAKEDANQEMSSVAYSNLAVKDRKAVAILHYPGVASNGTKASGAPTSSSGSPIGSPTTTPPTKPPSFNLHPAPHLLASMHLQKLNSQYQGMAAATPGQPGEAGPLQNWDFGAQAGGAESLSPSAGAQSPAIIDSDPVDEEVLMSLVVELGLDRANELPELWLGQNEFDFTADFPSSC

SEQ ID NO: 12671 - protein, 193 aa, Homo sapiens; identical to SEQ ID NO: 12670
  Payload ID: 2481
  Gene Symbol: CITED1
  Gene Name: Cbp/p300-interacting transactivator, with Glu/Asp-rich carboxy-terminal domain, 1
  Uniprot ID: Q99966
  ENSP ID: ENSP00000362721

SEQ ID NO: 12672 - protein, 219 aa, Homo sapiens
  Payload ID: 2481
  Gene Symbol: CITED1
  Gene Name: Cbp/p300-interacting transactivator, with Glu/Asp-rich carboxy-terminal domain, 1
  Uniprot ID: Q99966
  ENSP ID: ENSP00000388548
MEPSAQQLQLAASLPANLSNFCQGSEMPTTSRPALDVKGGTSPAKEDANQEMSSVAYSNLAVKDRKAVAILHYPGVASNGTKASGAPTSSSGSPIGSPTTTPPTKPPSFNLHPAPHLLASMHLQKLNSQYQGMAAATPGQPGEAGPLQNWDFGAQAGGAESLSPSAGAQSPAIIDSDPVDEEVLMSLVVELGLDRANELPELWLGQNEFDFTADFPSSC

SEQ ID NO: 12673 - protein, 138 aa, Homo sapiens
  Payload ID: 2481
  Gene Symbol: CITED1
  Gene Name: Cbp/p300-interacting transactivator, with Glu/Asp-rich carboxy-terminal domain, 1
  ENSP ID: ENSP00000391407
MEPSAQQLQLAASLPANLSNFCQGSEMPTTSRPALDVKGGTSPAKEDANQEMSSVAYSNLAVKDRKAVAILHYPGVASNGTKASGAPTSSSGSPIGSPTTTPPTKPPSFNLHPAPHLLASMHLQKLNSQYQGMAAATP

SEQ ID NO: 12674 - protein, 219 aa, Homo sapiens; identical to SEQ ID NO: 12672
  Payload ID: 2481
  Gene Symbol: CITED1
  Gene Name: Cbp/p300-interacting transactivator, with Glu/Asp-rich carboxy-terminal domain, 1
  Uniprot ID: Q99966
  ENSP ID: ENSP00000401764

SEQ ID NO: 12675 - protein, 193 aa, Homo sapiens; identical to SEQ ID NO: 12670
  Payload ID: 2481
  Gene Symbol: CITED1
  Gene Name: Cbp/p300-interacting transactivator, with Glu/Asp-rich carboxy-terminal domain, 1
  Uniprot ID: Q99966
  ENSP ID: ENSP00000403274

SEQ ID NO: 12676 - protein, 109 aa, Homo sapiens
  Payload ID: 2481
  Gene Symbol: CITED1
  Gene Name: Cbp/p300-interacting transactivator, with Glu/Asp-rich carboxy-terminal domain, 1
  ENSP ID: ENSP00000405765
MEPSAQQLQLAASLPANLSNFCQGSEMPTTSRPALDVKGGTSPAKEDANQEMSSVAYSNLAVKDRKAVAILHYPGVASNGTKASGAPTSSSGSPIGSPTTTPPTKPPSF

SEQ ID NO: 12677 - protein, 106 aa, Homo sapiens
  Payload ID: 2481
  Gene Symbol: CITED1
  Gene Name: Cbp/p300-interacting transactivator, with Glu/Asp-rich carboxy-terminal domain, 1
  ENSP ID: ENSP00000407496
  MOD_RES (1)..(1): Any amino acid
XPTTSRPALDVKGGTSPAKEDANQEMSSVAYSNLAVKDRKAVAILHYPGVASNGTKSPAIIDSDPVDEEVLMSLVVELGLDRANELPELWLGQNEFDFTADFPSSC

SEQ ID NO: 12678 - protein, 59 aa, Homo sapiens
  Payload ID: 2481
  Gene Symbol: CITED1
  Gene Name: Cbp/p300-interacting transactivator, with Glu/Asp-rich carboxy-terminal domain, 1
  ENSP ID: ENSP00000412769
MEPSAQQLQLAASLPANLSNFCQGSEMPTTSRPALDVKGGTSPAKEDANQEMSSVAYSN

SEQ ID NO: 12679 - protein, 140 aa, Homo sapiens
  Payload ID: 2481
  Gene Symbol: CITED1
  Gene Name: Cbp/p300-interacting transactivator, with Glu/Asp-rich carboxy-terminal domain, 1
  ENSP ID: ENSP00000414781
MPTTSRPALDVKGGTSPAKEDANQEMSSVAYSNLAVKDRKAVAILHYPGVASNGTKASGAPTSSSGSPIGSPTTTPPTKPPSFNLHPAPHLLASMHLQKLNSQYQGMAAATPGQPGEAGPLQNWDFGAQAGGAESLSPSA

SEQ ID NO: 12680 - protein, 270 aa, Homo sapiens
  Payload ID: 2482
  Gene Symbol: CITED2
  Gene Name: Cbp/p300-interacting transactivator, with Glu/Asp-rich carboxy-terminal domain, 2
  Uniprot ID: Q99967
  ENSP ID: ENSP00000356623
MADHMMAMNHGRFPDGTNGLHHHPAHRMGMGQFPSPHHHQQQQPQHAFNALMGEHIHYGAGNMNATSGIRHAMGPGTVNGGHPPSALAPAARFNNSQFMGPPVASQGGSLPASMQLQKLNNQYFNHHPYPHNHYMPDLHPAAGHQMNGTNQHFRDCNPKHSGGSSTPGGSGGSSTPGGSGSSSGGGAGSSNSGGGSGSGNMPASVAHVPAAMLPPNVIDTDFIDEEVLMSLVIEMGLDRIKELPELWLGQNEFDFMTDFVCKQQPSRVSC

SEQ ID NO: 12681 - protein, 270 aa, Homo sapiens; identical to SEQ ID NO: 12680
  Payload ID: 2482
  Gene Symbol: CITED2
  Gene Name: Cbp/p300-interacting transactivator, with Glu/Asp-rich carboxy-terminal domain, 2
  Uniprot ID: Q99967
  ENSP ID: ENSP00000442831

SEQ ID NO: 12682 - protein, 275 aa, Homo sapiens
  Payload ID: 2482
  Gene Symbol: CITED2
  Gene Name: Cbp/p300-interacting transactivator, with Glu/Asp-rich carboxy-terminal domain, 2
  ENSP ID: ENSP00000444198
MSGLEMADHMMAMNHGRFPDGTNGLHHHPAHRMGMGQFPSPHHHQQQQPQHAFNALMGEHIHYGAGNMNATSGIRHAMGPGTVNGGHPPSALAPAARFNNSQFMGPPVASQGGSLPASMQLQKLNNQYFNHHPYPHNHYMPDLHPAAGHQMNGTNQHFRDCNPKHSGGSSTPGGSGGSSTPGGSGSSSGGGAGSSNSGGGSGSGNMPASVAHVPAAMLPPNVIDTDFIDEEVLMSLVIEMGLDRIKELPELWLGQNEFDFMTDFVCKQQPSRVSC

SEQ ID NO: 12683 - protein, 213 aa, Homo sapiens
  Payload ID: 2482
  Gene Symbol: CITED2
  Gene Name: Cbp/p300-interacting transactivator, with Glu/Asp-rich carboxy-terminal domain, 2
  Uniprot ID: Q99967
  ENSP ID: ENSP00000479918
MADHMMAMNHGRFPDGTNGLHHHPAHRMGMGQFPSPHHHQQQQPQHAFNALMGEHIHYGAGNMNATSGIRHAMGPGTVNGGHPPSALAPAARFNNSQFMGPPVASQGGSLPASMQLQKLNNQYFNHHPYPHNHYMPDLHPAAGHQMNGTNQHFRDCNPNVIDTDFIDEEVLMSLVIEMGLDRIKELPELWLGQNEFDFMTDFVCKQQPSRVSC

SEQ ID NO: 12684 - protein, 184 aa, Homo sapiens
  Payload ID: 2483
  Gene Symbol: CITED4
  Gene Name: Cbp/p300-interacting transactivator, with Glu/Asp-rich carboxy-terminal domain, 4
  Uniprot ID: Q96RK1
  ENSP ID: ENSP00000361721
MADHLMLAEGYRLVQRPPSAAAAHGPHALRTLPPYAGPGLDSGLRPRGAPLGPPPPRQPGALAYGAFGPPSSFQPFPAVPPPAAGIAHLQPVATPYPGRAAAPPNAPGGPPGPQPAPSAAAPPPPAHALGGMDAELIDEEALTSLELELGLHRVRELPELFLGQSEFDCFSDLGSAPPAGSVSC

SEQ ID NO: 12685 - protein, 598 aa, Homo sapiens
  Payload ID: 2484
  Gene Symbol: CTIF
  Gene Name: CBP80/20-dependent translation initiation factor
  Uniprot ID: O43310
  ENSP ID: ENSP00000256413
MENSSAASASSEAGSSRSQEIEELERFIDSYVLEYQVQGLLADKTEGDGESERTQSHISQWTADCSEPLDSSCSFSRGRAPPQQNGSKDNSLDMLGTDIWAANTFDSFSGATWDLQPEKLDFTQFHRKVRHTPKQPLPHIDREGCGKGKLEDGDGINLNDIEKVLPAWQGYHPMPHEVEIAHTKKLFRRRRNDRRRQQRPPGGNKPQQHGDHQPGSAKHNRDHQKSYQGGSAPHPSGRPTHHGYSQNRRWHHGNMKHPPGDKGEAGAHRNAKETMTIENPKLEDTAGDTGHSSLEAPRSPDTLAPVASERLPPQQSGGPEVETKRKDSILPERIGERPKITLLQSSKDRLRRRLKEKDEVAVETTTPQQNKMDKLIEILNSMRNNSSDVDTKLTTFMEEAQNSTNSEEMLGEIVRTIYQKAVSDRSFAFTAAKLCDKMALFMVEGTKFRSLLLNMLQKDFTVREELQQQDVERWLGFITFLCEVFGTMRSSTGEPFRVLVCPIYTCLRELLQSQDVKEDAVLCCSMELQSTGRLLEEQLPEMMTELLASARDKMLCPSESMLTRSLLLEVIELHANSWNPLTPPITQYYNRTIQKLTA

SEQ ID NO: 12686 - protein, 600 aa, Homo sapiens
  Payload ID: 2484
  Gene Symbol: CTIF
  Gene Name: CBP80/20-dependent translation initiation factor
  Uniprot ID: O43310
  ENSP ID: ENSP00000372459
MENSSAASASSEAGSSRSQEIEELERFIDSYVLEYQVQGLLADKTEGDGESERTQSHISQWTADCSEPLDSSCSFSRGRAPPQQNGSKDNSLDMLGTDIWAANTFDSFSGATWDLQPEKLDFTQFHRKVRHTPKQPLPHIDREGCGKGKLEDGDGINLNDIEKVLPAWQGYHPMPHEVEIAHTKKLFRRRRNDRRRQQRPPGGNKPQQHGDHQPGSAKHNRDHQKSYQGGSAPHPSGRPTHHGYSQNRRWHHGNMKHPPGDKGEAGAHRNAKETMTIENPKLEDTAGDTGHSSLEAPRSPDTLAPVASERLPPQQSGGPEVETKRKDSILPERIGERPKITLLQSSKDRLRRRLKEKVPDEVAVETTTPQQNKMDKLIEILNSMRNNSSDVDTKLTTFMEEAQNSTNSEEMLGEIVRTIYQKAVSDRSFAFTAAKLCDKMALFMVEGTKFRSLLLNMLQKDFTVREELQQQDVERWLGFITFLCEVFGTMRSSTGEPFRVLVCPIYTCLRELLQSQDVKEDAVLCCSMELQSTGRLLEEQLPEMMTELLASARDKMLCPSESMLTRSLLLEVIELHANSWNPLTPPITQYYNRTIQKLTA

SEQ ID NO: 12687 - protein, 194 aa, Homo sapiens
  Payload ID: 2484
  Gene Symbol: CTIF
  Gene Name: CBP80/20-dependent translation initiation factor
  ENSP ID: ENSP00000465405
MENSSAASASSEAGSSRSQEIEELERFIDSYVLEYQVQGLLADKTEGDGESERTQSHISQWTADCSEPLDSSCSFSRGRAPPQQNGSKDNSLDMLGTDIWAANTFDSFSGATWDLQPEKLDFTQFHRKVRHTPKQPLPHIDREGCGKGKLEDGDGINLNDIEKVLPAWQGYHPMPHEVEIAHTKKLFRRRRNDR

SEQ ID NO: 12688 - protein, 138 aa, Homo sapiens
  Payload ID: 2484
  Gene Symbol: CTIF
  Gene Name: CBP80/20-dependent translation initiation factor
  ENSP ID: ENSP00000467425
MENSSAASASSEAGSSRSQEIEELERFIDSYVLEYQVQGLLADKTEGDGESERTQSHISQWTADCSEPLDSSCSFSRGRAPPQQNGSKDNSLDMLGTDIWAANTFDSFSGATWDLQPEKLDFTQFHRKVRHTPKQPLP

SEQ ID NO: 12689 - protein, 104 aa, Homo sapiens
  Payload ID: 2484
  Gene Symbol: CTIF
  Gene Name: CBP80/20-dependent translation initiation factor
  ENSP ID: ENSP00000467957
MENSSAASASSEAGSSRSQEIEELERFIDSYVLEYQVQGLLADKTEGDGESERTQSHISQWTADCSEPLDSSCSFSRGRAPPQQNGSKDNSLDMLGTDIWAANT

SEQ ID NO: 12690 - protein, 120 aa, Homo sapiens
  Payload ID: 2484
  Gene Symbol: CTIF
  Gene Name: CBP80/20-dependent translation initiation factor
  ENSP ID: ENSP00000467965
MENSSAASASSEAGSSRSQEIEELERFIDSYVLEYQVQGLLADKTEGDGESERTQSHISQEEVLNGGPPMKGLTEEWTADCSEPLDSSCSFSRGRAPPQQNGSKDNSLDMLGTDIWAANT

SEQ ID NO: 12691 - protein, 120 aa, Homo sapiens; identical to SEQ ID NO: 12690
  Payload ID: 2484
  Gene Symbol: CTIF
  Gene Name: CBP80/20-dependent translation initiation factor
  ENSP ID: ENSP00000488966

SEQ ID NO: 12692 - protein, 194 aa, Homo sapiens; identical to SEQ ID NO: 12687
  Payload ID: 2484
  Gene Symbol: CTIF
  Gene Name: CBP80/20-dependent translation initiation factor
  ENSP ID: ENSP00000489151

SEQ ID NO: 12693 - protein, 104 aa, Homo sapiens; identical to SEQ ID NO: 12689
  Payload ID: 2484
  Gene Symbol: CTIF
  Gene Name: CBP80/20-dependent translation initiation factor
  ENSP ID: ENSP00000489209

SEQ ID NO: 12694 - protein, 600 aa, Homo sapiens; identical to SEQ ID NO: 12686
  Payload ID: 2484
  Gene Symbol: CTIF
  Gene Name: CBP80/20-dependent translation initiation factor
  ENSP ID: ENSP00000489354

SEQ ID NO: 12695 - protein, 138 aa, Homo sapiens; identical to SEQ ID NO: 12688
  Payload ID: 2484
  Gene Symbol: CTIF
  Gene Name: CBP80/20-dependent translation initiation factor
  ENSP ID: ENSP00000489577

SEQ ID NO: 12696 - protein, 598 aa, Homo sapiens; identical to SEQ ID NO: 12685
  Payload ID: 2484
  Gene Symbol: CTIF
  Gene Name: CBP80/20-dependent translation initiation factor
  ENSP ID: ENSP00000489589

SEQ ID NO: 12697 - protein, 358 aa, Homo sapiens
  Payload ID: 2485
  Gene Symbol: CEBPA
  Gene Name: CCAAT/enhancer binding protein (C/EBP), alpha
  Uniprot ID: P49715
  ENSP ID: ENSP00000427514
MESADFYEAEPRPPMSSHLQSPPHAPSSAAFGFPRGAGPAQPPAPPAAPEPLGGICEHETSIDISAYIDPAAFNDEFLADLFQHSRQQEKAKAAVGPTGGGGGGDFDYPGAPAGPGGAVMPGGAHGPPPGYGCAAAGYLDGRLEPLYERVGAPALRPLVIKQEPREEDEAKQLALAGLFPYQPPPPPPPSHPHPHPPPAHLAAPHLQFQIAHCGQTTMHLQPGHPTPPPTPVPSPHPAPALGAAGLPGPGSALKGLGAAHPDLRASGGSGAGKAKKSVDKNSNEYRVRRERNNIAVRKSRDKAKQRNVETQQKVLELTSDNDRLRKRVEQLSRELDTLRGIFRQLPESSLVKAMGNCA

SEQ ID NO: 12698 - protein, 345 aa, Homo sapiens
  Payload ID: 2486
  Gene Symbol: CEBPB
  Gene Name: CCAAT/enhancer binding protein (C/EBP), beta
  Uniprot ID: P17676
  ENSP ID: ENSP00000305422
MQRLVAWDPACLPLPPPPPAFKSMEVANFYYEADCLAAAYGGKAAPAAPPAARPGPRPPAGELGSIGDHERAIDFSPYLEPLGAPQAPAPATATDTFEAAPPAPAPAPASSGQHHDFLSDLFSDDYGGKNCKKPAEYGYVSLGRLGAAKGALHPGCFAPLHPPPPPPPPPAELKAEPGFEPADCKRKEEAGAPGGGAGMAAGFPYALRAYLGYQAVPSGSSGSLSTSSSSSPPGTPSPADAKAPPTACYAGAAPAPSQVKSKAKKTVDKHSDEYKIRRERNNIAVRKSRDKAKMRNLETQHKVLELTAENERLQKKVEQLSRELSTLRNLFKQLPEPLLASSGHC

SEQ ID NO: 12699 - protein, 269 aa, Homo sapiens
  Payload ID: 2487
  Gene Symbol: CEBPD
  Gene Name: CCAAT/enhancer binding protein (C/EBP), delta
  Uniprot ID: P49716
  ENSP ID: ENSP00000386165
MSAALFSLDGPARGAPWPAEPAPFYEPGRAGKPGRGAEPGALGEPGAAAPAMYDDESAIDFSAYIDSMAAVPTLELCHDELFADLFNSNHKAGGAGPLELLPGGPARPLGPGPAAPRLLKREPDWGDGDAPGSLLPAQVAACAQTVVSLAAAGQPTPPTSPEPPRSSPRQTPAPGPAREKSAGKRGPDRGSPEYRQRRERNNIAVRKSRDKAKRRNQEMQQKLVELSAENEKLHQRVEQLTRDLAGLRQFFKQLPSPPFLPAAGTADCR

SEQ ID NO: 12700 - protein, 281 aa, Homo sapiens
  Payload ID: 2488
  Gene Symbol: CEBPE
  Gene Name: CCAAT/enhancer binding protein (C/EBP), epsilon
  Uniprot ID: Q15744
  ENSP ID: ENSP00000206513
MSHGTYYECEPRGGQQPLEFSGGRAGPGELGDMCEHEASIDLSAYIESGEEQLLSDLFAVKPAPEARGLKGPGTPAFPHYLPPDPRPFAYPPHTFGPDRKALGPGIYSSPGSYDPRAVAVKEEPRGPEGSRAASRGSYNPLQYQVAHCGQTAMHLPPTLAAPGQPLRVLKAPLATAAPPCSPLLKAPSPAGPLHKGKKAVNKDSLEYRLRRERNNIAVRKSRDKAKRRILETQQKVLEYMAENERLRSRVEQLTQELDTLRNLFRQIPEAANLIKGVGGCS

SEQ ID NO: 12701 - protein, 150 aa, Homo sapiens
  Payload ID: 2489
  Gene Symbol: CEBPG
  Gene Name: CCAAT/enhancer binding protein (C/EBP), gamma
  Uniprot ID: P53567
  ENSP ID: ENSP00000284000
MSKISQQNSTPGVNGISVIHTQAHASGLQQVPQLVPAGPGGGGKAVAPSKQSKKSSPMDRNSDEYRQRRERNNMAVKKSRLKSKQKAQDTLQRVNQLKEENERLEAKIKLLTKELSVLKDLFLEHAHNLADNVQSISTENTTADGDNAGQ

SEQ ID NO: 12702 - protein, 150 aa, Homo sapiens; identical to SEQ ID NO: 12701
  Payload ID: 2489
  Gene Symbol: CEBPG
  Gene Name: CCAAT/enhancer binding protein (C/EBP), gamma
  Uniprot ID: P53567
  ENSP ID: ENSP00000466022

SEQ ID NO: 12703 - protein, 1054 aa, Homo sapiens
  Payload ID: 2490
  Gene Symbol: CEBPZ
  Gene Name: CCAAT/enhancer binding protein (C/EBP), zeta
  Uniprot ID: Q03701
  ENSP ID: ENSP00000234170
MAAVKEPLEFHAKRPWRPEEAVEDPDEEDEDNTSEAENGFSLEEVLRLGGTKQDYLMLATLDENEEVIDGGKKGAIDDLQQGELEAFIQNLNLAKYTKASLVEEDEPAEKENSSKKEVKIPKINNKNTAESQRTSVNKVKNKNRPEPHSDENGSTTPKVKKDKQNIFEFFERQTLLLRPGGKWYDLEYSNEYSLKPQPQDVVSKYKTLAQKLYQHEINLFKSKTNSQKGASSTWMKAIVSSGTLGDRMAAMILLIQDDAVHTLQFVETLVNLVKKKGSKQQCLMALDTFKELLITDLLPDNRKLRIFSQRPFDKLEQLSSGNKDSRDRRLILWYFEHQLKHLVAEFVQVLETLSHDTLVTTKTRALTVAHELLCNKPEEEKALLVQVVNKLGDPQNRIATKASHLLETLLCKHPNMKGVVSGEVERLLFRSNISSKAQYYAICFLNQMALSHEESELANKLITVYFCFFRTCVKKKDVESKMLSALLTGVNRAYPYSQTGDDKVREQIDTLFKVLHIVNFNTSVQALMLLFQVMNSQQTISDRYYTALYRKMLDPGLMTCSKQAMFLNLVYKSLKADIVLRRVKAFVKRLLQVTCQQMPPFICGALYLVSEILKAKPGLRSQLDDHPESDDEENFIDANDDEDMEKFTDADKETEIVKKLETEETVPETDVETKKPEVASWVHFDNLKGGKQLNKYDPFSRNPLFCGAENTSLWELKKLSVHFHPSVALFAKTILQGNYIQYSGDPLQDFTLMRFLDRFVYRNPKPHKGKENTDSVVMQPKRKHFIKDIRHLPVNSKEFLAKEESQIPVDEVFFHRYYKKVAVKEKQKRDADEESIEDVDDEEFEELIDTFEDDNCFSSGKDDMDFAGNVKKRTKGAKDNTLDEDSEGSDDELGNLDDDEVSLGSMDDEEFAEVDEDGGTFMDVLDDESESVPELEVHSKVSTKKSKRKGTDDFDFAGSFQGPRKKKRNLNDSSLFVSAEEFGHLLDENMGSKFDNIGMNAMANKDNASLKQLRWEAERDDWLHNRDAKSIIKKKKHFKKKRIKTTQKTKKQRK

SEQ ID NO: 12704 - protein, 146 aa, Homo sapiens
  Payload ID: 2490
  Gene Symbol: CEBPZ
  Gene Name: CCAAT/enhancer binding protein (C/EBP), zeta
  ENSP ID: ENSP00000391881
MCSQDYLMLATLDENEEVIDGGKKGAIDDLQQGELEAFIQNLNLAKYTKASLVEEDEPAEKENSSKKEVKIPKINNKNTAESQRTSVNKVKNKNRPEPHSDENGSTTPKVKKDKQNIFEFFERQTLLLRPGGKWYDLEYSNEYSLK

SEQ ID NO: 12705 - protein, 998 aa, Homo sapiens
  Payload ID: 2490
  Gene Symbol: CEBPZ
  Gene Name: CCAAT/enhancer binding protein (C/EBP), zeta
  ENSP ID: ENSP00000484333
MAAVKEPLEFHAKRPWRPEEAVEDPDEEDEDNTSEAENGFSLEEVLRLGGTKQDYLMLATLDENEEVIDGGKKGAIDDLQQGELEAFIQNLNLAKYTKASLVEEDEPAEKENSSKKEVKIPKINNKNTAESQRTSVNKVKNKNRPEPHSDENGSTTPKVKKDKQNIFEFFERQTLLLRPGGKWYDLEYSNEYSLKPQPQDVVSKYKTLAQKLYQHEINLFKSKTNSQKGASSTWMKAIVSSGTLGDRMAAMILLIQDDAVHTLQFVETLVNLVKKKGSKQQCLMALDTFKELLITDLLPDNRKLRIFSQRPFDKLEQLSSGNKDSRDRRLILWYFEHQLKHLVAEFVQVLETLSHDTLVTTKTRALTVAHELLCNKPEEEKALLVQVVNKLGDPQNRIATKASHLLETLLCKHPNMKGVVSGEVERLLFRSNISSKAQYYAICFLNQMALSHEESELANKLITVYFCFFRTCVKKKDVESKMLSALLTGVNRAYPYSQTGDDKVREQIDTLFKVLHIVNFNTSVQALMLLFQVMNSQQTISDRYYTALYRKMLDPGLMTCSKQAMFLNLVYKSLKADIVLRRVKAFVKRLLQVTCQQMPPFICGALYLVSEILKAKPGLRSQLDDHPESDDEENFIDANDDEDMEKFTDADKETEIVKKLETEETVPETDVETKKPEVASWVHFDNLKGGKQLNKYDPFSRNPLFCGAENTSLWELKKLSVHFHPSVALFAKTILQGNYIQYSGDPLQDFTLMRFLDRFVYRNPKPHKGKENTDSVVMQPKRKHFIKDIRHLPVNSKEFLAKEESQIPVDEVFFHRYYKKVAVKEKQKRDADEESIEDVDDEEFEELIDTFEDDNCFSSGKDDMDFAGNVKKRTKGAKDNTLDEDSEGSDDELGNLDDDEVSLGSMDDEEFAEVDEDGGTFMDVLDDESESVPELEVHSKVSTKKSKRKGTDDFDFAGSFQGPRKKKRNLNDSSLFVSAEEFGHLLDENMGSKFDNIA

SEQ ID NO: 12706 - protein, 727 aa, Homo sapiens
  Payload ID: 2491
  Gene Symbol: CTCF
  Gene Name: CCCTC-binding  factor (zinc finger protein)
  Uniprot ID: P49711
  ENSP ID: ENSP00000264010
MEGDAVEAIVEESETFIKGKERKTYQRRREGGQEEDACHLPQNQTDGGEVVQDVNSSVQMVMMEQLDPTLLQMKTEVMEGTVAPEAEAAVDDTQIITLQVVNMEEQPINIGELQLVQVPVPVTVPVATTSVEELQGAYENEVSKEGLAESEPMICHTLPLPEGFQVVKVGANGEVETLEQGELPPQEDPSWQKDPDYQPPAKKTKKTKKSKLRYTEEGKDVDVSVYDFEEEQQEGLLSEVNAEKVVGNMKPPKPTKIKKKGVKKTFQCELCSYTCPRRSNLDRHMKSHTDERPHKCHLCGRAFRTVTLLRNHLNTHTGTRPHKCPDCDMAFVTSGELVRHRRYKHTHEKPFKCSMCDYASVEVSKLKRHIRSHTGERPFQCSLCSYASRDTYKLKRHMRTHSGEKPYECYICHARFTQSGTMKMHILQKHTENVAKFHCPHCDTVIARKSDLGVHLRKQHSYIEQGKKCRYCDAVFHERYALIQHQKSHKNEKRFKCDQCDYACRQERHMIMHKRTHTGEKPYACSHCDKTFRQKQLLDMHFKRYHDPNFVPAAFVCSKCGKTFTRRNTMARHADNCAGPDGVEGENGGETKKSKRGRKRKMRSKKEDSSDSENAEPDLDDNEDEEEPAVEIEPEPEPQPVTPAPPPAKKRRGRPPGRTNQPKQNQPTAIIQVEDQNTGAIENIIVEVKKEPDAEPAEGEEEEAQPAATDAPNGDLTPEMILSMMDR

SEQ ID NO: 12707 - protein, 399 aa, Homo sapiens
  Payload ID: 2491
  Gene Symbol: CTCF
  Gene Name: CCCTC-binding  factor (zinc finger protein)
  Uniprot ID: P49711
  ENSP ID: ENSP00000384707
MAFVTSGELVRHRRYKHTHEKPFKCSMCDYASVEVSKLKRHIRSHTGERPFQCSLCSYASRDTYKLKRHMRTHSGEKPYECYICHARFTQSGTMKMHILQKHTENVAKFHCPHCDTVIARKSDLGVHLRKQHSYIEQGKKCRYCDAVFHERYALIQHQKSHKNEKRFKCDQCDYACRQERHMIMHKRTHTGEKPYACSHCDKTFRQKQLLDMHFKRYHDPNFVPAAFVCSKCGKTFTRRNTMARHADNCAGPDGVEGENGGETKKSKRGRKRKMRSKKEDSSDSENAEPDLDDNEDEEEPAVEIEPEPEPQPVTPAPPPAKKRRGRPPGRTNQPKQNQPTAIIQVEDQNTGAIENIIVEVKKEPDAEPAEGEEEEAQPAATDAPNGDLTPEMILSMMDR

SEQ ID NO: 12708 - protein, 663 aa, Homo sapiens
  Payload ID: 2492
  Gene Symbol: CTCFL
  Gene Name: CCCTC-binding  factor (zinc finger protein)-like
  Uniprot ID: Q8NI51
  ENSP ID: ENSP00000243914
MAATEISVLSEQFTKIKELELMPEKGLKEEEKDGVCREKDHRSPSELEAERTSGAFQDSVLEEEVELVLAPSEESEKYILTLQTVHFTSEAVELQDMSLLSIQQQEGVQVVVQQPGPGLLWLEEGPRQSLQQCVAISIQQELYSPQEMEVLQFHALEENVMVASEDSKLAVSLAETTGLIKLEEEQEKNQLLAERTKEQLFFVETMSGDERSDEIVLTVSNSNVEEQEDQPTAGQADAEKAKSTKNQRKTKGAKGTFHCDVCMFTSSRMSSFNRHMKTHTSEKPHLCHLCLKTFRTVTLLRNHVNTHTGTRPYKCNDCNMAFVTSGELVRHRRYKHTHEKPFKCSMCKYASVEASKLKRHVRSHTGERPFQCCQCSYASRDTYKLKRHMRTHSGEKPYECHICHTRFTQSGTMKIHILQKHGENVPKYQCPHCATIIARKSDLRVHMRNLHAYSAAELKCRYCSAVFHERYALIQHQKTHKNEKRFKCKHCSYACKQERHMTAHIRTHTGEKPFTCLSCNKCFRQKQLLNAHFRKYHDANFIPTVYKCSKCGKGFSRWINLHRHSEKCGSGEAKSAASGKGRRTRKRKQTILKEATKGQKEAAKGWKEAANGDEAAAEEASTTKGEQFPGEMFPVACRETTARVKEEVDEGVTCEMLLNTMDK

SEQ ID NO: 12709 - protein, 663 aa, Homo sapiens; identical to SEQ ID NO: 12708
  Payload ID: 2492
  Gene Symbol: CTCFL
  Gene Name: CCCTC-binding  factor (zinc finger protein)-like
  Uniprot ID: Q8NI51
  ENSP ID: ENSP00000360239

SEQ ID NO: 12710 - protein, 460 aa, Homo sapiens
  Payload ID: 2492
  Gene Symbol: CTCFL
  Gene Name: CCCTC-binding  factor (zinc finger protein)-like
  Uniprot ID: Q8NI51
  ENSP ID: ENSP00000392034
MSGDERSDEIVLTVSNSNVEEQEDQPTAGQADAEKAKSTKNQRKTKGAKGTFHCDVCMFTSSRMSSFNRHMKTHTSEKPHLCHLCLKTFRTVTLLRNHVNTHTGTRPYKCNDCNMAFVTSGELVRHRRYKHTHEKPFKCSMCKYASVEASKLKRHVRSHTGERPFQCCQCSYASRDTYKLKRHMRTHSGEKPYECHICHTRFTQSGTMKIHILQKHGENVPKYQCPHCATIIARKSDLRVHMRNLHAYSAAELKCRYCSAVFHERYALIQHQKTHKNEKRFKCKHCSYACKQERHMTAHIRTHTGEKPFTCLSCNKCFRQKQLLNAHFRKYHDANFIPTVYKCSKCGKGFSRWINLHRHSEKCGSGEAKSAASGKGRRTRKRKQTILKEATKGQKEAAKGWKEAANGDGVISAHRNLCLLGSSDSHASVSGAGITDARHHAWLIVLLFLVEMGFYHVSHS

SEQ ID NO: 12711 - protein, 573 aa, Homo sapiens
  Payload ID: 2492
  Gene Symbol: CTCFL
  Gene Name: CCCTC-binding  factor (zinc finger protein)-like
  Uniprot ID: Q8NI51
  ENSP ID: ENSP00000399061
MAATEISVLSEQFTKIKELELMPEKGLKEEEKDGVCREKDHRSPSELEAERTSGAFQDSVLEEEVELVLAPSEESEKYILTLQTVHFTSEAVELQDMSLLSIQQQEGVQVVVQQPGPGLLWLEEGPRQSLQQCVAISIQQELYSPQEMEVLQFHALEENVMVASEDSKLAVSLAETTGLIKLEEEQEKNQLLAERTKEQLFFVETMSGDERSDEIVLTVSNSNVEEQEDQPTAGQADAEKAKSTKNQRKTKGAKGTFHCDVCMFTSSRMSSFNRHMKTHTSEKPHLCHLCLKTFRTVTLLRNHVNTHTGTRPYKCNDCNMAFVTSGELVRHRRYKHTHEKPFKCSMCKYASVEASKLKRHVRSHTGERPFQCCQCSYASRDTYKLKRHMRTHSGEKPYECHICHTRFTQSGTMKIHILQKHGENVPKYQCPHCATIIARKSDLRVHMRNLHAYSAAELKCRYCSAVFHERYALIQHQKTHKNEKRFKCKHCSYACKQERHMTAHIRTHTGEKPFTCLSCNKCFRQKQLLNAHFRKYHDANFIPTVYKCSKCGKGFSRWITSKWSGLKPQTFIT

SEQ ID NO: 12712 - protein, 451 aa, Homo sapiens
  Payload ID: 2492
  Gene Symbol: CTCFL
  Gene Name: CCCTC-binding  factor (zinc finger protein)-like
  ENSP ID: ENSP00000403369
MAATEISVLSEQFTKIKELELMPEKGLKEEEKDGVCREKDHRSPSELEAERTSGAFQDSVLEEEVELVLAPSEESEKYILTLQTVHFTSEAVELQDMSLLSIQQQEGVQVVVQQPGPGLLWLEEGPRQSLQQCVAISIQQELYSPQEMEVLQFHALEENVMVASEDSKLAVSLAETTGLIKLEEEQEKNQLLAERTKEQLFFVETMSGDERSDEIVLTVSNSNVEEQEDQPTAGQADAEKAKSTKNQRKTKGAKGTFHCDVCMFTSSRMSSFNRHMKTHTSEKPHLCHLCLKTFRTVTLLRNHVNTHTGTRPYKCNDCNMAFVTSGELVRHRRYKHTHEKPFKCSMCKYASVEASKLKRHVRSHTGERPFQCCQCSYASRDTYKLKRHMRTHSGEKPYECHICHTRFTQSGTMKIHILQKHGENVPKYQCPHCATIIARKSDLRFLGLPFP

SEQ ID NO: 12713 - protein, 483 aa, Homo sapiens
  Payload ID: 2492
  Gene Symbol: CTCFL
  Gene Name: CCCTC-binding  factor (zinc finger protein)-like
  Uniprot ID: Q8NI51
  ENSP ID: ENSP00000409344
MAATEISVLSEQFTKIKELELMPEKGLKEEEKDGVCREKDHRSPSELEAERTSGAFQDSVLEEEVELVLAPSEESEKYILTLQTVHFTSEAVELQDMSLLSIQQQEGVQVVVQQPGPGLLWLEEGPRQSLQQCVAISIQQELYSPQEMEVLQFHALEENVMVASEDSKLAVSLAETTGLIKLEEEQEKNQLLAERTKEQLFFVETMSGDERSDEIVLTVSNSNVEEQEDQPTAGQADAEKAKSTKNQRKTKGAKGTFHCDVCMFTSSRMSSFNRHMKTHTSEKPHLCHLCLKTFRTVTLLRNHVNTHTGTRPYKCNDCNMAFVTSGELVRHRRYKHTHEKPFKCSMCKYASVEERHMTAHIRTHTGEKPFTCLSCNKCFRQKQLLNAHFRKYHDANFIPTVYKCSKCGKGFSRWILWVGNSEVAELGGPGSGPLLRLQSGCPPGLHHPKAGLGPEDPLPGQLRHTTAGTGLSSLLQGPLCRAA

SEQ ID NO: 12714 - protein, 427 aa, Homo sapiens
  Payload ID: 2492
  Gene Symbol: CTCFL
  Gene Name: CCCTC-binding  factor (zinc finger protein)-like
  Uniprot ID: Q8NI51
  ENSP ID: ENSP00000413713
MAATEISVLSEQFTKIKELELMPEKGLKEEEKDGVCREKDHRSPSELEAERTSGAFQDSVLEEEVELVLAPSEESEKYILTLQTVHFTSEAVELQDMSLLSIQQQEGVQVVVQQPGPGLLWLEEGPRQSLQQCVAISIQQELYSPQEMEVLQFHALEENVMVASEDSKLAVSLAETTGLIKLEEEQEKNQLLAERTKEQLFFVETMSGDERSDEIVLTVSNSNVEEQEDQPTAGQADAEKAKSTKNQRKTKGAKGTFHCDVCMFTSSRMSSFNRHMKTHTSEKPHLCHLCLKTFRTVTLLRNHVNTHTGTRPYKCNDCNMAFVTSGELVRHRRYKHTHEKPFKCSMCKYASVEASKLKRHVRSHTGERPFQCCQCSYASRDTYKLKRHMRTHSEATSKRSLQEIPRCKFHPDCLQMLQVWQRLFPLD

SEQ ID NO: 12715 - protein, 613 aa, Homo sapiens
  Payload ID: 2492
  Gene Symbol: CTCFL
  Gene Name: CCCTC-binding  factor (zinc finger protein)-like
  Uniprot ID: Q8NI51
  ENSP ID: ENSP00000415329
MAATEISVLSEQFTKIKELELMPEKGLKEEEKDGVCREKDHRSPSELEAERTSGAFQDSVLEEEVELVLAPSEESEKYILTLQTVHFTSEAVELQDMSLLSIQQQEGVQVVVQQPGPGLLWLEEGPRQSLQQCVAISIQQELYSPQEMEVLQFHALEENVMVASEDSKLAVSLAETTGLIKLEEEQEKNQLLAERTKEQLFFVETMSGDERSDEIVLTVSNSNVEEQEDQPTAGQADAEKAKSTKNQRKTKGAKGTFHCDVCMFTSSRMSSFNRHMKTHTSEKPHLCHLCLKTFRTVTLLRNHVNTHTGTRPYKCNDCNMAFVTSGELVRHRRYKHTHEKPFKCSMCKYASVEASKLKRHVRSHTGERPFQCCQCSYASRDTYKLKRHMRTHSGVHMRNLHAYSAAELKCRYCSAVFHERYALIQHQKTHKNEKRFKCKHCSYACKQERHMTAHIRTHTGEKPFTCLSCNKCFRQKQLLNAHFRKYHDANFIPTVYKCSKCGKGFSRWINLHRHSEKCGSGEAKSAASGKGRRTRKRKQTILKEATKGQKEAAKGWKEAANGDEAAAEEASTTKGEQFPGEMFPVACRETTARVKEEVDEGVTCEMLLNTMDK

SEQ ID NO: 12716 - protein, 700 aa, Homo sapiens
  Payload ID: 2492
  Gene Symbol: CTCFL
  Gene Name: CCCTC-binding  factor (zinc finger protein)-like
  Uniprot ID: Q8NI51
  ENSP ID: ENSP00000415579
MAATEISVLSEQFTKIKELELMPEKGLKEEEKDGVCREKDHRSPSELEAERTSGAFQDSVLEEEVELVLAPSEESEKYILTLQTVHFTSEAVELQDMSLLSIQQQEGVQVVVQQPGPGLLWLEEGPRQSLQQCVAISIQQELYSPQEMEVLQFHALEENVMVASEDSKLAVSLAETTGLIKLEEEQEKNQLLAERTKEQLFFVETMSGDERSDEIVLTVSNSNVEEQEDQPTAGQADAEKAKSTKNQRKTKGAKGTFHCDVCMFTSSRMSSFNRHMKTHTSEKPHLCHLCLKTFRTVTLLRNHVNTHTGTRPYKCNDCNMAFVTSGELVRHRRYKHTHEKPFKCSMCKYASVEASKLKRHVRSHTGERPFQCCQCSYASRDTYKLKRHMRTHSGEKPYECHICHTRFTQSGTMKIHILQKHGENVPKYQCPHCATIIARKSDLRVHMRNLHAYSAAELKCRYCSAVFHERYALIQHQKTHKNEKRFKCKHCSYACKQERHMTAHIRTHTGEKPFTCLSCNKCFRQKQLLNAHFRKYHDANFIPTVYKCSKCGKGFSRWINLHRHSEKCGSGEAKSAASGKGRRTRKRKQTILKEATKGQKEAAKGWKEAANGDEAAAEEASTTKGEQFPGEMFPVACRETTARVKEEVDEGVTCEMLLNTMDNSAGCTGRMMLVSAWLLGRPQETYNQGRRRRGSRRVTW

SEQ ID NO: 12717 - protein, 403 aa, Homo sapiens
  Payload ID: 2492
  Gene Symbol: CTCFL
  Gene Name: CCCTC-binding  factor (zinc finger protein)-like
  Uniprot ID: Q8NI51
  ENSP ID: ENSP00000437999
MFTSSRMSSFNRHMKTHTSEKPHLCHLCLKTFRTVTLLRNHVNTHTGTRPYKCNDCNMAFVTSGELVRHRRYKHTHEKPFKCSMCKYASVEASKLKRHVRSHTGERPFQCCQCSYASRDTYKLKRHMRTHSGEKPYECHICHTRFTQSGTMKIHILQKHGENVPKYQCPHCATIIARKSDLRVHMRNLHAYSAAELKCRYCSAVFHERYALIQHQKTHKNEKRFKCKHCSYACKQERHMTAHIRTHTGEKPFTCLSCNKCFRQKQLLNAHFRKYHDANFIPTVYKCSKCGKGFSRWINLHRHSEKCGSGEAKSAASGKGRRTRKRKQTILKEATKGQKEAAKGWKEAANGDGVISAHRNLCLLGSSDSHASVSGAGITDARHHAWLIVLLFLVEMGFYHVSHS

SEQ ID NO: 12718 - protein, 422 aa, Homo sapiens
  Payload ID: 2492
  Gene Symbol: CTCFL
  Gene Name: CCCTC-binding  factor (zinc finger protein)-like
  Uniprot ID: Q8NI51
  ENSP ID: ENSP00000439998
MSGDERSDEIVLTVSNSNVEEQEDQPTAGQADAEKAKSTKNQRKTKGAKGTFHCDVCMFTSSRMSSFNRHMKTHTSEKPHLCHLCLKTFRTVTLLRNHVNTHTGTRPYKCNDCNMAFVTSGELVRHRRYKHTHEKPFKCSMCKYASVEASKLKRHVRSHTGERPFQCCQCSYASRDTYKLKRHMRTHSGEKPYECHICHTRFTQSGTMKIHILQKHGENVPKYQCPHCATIIARKSDLRVHMRNLHAYSAAELKCRYCSAVFHERYALIQHQKTHKNEKRFKCKHCSYACKQERHMTAHIRTHTGEKPFTCLSCNKCFRQKQLLNAHFRKYHDANFIPTVYKCSKCGKGFSRWILWVGNSEVAELGGPGSGPLLRLQSGCPPGLHHPKAGLGPEDPLPGQLRHTTAGTGLSSLLQGPLCRAA

SEQ ID NO: 12719 - protein, 663 aa, Homo sapiens; identical to SEQ ID NO: 12708
  Payload ID: 2492
  Gene Symbol: CTCFL
  Gene Name: CCCTC-binding  factor (zinc finger protein)-like
  Uniprot ID: Q8NI51
  ENSP ID: ENSP00000476398

SEQ ID NO: 12720 - protein, 627 aa, Homo sapiens
  Payload ID: 2492
  Gene Symbol: CTCFL
  Gene Name: CCCTC-binding  factor (zinc finger protein)-like
  ENSP ID: ENSP00000476458
MAATEISVLSEQFTKIKELELMPEKGLKEEEKDGVCREKDHRSPSELEAERTSGAFQDSVLEEEVELVLAPSEESEKYILTLQTVHFTSEAVELQDMSLLSIQQQEGVQVVVQQPGPGLLWLEEGPRQSLQQCVAISIQQELYSPQEMEVLQFHALEENVMVASEDSKLAVSLAETTGLIKLEEEQEKNQLLAERTKEQLFFVETMSGDERSDEIVLTVSNSNVEEQEDQPTAGQADAEKAKSTKNQRKTKGAKGTFHCDVCMFTSSRMSSFNRHMKTHTSEKPHLCHLCLKTFRTVTLLRNHVNTHTGTRPYKCNDCNMAFVTSGELVRHRRYKHTHEKPFKCSMCKYASVEASKLKRHVRSHTGERPFQCCQCSYASRDTYKLKRHMRTHSGEKPYECHICHTRFTQSGTMKIHILQKHGENVPKYQCPHCATIIARKSDLRVHMRNLHAYSAAELKCRYCSAVFHERYALIQHQKTHKNEKRFKCKHCSYACKQERHMTAHIRTHTGEKPFTCLSCNKCFRQKQLLNAHFRKYHDANFIPTVYKCSKCGKGFSRWILWVGNSEVAELGGPGSGPLLRLQSGCPPGLHHPKAGLGPEDPLPGQLRHTTAGTGLSSLLQGPLCRAA

SEQ ID NO: 12721 - protein, 404 aa, Homo sapiens
  Payload ID: 2492
  Gene Symbol: CTCFL
  Gene Name: CCCTC-binding  factor (zinc finger protein)-like
  ENSP ID: ENSP00000476577
MAATEISVLSEQFTKIKELELMPEKGLKEEEKDGVCREKDHRSPSELEAERTSGAFQDSVLEEEVELVLAPSEESEKYILTLQTVHFTSEAVELQDMSLLSIQQQEGVQVVVQQPGPGLLWLEEGPRQSLQQCVAISIQQELYSPQEMEVLQFHALEENVMVASEDSKLAVSLAETTGLIKLEEEQEKNQLLAERTKEQLFFVETMSGDERSDEIVLTVSNSNVEEQEDQPTAGQADAEKAKSTKNQRKTKGAKGTFHCDVCMFTSSRMSSFNRHMKTHTSEKPHLCHLCLKTFRTVTLLRNHVNTHTGTRPYKCNDCNMAFVTSGELVRHRRYKHTHEKPFKCSMCKYASVEVKPFLDLKLHGILVEAAVQVTPSVTNSRICYKQAFYYSYKIYAGNNMHSLL

SEQ ID NO: 12722 - protein, 299 aa, Homo sapiens
  Payload ID: 2492
  Gene Symbol: CTCFL
  Gene Name: CCCTC-binding  factor (zinc finger protein)-like
  Uniprot ID: Q8NI51
  ENSP ID: ENSP00000476718
MFTSSRMSSFNRHMKTHTSEKPHLCHLCLKTFRTVTLLRNHVNTHTGTRPYKCNDCNMAFVTSGELVRHRRYKHTHEKPFKCSMCKYASVEASKLKRHVRSHTGERPFQCCQCSYASRDTYKLKRHMRTHSGEKPYECHICHTRFTQSGTMKIHILQKHGENVPKYQCPHCATIIARKSDLRVHMRNLHAYSAAELKCRYCSAVFHERYALIQHQKTHKNEKRFKCKHCSYACKQERHMTAHIRTHTGEKPFTCLSCNKCFRQKQLLNAHFRKYHDANFIPTVYKCSKCGKGFSRWVLY

SEQ ID NO: 12723 - protein, 663 aa, Homo sapiens; identical to SEQ ID NO: 12708
  Payload ID: 2492
  Gene Symbol: CTCFL
  Gene Name: CCCTC-binding  factor (zinc finger protein)-like
  Uniprot ID: Q8NI51
  ENSP ID: ENSP00000476783

SEQ ID NO: 12724 - protein, 404 aa, Homo sapiens; identical to SEQ ID NO: 12721
  Payload ID: 2492
  Gene Symbol: CTCFL
  Gene Name: CCCTC-binding  factor (zinc finger protein)-like
  ENSP ID: ENSP00000477165

SEQ ID NO: 12725 - protein, 426 aa, Homo sapiens
  Payload ID: 2492
  Gene Symbol: CTCFL
  Gene Name: CCCTC-binding  factor (zinc finger protein)-like
  ENSP ID: ENSP00000477412
MAATEISVLSEQFTKIKELELMPEKGLKEEEKDGVCREKDHRSPSELEAERTSGAFQDSVLEEEVELVLAPSEESEKYILTLQTVHFTSEAVELQDMSLLSIQQQEGVQVVVQQPGPGLLWLEEGPRQSLQQCVAISIQQELYSPQEMEVLQFHALEENVMVASEDSKLAVSLAETTGLIKLEEEQEKNQLLAERTKEQLFFVETMSGDERSDEIVLTVSNSNVEEQEDQPTAGQADAEKAKSTKNQRKTKGAKGTFHCDVCMFTSSRMSSFNRHMKTHTSEKPHLCHLCLKTFRTVTLLRNHVNTHTGTRPYKCNDCNMAFVTSGELVRHRRYKHTHEKPFKCSMCKYASVEASKLKRHVRSHTGERPFQCCQCSYASRDTYKLKRHMRTHSGKGSGAEGLIPTVLTLKASFKKLLFIGTIKVQR

SEQ ID NO: 12726 - protein, 665 aa, Homo sapiens
  Payload ID: 2492
  Gene Symbol: CTCFL
  Gene Name: CCCTC-binding  factor (zinc finger protein)-like
  Uniprot ID: Q8NI51
  ENSP ID: ENSP00000477488
MAATEISVLSEQFTKIKELELMPEKGLKEEEKDGVCREKDHRSPSELEAERTSGAFQDSVLEEEVELVLAPSEESEKYILTLQTVHFTSEAVELQDMSLLSIQQQEGVQVVVQQPGPGLLWLEEGPRQSLQQCVAISIQQELYSPQEMEVLQFHALEENVMVASEDSKLAVSLAETTGLIKLEEEQEKNQLLAERTKEQLFFVETMSGDERSDEIVLTVSNSNVEEQEDQPTAGQADAEKAKSTKNQRKTKGAKGTFHCDVCMFTSSRMSSFNRHMKTHTSEKPHLCHLCLKTFRTVTLLRNHVNTHTGTRPYKCNDCNMAFVTSGELVRHRRYKHTHEKPFKCSMCKYASVEASKLKRHVRSHTGERPFQCCQCSYASRDTYKLKRHMRTHSGEKPYECHICHTRFTQSGTMKIHILQKHGENVPKYQCPHCATIIARKSDLRVHMRNLHAYSAAELKCRYCSAVFHERYALIQHQKTHKNEKRFKCKHCSYACKQERHMTAHIRTHTGEKPFTCLSCNKCFRQKQLLNAHFRKYHDANFIPTVYKCSKCGKGFSRWINLHRHSEKCGSGEAKSAASGKGRRTRKRKQTILKEATKGQKEAAKGWKEAANGDGVISAHRNLCLLGSSDSHASVSGAGITDARHHAWLIVLLFLVEMGFYHVSHS

SEQ ID NO: 12727 - protein, 502 aa, Homo sapiens
  Payload ID: 2493
  Gene Symbol: CCDC169-SOHLH2
  Gene Name: CCDC169-SOHLH2 readthrough
  ENSP ID: ENSP00000421868
METLQESLNTLLKQLEEEKKTLESQVKYYALKLEQESKAYQKINNERRTYLAEMSQGSGLHQVSKRQQVDQLPRMQENLVKTLLLKEELDPLKAKIDILLVGDVTVGYLADTVQKLFANIAEVTITISDTKEAAALLDDCIFNMVLLKVPSSLSAEELEAIKLIRFGKKKNTHSLFVFIIPENFKGCISGHGMDIALTEPLTMEKMSNVVKYWTTCPSNTVKTENATGPEELGLPLQRSYSEHLGYFPTDLFACSESLRNGNGLELNASLSEFEKNKKISLLHSSKEKLRRERIKYCCEQLRTLLPYVKGRKNDAASVLEATVDYVKYIREKISPAVMAQITEALQSNMRFCKKQQTPIELSLPGTVMAQRENSVMSTYSPERGLQFLTNTCWNGCSTPDAESSLDEAVRVPSSSASENAIGDPYKTHISSAALSLNSLHTVRYYSKVTPSYDATAVTNQNISIHLPSAMPPVSKLLPRHCTSGLGQTCTTHPNCLQQFWAY

SEQ ID NO: 12728 - protein, 178 aa, Homo sapiens
  Payload ID: 2494
  Gene Symbol: CNBP
  Gene Name: CCHC-type zinc finger, nucleic acid binding protein
  Uniprot ID: P62633
  ENSP ID: ENSP00000399488
MSSNECFKCGRSGHWARECPTGGGRGRGMRSRGRGGFTSDRGFQFVSSSLPDICYRCGESGHLAKDCDLQEDEACYNCGRGGHIAKDCKEPKREREQCCYNCGKPGHLARDCDHADEQKCYSCGEFGHIQKDCTKVKCYRCGETGHVAINCSKTSEVNCYRCGESGHLARECTIEATA

SEQ ID NO: 12729 - protein, 172 aa, Homo sapiens
  Payload ID: 2494
  Gene Symbol: CNBP
  Gene Name: CCHC-type zinc finger, nucleic acid binding protein
  Uniprot ID: P62633
  ENSP ID: ENSP00000400444
MSSNECFKCGRSGHWARECPTGGGRGRGMRSRGRGFQFVSSSLPDICYRCGESGHLAKDCDLQEDVEACYNCGRGGHIAKDCKEPKREREQCCYNCGKPGHLARDCDHADEQKCYSCGEFGHIQKDCTKVKCYRCGETGHVAINCSKTSEVNCYRCGESGHLARECTIEATA

SEQ ID NO: 12730 - protein, 177 aa, Homo sapiens
  Payload ID: 2494
  Gene Symbol: CNBP
  Gene Name: CCHC-type zinc finger, nucleic acid binding protein
  Uniprot ID: P62633
  ENSP ID: ENSP00000410619
MSSNECFKCGRSGHWARECPTGGGRGRGMRSRGRGGFTSDRGFQFVSSSLPDICYRCGESGHLAKDCDLQEDACYNCGRGGHIAKDCKEPKREREQCCYNCGKPGHLARDCDHADEQKCYSCGEFGHIQKDCTKVKCYRCGETGHVAINCSKTSEVNCYRCGESGHLARECTIEATA

SEQ ID NO: 12731 - protein, 179 aa, Homo sapiens
  Payload ID: 2494
  Gene Symbol: CNBP
  Gene Name: CCHC-type zinc finger, nucleic acid binding protein
  Uniprot ID: P62633
  ENSP ID: ENSP00000410769
MSSNECFKCGRSGHWARECPTGGGRGRGMRSRGRGGFTSDRGFQFVSSSLPDICYRCGESGHLAKDCDLQEDVEACYNCGRGGHIAKDCKEPKREREQCCYNCGKPGHLARDCDHADEQKCYSCGEFGHIQKDCTKVKCYRCGETGHVAINCSKTSEVNCYRCGESGHLARECTIEATA

SEQ ID NO: 12732 - protein, 170 aa, Homo sapiens
  Payload ID: 2494
  Gene Symbol: CNBP
  Gene Name: CCHC-type zinc finger, nucleic acid binding protein
  Uniprot ID: P62633
  ENSP ID: ENSP00000421323
MSSNECFKCGRSGHWARECPTGGGRGRGMRSRGRGFQFVSSSLPDICYRCGESGHLAKDCDLQEDACYNCGRGGHIAKDCKEPKREREQCCYNCGKPGHLARDCDHADEQKCYSCGEFGHIQKDCTKVKCYRCGETGHVAINCSKTSEVNCYRCGESGHLARECTIEATA

SEQ ID NO: 12733 - protein, 167 aa, Homo sapiens
  Payload ID: 2494
  Gene Symbol: CNBP
  Gene Name: CCHC-type zinc finger, nucleic acid binding protein
  Uniprot ID: P62633
  ENSP ID: ENSP00000422110
MSSNECFKCGRSGHWARECPTGGGRGRGMRSRGRGGFTSDRDICYRCGESGHLAKDCDLQEDACYNCGRGGHIAKDCKEPKREREQCCYNCGKPGHLARDCDHADEQKCYSCGEFGHIQKDCTKVKCYRCGETGHVAINCSKTSEVNCYRCGESGHLARECTIEATA

SEQ ID NO: 12734 - protein, 113 aa, Homo sapiens
  Payload ID: 2494
  Gene Symbol: CNBP
  Gene Name: CCHC-type zinc finger, nucleic acid binding protein
  ENSP ID: ENSP00000424787
MSSNECFKCGRSGHWARECPTGGGRGRGMRSRGRGGFQFVSSSLPDICYRCGESGHLAKDCDLQEDVLACFFSLLLKPAITAVEVATLPRTARSPRESESNAATTVANQAIWL

SEQ ID NO: 12735 - protein, 160 aa, Homo sapiens
  Payload ID: 2494
  Gene Symbol: CNBP
  Gene Name: CCHC-type zinc finger, nucleic acid binding protein
  Uniprot ID: P62633
  ENSP ID: ENSP00000426223
MSSNECFKCGRSGHWARECPTGGGRGRGMRSRGRDICYRCGESGHLAKDCDLQEDACYNCGRGGHIAKDCKEPKREREQCCYNCGKPGHLARDCDHADEQKCYSCGEFGHIQKDCTKVKCYRCGETGHVAINCSKTSEVNCYRCGESGHLARECTIEATA

SEQ ID NO: 12736 - protein, 113 aa, Homo sapiens
  Payload ID: 2495
  Gene Symbol: CCL15-CCL14
  Gene Name: CCL15-CCL14 readthrough (NMD candidate)
  ENSP ID: ENSP00000481402
MKVSVAALSCLMLVAVLGSQAQFTNDAETELMMSKLPLENPVVLNSFHFAADCCTSYISQSIPCSLMKSYFETSSECSKPGVIFLTKKGRQVCAKPSGPGVQDCMKKLKPYSI

SEQ ID NO: 12737 - protein, 113 aa, Homo sapiens; identical to SEQ ID NO: 12736
  Payload ID: 2495
  Gene Symbol: CCL15-CCL14
  Gene Name: CCL15-CCL14 readthrough (NMD candidate)
  ENSP ID: ENSP00000481940

SEQ ID NO: 12738 - protein, 113 aa, Homo sapiens
  Payload ID: 2495
  Gene Symbol: CCL15-CCL14
  Gene Name: CCL15-CCL14 readthrough (NMD candidate)
  ENSP ID: ENSP00000487982
MKVSVAALSCLMLVAVLGSQAQFINDAETELMMSKLPLENPVVLNSFHFAADCCTSYISQSIPCSLMKSYFETSSECSKPGVIFLTKKGRQVCAKPSGPGVQDCMKKLKPYSI

SEQ ID NO: 12739 - protein, 113 aa, Homo sapiens; identical to SEQ ID NO: 12738
  Payload ID: 2495
  Gene Symbol: CCL15-CCL14
  Gene Name: CCL15-CCL14 readthrough (NMD candidate)
  ENSP ID: ENSP00000488638

SEQ ID NO: 12740 - protein, 316 aa, Homo sapiens
  Payload ID: 2496
  Gene Symbol: CNOT1
  Gene Name: CCR4-NOT transcription complex, subunit 1
  ENSP ID: ENSP00000245138
MLLLELNAPEHVLETINFQTLTAFCNTFHILRPTKAPGFVYAWLELISHRIFIARMLAHTPQQKGWPMYAQLLIDLFKYLAPFLRNVELTKPMQILYKGTLRVLLVLLHDFPEFLCDYHYGFCDVIPPNCIQLRNLILSAFPRNMRLPDPFTPNLKVDMLSEINIAPRILTNFTGVMPPQFKKDLDSYLKTRSPVTFLSDLRSNLQVSNEPGNRYNLQLINALVLYVGTQAIAHIHNKGSTPSMSTITHSAHMDIFQNLAVDLDTEGRYLFLNAIANQSGTQIATLTTSVAPCCTFLQRPIRKPSKNRSQEFSWNG

SEQ ID NO: 12741 - protein, 2376 aa, Homo sapiens
  Payload ID: 2496
  Gene Symbol: CNOT1
  Gene Name: CCR4-NOT transcription complex, subunit 1
  Uniprot ID: A5YKK6
  ENSP ID: ENSP00000320949
MNLDSLSLALSQISYLVDNLTKKNYRASQQEIQHIVNRHGPEADRHLLRCLFSHVDFSGDGKSSGKDFHQTQFLIQECALLITKPNFISTLSYAIDNPLHYQKSLKPAPHLFAQLSKVLKLSKVQEVIFGLALLNSSSSDLRGFAAQFIKQKLPDLLRSYIDADVSGNQEGGFQDIAIEVLHLLLSHLLFGQKGAFGVGQEQIDAFLKTLRRDFPQERCPVVLAPLLYPEKRDILMDRILPDSGGVAKTMMESSLADFMQEVGYGFCASIEECRNIIVQFGVREVTAAQVARVLGMMARTHSGLTDGIPLQSISAPGSGIWSDGKDKSDGAQAHTWNVEVLIDVLKELNPSLNFKEVTYELDHPGFQIRDSKGLHNVVYGIQRGLGMEVFPVDLIYRPWKHAEGQLSFIQHSLINPEIFCFADYPCHTVATDILKAPPEDDNREIATWKSLDLIESLLRLAEVGQYEQVKQLFSFPIKHCPDMLVLALLQINTSWHTLRHELISTLMPIFLGNHPNSAIILHYAWHGQGQSPSIRQLIMHAMAEWYMRGEQYDQAKLSRILDVAQDLKALSMLLNGTPFAFVIDLAALASRREYLKLDKWLTDKIREHGEPFIQACMTFLKRRCPSILGGLAPEKDQPKSAQLPPETLATMLACLQACAGSVSQELSETILTMVANCSNVMNKARQPPPGVMPKGRPPSASSLDAISPVQIDPLAGMTSLSIGGSAAPHTQSMQGFPPNLGSAFSTPQSPAKAFPPLSTPNQTTAFSGIGGLSSQLPVGGLGTGSLTGIGTGALGLPAVNNDPFVQRKLGTSGLNQPTFQQSKMKPSDLSQVWPEANQHFSKEIDDEANSYFQRIYNHPPHPTMSVDEVLEMLQRFKDSTIKREREVFNCMLRNLFEEYRFFPQYPDKELHITACLFGGIIEKGLVTYMALGLALRYVLEALRKPFGSKMYYFGIAALDRFKNRLKDYPQYCQHLASISHFMQFPHHLQEYIEYGQQSRDPPVKMQGSITTPGSIALAQAQAQAQVPAKAPLAGQVSTMVTTSTTTTVAKTVTVTRPTGVSFKKDVPPSINTTNIDTLLVATDQTERIVEPPENIQEKIAFIFNNLSQSNMTQKVEELKETVKEEFMPWVSQYLVMKRVSIEPNFHSLYSNFLDTLKNPEFNKMVLNETYRNIKVLLTSDKAAANFSDRSLLKNLGHWLGMITLAKNKPILHTDLDVKSLLLEAYVKGQQELLYVVPFVAKVLESSIRSVVFRPPNPWTMAIMNVLAELHQEHDLKLNLKFEIEVLCKNLALDINELKPGNLLKDKDRLKNLDEQLSAPKKDVKQPEELPPITTTTTSTTPATNTTCTATVPPQPQYSYHDINVYSLAGLAPHITLNPTIPLFQAHPQLKQCVRQAIERAVQELVHPVVDRSIKIAMTTCEQIVRKDFALDSEESRMRIAAHHMMRNLTAGMAMITCREPLLMSISTNLKNSFASALRTASPQQREMMDQAAAQLAQDNCELACCFIQKTAVEKAGPEMDKRLATEFELRKHARQEGRRYCDPVVLTYQAERMPEQIRLKVGGVDPKQLAVYEEFARNVPGFLPTNDLSQPTGFLAQPMKQAWATDDVAQIYDKCITELEQHLHAIPPTLAMNPQAQALRSLLEVVVLSRNSRDAIAALGLLQKAVEGLLDATSGADADLLLRYRECHLLVLKALQDGRAYGSPWCNKQITRCLIECRDEYKYNVEAVELLIRNHLVNMQQYDLHLAQSMENGLNYMAVAFAMQLVKILLVDERSVAHVTEADLFHTIETLMRINAHSRGNAPEGLPQLMEVVRSNYEAMIDRAHGGPNFMMHSGISQASEYDDPPGLREKAEYLLREWVNLYHSAAAGRDSTKAFSAFVGQMHQQGILKTDDLITRFFRLCTEMCVEISYRAQAEQQHNPAANPTMIRAKCYHNLDAFVRLIALLVKHSGEATNTVTKINLLNKVLGIVVGVLLQDHDVRQSEFQQLPYHRIFIMLLLELNAPEHVLETINFQTLTAFCNTFHILRPTKAPGFVYAWLELISHRIFIARMLAHTPQQKGWPMYAQLLIDLFKYLAPFLRNVELTKPMQILYKGTLRVLLVLLHDFPEFLCDYHYGFCDVIPPNCIQLRNLILSAFPRNMRLPDPFTPNLKVDMLSEINIAPRILTNFTGVMPPQFKKDLDSYLKTRSPVTFLSDLRSNLQVSNEPGNRYNLQLINALVLYVGTQAIAHIHNKGSTPSMSTITHSAHMDIFQNLAVDLDTEGRYLFLNAIANQLRYPNSHTHYFSCTMLYLFAEANTEAIQEQITRVLLERLIVNRPHPWGLLITFIELIKNPAFKFWNHEFVHCAPEIEKLFQSVAQCCMGQKQAQQVMEGTGAS

SEQ ID NO: 12742 - protein, 1551 aa, Homo sapiens
  Payload ID: 2496
  Gene Symbol: CNOT1
  Gene Name: CCR4-NOT transcription complex, subunit 1
  Uniprot ID: A5YKK6
  ENSP ID: ENSP00000413113
MNLDSLSLALSQISYLVDNLTKKNYRASQQEIQHIVNRHGPEADRHLLRCLFSHVDFSGDGKSSGKDFHQTQFLIQECALLITKPNFISTLSYAIDNPLHYQKSLKPAPHLFAQLSKVLKLSKVQEVIFGLALLNSSSSDLRGFAAQFIKQKLPDLLRSYIDADVSGNQEGGFQDIAIEVLHLLLSHLLFGQKGAFGVGQEQIDAFLKTLRRDFPQERCPVVLAPLLYPEKRDILMDRILPDSGGVAKTMMESSLADFMQEVGYGFCASIEECRNIIVQFGVREVTAAQVARVLGMMARTHSGLTDGIPLQSISAPGSGIWSDGKDKSDGAQAHTWNVEVLIDVLKELNPSLNFKEVTYELDHPGFQIRDSKGLHNVVYGIQRGLGMEVFPVDLIYRPWKHAEGQLSFIQHSLINPEIFCFADYPCHTVATDILKAPPEDDNREIATWKSLDLIESLLRLAEVGQYEQVKQLFSFPIKHCPDMLVLALLQINTSWHTLRHELISTLMPIFLGNHPNSAIILHYAWHGQGQSPSIRQLIMHAMAEWYMRGEQYDQAKLSRILDVAQDLKALSMLLNGTPFAFVIDLAALASRREYLKLDKWLTDKIREHGEPFIQACMTFLKRRCPSILGGLAPEKDQPKSAQLPPETLATMLACLQACAGSVSQELSETILTMVANCSNVMNKARQPPPGVMPKGRPPSASSLDAISPVQIDPLAGMTSLSIGGSAAPHTQSMQGFPPNLGSAFSTPQSPAKAFPPLSTPNQTTAFSGIGGLSSQLPVGGLGTGSLTGIGTGALGLPAVNNDPFVQRKLGTSGLNQPTFQQSKMKPSDLSQVWPEANQHFSKEIDDEANSYFQRIYNHPPHPTMSVDEVLEMLQRFKDSTIKREREVFNCMLRNLFEEYRFFPQYPDKELHITACLFGGIIEKGLVTYMALGLALRYVLEALRKPFGSKMYYFGIAALDRFKNRLKDYPQYCQHLASISHFMQFPHHLQEYIEYGQQSRDPPVKMQGSITTPGSIALAQAQAQAQVPAKAPLAGQVSTMVTTSTTTTVAKTVTVTRPTGVSFKKDVPPSINTTNIDTLLVATDQTERIVEPPENIQEKIAFIFNNLSQSNMTQKVEELKETVKEEFMPWVSQYLVMKRVSIEPNFHSLYSNFLDTLKNPEFNKMVLNETYRNIKVLLTSDKAAANFSDRSLLKNLGHWLGMITLAKNKPILHTDLDVKSLLLEAYVKGQQELLYVVPFVAKVLESSIRSVVFRPPNPWTMAIMNVLAELHQEHDLKLNLKFEIEVLCKNLALDINELKPGNLLKDKDRLKNLDEQLSAPKKDVKQPEELPPITTTTTSTTPATNTTCTATVPPQPQYSYHDINVYSLAGLAPHITLNPTIPLFQAHPQLKQCVRQAIERAVQELVHPVVDRSIKIAMTTCEQIVRKDFALDSEESRMRIAAHHMMRNLTAGMAMITCREPLLMSISTNLKNSFASALRVSWLFPWYRYKTYYCLSVIIFFFVYIWHWALPLILNNHHICLMSSIILDCNSVRQSIMSVCFFFFLLYSQHDV

SEQ ID NO: 12743 - protein, 277 aa, Homo sapiens
  Payload ID: 2496
  Gene Symbol: CNOT1
  Gene Name: CCR4-NOT transcription complex, subunit 1
  ENSP ID: ENSP00000454377
RREYLKLDKWLTDKIREHGEPFIQACMTFLKRRCPSILGGLAPEKDQPKSAQLPPETLATMLACLQACAGSVSQELSETILTMVANCSNVMNKARQPPPGVMPKGRPPSASSLDAISPVQIDPLAGMTSLSIGGSAAPHTQSMQGFPPNLGSAFSTPQSPAKAFPPLSTPNQTTAFSGIGGLSSQLPGGLGTGSLTGIGTGALGLPAVNNDPFVQRKLGTSGLNQPTFQQSKMKPSDLSQVWPEANQHFSKEIDDEANSYFQRIYNHPPHPTMSVDE

SEQ ID NO: 12744 - protein, 439 aa, Homo sapiens
  Payload ID: 2496
  Gene Symbol: CNOT1
  Gene Name: CCR4-NOT transcription complex, subunit 1
  ENSP ID: ENSP00000454611
PTLAMNPQAQALRSLLEVVVLSRNSRDAIAALGLLQKAVEGLLDATSGADADLLLRYRECHLLVLKALQDGRAYGSPWCNKQITRCLIECRDEYKYNVEAVELLIRNHLVNMQQYDLHLAQSMENGLNYMAVAFAMQLVKILLVDERSVAHVTEADLFHTIETLMRINAHSRGNAPEGLPQLMEVVRSNYEAMIDRAHGGPNFMMHSGISQASEYDDPPGLREKAEYLLREWVNLYHSAAAGRDSTKAFSAFVGQVELLERKMHQQGILKTDDLITRFFRLCTEMCVEISYRAQAEQQHNPAANPTMIRAKCYHNLDAFVRLIALLVKHSGEATNTVTKINLLNKVLGIVVGVLLQDHDVRQSEFQQLPYHRIFIMLLLELNAPEHVLETINFQTLTAFCNTFHILRPTKAPGFVYAWLELISHRIFIARMLAHTPQQK

SEQ ID NO: 12745 - protein, 185 aa, Homo sapiens
  Payload ID: 2496
  Gene Symbol: CNOT1
  Gene Name: CCR4-NOT transcription complex, subunit 1
  ENSP ID: ENSP00000454763
  MOD_RES (1)..(1): Any amino acid
XAELHQEHDLKDKDRLKNLDEQLSAPKKDVKQPEELPPITTTTTSTTPATNTTCTATVPPQPQYSYHDINVYSLAGLAPHITLNPTIPLFQAHPQLKQCVRQAIERAVQELVHPVVDRSIKIAMTTCEQIVRKDFALDSEESRMRIAAHHMMRNLTAGMAMITCREPLLMSISTNLKNSFASALR

SEQ ID NO: 12746 - protein, 25 aa, Homo sapiens
  Payload ID: 2496
  Gene Symbol: CNOT1
  Gene Name: CCR4-NOT transcription complex, subunit 1
  ENSP ID: ENSP00000455289
MNLDSLSLALSQISYLVDNLTKKNY

SEQ ID NO: 12747 - protein, 2371 aa, Homo sapiens
  Payload ID: 2496
  Gene Symbol: CNOT1
  Gene Name: CCR4-NOT transcription complex, subunit 1
  Uniprot ID: A5YKK6
  ENSP ID: ENSP00000455635
MNLDSLSLALSQISYLVDNLTKKNYRASQQEIQHIVNRHGPEADRHLLRCLFSHVDFSGDGKSSGKDFHQTQFLIQECALLITKPNFISTLSYAIDNPLHYQKSLKPAPHLFAQLSKVLKLSKVQEVIFGLALLNSSSSDLRGFAAQFIKQKLPDLLRSYIDADVSGNQEGGFQDIAIEVLHLLLSHLLFGQKGAFGVGQEQIDAFLKTLRRDFPQERCPVVLAPLLYPEKRDILMDRILPDSGGVAKTMMESSLADFMQEVGYGFCASIEECRNIIVQFGVREVTAAQVARVLGMMARTHSGLTDGIPLQSISAPGSGIWSDGKDKSDGAQAHTWNVEVLIDVLKELNPSLNFKEVTYELDHPGFQIRDSKGLHNVVYGIQRGLGMEVFPVDLIYRPWKHAEGQLSFIQHSLINPEIFCFADYPCHTVATDILKAPPEDDNREIATWKSLDLIESLLRLAEVGQYEQVKQLFSFPIKHCPDMLVLALLQINTSWHTLRHELISTLMPIFLGNHPNSAIILHYAWHGQGQSPSIRQLIMHAMAEWYMRGEQYDQAKLSRILDVAQDLKALSMLLNGTPFAFVIDLAALASRREYLKLDKWLTDKIREHGEPFIQACMTFLKRRCPSILGGLAPEKDQPKSAQLPPETLATMLACLQACAGSVSQELSETILTMVANCSNVMNKARQPPPGVMPKGRPPSASSLDAISPVQIDPLAGMTSLSIGGSAAPHTQSMQGFPPNLGSAFSTPQSPAKAFPPLSTPNQTTAFSGIGGLSSQLPVGGLGTGSLTGIGTGALGLPAVNNDPFVQRKLGTSGLNQPTFQQTDLSQVWPEANQHFSKEIDDEANSYFQRIYNHPPHPTMSVDEVLEMLQRFKDSTIKREREVFNCMLRNLFEEYRFFPQYPDKELHITACLFGGIIEKGLVTYMALGLALRYVLEALRKPFGSKMYYFGIAALDRFKNRLKDYPQYCQHLASISHFMQFPHHLQEYIEYGQQSRDPPVKMQGSITTPGSIALAQAQAQAQVPAKAPLAGQVSTMVTTSTTTTVAKTVTVTRPTGVSFKKDVPPSINTTNIDTLLVATDQTERIVEPPENIQEKIAFIFNNLSQSNMTQKVEELKETVKEEFMPWVSQYLVMKRVSIEPNFHSLYSNFLDTLKNPEFNKMVLNETYRNIKVLLTSDKAAANFSDRSLLKNLGHWLGMITLAKNKPILHTDLDVKSLLLEAYVKGQQELLYVVPFVAKVLESSIRSVVFRPPNPWTMAIMNVLAELHQEHDLKLNLKFEIEVLCKNLALDINELKPGNLLKDKDRLKNLDEQLSAPKKDVKQPEELPPITTTTTSTTPATNTTCTATVPPQPQYSYHDINVYSLAGLAPHITLNPTIPLFQAHPQLKQCVRQAIERAVQELVHPVVDRSIKIAMTTCEQIVRKDFALDSEESRMRIAAHHMMRNLTAGMAMITCREPLLMSISTNLKNSFASALRTASPQQREMMDQAAAQLAQDNCELACCFIQKTAVEKAGPEMDKRLATEFELRKHARQEGRRYCDPVVLTYQAERMPEQIRLKVGGVDPKQLAVYEEFARNVPGFLPTNDLSQPTGFLAQPMKQAWATDDVAQIYDKCITELEQHLHAIPPTLAMNPQAQALRSLLEVVVLSRNSRDAIAALGLLQKAVEGLLDATSGADADLLLRYRECHLLVLKALQDGRAYGSPWCNKQITRCLIECRDEYKYNVEAVELLIRNHLVNMQQYDLHLAQSMENGLNYMAVAFAMQLVKILLVDERSVAHVTEADLFHTIETLMRINAHSRGNAPEGLPQLMEVVRSNYEAMIDRAHGGPNFMMHSGISQASEYDDPPGLREKAEYLLREWVNLYHSAAAGRDSTKAFSAFVGQMHQQGILKTDDLITRFFRLCTEMCVEISYRAQAEQQHNPAANPTMIRAKCYHNLDAFVRLIALLVKHSGEATNTVTKINLLNKVLGIVVGVLLQDHDVRQSEFQQLPYHRIFIMLLLELNAPEHVLETINFQTLTAFCNTFHILRPTKAPGFVYAWLELISHRIFIARMLAHTPQQKGWPMYAQLLIDLFKYLAPFLRNVELTKPMQILYKGTLRVLLVLLHDFPEFLCDYHYGFCDVIPPNCIQLRNLILSAFPRNMRLPDPFTPNLKVDMLSEINIAPRILTNFTGVMPPQFKKDLDSYLKTRSPVTFLSDLRSNLQVSNEPGNRYNLQLINALVLYVGTQAIAHIHNKGSTPSMSTITHSAHMDIFQNLAVDLDTEGRYLFLNAIANQLRYPNSHTHYFSCTMLYLFAEANTEAIQEQITRVLLERLIVNRPHPWGLLITFIELIKNPAFKFWNHEFVHCAPEIEKLFQSVAQCCMGQKQAQQVMEGTGAS

SEQ ID NO: 12748 - protein, 193 aa, Homo sapiens
  Payload ID: 2496
  Gene Symbol: CNOT1
  Gene Name: CCR4-NOT transcription complex, subunit 1
  ENSP ID: ENSP00000456131
  MOD_RES (1)..(1): Any amino acid
XSSQLPVGGLGTGSLTGIGTGALGLPAVNNDPFVQRKLGTSGLNQPTFQQSKMKPSDLSQVWPEANQHFSKEIDDEANSYFQRIYNHPPHPTMSVDEYPDKELHITACLFGGIIEKGLVTYMALGLALRYVLEALRKPFGSKMYYFGIAALDRFKNRLKDYPQYCQHLASISHFMQFPHHLQEYIEYGQQSRD

SEQ ID NO: 12749 - protein, 2150 aa, Homo sapiens
  Payload ID: 2496
  Gene Symbol: CNOT1
  Gene Name: CCR4-NOT transcription complex, subunit 1
  Uniprot ID: A5YKK6
  ENSP ID: ENSP00000456649
MNLDSLSLALSQISYLVDNLTKKNYRASQQEIQHIVNRHGPEADRHLLRCLFSHVDFSGDGKSSGKDFHQTQFLIQECALLITKPNFISTLSYAIDNPLHYQKSLKPAPHLFAQLSKVLKLSKVQEVIFGLALLNSSSSDLRGFAAQFIKQKLPDLLRSYIDADVSGNQEGGFQDIAIEVLHLLLSHLLFGQKGAFGVGQEQIDAFLKTLRRDFPQERCPVVLAPLLYPEKRDILMDRILPDSGGVAKTMMESSLADFMQEVGYGFCASIEECRNIIVQFGVREVTAAQVARVLGMMARTHSGLTDGIPLQSISAPGSGIWSDGKDKSDGAQAHTWNVEVLIDVLKELNPSLNFKEVTYELDHPGFQIRDSKGLHNVVYGIQRGLGMEVFPVDLIYRPWKHAEGQLSFIQHSLINPEIFCFADYPCHTVATDILKAPPEDDNREIATWKSLDLIESLLRLAEVGQYEQVKQLFSFPIKHCPDMLVLALLQINTSWHTLRHELISTLMPIFLGNHPNSAIILHYAWHGQGQSPSIRQLIMHAMAEWYMRGEQYDQAKLSRILDVAQDLKALSMLLNGTPFAFVIDLAALASRREYLKLDKWLTDKIREHGEPFIQACMTFLKRRCPSILGGLAPEKDQPKSAQLPPETLATMLACLQACAGSVSQELSETILTMVANCSNVMNKARQPPPGVMPKGRPPSASSLDAISPVQIDPLAGMTSLSIGGSAAPHTQSMQGFPPNLGSAFSTPQSPAKAFPPLSTPNQTTAFSGIGGLSSQLPVGGLGTGSLTGIGTGALGLPAVNNDPFVQRKLGTSGLNQPTFQQTDLSQVWPEANQHFSKEIDDEANSYFQRIYNHPPHPTMSVDEVLEMLQRFKDSTIKREREVFNCMLRNLFEEYRFFPQYPDKELHITACLFGGIIEKGLVTYMALGLALRYVLEALRKPFGSKMYYFGIAALDRFKNRLKDYPQYCQHLASISHFMQFPHHLQEYIEYGQQSRDPPVKMQGSITTPGSIALAQAQAQAQVPAKAPLAGQVSTMVTTSTTTTVAKTVTVTRPTGVSFKKDVPPSINTTNIDTLLVATDQTERIVEPPENIQEKIAFIFNNLSQSNMTQKVEELKETVKEEFMPWVSQYLVMKRVSIEPNFHSLYSNFLDTLKNPEFNKMVLNETYRNIKVLLTSDKAAANFSDRSLLKNLGHWLGMITLAKNKPILHTDLDVKSLLLEAYVKGQQELLYVVPFVAKVLESSIRSVVFRPPNPWTMAIMNVLAELHQEHDLKLNLKFEIEVLCKNLALDINELKPGNLLKDKDRLKNLDEQLSAPKKDVKQPEELPPITTTTTSTTPATNTTCTATVPPQPQYSYHDINVYSLAGLAPHITLNPTIPLFQAHPQLKQCVRQAIERAVQELVHPVVDRSIKIAMTTCEQIVRKDFALDSEESRMRIAAHHMMRNLTAGMAMITCREPLLMSISTNLKNSFASALRTASPQQREMMDQAAAQLAQDNCELACCFIQKTAVEKAGPEMDKRLATEFELRKHARQEGRRYCDPVVLTYQAERMPEQIRLKVGGVDPKQLAVYEEFARNVPGFLPTNDLSQPTGFLAQPMKQAWATDDVAQIYDKCITELEQHLHAIPPTLAMNPQAQALRSLLEVVVLSRNSRDAIAALGLLQKAVEGLLDATSGADADLLLRYRECHLLVLKALQDGRAYGSPWCNKQITRCLIECRDEYKYNVEAVELLIRNHLVNMQQYDLHLAQSMENGLNYMAVAFAMQLVKILLVDERSVAHVTEADLFHTIETLMRINAHSRGNAPEGLPQLMEVVRSNYEAMIDRAHGGPNFMMHSGISQASEYDDPPGLREKAEYLLREWVNLYHSAAAGRDSTKAFSAFVGQMHQQGILKTDDLITRFFRLCTEMCVEISYRAQAEQQHNPAANPTMIRAKCYHNLDAFVRLIALLVKHSGEATNTVTKINLLNKVLGIVVGVLLQDHDVRQSEFQQLPYHRIFIMLLLELNAPEHVLETINFQTLTAFCNTFHILRPTKAPGFVYAWLELISHRIFIARMLAHTPQQKGWPMYAQLLIDLFKYLAPFLRNVELTKPMQILYKGTLRVLLVLLHDFPEFLCDYHYGFCDVIPPNCIQLRNLILSAFPRNMRLPDPFTPNLKSLTL

SEQ ID NO: 12750 - protein, 62 aa, Homo sapiens
  Payload ID: 2496
  Gene Symbol: CNOT1
  Gene Name: CCR4-NOT transcription complex, subunit 1
  ENSP ID: ENSP00000456975
MNLDSLSLALSQISYLVDNLTKKNYRASQQEIQHIVNRHGPEADRHLLRCLFSHVDFSGDGK

SEQ ID NO: 12751 - protein, 68 aa, Homo sapiens
  Payload ID: 2496
  Gene Symbol: CNOT1
  Gene Name: CCR4-NOT transcription complex, subunit 1
  ENSP ID: ENSP00000457173
  MOD_RES (1)..(1): Any amino acid
XKIAMTTCEQIVRKDFALDSEESRMRIAAHHMMRNLTAGMAMITCREPLLMSISTNLKNSFASALREG

SEQ ID NO: 12752 - protein, 96 aa, Homo sapiens
  Payload ID: 2496
  Gene Symbol: CNOT1
  Gene Name: CCR4-NOT transcription complex, subunit 1
  ENSP ID: ENSP00000457460
MNLDSLSLALSQISYLVDNLTKKNYRASQQEIQHIVNRHGPEADRHLLRCLFSHVDFSGDGKSSGKDFHQTQFLIQECALLITKPNCLEYLMWPRT

SEQ ID NO: 12753 - protein, 25 aa, Homo sapiens
  Payload ID: 2496
  Gene Symbol: CNOT1
  Gene Name: CCR4-NOT transcription complex, subunit 1
  ENSP ID: ENSP00000457869
MNLDSLSLALSQISYLVDNLTKKNY

SEQ ID NO: 12754 - protein, 241 aa, Homo sapiens
  Payload ID: 2496
  Gene Symbol: CNOT1
  Gene Name: CCR4-NOT transcription complex, subunit 1
  ENSP ID: ENSP00000458057
  MOD_RES (1)..(1): Any amino acid
XITTPGSIALAQAQAQAQVPAKAPLAGQVSTMVTTSTTTTVAKTVTVTRPTGVSFKKDVPPSINTTNIDTLLVATDQTERIVEPPENIQEKIAFIFNNLSQSNMTQKVEELKETVKEEFMPWVSQYLVMKRVSIEPNFHSLYSNFLDTLKNPEFNKMVLNETYRNIKDLDVKSLLLEAYVKGQQELLYVVPFVAKVLESSIRSVVFRPPNPWTMAIMNVLAELHQEHDLKLNLKFEIEVLC

SEQ ID NO: 12755 - protein, 96 aa, Homo sapiens; identical to SEQ ID NO: 12752
  Payload ID: 2496
  Gene Symbol: CNOT1
  Gene Name: CCR4-NOT transcription complex, subunit 1
  ENSP ID: ENSP00000485782

SEQ ID NO: 12756 - protein, 717 aa, Homo sapiens
  Payload ID: 2497
  Gene Symbol: CNOT10
  Gene Name: CCR4-NOT transcription complex, subunit 10
  Uniprot ID: Q9H9A5
  ENSP ID: ENSP00000329376
MAADKPADQGAEKHEGTGQSSGITDQEKELSTNAFQAFTSGNYDACLQHLACLQDINKDDYKIILNTAVAEFFKSNQTTTDNLRQTLNQLKNQVHSAVEEMDGLDDVENSMLYYNQAVILYHLRQYTEAISVGEKLYQFIEPFEEKFAQAVCFLLVDLYILTYQAEKALHLLAVLEKMISQGNNNKNGKNETGNNNNKDGSNHKAESGALIEAAKSKIHQYKVRAYIQMKSLKACKREIKSVMNTAGNSAPSLFLKSNFEYLRGNYRKAVKLLNSSNIAEHPGFMKTGECLRCMFWNNLGCIHFAMSKHNLGIFYFKKALQENDNVCAQLSAGSTDPGKKFSGRPMCTLLTNKRYELLYNCGIQLLHIGRPLAAFECLIEAVQVYHANPRLWLRLAECCIAANKGTSEQETKGLPSKKGIVQSIVGQGYHRKIVLASQSIQNTVYNDGQSSAIPVASMEFAAICLRNALLLLPEEQQDPKQENGAKNSNQLGGNTESSESSETCRCSILACSAYVALALGDNLMALNHADKLLQQPKLSGSLKFLGHLYAAEALISLDRISDAITHLNPENVTDVSLGISSNEQDQGSDKGENEAMESSGKRAPQCYPSSVNSARTVMLFNLGSAYCLRSEYDKARKCLHQAASMIHPKEVPPEAILLAVYLELQNGNTQLALQIIKRNQLLPAVKTHSEVRKKPVFQPVHPIQPIQMPAFTTVQRK

SEQ ID NO: 12757 - protein, 744 aa, Homo sapiens
  Payload ID: 2497
  Gene Symbol: CNOT10
  Gene Name: CCR4-NOT transcription complex, subunit 10
  Uniprot ID: Q9H9A5
  ENSP ID: ENSP00000330060
MAADKPADQGAEKHEGTGQSSGITDQEKELSTNAFQAFTSGNYDACLQHLACLQDINKDDYKIILNTAVAEFFKSNQTTTDNLRQTLNQLKNQVHSAVEEMDGLDDVENSMLYYNQAVILYHLRQYTEAISVGEKLYQFIEPFEEKFAQAVCFLLVDLYILTYQAEKALHLLAVLEKMISQGNNNKNGKNETGNNNNKDGSNHKAESGALIEAAKSKIHQYKVRAYIQMKSLKACKREIKSVMNTAGNSAPSLFLKSNFEYLRGNYRKAVKLLNSSNIAEHPGFMKTGECLRCMFWNNLGCIHFAMSKHNLGIFYFKKALQENDNVCAQLSAGSTDPGKKFSGRPMCTLLTNKRYELLYNCGIQLLHIGRPLAAFECLIEAVQVYHANPRLWLRLAECCIAANKGTSEQETKGLPSKKGIVQSIVGQGYHRKIVLASQSIQNTVYNDGQSSAIPVASMEFAAICLRNALLLLPEEQQDPKQENGAKNSNQLGGNTESSESSETCSSKSHDGDKFIPAPPSSPLRKQELENLKCSILACSAYVALALGDNLMALNHADKLLQQPKLSGSLKFLGHLYAAEALISLDRISDAITHLNPENVTDVSLGISSNEQDQGSDKGENEAMESSGKRAPQCYPSSVNSARTVMLFNLGSAYCLRSEYDKARKCLHQAASMIHPKEVPPEAILLAVYLELQNGNTQLALQIIKRNQLLPAVKTHSEVRKKPVFQPVHPIQPIQMPAFTTVQRK

SEQ ID NO: 12758 - protein, 43 aa, Homo sapiens
  Payload ID: 2497
  Gene Symbol: CNOT10
  Gene Name: CCR4-NOT transcription complex, subunit 10
  ENSP ID: ENSP00000392312
GLDDVENSMLYYNQAVILYHLRQYTEAISVGEKLYQFIEPFDW

SEQ ID NO: 12759 - protein, 229 aa, Homo sapiens
  Payload ID: 2497
  Gene Symbol: CNOT10
  Gene Name: CCR4-NOT transcription complex, subunit 10
  ENSP ID: ENSP00000395385
PVASMEFAAICLRNALLLLPEEQQDPKQENGAKNSNQLGGNTESSESSETCSSKSHDGDKFIPAPPSSPLRKQELENLKCSILACSAYVALALGDNLMALNHADKLLQQPKLSGSLKFLGHLYAAEALISLDRISDAITHLNPENVTDVSLGISSNEQDQAGKRAPQCYPSSVNSARTVMLFNLGSAYCLRSEYDKARKCLHQAASMIHPKEVPPEAILLAVYLELQNG

SEQ ID NO: 12760 - protein, 804 aa, Homo sapiens
  Payload ID: 2497
  Gene Symbol: CNOT10
  Gene Name: CCR4-NOT transcription complex, subunit 10
  Uniprot ID: Q9H9A5
  ENSP ID: ENSP00000399862
MKSIGVKTVKVCGSKSSVRIEGQPCSLGQSRRKVKLMGERSYTLSIGNGDYFWANKEMLWDYVQTLSDQGAEKHEGTGQSSGITDQEKELSTNAFQAFTSGNYDACLQHLACLQDINKDDYKIILNTAVAEFFKSNQTTTDNLRQTLNQLKNQVHSAVEEMDGLDDVENSMLYYNQAVILYHLRQYTEAISVGEKLYQFIEPFEEKFAQAVCFLLVDLYILTYQAEKALHLLAVLEKMISQGNNNKNGKNETGNNNNKDGSNHKAESGALIEAAKSKIHQYKVRAYIQMKSLKACKREIKSVMNTAGNSAPSLFLKSNFEYLRGNYRKAVKLLNSSNIAEHPGFMKTGECLRCMFWNNLGCIHFAMSKHNLGIFYFKKALQENDNVCAQLSAGSTDPGKKFSGRPMCTLLTNKRYELLYNCGIQLLHIGRPLAAFECLIEAVQVYHANPRLWLRLAECCIAANKGTSEQETKGLPSKKGIVQSIVGQGYHRKIVLASQSIQNTVYNDGQSSAIPVASMEFAAICLRNALLLLPEEQQDPKQENGAKNSNQLGGNTESSESSETCSSKSHDGDKFIPAPPSSPLRKQELENLKCSILACSAYVALALGDNLMALNHADKLLQQPKLSGSLKFLGHLYAAEALISLDRISDAITHLNPENVTDVSLGISSNEQDQGSDKGENEAMESSGKRAPQCYPSSVNSARTVMLFNLGSAYCLRSEYDKARKCLHQAASMIHPKEVPPEAILLAVYLELQNGNTQLALQIIKRNQLLPAVKTHSEVRKKPVFQPVHPIQPIQMPAFTTVQRK

SEQ ID NO: 12761 - protein, 609 aa, Homo sapiens
  Payload ID: 2497
  Gene Symbol: CNOT10
  Gene Name: CCR4-NOT transcription complex, subunit 10
  ENSP ID: ENSP00000402795
MAADKPADQGAEKHEGTGQSSGITDQEKELSTNAFQAFTVHSAVEEMDGLDDVENSMLYYNQAVILYHLRQYTEAISVGEKLYQFIEPFEEKFAQAVCFLLVDLYILTYQAEKALHLLAVLEKMISQGNNNKNGKNETGNNNNKDGSNHKAESGALIEAAKSKIHQYKVRAYIQMKSLKACKREIKSVMNTAGNSAPSLFLKSNFEYLRGNYRKAVKLLNSSNIAEHPGFMKTGECLRCMFWNNLGCIHFAMSKHNLGIFYFKKALQENDNVCAQLSAGSTDPGKKFSGRPMCTLLTNKRYELLYNCGIQLLHIGRPLAAFECLIEAVQVYHANPRLWLRLAECCIAANKGTSEQETKGLPSKKGIVQSIVGQGYHRKIVLASQSIQNTVYNDGQSSAIPVASMEFAAICLRNALLLLPEEQQDPKQENGAKNSNQLGGNTESSESSETCRCSILACSAYVALALGDNLMALNHADKLLQQPKLSGSLKFLGHLYAAEALISLDRISDAITHLNPENVTDVSLGISSNEQDQGSDKGENEAMESSGKRAPQCYPSSVNSARTVMLFNLGSAYCLRSEYDKARKCLHQAQWLMPPSTLGGRGRRIMRSGV

SEQ ID NO: 12762 - protein, 210 aa, Homo sapiens
  Payload ID: 2497
  Gene Symbol: CNOT10
  Gene Name: CCR4-NOT transcription complex, subunit 10
  ENSP ID: ENSP00000402979
  MOD_RES (1)..(1): Any amino acid
XYDACLQHLACLQDINKDDYKIILNTAVAEFFKSNQTTTDNLRQTLNQLKNQVHSAVEEMDGLDDVENSMLYYNQAVILYHLRQYTEAISVGEKLYQFIEPFEEKFAQAVCFLLVDLYILTYQAEKALHLLAVLEKMISQGNNNKNGKNETGNNNNKDGSNHKAESGALIEAAKSKIHQYKVRAYIQMKSLKACKREIKSVMNTAGNVNA

SEQ ID NO: 12763 - protein, 510 aa, Homo sapiens
  Payload ID: 2498
  Gene Symbol: CNOT11
  Gene Name: CCR4-NOT transcription complex, subunit 11
  Uniprot ID: Q9UKZ1
  ENSP ID: ENSP00000289382
MPGGGASAASGRLLTAAEQRGSREAAGSASRSGFGGSGGGRGGASGPGSGSGGPGGPAGRMSLTPKELSSLLSIISEEAGGGSTFEGLSTAFHHYFSKADHFRLGSVLVMLLQQPDLLPSAAQRLTALYLLWEMYRTEPLAANPFAASFAHLLNPAPPARGGQEPDRPPLSGFLPPITPPEKFFLSQLMLAPPRELFKKTPRQIALMDVGNMGQSVDISGLQLALAERQSELPTQSKASFPSILSDPDPDSSNSGFDSSVASQITEALVSGPKPPIESHFRPEFIRPPPPLHICEDELAWLNPTEPDHAIQWDKSMCVKNSTGVEIKRIMAKAFKSPLSSPQQTQLLGELEKDPKLVYHIGLTPAKLPDLVENNPLVAIEMLLKLMQSSQITEYFSVLVNMDMSLHSMEVVNRLTTAVDLPPEFIHLYISNCISTCEQIKDKYMQNRLVRLVCVFLQSLIRNKIINVQDLFIEVQAFCIEFSRIREAAGLFRLLKTLDTGETPSETKMSK

SEQ ID NO: 12764 - protein, 127 aa, Homo sapiens
  Payload ID: 2498
  Gene Symbol: CNOT11
  Gene Name: CCR4-NOT transcription complex, subunit 11
  ENSP ID: ENSP00000394203
  MOD_RES (1)..(1): Any amino acid
XTGVEIKRIMAKAFKSPLSSPQQTQLLGELEKDPKLVYHIGLTPAKLPDLVENNPLVAIEMLLKLMQSSQITEYFSVLVNMDMSLHSMEVVNRLTTAVDLPPEFIHLYISNCISTCEQIKDKYMQVI

SEQ ID NO: 12765 - protein, 540 aa, Homo sapiens
  Payload ID: 2499
  Gene Symbol: CNOT2
  Gene Name: CCR4-NOT transcription complex, subunit 2
  Uniprot ID: Q9NZN8
  ENSP ID: ENSP00000229195
MVRTDGHTLSEKRNYQVTNSMFGASRKKFVEGVDSDYHDENMYYSQSSMFPHRSEKDMLASPSTSGQLSQFGASLYGQQSALGLPMRGMSNNTPQLNRSLSQGTQLPSHVTPTTGVPTMSLHTPPSPSRGILPMNPRNMMNHSQVGQGIGIPSRTNSMSSSGLGSPNRSSPSIICMPKQQPSRQPFTVNSMSGFGMNRNQAFGMNNSLSSNIFNGTDGSENVTGLDLSDFPALADRNRREGSGNPTPLINPLAGRAPYVGMVTKPANEQSQDFSIHNEDFPALPGSSYKDPTSSNDDSKSNLNTSGKTTSSTDGPKFPGDKSSTTQNNNQQKKGIQVLPDGRVTNIPQGMVTDQFGMIGLLTFIRAAETDPGMVHLALGSDLTTLGLNLNSPENLYPKFASPWASSPCRPQDIDFHVPSEYLTNIHIRDKLAAIKLGRYGEDLLFYLYYMNGGDVLQLLAAVELFNRDWRYHKEERVWITRAPGMEPTMKTNTYERGTYYFFDCLNWRKVAKEFHLEYDKLEERPHLPSTFNYNPAQQAF

SEQ ID NO: 12766 - protein, 540 aa, Homo sapiens; identical to SEQ ID NO: 12765
  Payload ID: 2499
  Gene Symbol: CNOT2
  Gene Name: CCR4-NOT transcription complex, subunit 2
  Uniprot ID: Q9NZN8
  ENSP ID: ENSP00000412091

SEQ ID NO: 12767 - protein, 186 aa, Homo sapiens
  Payload ID: 2499
  Gene Symbol: CNOT2
  Gene Name: CCR4-NOT transcription complex, subunit 2
  ENSP ID: ENSP00000446507
  MOD_RES (1)..(1): Any amino acid
XPTSSNDDSKSNLNTSGKTTSSTDGPKFPGDKSSTTQNNNQQKKGIQVLPDGRVTNIPQGMVTDQFGMIGLLTFIRAAETDPGMVHLALGSDLTTLGLNLNSPENLYPKFASPWASSPCRPQDIDFHVPSEYLTNIHIRDKLAAIKLGRYGEDLLFYLYYMNGGDVLQLLAAVELYVQSILITFVL

SEQ ID NO: 12768 - protein, 309 aa, Homo sapiens
  Payload ID: 2499
  Gene Symbol: CNOT2
  Gene Name: CCR4-NOT transcription complex, subunit 2
  ENSP ID: ENSP00000447497
MVRTDGHTLSEKRNYQVTNSMFGASRKKFVEGVDSDYHDENMYYSQSSMFPHRSEKDMLASPSTSGQLSQFGASLYGQQSALGLPMRGMSNNTPQLNRSLSQGTQLPSHVTPTTGVPTMSLHTPPSPSSMSGFGMNRNQAFGMNNSLSSNIFNGTDGSENVTGLDLSDFPALADRNRREGSGNPTPLINPLAGRAPYVGMVTKPANEQSQDFSIHNEDFPALPGSSYKDPTSSNDDSKSNLNTSGKTTSSTDGPKFPGDKSSTTQNNNQQKKGIQVLPDGRVTNIPQGMVTDQFGMIGLLTFIRAAETD

SEQ ID NO: 12769 - protein, 104 aa, Homo sapiens
  Payload ID: 2499
  Gene Symbol: CNOT2
  Gene Name: CCR4-NOT transcription complex, subunit 2
  ENSP ID: ENSP00000447808
PSEYLTNIHIRDKLAAIKLGRYGEDLLFYLYYMNGGDVLQLLAAVELFNRDWRYHKEERVWITRAPGMEPTMKTNTYERGTYYFFDCLNWRKVAKVYFFPCANV

SEQ ID NO: 12770 - protein, 46 aa, Homo sapiens
  Payload ID: 2499
  Gene Symbol: CNOT2
  Gene Name: CCR4-NOT transcription complex, subunit 2
  ENSP ID: ENSP00000447813
  MOD_RES (1)..(1): Any amino acid
XLYPKFASPWASSPCRPQDIDFHVPSEYLTNIHIRDKLFFFFSWLQ

SEQ ID NO: 12771 - protein, 196 aa, Homo sapiens
  Payload ID: 2499
  Gene Symbol: CNOT2
  Gene Name: CCR4-NOT transcription complex, subunit 2
  ENSP ID: ENSP00000448024
MFGASRKKFVEGVDSDYHDENMYYSQSSMFPHRSEKDMLASPSTSGQLSQFGASLYGQQSALGLPMRGMSNNTPQLNRSLSQGTQLPSHVTPTTGVPTMSLHTPPSPSRGILPMNPRNMMNHSQVGQGIGIPSRTNSMSSSGLGSPNRSSPSIICMPKQQPSRQPFTVNSMSGFGMNRNQAFGMNNSLSSNIFNGT

SEQ ID NO: 12772 - protein, 36 aa, Homo sapiens
  Payload ID: 2499
  Gene Symbol: CNOT2
  Gene Name: CCR4-NOT transcription complex, subunit 2
  ENSP ID: ENSP00000448255
MVRTDGHTLSEKRNYQSGRIPSFIMFWLDFLTVCWS

SEQ ID NO: 12773 - protein, 182 aa, Homo sapiens
  Payload ID: 2499
  Gene Symbol: CNOT2
  Gene Name: CCR4-NOT transcription complex, subunit 2
  ENSP ID: ENSP00000448298
  MOD_RES (1)..(1): Any amino acid
XTDGPKFPGDKSSTTQNNNQQKKGIQVLPDGRVTNIPQGMVTDQFGMIGLLTFIRAAETDPGMVHLALGSDLTTLGLNLNSPENLYPKFASPWASSPCRPQDIDFHVPSEYLTNIHIRDKLAAIKLGRYGEDLLFYLYYMNGGDVLQLLAAVELYVQILTVIGDTTKKNEYGLPGHQAWSQQ

SEQ ID NO: 12774 - protein, 54 aa, Homo sapiens
  Payload ID: 2499
  Gene Symbol: CNOT2
  Gene Name: CCR4-NOT transcription complex, subunit 2
  ENSP ID: ENSP00000448453
MVRTDGHTLSEKRNYQPPALSFPIPRVANVERSCTGDKQHVWCFKKEVCRGGRQ

SEQ ID NO: 12775 - protein, 276 aa, Homo sapiens
  Payload ID: 2499
  Gene Symbol: CNOT2
  Gene Name: CCR4-NOT transcription complex, subunit 2
  ENSP ID: ENSP00000448490
MVRTDGHTLSEKRNYQVTNSMFGASRKKFVEGVDSDYHDENMYYSQSSMFPHRSEKDMLASPSTSGQLSQFGASLYGQQNGSENVTGLDLSDFPALADRNRREGSGNPTPLINPLAGRAPYVGMVTKPANEQSQDFSIHNEDFPALPGSSYKDPTSSNDDSKSNLNTSGKTTSSTDGPKFPGDKSSTTQNNNQQKKGIQVLPDGRVTNIPQGMVTDQFGMIGLLTFIRAAETDPGMVHLALGSDLTTLGLNLNSPENLYPKFASPWASSPCRPQDI

SEQ ID NO: 12776 - protein, 68 aa, Homo sapiens
  Payload ID: 2499
  Gene Symbol: CNOT2
  Gene Name: CCR4-NOT transcription complex, subunit 2
  ENSP ID: ENSP00000448660
MLKEVAQVTNSMFGASRKKFVEGVDSDYHDENMYYSQSSMFPHRSEKDMLASPSTSGQLSQFGASLYG

SEQ ID NO: 12777 - protein, 99 aa, Homo sapiens
  Payload ID: 2499
  Gene Symbol: CNOT2
  Gene Name: CCR4-NOT transcription complex, subunit 2
  ENSP ID: ENSP00000448808
  MOD_RES (1)..(1): Any amino acid
XHLALGSDLTTLGLNLNSPENLYPKFASPWASSPCRPQDIDFHVPSEYLTNIHIRDKLAAIKLGRYGEDLLFYLYYMNGGDVLQLLAAVELSSIWNMTN

SEQ ID NO: 12778 - protein, 191 aa, Homo sapiens
  Payload ID: 2499
  Gene Symbol: CNOT2
  Gene Name: CCR4-NOT transcription complex, subunit 2
  Uniprot ID: Q9NZN8
  ENSP ID: ENSP00000448883
MVTDQFGMIGLLTFIRAAETDPGMVHLALGSDLTTLGLNLNSPENLYPKFASPWASSPCRPQDIDFHVPSEYLTNIHIRDKLAAIKLGRYGEDLLFYLYYMNGGDVLQLLAAVELFNRDWRYHKEERVWITRAPGMEPTMKTNTYERGTYYFFDCLNWRKVAKEFHLEYDKLEERPHLPSTFNYNPAQQAF

SEQ ID NO: 12779 - protein, 36 aa, Homo sapiens; identical to SEQ ID NO: 12772
  Payload ID: 2499
  Gene Symbol: CNOT2
  Gene Name: CCR4-NOT transcription complex, subunit 2
  ENSP ID: ENSP00000449084

SEQ ID NO: 12780 - protein, 540 aa, Homo sapiens; identical to SEQ ID NO: 12765
  Payload ID: 2499
  Gene Symbol: CNOT2
  Gene Name: CCR4-NOT transcription complex, subunit 2
  Uniprot ID: Q9NZN8
  ENSP ID: ENSP00000449260

SEQ ID NO: 12781 - protein, 76 aa, Homo sapiens
  Payload ID: 2499
  Gene Symbol: CNOT2
  Gene Name: CCR4-NOT transcription complex, subunit 2
  ENSP ID: ENSP00000449385
MVRTDGHTLSEKRNYQPPALSFPIPRVANVERSCTDVVSLCHPGWTAVASSWLTATSASQVQVILLPRPPSSWDYR

SEQ ID NO: 12782 - protein, 217 aa, Homo sapiens
  Payload ID: 2499
  Gene Symbol: CNOT2
  Gene Name: CCR4-NOT transcription complex, subunit 2
  ENSP ID: ENSP00000449446
MVRTDGHTLSEKRNYQVTNSMFGASRKKFVEGVDSDYHDENMYYSQSSMFPHRSEKDMLASPSTSGQLSQFGASLYGQQSALGLPMRGMSNNTPQLNRSLSQGTQLPSHVTPTTGVPTMSLHTPPSPSRGILPMNPRNMMNHSQVGQGIGIPSRTNSMSSSGLGSPNRSSPSIICMPKQQPSRQPFTVNRNQAFGMNNSLSSNIFNGTDGSENVTGL

SEQ ID NO: 12783 - protein, 182 aa, Homo sapiens
  Payload ID: 2499
  Gene Symbol: CNOT2
  Gene Name: CCR4-NOT transcription complex, subunit 2
  ENSP ID: ENSP00000449577
MVRTDGHTLSEKRNYQVTNSMFGASRKKFVEGVDSDYHDENMYYSQSSMFPHRSEKDMLASPSTSGQLSQFGASLYGQQSALGLPMRGMSNNTPQLNRSLSQGTQLPSHVTPTTGVPTMSLHTPPSPSRGILPMNPRNMMNHSQVGQGIGIPSRTNSMSSSGLGSPNRSSPSIICMPKQQPS

SEQ ID NO: 12784 - protein, 531 aa, Homo sapiens
  Payload ID: 2499
  Gene Symbol: CNOT2
  Gene Name: CCR4-NOT transcription complex, subunit 2
  ENSP ID: ENSP00000449659
MLKEVAQVTNSMFGASRKKFVEGVDSDYHDENMYYSQSSMFPHRSEKDMLASPSTSGQLSQFGASLYGQQSALGLPMRGMSNNTPQLNRSLSQGTQLPSHVTPTTGVPTMSLHTPPSPSRGILPMNPRNMMNHSQVGQGIGIPSRTNSMSSSGLGSPNRSSPSIICMPKQQPSRQPFTVNSMSGFGMNRNQAFGMNNSLSSNIFNGTDGSENVTGLDLSDFPALADRNRREGSGNPTPLINPLAGRAPYVGMVTKPANEQSQDFSIHNEDFPALPGSSYKDPTSSNDDSKSNLNTSGKTTSSTDGPKFPGDKSSTTQNNNQQKKGIQVLPDGRVTNIPQGMVTDQFGMIGLLTFIRAAETDPGMVHLALGSDLTTLGLNLNSPENLYPKFASPWASSPCRPQDIDFHVPSEYLTNIHIRDKLAAIKLGRYGEDLLFYLYYMNGGDVLQLLAAVELFNRDWRYHKEERVWITRAPGMEPTMKTNTYERGTYYFFDCLNWRKVAKEFHLEYDKLEERPHLPSTFNYNPAQQAF

SEQ ID NO: 12785 - protein, 81 aa, Homo sapiens
  Payload ID: 2499
  Gene Symbol: CNOT2
  Gene Name: CCR4-NOT transcription complex, subunit 2
  ENSP ID: ENSP00000449801
MFGASRKKFVEGVDSDYHDENMYYSQSSMFPHRSEKDMLASPSTSGQLSQFGASLYGQQSALGLPMRGMSNNTPQLNRSLS

SEQ ID NO: 12786 - protein, 62 aa, Homo sapiens
  Payload ID: 2499
  Gene Symbol: CNOT2
  Gene Name: CCR4-NOT transcription complex, subunit 2
  ENSP ID: ENSP00000449917
MVRTDGHTLSEKRNYQVTNSMFGASRKKFVEGVDSDYHDENMYYSQSSMFPHRSEKDTEVKM

SEQ ID NO: 12787 - protein, 144 aa, Homo sapiens
  Payload ID: 2499
  Gene Symbol: CNOT2
  Gene Name: CCR4-NOT transcription complex, subunit 2
  ENSP ID: ENSP00000450077
MLKEVAQVTNSMFGASRKKFVEGVDSDYHDENMYYSQSSMFPHRSEKDMLASPSTSGQLSQFGASLYGQQNGSENVTGLDLSDFPALADRNRREGSGNPTPLINPLAGRAPYVGMVTKPANEQSQDFSIHNEDFPALPGSSYKD

SEQ ID NO: 12788 - protein, 131 aa, Homo sapiens
  Payload ID: 2499
  Gene Symbol: CNOT2
  Gene Name: CCR4-NOT transcription complex, subunit 2
  ENSP ID: ENSP00000450090
MRGMSNNTPQLNRSLSQGTQLPSHVTPTTGVPTMSLHTPPSPSRGILPMNPRNMMNHSQVGQGIGIPSRTNSMSSSGLGSPNRSSPSIICMPKQQPSRQPFTVNSMSGFGMNRNQAFGMNNSLSSNIFNGT

SEQ ID NO: 12789 - protein, 25 aa, Homo sapiens
  Payload ID: 2499
  Gene Symbol: CNOT2
  Gene Name: CCR4-NOT transcription complex, subunit 2
  ENSP ID: ENSP00000450283
MVRTDGHTLSEKRNYQVTNSMFGAS

SEQ ID NO: 12790 - protein, 321 aa, Homo sapiens
  Payload ID: 2499
  Gene Symbol: CNOT2
  Gene Name: CCR4-NOT transcription complex, subunit 2
  ENSP ID: ENSP00000450318
MVRTDGHTLSEKRNYQVTNSMFGASRKKFVEGVDSDYHDENMYYSQSSMFPHRSEKDMLASPSTSGQLSQFGASLYGQQSALGLPMRGMSNNTPQLNRSLSQGTQLPSHVTPTTGVPTMSLHTPPSPSRGILPMNPRNMMNHSQVGQGIGIPSRTNSMSSSGLGSPNRSSPSIICMPKQQPSRQPFTVNSMSGFGMNRNQAFGMNNSLSSNIFNGTDGSENVTGLDLSDFPALADRNRREGSGNPTPLINPLAGRAPYVGMVTKPANEQSQDFSIHNEDFPALPGSSYKDPTSSNDDSKSNLNTSGKTTSSTDGPKFPGDK

SEQ ID NO: 12791 - protein, 152 aa, Homo sapiens
  Payload ID: 2499
  Gene Symbol: CNOT2
  Gene Name: CCR4-NOT transcription complex, subunit 2
  ENSP ID: ENSP00000483096
  MOD_RES (1)..(1): Any amino acid
XENMYYSQSSMFPHRSEKDMLASPSTSGQLSQFGASLYGQQSALGLPMRGMSNNTPQLNRSLSQGTQLPSHVTPTTGVPTMSLHTPPSPSRGILPMNPRNMMNHSQVGQGIGIPSRTNSMSSSGLGSPNRSSPSIICMPKQQPSRQPFTVNR

SEQ ID NO: 12792 - protein, 753 aa, Homo sapiens
  Payload ID: 2500
  Gene Symbol: CNOT3
  Gene Name: CCR4-NOT transcription complex, subunit 3
  Uniprot ID: O75175
  ENSP ID: ENSP00000221232
MADKRKLQGEIDRCLKKVSEGVEQFEDIWQKLHNAANANQKEKYEADLKKEIKKLQRLRDQIKTWVASNEIKDKRQLIDNRKLIETQMERFKVVERETKTKAYSKEGLGLAQKVDPAQKEKEEVGQWLTNTIDTLNMQVDQFESEVESLSVQTRKKKGDKDKQDRIEGLKRHIEKHRYHVRMLETILRMLDNDSILVDAIRKIKDDVEYYVDSSQDPDFEENEFLYDDLDLEDIPQALVATSPPSHSHMEDEIFNQSSSTPTSTTSSSPIPPSPANCTTENSEDDKKRGRSTDSEVSQSPAKNGSKPVHSNQHPQSPAVPPTYPSGPPPAASALSTTPGNNGVPAPAAPPSALGPKASPAPSHNSGTPAPYAQAVAPPAPSGPSTTQPRPPSVQPSGGGGGGSGGGGSSSSSNSSAGGGAGKQNGATSYSSVVADSPAEVALSSSGGNNASSQALGPPSGPHNPPPSTSKEPSAAAPTGAGGVAPGSGNNSGGPSLLVPLPVNPPSSPTPSFSDAKAAGALLNGPPQFSTAPEIKAPEPLSSLKSMAERAAISSGIEDPVPTLHLTERDIILSSTSAPPASAQPPLQLSEVNIPLSLGVCPLGPVPLTKEQLYQQAMEEAAWHHMPHPSDSERIRQYLPRNPCPTPPYHHQMPPPHSDTVEFYQRLSTETLFFIFYYLEGTKAQYLAAKALKKQSWRFHTKYMMWFQRHEEPKTITDEFEQGTYIYFDYEKWGQRKKEGFTFEYRYLEDRDLQ

SEQ ID NO: 12793 - protein, 753 aa, Homo sapiens; identical to SEQ ID NO: 12792
  Payload ID: 2500
  Gene Symbol: CNOT3
  Gene Name: CCR4-NOT transcription complex, subunit 3
  Uniprot ID: O75175
  ENSP ID: ENSP00000351159

SEQ ID NO: 12794 - protein, 375 aa, Homo sapiens
  Payload ID: 2500
  Gene Symbol: CNOT3
  Gene Name: CCR4-NOT transcription complex, subunit 3
  ENSP ID: ENSP00000398463
  MOD_RES (1)..(1): Any amino acid
XRKLIETQMERFKVVERETKTKAYSKEGLGLAQKVDPAQKEKEEVGQWLTNTIDTLNMQVDQFESEVESLSVQTRKKKGDKDQKQDRIEGLKRHIEKHRYHVRMLETILRMLDNDSILVDAIRKIKDDVEYYVDSSQDPDFEENEFLYDDLDLEDIPQALVATSPPSHSHMEDEIFNQSSSTPTSTTSSSPIPPSPANCTTENSEDDKKRGRSTDSEVSQSPAKNGSKPVHSNQHPQSPAVPPTYPSGPPPAASALSTTPGNNGVPAPAAPPSALGPKASPAPSHNSGTPAPYAQAVAPPAPSGPSTTQPRPPSVQPSGGGGGGSGGGGSSSSSNSSAGGGAGKQNGATSYSSVVADSPAEVALSSSGGNNASSQ

SEQ ID NO: 12795 - protein, 288 aa, Homo sapiens
  Payload ID: 2500
  Gene Symbol: CNOT3
  Gene Name: CCR4-NOT transcription complex, subunit 3
  ENSP ID: ENSP00000401703
  MOD_RES (1)..(1): Any amino acid
XKEPSAAAPTGAGGVAPGSGNNSGGPSLLVPLPVNPPSSPTPSFSDAKAAGALLNGPPQFSTAPEIKAPEPLSSLKSMAERAAISSGIEDPVPTLHLTERDIILSSTSAPPASAQPPLQLSEVNIPLSLGVCPLGPVPLTKEQLYQQAMEEAAWHHMPHPSDSERIRQYLPRNPCPTPPYHHQMPPPHSDTVEFYQRLSTETLFFIFYYLEGTKAQYLAAKALKKQSWRFHTKYMMWFQRHEEPKTITDEFEQLAQSLSLTKYSSLWLSAQPGTPPSHPPLGQLLGLL

SEQ ID NO: 12796 - protein, 571 aa, Homo sapiens
  Payload ID: 2500
  Gene Symbol: CNOT3
  Gene Name: CCR4-NOT transcription complex, subunit 3
  ENSP ID: ENSP00000411587
MLETILRMLDNDSILVDAIRKIKDDVEYYVDSSQDPDFEENEFLYDDLDLEDIPQALVATSPPSHSHMEDEIFNQSSSTPTSTTSSSPIPPSPANCTTENSEDDKKRGRSTDSEVSQSPAKNGSKPVHSNQHPQSPAVPPTYPSGPPPAASALSTTPGNNGVPAPAAPPSALGPKASPAPSHNSGTPAPYAQAVAPPAPSGPSTTQPRPPSVQPSGGGGGGSGGGGSSSSSNSSAGGGAGKQNGATSYSSVVADSPAEVALSSSGGNNASSQALGPPSGPHNPPPSTSKEPSAAAPTGAGGVAPGSGNNSGGPSLLVPLPVNPPSSPTPSFSDAKAAGALLNGPPQFSTAPEIKAPEPLSSLKSMAERAAISSGIEDPVPTLHLTERDIILSSTSAPPASAQPPLQLSEVNIPLSLGVCPLGPVPLTKEQLYQQAMEEAAWHHMPHPSDSERIRQYLPRNPCPTPPYHHQMPPPHSDTVEFYQRLSTETLFFIFYYLEPRDVRTAWVDSEAGPLRHTSAPLPVAHWLTRGPSPALLQQPQSRPTPLCSLAHSQASLETTGELSSPLPTPLL

SEQ ID NO: 12797 - protein, 88 aa, Homo sapiens
  Payload ID: 2500
  Gene Symbol: CNOT3
  Gene Name: CCR4-NOT transcription complex, subunit 3
  ENSP ID: ENSP00000420064
AQYLAAKALKKQSWRFHTKYMMWFQRHEEPKTITDEFEQIPDHLLVHSLTAFSPGQGTYIYFDYEKWGQRKKEGFTFEYRYLEDRDLQ

SEQ ID NO: 12798 - protein, 571 aa, Homo sapiens
  Payload ID: 2500
  Gene Symbol: CNOT3
  Gene Name: CCR4-NOT transcription complex, subunit 3
  Uniprot ID: O75175
  ENSP ID: ENSP00000477620
MLETILRMLDNDSILVDAIRKIKDDVEYYVDSSQDPDFEENEFLYDDLDLEDIPQALVATSPPSHSHMEDEIFNQSSSTPTSTTSSSPIPPSPANCTTENSEDDKKRGRSTDSEVSQSPAKNGSKPVHSNQHPQSPAVPPTYPSGPPPAASALSTTPGNNGVPAPAAPPSALGPKASPAPSHNSGTPAPYAQAVAPPAPSGPSTTQPRPPSVQPSGGGGGGSGGGGSSSSSNSSAGGGAGKQNGATSYSSVVADSPAEVALSSSGGNNASSQALGPPSGPHNPPPSTSKEPSAAAPTGAGGVAPGSGNNSGGPSLLVPLPVNPPSSPTPSFSDAKAAGALLNGPPQFSTAPEIKAPEPLSSLKSMAERAAISSGIEDPVPTLHLTERDIILSSTSAPPASAQPPLQLSEVNIPLSLGVCPLGPVPLTKEQLYQQAMEEAAWHHMPHPSDSERIRQYLPRNPCPTPPYHHQMPPPHSDTVEFYQRLSTETLFFIFYYLEPRDVRTAWVDSEAGPLRHTSAPLPVAHWLTRGPSPALLQQPQSRPTPLCSSAHSQASLETTGELSSPLPTPLL

SEQ ID NO: 12799 - protein, 571 aa, Homo sapiens; identical to SEQ ID NO: 12798
  Payload ID: 2500
  Gene Symbol: CNOT3
  Gene Name: CCR4-NOT transcription complex, subunit 3
  ENSP ID: ENSP00000477693

SEQ ID NO: 12800 - protein, 571 aa, Homo sapiens; identical to SEQ ID NO: 12798
  Payload ID: 2500
  Gene Symbol: CNOT3
  Gene Name: CCR4-NOT transcription complex, subunit 3
  Uniprot ID: O75175
  ENSP ID: ENSP00000478143

SEQ ID NO: 12801 - protein, 753 aa, Homo sapiens; identical to SEQ ID NO: 12792
  Payload ID: 2500
  Gene Symbol: CNOT3
  Gene Name: CCR4-NOT transcription complex, subunit 3
  ENSP ID: ENSP00000478280

SEQ ID NO: 12802 - protein, 288 aa, Homo sapiens; identical to SEQ ID NO: 12795
  Payload ID: 2500
  Gene Symbol: CNOT3
  Gene Name: CCR4-NOT transcription complex, subunit 3
  ENSP ID: ENSP00000478423
  MOD_RES (1)..(1): Any amino acid

SEQ ID NO: 12803 - protein, 571 aa, Homo sapiens; identical to SEQ ID NO: 12798
  Payload ID: 2500
  Gene Symbol: CNOT3
  Gene Name: CCR4-NOT transcription complex, subunit 3
  Uniprot ID: O75175
  ENSP ID: ENSP00000478913

SEQ ID NO: 12804 - protein, 753 aa, Homo sapiens; identical to SEQ ID NO: 12792
  Payload ID: 2500
  Gene Symbol: CNOT3
  Gene Name: CCR4-NOT transcription complex, subunit 3
  ENSP ID: ENSP00000478956

SEQ ID NO: 12805 - protein, 571 aa, Homo sapiens; identical to SEQ ID NO: 12798
  Payload ID: 2500
  Gene Symbol: CNOT3
  Gene Name: CCR4-NOT transcription complex, subunit 3
  ENSP ID: ENSP00000479186

SEQ ID NO: 12806 - protein, 753 aa, Homo sapiens; identical to SEQ ID NO: 12792
  Payload ID: 2500
  Gene Symbol: CNOT3
  Gene Name: CCR4-NOT transcription complex, subunit 3
  Uniprot ID: O75175
  ENSP ID: ENSP00000479987

SEQ ID NO: 12807 - protein, 106 aa, Homo sapiens
  Payload ID: 2500
  Gene Symbol: CNOT3
  Gene Name: CCR4-NOT transcription complex, subunit 3
  ENSP ID: ENSP00000480220
  MOD_RES (1)..(1): Any amino acid
XLIETQMERFKVVERETKTKAYSKEGLGLAQKVDPAQKEKEEVGQWLTNTIDTLNMQVDQFESEVESLSVQTRKKKGDKDEGPSRCSAAPEPGPGLASRSRTGLRA

SEQ ID NO: 12808 - protein, 753 aa, Homo sapiens; identical to SEQ ID NO: 12792
  Payload ID: 2500
  Gene Symbol: CNOT3
  Gene Name: CCR4-NOT transcription complex, subunit 3
  ENSP ID: ENSP00000480258

SEQ ID NO: 12809 - protein, 571 aa, Homo sapiens; identical to SEQ ID NO: 12798
  Payload ID: 2500
  Gene Symbol: CNOT3
  Gene Name: CCR4-NOT transcription complex, subunit 3
  ENSP ID: ENSP00000480392

SEQ ID NO: 12810 - protein, 753 aa, Homo sapiens; identical to SEQ ID NO: 12792
  Payload ID: 2500
  Gene Symbol: CNOT3
  Gene Name: CCR4-NOT transcription complex, subunit 3
  ENSP ID: ENSP00000480585

SEQ ID NO: 12811 - protein, 753 aa, Homo sapiens; identical to SEQ ID NO: 12792
  Payload ID: 2500
  Gene Symbol: CNOT3
  Gene Name: CCR4-NOT transcription complex, subunit 3
  Uniprot ID: O75175
  ENSP ID: ENSP00000480697

SEQ ID NO: 12812 - protein, 96 aa, Homo sapiens
  Payload ID: 2500
  Gene Symbol: CNOT3
  Gene Name: CCR4-NOT transcription complex, subunit 3
  ENSP ID: ENSP00000480755
EFYQRLSTETLFFIFYYLEGTKAQYLAAKALKKQSWRFHTKYMMWFQRHEEPKTITDEFEQLAQSLSLTKYSSLWLSAQPGTPPSHPPLGQLLGLL

SEQ ID NO: 12813 - protein, 753 aa, Homo sapiens; identical to SEQ ID NO: 12792
  Payload ID: 2500
  Gene Symbol: CNOT3
  Gene Name: CCR4-NOT transcription complex, subunit 3
  ENSP ID: ENSP00000480876

SEQ ID NO: 12814 - protein, 753 aa, Homo sapiens; identical to SEQ ID NO: 12792
  Payload ID: 2500
  Gene Symbol: CNOT3
  Gene Name: CCR4-NOT transcription complex, subunit 3
  ENSP ID: ENSP00000480988

SEQ ID NO: 12815 - protein, 375 aa, Homo sapiens; identical to SEQ ID NO: 12794
  Payload ID: 2500
  Gene Symbol: CNOT3
  Gene Name: CCR4-NOT transcription complex, subunit 3
  ENSP ID: ENSP00000481527
  MOD_RES (1)..(1): Any amino acid

SEQ ID NO: 12816 - protein, 571 aa, Homo sapiens; identical to SEQ ID NO: 12798
  Payload ID: 2500
  Gene Symbol: CNOT3
  Gene Name: CCR4-NOT transcription complex, subunit 3
  ENSP ID: ENSP00000481624

SEQ ID NO: 12817 - protein, 753 aa, Homo sapiens; identical to SEQ ID NO: 12792
  Payload ID: 2500
  Gene Symbol: CNOT3
  Gene Name: CCR4-NOT transcription complex, subunit 3
  ENSP ID: ENSP00000481681

SEQ ID NO: 12818 - protein, 753 aa, Homo sapiens; identical to SEQ ID NO: 12792
  Payload ID: 2500
  Gene Symbol: CNOT3
  Gene Name: CCR4-NOT transcription complex, subunit 3
  Uniprot ID: O75175
  ENSP ID: ENSP00000481924

SEQ ID NO: 12819 - protein, 93 aa, Homo sapiens
  Payload ID: 2500
  Gene Symbol: CNOT3
  Gene Name: CCR4-NOT transcription complex, subunit 3
  ENSP ID: ENSP00000482531
EFYQRLSTETLFFIFYYLEGTKAQYLAAKALKKQSWRFHTKYMMWFQRHEEPKTITDEFEQGTYIYFDYEKWGQRKKEGFTFEYRYLEDRDLQ

SEQ ID NO: 12820 - protein, 753 aa, Homo sapiens; identical to SEQ ID NO: 12792
  Payload ID: 2500
  Gene Symbol: CNOT3
  Gene Name: CCR4-NOT transcription complex, subunit 3
  Uniprot ID: O75175
  ENSP ID: ENSP00000483036

SEQ ID NO: 12821 - protein, 106 aa, Homo sapiens; identical to SEQ ID NO: 12807
  Payload ID: 2500
  Gene Symbol: CNOT3
  Gene Name: CCR4-NOT transcription complex, subunit 3
  ENSP ID: ENSP00000483360
  MOD_RES (1)..(1): Any amino acid

SEQ ID NO: 12822 - protein, 753 aa, Homo sapiens; identical to SEQ ID NO: 12792
  Payload ID: 2500
  Gene Symbol: CNOT3
  Gene Name: CCR4-NOT transcription complex, subunit 3
  ENSP ID: ENSP00000483431

SEQ ID NO: 12823 - protein, 571 aa, Homo sapiens; identical to SEQ ID NO: 12798
  Payload ID: 2500
  Gene Symbol: CNOT3
  Gene Name: CCR4-NOT transcription complex, subunit 3
  ENSP ID: ENSP00000483450

SEQ ID NO: 12824 - protein, 753 aa, Homo sapiens; identical to SEQ ID NO: 12792
  Payload ID: 2500
  Gene Symbol: CNOT3
  Gene Name: CCR4-NOT transcription complex, subunit 3
  ENSP ID: ENSP00000483604

SEQ ID NO: 12825 - protein, 753 aa, Homo sapiens; identical to SEQ ID NO: 12792
  Payload ID: 2500
  Gene Symbol: CNOT3
  Gene Name: CCR4-NOT transcription complex, subunit 3
  Uniprot ID: O75175
  ENSP ID: ENSP00000483692

SEQ ID NO: 12826 - protein, 753 aa, Homo sapiens; identical to SEQ ID NO: 12792
  Payload ID: 2500
  Gene Symbol: CNOT3
  Gene Name: CCR4-NOT transcription complex, subunit 3
  ENSP ID: ENSP00000483882

SEQ ID NO: 12827 - protein, 753 aa, Homo sapiens; identical to SEQ ID NO: 12792
  Payload ID: 2500
  Gene Symbol: CNOT3
  Gene Name: CCR4-NOT transcription complex, subunit 3
  ENSP ID: ENSP00000483968

SEQ ID NO: 12828 - protein, 88 aa, Homo sapiens; identical to SEQ ID NO: 12797
  Payload ID: 2500
  Gene Symbol: CNOT3
  Gene Name: CCR4-NOT transcription complex, subunit 3
  ENSP ID: ENSP00000484003

SEQ ID NO: 12829 - protein, 93 aa, Homo sapiens; identical to SEQ ID NO: 12819
  Payload ID: 2500
  Gene Symbol: CNOT3
  Gene Name: CCR4-NOT transcription complex, subunit 3
  ENSP ID: ENSP00000484020

SEQ ID NO: 12830 - protein, 753 aa, Homo sapiens; identical to SEQ ID NO: 12792
  Payload ID: 2500
  Gene Symbol: CNOT3
  Gene Name: CCR4-NOT transcription complex, subunit 3
  Uniprot ID: O75175
  ENSP ID: ENSP00000484040

SEQ ID NO: 12831 - protein, 571 aa, Homo sapiens; identical to SEQ ID NO: 12798
  Payload ID: 2500
  Gene Symbol: CNOT3
  Gene Name: CCR4-NOT transcription complex, subunit 3
  ENSP ID: ENSP00000484369

SEQ ID NO: 12832 - protein, 96 aa, Homo sapiens; identical to SEQ ID NO: 12812
  Payload ID: 2500
  Gene Symbol: CNOT3
  Gene Name: CCR4-NOT transcription complex, subunit 3
  ENSP ID: ENSP00000484612

SEQ ID NO: 12833 - protein, 753 aa, Homo sapiens; identical to SEQ ID NO: 12792
  Payload ID: 2500
  Gene Symbol: CNOT3
  Gene Name: CCR4-NOT transcription complex, subunit 3
  ENSP ID: ENSP00000484794

SEQ ID NO: 12834 - protein, 575 aa, Homo sapiens
  Payload ID: 2501
  Gene Symbol: CNOT4
  Gene Name: CCR4-NOT transcription complex, subunit 4
  Uniprot ID: O95628
  ENSP ID: ENSP00000326731
MSRSPDAKEDPVECPLCMEPLEIDDINFFPCTCGYQICRFCWHRIRTDENGLCPACRKPYPEDPAVYKPLSQEELQRIKNEKKQKQNERKQKISENRKHLASVRVVQKNLVFVVGLSQRLADPEVLKRPEYFGKFGKIHKVVINNSTSYAGSQGPSASAYVTYIRSEDALRAIQCVNNVVVDGRTLKASLGTTKYCSYFLKNMQCPKPDCMYLHELGDEAASFTKEEMQAGKHQEYEQKLLQELYKLNPNFLQLSTGSVDKNKNKVTPLQRYDTPIDKPSDSLSIGNGDNSQQISNSDTPSPPPGLSKSNPVIPISSSNHSARSPFEGAVTESQSLFSDNFRHPNPIPSGLPPFPSSPQTSSDWPTAPEPQSLFTSETIPVSSSTDWQAAFGFGSSKQPEDDLGFDPFDVTRKALADLIEKELSVQDQPSLSPTSLQNSSSHTTTAKGPGSGFLHPAAATNANSLNSTFSVLPQRFPQFQQHRAVYNSFSFPGQAARYPWMAFPRNSIMHLNHTANPTSNSNFLDLNLPPQHNTGLGGIPVAGEEEVKVSTMPLSTSSHSLQQGQQPTSLHTTVA

SEQ ID NO: 12835 - protein, 175 aa, Homo sapiens
  Payload ID: 2501
  Gene Symbol: CNOT4
  Gene Name: CCR4-NOT transcription complex, subunit 4
  ENSP ID: ENSP00000348485
MAFPRNSIMHLNHTANPTSNSNFLDLNLPPQHNTGLGGIPVAGIPASSGNSLDSLQDDNPPHWLKSLQALTEMDGPALLHHRPTTAPLQHTDPAAQSQLESLPSSFKPFQLPLPTPRLSDSLQTPQQNPHRFTTEFNTGPPLGKEEQPLENAGFVPLCFLPLSPPPTAPFSSLMF

SEQ ID NO: 12836 - protein, 639 aa, Homo sapiens
  Payload ID: 2501
  Gene Symbol: CNOT4
  Gene Name: CCR4-NOT transcription complex, subunit 4
  Uniprot ID: O95628
  ENSP ID: ENSP00000354673
MSRSPDAKEDPVECPLCMEPLEIDDINFFPCTCGYQICRFCWHRIRTDENGLCPACRKPYPEDPAVYKPLSQEELQRIKNEKKQKQNERKQKISENRKHLASVRVVQKNLVFVVGLSQRLADPEVLKRPEYFGKFGKIHKVVINNSTSYAGSQGPSASAYVTYIRSEDALRAIQCVNNVVVDGRTLKASLGTTKYCSYFLKNMQCPKPDCMYLHELGDEAASFTKEEMQAGKHQEYEQKLLQELYKLNPNFLQLSTGSVDKNKNKVTPLQSPIDKPSDSLSIGNGDNSQQISNSDTPSPPPGLSKSNPVIPISSSNHSARSPFEGAVTESQSLFSDNFRHPNPIPSGLPPFPSSPQTSSDWPTAPEPQSLFTSETIPVSSSTDWQAAFGFGSSKQPEDDLGFDPFDVTRKALADLIEKELSVQDQPSLSPTSLQNSSSHTTTAKGPGSGFLHPAAATNANSLNSTFSVLPQRFPQFQQHRAVYNSFSFPGQAARYPWMAFPRNSIMHLNHTANPTSNSNFLDLNLPPQHNTGLGGIPVAGIPASSGNSLDSLQDDNPPHWLKSLQALTEMDGPSAAPSQTHHSAPFSTQIPLHRASWNPYPPPSNPSSFHSPPPGFQTAFRPPSKTPTDLLQSSTLDRH

SEQ ID NO: 12837 - protein, 710 aa, Homo sapiens
  Payload ID: 2501
  Gene Symbol: CNOT4
  Gene Name: CCR4-NOT transcription complex, subunit 4
  Uniprot ID: O95628
  ENSP ID: ENSP00000388491
MSRSPDAKEDPVECPLCMEPLEIDDINFFPCTCGYQICRFCWHRIRTDENGLCPACRKPYPEDPAVYKPLSQEELQRIKNEKKQKQNERKQKISENRKHLASVRVVQKNLVFVVGLSQRLADPEVLKRPEYFGKFGKIHKVVINNSTSYAGSQGPSASAYVTYIRSEDALRAIQCVNNVVVDGRTLKASLGTTKYCSYFLKNMQCPKPDCMYLHELGDEAASFTKEEMQAGKHQEYEQKLLQELYKLNPNFLQLSTGSVDKNKNKVTPLQSPIDKPSDSLSIGNGDNSQQISNSDTPSPPPGLSKSNPVIPISSSNHSARSPFEGAVTESQSLFSDNFRHPNPIPSGLPPFPSSPQTSSDWPTAPEPQSLFTSETIPVSSSTDWQAAFGFGSSKQPEDDLGFDPFDVTRKALADLIEKELSVQDQPSLSPTSLQNSSSHTTTAKGPGSGFLHPAAATNANSLNSTFSVLPQRFPQFQQHRAVYNSFSFPGQAARYPWMAFPRNSIMHLNHTANPTSNSNFLDLNLPPQHNTGLGGIPVADNSSSVESLNMKEWQDGLRALLPNININFGGLPNSSSPSNANHSAPTSNTATTDSLSWDSPGSWTDPAIITGIPASSGNSLDSLQDDNPPHWLKSLQALTEMDGPSAAPSQTHHSAPFSTQIPLHRASWNPYPPPSNPSSFHSPPPGFQTAFRPPSKTPTDLLQSSTLDRH

SEQ ID NO: 12838 - protein, 572 aa, Homo sapiens
  Payload ID: 2501
  Gene Symbol: CNOT4
  Gene Name: CCR4-NOT transcription complex, subunit 4
  Uniprot ID: O95628
  ENSP ID: ENSP00000399108
MSRSPDAKEDPVECPLCMEPLEIDDINFFPCTCGYQICRFCWHRIRTDENGLCPACRKPYPEDPAVYKPLSQEELQRIKNEKKQKQNERKQKISENRKHLASVRVVQKNLVFVVGLSQRLADPEVLKRPEYFGKFGKIHKVVINNSTSYAGSQGPSASAYVTYIRSEDALRAIQCVNNVVVDGRTLKASLGTTKYCSYFLKNMQCPKPDCMYLHELGDEAASFTKEEMQAGKHQEYEQKLLQELYKLNPNFLQLSTGSVDKNKNKVTPLQSPIDKPSDSLSIGNGDNSQQISNSDTPSPPPGLSKSNPVIPISSSNHSARSPFEGAVTESQSLFSDNFRHPNPIPSGLPPFPSSPQTSSDWPTAPEPQSLFTSETIPVSSSTDWQAAFGFGSSKQPEDDLGFDPFDVTRKALADLIEKELSVQDQPSLSPTSLQNSSSHTTTAKGPGSGFLHPAAATNANSLNSTFSVLPQRFPQFQQHRAVYNSFSFPGQAARYPWMAFPRNSIMHLNHTANPTSNSNFLDLNLPPQHNTGLGGIPVAGEEEVKVSTMPLSTSSHSLQQGQQPTSLHTTVA

SEQ ID NO: 12839 - protein, 642 aa, Homo sapiens
  Payload ID: 2501
  Gene Symbol: CNOT4
  Gene Name: CCR4-NOT transcription complex, subunit 4
  Uniprot ID: O95628
  ENSP ID: ENSP00000406777
MSRSPDAKEDPVECPLCMEPLEIDDINFFPCTCGYQICRFCWHRIRTDENGLCPACRKPYPEDPAVYKPLSQEELQRIKNEKKQKQNERKQKISENRKHLASVRVVQKNLVFVVGLSQRLADPEVLKRPEYFGKFGKIHKVVINNSTSYAGSQGPSASAYVTYIRSEDALRAIQCVNNVVVDGRTLKASLGTTKYCSYFLKNMQCPKPDCMYLHELGDEAASFTKEEMQAGKHQEYEQKLLQELYKLNPNFLQLSTGSVDKNKNKVTPLQRYDTPIDKPSDSLSIGNGDNSQQISNSDTPSPPPGLSKSNPVIPISSSNHSARSPFEGAVTESQSLFSDNFRHPNPIPSGLPPFPSSPQTSSDWPTAPEPQSLFTSETIPVSSSTDWQAAFGFGSSKQPEDDLGFDPFDVTRKALADLIEKELSVQDQPSLSPTSLQNSSSHTTTAKGPGSGFLHPAAATNANSLNSTFSVLPQRFPQFQQHRAVYNSFSFPGQAARYPWMAFPRNSIMHLNHTANPTSNSNFLDLNLPPQHNTGLGGIPVAGIPASSGNSLDSLQDDNPPHWLKSLQALTEMDGPSAAPSQTHHSAPFSTQIPLHRASWNPYPPPSNPSSFHSPPPGFQTAFRPPSKTPTDLLQSSTLDRH

SEQ ID NO: 12840 - protein, 433 aa, Homo sapiens
  Payload ID: 2501
  Gene Symbol: CNOT4
  Gene Name: CCR4-NOT transcription complex, subunit 4
  Uniprot ID: O95628
  ENSP ID: ENSP00000416532
MSRSPDAKEDPVECPLCMEPLEIDDINFFPCTCGYQICRFCWHRIRTDENGLCPACRKPYPEDPAVYKPLSQEELQRIKNEKKQKQNERKQKISENRKHLASVRVVQKNLVFVVGLSQRLADPEVLKRPEYFGKFGKIHKVVINNSTSYAGSQGPSASAYVTYIRSEDALRAIQCVNNVVVDGRTLKASLGTTKYCSYFLKNMQCPKPDCMYLHELGDEAASFTKEEMQAGKHQEYEQKLLQELYKLNPNFLQLSTGSVDKNKNKVTPLQRYDTPIDKPSDSLSIGNGDNSQQISNSDTPSPPPGLSKSNPVIPISSSNHSARSPFEGAVTESQSLFSDNFRHPNPIPSGLPPFPSSPQTSSDWPTAPEPQSLFTSETIPVSSSTDWQAAFGFGSSKQPEDDLGFDPFDVTRKALADLTEPIERKRLAVLKRR

SEQ ID NO: 12841 - protein, 713 aa, Homo sapiens
  Payload ID: 2501
  Gene Symbol: CNOT4
  Gene Name: CCR4-NOT transcription complex, subunit 4
  Uniprot ID: O95628
  ENSP ID: ENSP00000445508
MSRSPDAKEDPVECPLCMEPLEIDDINFFPCTCGYQICRFCWHRIRTDENGLCPACRKPYPEDPAVYKPLSQEELQRIKNEKKQKQNERKQKISENRKHLASVRVVQKNLVFVVGLSQRLADPEVLKRPEYFGKFGKIHKVVINNSTSYAGSQGPSASAYVTYIRSEDALRAIQCVNNVVVDGRTLKASLGTTKYCSYFLKNMQCPKPDCMYLHELGDEAASFTKEEMQAGKHQEYEQKLLQELYKLNPNFLQLSTGSVDKNKNKVTPLQRYDTPIDKPSDSLSIGNGDNSQQISNSDTPSPPPGLSKSNPVIPISSSNHSARSPFEGAVTESQSLFSDNFRHPNPIPSGLPPFPSSPQTSSDWPTAPEPQSLFTSETIPVSSSTDWQAAFGFGSSKQPEDDLGFDPFDVTRKALADLIEKELSVQDQPSLSPTSLQNSSSHTTTAKGPGSGFLHPAAATNANSLNSTFSVLPQRFPQFQQHRAVYNSFSFPGQAARYPWMAFPRNSIMHLNHTANPTSNSNFLDLNLPPQHNTGLGGIPVADNSSSVESLNMKEWQDGLRALLPNININFGGLPNSSSPSNANHSAPTSNTATTDSLSWDSPGSWTDPAIITGIPASSGNSLDSLQDDNPPHWLKSLQALTEMDGPSAAPSQTHHSAPFSTQIPLHRASWNPYPPPSNPSSFHSPPPGFQTAFRPPSKTPTDLLQSSTLDRH

SEQ ID NO: 12842 - protein, 557 aa, Homo sapiens
  Payload ID: 2502
  Gene Symbol: CNOT6
  Gene Name: CCR4-NOT transcription complex, subunit 6
  Uniprot ID: Q9ULM6
  ENSP ID: ENSP00000261951
MPKEKYEPPDPRRMYTIMSSEEAANGKKSHWAELEISGKVRSLSASLWSLTHLTALHLSDNSLSRIPSDIAKLHNLVYLDLSSNKIRSLPAELGNMVSLRELHLNNNLLRVLPFELGKLFQLQTLGLKGNPLTQDILNLYQEPDGTRRLLNYLLDNLSGTAKRITTEQPPPRSWIMLQEPDRTRPTALFSVMCYNVLCDKYATRQLYGYCPSWALNWDYRKKAIIQEILSCNADIVSLQEVETEQYYSFFLVELKERGYNGFFSPKSRARTMSEQERKHVDGCAIFFKTEKFTLVQKHTVEFNQLAMANSEGSEAMLNRVMTKDNIGVAVLLELRKESIEMPSGKPHLGTEKQLILVANAHMHWDPEYSDVKLVQTMMFLSEVKNIIDKASRNLKSSVLGEFGTIPLVLCADLNSLPDSGVVEYLSTGGVETNHKDFKELRYNESLTNFSCHGKNGTTNGRITHGFKLQSAYESGLMPYTNYTFDFKGIIDYIFYSKPQLNTLGILGPLDHHWLVENNISGCPHPLIPSDHFSLFAQLELLLPFLPQVNGIHLPGRR

SEQ ID NO: 12843 - protein, 557 aa, Homo sapiens; identical to SEQ ID NO: 12842
  Payload ID: 2502
  Gene Symbol: CNOT6
  Gene Name: CCR4-NOT transcription complex, subunit 6
  Uniprot ID: Q9ULM6
  ENSP ID: ENSP00000377024

SEQ ID NO: 12844 - protein, 234 aa, Homo sapiens
  Payload ID: 2502
  Gene Symbol: CNOT6
  Gene Name: CCR4-NOT transcription complex, subunit 6
  ENSP ID: ENSP00000422087
MPKEKYEPPDPRRMYTIMSSEEAANGKKSHWAELEISGNPLTQDILNLYQEPDGTRRLLNYLLDNLSVTTEQPPPRSWIMLQEPDRTRPTALFSVMCYNVLCDKYATRQLYGYCPSWALNWDYRKKAIIQEILSCNADIVSLQEVETEQYYSFFLVELKERGYNGFFSPKSRARTMSEQERKHVDGCAIFFKTEKFTLVQKHTVEFNQLAMANSEGSEAMLNRVMTKDNIGVAV

SEQ ID NO: 12845 - protein, 557 aa, Homo sapiens; identical to SEQ ID NO: 12842
  Payload ID: 2502
  Gene Symbol: CNOT6
  Gene Name: CCR4-NOT transcription complex, subunit 6
  Uniprot ID: Q9ULM6
  ENSP ID: ENSP00000481893

SEQ ID NO: 12846 - protein, 469 aa, Homo sapiens
  Payload ID: 2503
  Gene Symbol: CNOT6L
  Gene Name: CCR4-NOT transcription complex, subunit 6-like
  ENSP ID: ENSP00000423750
  MOD_RES (1)..(1): Any amino acid
XCVCVSGVARGRDPRVACPSRFVAAAPEPRRLIGMPKEKYDPPDPRRIYTIMSAEEVANGKKSHWAELEISGRVRSLSTSLWSLTHLTALHLNDNYLSRIPPDIAKLHNLVYLDLSSNKLRSLPAELGNMVSLRELLLNNNLLRVLPYELGRLFQLQTLGLKGNPLSQDILNLYQDPDGTRKLLNFMLDNLAVHPEQLPPRPWITLKERDQILPSASFTVMCYNVLCDKYATRQLYGYCPSWALNWEYRKKGIMEEIVNCDADIISLQEVETEQYFTLFLPALKERGYDGFFSPKSRAKIMSEQERKHVDGCAIFFKTEKFTLVQKHTVEFNQVAMANSDGSEAMLNRVMTKDNIGVAVVLEVHKELFGAGMKPIHAADKQLLIVANAHMHWDPEYSDVKLIQTMMFVSEVKNILEKASSRPGSPTADPNSIPLVLCADLNSLPDSGVVEYLSNGGVADNHKDFKELRA

SEQ ID NO: 12847 - protein, 555 aa, Homo sapiens
  Payload ID: 2503
  Gene Symbol: CNOT6L
  Gene Name: CCR4-NOT transcription complex, subunit 6-like
  Uniprot ID: Q96LI5
  ENSP ID: ENSP00000424896
MRLIGMPKEKYDPPDPRRIYTIMSAEEVANGKKSHWAELEISGRVRSLSTSLWSLTHLTALHLNDNYLSRIPPDIAKLHNLVYLDLSSNKLRSLPAELGNMVSLRELLLNNNLLRVLPYELGRLFQLQTLGLKGNPLSQDILNLYQDPDGTRKLLNFMLDNLAVHPEQLPPRPWITLKERDQILPSASFTVMCYNVLCDKYATRQLYGYCPSWALNWEYRKKGIMEEIVNCDADIISLQEVETEQYFTLFLPALKERGYDGFFSPKSRAKIMSEQERKHVDGCAIFFKTEKFTLVQKHTVEFNQVAMANSDGSEAMLNRVMTKDNIGVAVVLEVHKELFGAGMKPIHAADKQLLIVANAHMHWDPEYSDVKLIQTMMFVSEVKNILEKASSRPGSPTADPNSIPLVLCADLNSLPDSGVVEYLSNGGVADNHKDFKELRYNECLMNFSCNGKNGSSEGRITHGFQLKSAYENNLMPYTNYTFDFKGVIDYIFYSKTHMNVLGVLGPLDPQWLVENNITGCPHPHIPSDHFSLLTQLELHPPLLPLVNGVHLPNRR

SEQ ID NO: 12848 - protein, 562 aa, Homo sapiens
  Payload ID: 2503
  Gene Symbol: CNOT6L
  Gene Name: CCR4-NOT transcription complex, subunit 6-like
  ENSP ID: ENSP00000425571
PGPRRAECRLIGMPKEKYDPPDPRRIYTIMSAEEVANGKKSHWAELEISGRVRSLSTSLWSLTHLTALHLNDNYLSRIPPDIAKLHNLVYLDLSSNKLRSLPAELGNMVSLRELLLNNNLLRVLPYELGRLFQLQTLGLKGNPLSQDILNLYQDPDGTRKLLNFMLDNLAVHPEQLPPRPWITLKERDQILPSASFTVMCYNVLCDKYATRQLYGYCPSWALNWEYRKKGIMEEIVNCDADIISLQEVETEQYFTLFLPALKERGYDGFFSPKSRAKIMSEQERKHVDGCAIFFKTEKFTLVQKHTVEFNQVAMANSDGSEAMLNRVMTKDNIGVAVVLEVHKELFGAGMKPIHAADKQLLIVANAHMHWDPEYSDVKLIQTMMFVSEVKNILEKASSRPGSPTADPNSIPLVLCADLNSLPDSGVVEYLSNGGVADNHKDFKELRYNECLMNFSCNGKNGSSEGRITHGFQLKSAYENNLMPYTNYTFDFKGVIDYIFYSKTHMNVLGVLGPLDPQWLVENNITGCPHPHIPSDHFSLLTQLELHPPLLPLVNGVHLPNRR

SEQ ID NO: 12849 - protein, 46 aa, Homo sapiens
  Payload ID: 2503
  Gene Symbol: CNOT6L
  Gene Name: CCR4-NOT transcription complex, subunit 6-like
  ENSP ID: ENSP00000425836
MRLIGMPKEKYDPPDPRRIYTIMSAEEVANGKKSHWAELEISECGA

SEQ ID NO: 12850 - protein, 163 aa, Homo sapiens
  Payload ID: 2503
  Gene Symbol: CNOT6L
  Gene Name: CCR4-NOT transcription complex, subunit 6-like
  ENSP ID: ENSP00000426269
MRLIGMPKEKYDPPDPRRIYTIMSAEEVANGKKSHWAELEISGRVRSLSTSLWSLTHLTALHLNDNYLSRIPPDIAKLHNLVYLDLSSNKLRSLPAELGNMVSLRELLLNNNLLRVLPYELGRLFQLQTLGLKGNPLSQDILNLYQDPDGTRKLLNFMLDNLA

SEQ ID NO: 12851 - protein, 260 aa, Homo sapiens
  Payload ID: 2503
  Gene Symbol: CNOT6L
  Gene Name: CCR4-NOT transcription complex, subunit 6-like
  ENSP ID: ENSP00000426320
LKSCHCQVAAASNQEVETEQYFTLFLPALKERGYDGFFSPKSRAKIMSEQERKHVDGCAIFFKTEKFTLVQKHTVEFNQVAMANSDGSEAMLNRVMTKDNIGVAVVLEVHKELFGAGMKPIHAADKQLLIVANAHMHWDPEYSDVKLIQTMMFVSEVKNILEKASSRPGSPTADPNSIPLVLCADLNSLPDSGVVEYLSNGGVADNHKDFKELRYNECLMNFSCNGKNGSSEGRITHGFQLKSAYENNLMPYTNYTFDFK

SEQ ID NO: 12852 - protein, 285 aa, Homo sapiens
  Payload ID: 2504
  Gene Symbol: CNOT7
  Gene Name: CCR4-NOT transcription complex, subunit 7
  Uniprot ID: Q9UIV1
  ENSP ID: ENSP00000355279
MPAATVDHSQRICEVWACNLDEEMKKIRQVIRKYNYVAMDTEFPGVVARPIGEFRSNADYQYQLLRCNVDLLKIIQLGLTFMNEQGEYPPGTSTWQFNFKFNLTEDMYAQDSIELLTTSGIQFKKHEEEGIETQYFAELLMTSGVVLCEGVKWLSFHSGYDFGYLIKILTNSNLPEEELDFFEILRLFFPVIYDVKYLMKSCKNLKGGLQEVAEQLELERIGPQHQAGSDSLLTGMAFFKMREMFFEDHIDDAKYCGHLYGLGSGSSYVQNGTGNAYEEEANKQS

SEQ ID NO: 12853 - protein, 208 aa, Homo sapiens
  Payload ID: 2504
  Gene Symbol: CNOT7
  Gene Name: CCR4-NOT transcription complex, subunit 7
  ENSP ID: ENSP00000428147
  MOD_RES (1)..(1): Any amino acid
XEEMKKIRQVIRKYNYVAMDTEFPGVVARPIGEFRSNADYQYQLLRCNVDLLKIIQLGLTFMNEQGEYPPGTSTWQFNFKFNLTEDMYAQDSIELLTTSGIQFKKHEEEGIETQYFAELLMTSGVVLCEGVKWLSFHSGYDFGYLIKILTNSNLPEEELDFFEILRLFFPVIYDVKYLMKSCKNLKVRLRMALSTAAHCSDQVTVMRA

SEQ ID NO: 12854 - protein, 62 aa, Homo sapiens
  Payload ID: 2504
  Gene Symbol: CNOT7
  Gene Name: CCR4-NOT transcription complex, subunit 7
  ENSP ID: ENSP00000428783
MPAATVDHSQRICEVWACNLDEEMKKIRQVIRKYNYVAMGFGVEKNLVSEKQLESTGRFPLF

SEQ ID NO: 12855 - protein, 40 aa, Homo sapiens
  Payload ID: 2504
  Gene Symbol: CNOT7
  Gene Name: CCR4-NOT transcription complex, subunit 7
  ENSP ID: ENSP00000429079
MPAATVDHSQRICEVWACNLDEEMKKIRQVIRKYNYVAMD

SEQ ID NO: 12856 - protein, 244 aa, Homo sapiens
  Payload ID: 2504
  Gene Symbol: CNOT7
  Gene Name: CCR4-NOT transcription complex, subunit 7
  Uniprot ID: Q9UIV1
  ENSP ID: ENSP00000429093
MPAATVDHSQRICEVWACNLDEEMKKIRQVIRKYNYVAMDTEFPGVVARPIGEFRSNADYQYQLLRCNVDLLKIIQLGLTFMNEQGEYPPGTSTWQFNFKFNLTEDMYAQDSIELLTTSGIQFKKHEEEGIETQYFAELLMTSGVVLCEGVKWLSFHSGYDFGYLIKILTNSNLPEEELDFFEILRLFFPVIYDVKYLMKSCKNLKGGLQEVAEQLELERIGPQHQAGSDSLLTGMAFFKMREV

SEQ ID NO: 12857 - protein, 51 aa, Homo sapiens
  Payload ID: 2504
  Gene Symbol: CNOT7
  Gene Name: CCR4-NOT transcription complex, subunit 7
  ENSP ID: ENSP00000429632
MPAATVDHSQRICEVWACNLDEEMKKIRQVIRKYNYVAMFFKKLGFSIGIL

SEQ ID NO: 12858 - protein, 147 aa, Homo sapiens
  Payload ID: 2504
  Gene Symbol: CNOT7
  Gene Name: CCR4-NOT transcription complex, subunit 7
  ENSP ID: ENSP00000430160
MPAATVDHSQRICEVWACNLDEEMKKIRQVIRKYNYVAMDTEFPGVVARPIGEFRSNADYQYQLLRCNVDLLKIIQLGLTFMNEQGEYPPGTSTWQFNFKFNLTEDMYAQDSIELLTTSGIQFKKHEEEGIETQYFAELLMTSGVVL

SEQ ID NO: 12859 - protein, 91 aa, Homo sapiens
  Payload ID: 2504
  Gene Symbol: CNOT7
  Gene Name: CCR4-NOT transcription complex, subunit 7
  ENSP ID: ENSP00000430263
  MOD_RES (1)..(1): Any amino acid
XGYDFGYLIKILTNSNLPEEELDFFEILRLFFPVIYDVKYLMKSCKNLKMFFEDHIDDAKYCGHLYGLGSGSSYVQNGTGNAYEEEANKQS

SEQ ID NO: 12860 - protein, 51 aa, Homo sapiens; identical to SEQ ID NO: 12857
  Payload ID: 2504
  Gene Symbol: CNOT7
  Gene Name: CCR4-NOT transcription complex, subunit 7
  ENSP ID: ENSP00000487113

SEQ ID NO: 12861 - protein, 292 aa, Homo sapiens
  Payload ID: 2505
  Gene Symbol: CNOT8
  Gene Name: CCR4-NOT transcription complex, subunit 8
  Uniprot ID: Q9UFF9
  ENSP ID: ENSP00000285896
MPAALVENSQVICEVWASNLEEEMRKIREIVLSYSYIAMDTEFPGVVVRPIGEFRSSIDYQYQLLRCNVDLLKIIQLGLTFTNEKGEYPSGINTWQFNFKFNLTEDMYSQDSIDLLANSGLQFQKHEEEGIDTLHFAELLMTSGVVLCDNVKWLSFHSGYDFGYMVKLLTDSRLPEEEHEFFHILNLFFPSIYDVKYLMKSCKNLKGGLQEVADQLDLQRIGRQHQAGSDSLLTGMAFFRMKELFFEDSIDDAKYCGRLYGLGTGVAQKQNEDVDSAQEKMSILAIINNMQQ

SEQ ID NO: 12862 - protein, 292 aa, Homo sapiens; identical to SEQ ID NO: 12861
  Payload ID: 2505
  Gene Symbol: CNOT8
  Gene Name: CCR4-NOT transcription complex, subunit 8
  Uniprot ID: Q9UFF9
  ENSP ID: ENSP00000384747

SEQ ID NO: 12863 - protein, 118 aa, Homo sapiens
  Payload ID: 2505
  Gene Symbol: CNOT8
  Gene Name: CCR4-NOT transcription complex, subunit 8
  ENSP ID: ENSP00000428090
MPAALVENSQVICEVWASNLEEEMRKIREIVLSYSYIAMDTEFPGVVVRPIGEFRSSIDYQYQLLRCNVDLLKIIQLGLTFTNEKGEYPSGINTWQFNFKFNLTEDMYSQDSIDLLAN

SEQ ID NO: 12864 - protein, 186 aa, Homo sapiens
  Payload ID: 2505
  Gene Symbol: CNOT8
  Gene Name: CCR4-NOT transcription complex, subunit 8
  Uniprot ID: Q9UFF9
  ENSP ID: ENSP00000428305
MYSQDSIDLLANSGLQFQKHEEEGIDTLHFAELLMTSGVVLCDNVKWLSFHSGYDFGYMVKLLTDSRLPEEEHEFFHILNLFFPSIYDVKYLMKSCKNLKGGLQEVADQLDLQRIGRQHQAGSDSLLTGMAFFRMKELFFEDSIDDAKYCGRLYGLGTGVAQKQNEDVDSAQEKMSILAIINNMQQ

SEQ ID NO: 12865 - protein, 85 aa, Homo sapiens
  Payload ID: 2505
  Gene Symbol: CNOT8
  Gene Name: CCR4-NOT transcription complex, subunit 8
  ENSP ID: ENSP00000428359
MYSQDSIDLLANSGLQFQKHEEEGIDTLHFAELLMTSGVVLCDNVKWLSFHSGYDFGYMVKLLTDSRLPEEEHEFFHILNLFFPS

SEQ ID NO: 12866 - protein, 121 aa, Homo sapiens
  Payload ID: 2505
  Gene Symbol: CNOT8
  Gene Name: CCR4-NOT transcription complex, subunit 8
  ENSP ID: ENSP00000428550
MPAALVENSQVICEVWASNLEEEMRKIREIVLSYSYIAMDTEFPGVVVRPIGEFRSSIDYQYQLLRCNVDLLKIIQLGLTFTNEKGEYPSGINTWQFNFKFNLTGYDFGYMVKLLTDSRLP

SEQ ID NO: 12867 - protein, 186 aa, Homo sapiens; identical to SEQ ID NO: 12864
  Payload ID: 2505
  Gene Symbol: CNOT8
  Gene Name: CCR4-NOT transcription complex, subunit 8
  Uniprot ID: Q9UFF9
  ENSP ID: ENSP00000428565

SEQ ID NO: 12868 - protein, 117 aa, Homo sapiens
  Payload ID: 2505
  Gene Symbol: CNOT8
  Gene Name: CCR4-NOT transcription complex, subunit 8
  ENSP ID: ENSP00000428576
MPAALVENSQVICEVWASNLEEEMRKIREIVLSYSYIAMDTEFPGVVVRPIGEFRSSIDYQYQLLRCNVDLLKIIQLGLTFTNEKGEYPSGINTWQFNFKFNLTYKKEKVNNNTCVA

SEQ ID NO: 12869 - protein, 52 aa, Homo sapiens
  Payload ID: 2505
  Gene Symbol: CNOT8
  Gene Name: CCR4-NOT transcription complex, subunit 8
  ENSP ID: ENSP00000428600
MPAALVENSQVICEVWASNLEEEMRKIREIVLSYSYIAMRGHVLPGFHRSPC

SEQ ID NO: 12870 - protein, 90 aa, Homo sapiens
  Payload ID: 2505
  Gene Symbol: CNOT8
  Gene Name: CCR4-NOT transcription complex, subunit 8
  ENSP ID: ENSP00000428842
MPAALVENSQVICEVWASNLEEEMRKIREIVLSYSYIAMDTEFPGVVVRPIGEFRSSIDYQYQLLRCNVDLLKIIQLGLTFTNEKGEYPS

SEQ ID NO: 12871 - protein, 118 aa, Homo sapiens; identical to SEQ ID NO: 12863
  Payload ID: 2505
  Gene Symbol: CNOT8
  Gene Name: CCR4-NOT transcription complex, subunit 8
  ENSP ID: ENSP00000429108

SEQ ID NO: 12872 - protein, 55 aa, Homo sapiens
  Payload ID: 2505
  Gene Symbol: CNOT8
  Gene Name: CCR4-NOT transcription complex, subunit 8
  ENSP ID: ENSP00000429310
MPAALVENSQVICEVWASNLEEEMRKIREIVLSYSYIAMDTEFPGVVVRPIGEFR

SEQ ID NO: 12873 - protein, 225 aa, Homo sapiens
  Payload ID: 2505
  Gene Symbol: CNOT8
  Gene Name: CCR4-NOT transcription complex, subunit 8
  ENSP ID: ENSP00000429394
MPAALVENSQVICEVWASNLEEEMRKIREIVLSYSYIAMDTEFPGVVVRPIGEFRSSIDYQYQLLRCNVDLLKIIQLGLTFTNEKGEYPSGINTWQFNFKFNLTGYDFGYMVKLLTDSRLPEEEHEFFHILNLFFPSIYDVKYLMKSCKNLKGGLQEVADQLDLQRIGRQHQAGSDSLLTGMAFFRMKELFFEDSIDDAKYCGRLYGLGTGVAQKQNEDVDSAQE

SEQ ID NO: 12874 - protein, 128 aa, Homo sapiens
  Payload ID: 2505
  Gene Symbol: CNOT8
  Gene Name: CCR4-NOT transcription complex, subunit 8
  ENSP ID: ENSP00000429576
MVKLLTDSRLPEEEHEFFHILNLFFPSIYDVKYLMKSCKNLKGGLQEVADQLDLQRIGRQHQAGSDSLLTGMAFFRMKELFFEDSIDDAKYCGRLYGLGTGVAQKQNEDVDSAQEKMSILAIINNMQQ

SEQ ID NO: 12875 - protein, 55 aa, Homo sapiens; identical to SEQ ID NO: 12872
  Payload ID: 2505
  Gene Symbol: CNOT8
  Gene Name: CCR4-NOT transcription complex, subunit 8
  ENSP ID: ENSP00000429810

SEQ ID NO: 12876 - protein, 186 aa, Homo sapiens; identical to SEQ ID NO: 12864
  Payload ID: 2505
  Gene Symbol: CNOT8
  Gene Name: CCR4-NOT transcription complex, subunit 8
  Uniprot ID: Q9UFF9
  ENSP ID: ENSP00000429882

SEQ ID NO: 12877 - protein, 132 aa, Homo sapiens
  Payload ID: 2505
  Gene Symbol: CNOT8
  Gene Name: CCR4-NOT transcription complex, subunit 8
  ENSP ID: ENSP00000430215
MPAALVENSQVICEVWASNLEEEMRKIREIVLSYSYIAMDTEFPGVVVRPIGEFRSSIDYQYQLLRCNVDLLKIIQLGLTFTNEKGEYPSGINTWQFNFKFNLTEDMYSQDSIDLLANSGLQFQKHEEEGID

SEQ ID NO: 12878 - protein, 292 aa, Homo sapiens; identical to SEQ ID NO: 12861
  Payload ID: 2505
  Gene Symbol: CNOT8
  Gene Name: CCR4-NOT transcription complex, subunit 8
  Uniprot ID: Q9UFF9
  ENSP ID: ENSP00000430493

SEQ ID NO: 12879 - protein, 238 aa, Homo sapiens
  Payload ID: 2505
  Gene Symbol: CNOT8
  Gene Name: CCR4-NOT transcription complex, subunit 8
  Uniprot ID: Q9UFF9
  ENSP ID: ENSP00000430833
MPAALVENSQVICEVWASNLEEEMRKIREIVLSYSYIAMDTEFPGVVVRPIGEFRSSIDYQYQLLRCNVDLLKIIQLGLTFTNEKGEYPSGINTWQFNFKFNLTGYDFGYMVKLLTDSRLPEEEHEFFHILNLFFPSIYDVKYLMKSCKNLKGGLQEVADQLDLQRIGRQHQAGSDSLLTGMAFFRMKELFFEDSIDDAKYCGRLYGLGTGVAQKQNEDVDSAQEKMSILAIINNMQQ

SEQ ID NO: 12880 - protein, 186 aa, Homo sapiens; identical to SEQ ID NO: 12864
  Payload ID: 2505
  Gene Symbol: CNOT8
  Gene Name: CCR4-NOT transcription complex, subunit 8
  Uniprot ID: Q9UFF9
  ENSP ID: ENSP00000431034

SEQ ID NO: 12881 - protein, 482 aa, Homo sapiens
  Payload ID: 2506
  Gene Symbol: CCZ1B
  Gene Name: CCZ1 homolog B, vacuolar protein trafficking and biogenesis associated
  Uniprot ID: P86790
  ENSP ID: ENSP00000314544
MAAAAAGAGSGPWAAQEKQFPPALLSFFIYNPRFGPREGQEENKILFYHPNEVEKNEKIRNVGLCEAIVQFTRTFSPSKPAKSLHTQKNRQFFNEPEENFWMVMVVRNPIIEKQSKDGKPVIEYQEEELLDKVYSSVLRQCYSMYKLFNGTFLKAMEDGGVKLLKERLEKFFHRYLQTLHLQSCDLLDIFGGISFFPLDKMTYLKIQSFINRMEESLNIVKYTAFLYNDQLIWSGLEQDDMRILYKYLTTSLFPRHIEPELAGRDSPIRAEMPGNLQHYGRFLTGPLNLNDPDAKCRFPKIFVNTDDTYEELHLIVYKAMSAAVCFMIDASVHPTLDFCRRLDSIVGPQLTVLASDICEQFNINKRMSGSEKEPQFKFIYFNHMNLAEKSTVHMRKTPSVSLTSVHPDLMKILGDINSDFTRVDEDEEIIVKAMSDYWVVGKKSDRRELYVILNQKNANLIEVNEEVKKLCATQFNNIFFLD

SEQ ID NO: 12882 - protein, 78 aa, Homo sapiens
  Payload ID: 2506
  Gene Symbol: CCZ1B
  Gene Name: CCZ1 homolog B, vacuolar protein trafficking and biogenesis associated
  ENSP ID: ENSP00000390078
MAAAAAGAGSGPWAAQEKQFPPALLSFFIYNPRFGPREGQEENKILFYHPNEVEKNEKIRNVGLCEAIVQFTRLFGIL

SEQ ID NO: 12883 - protein, 78 aa, Homo sapiens; identical to SEQ ID NO: 12882
  Payload ID: 2506
  Gene Symbol: CCZ1B
  Gene Name: CCZ1 homolog B, vacuolar protein trafficking and biogenesis associated
  ENSP ID: ENSP00000487253

SEQ ID NO: 12884 - protein, 482 aa, Homo sapiens; identical to SEQ ID NO: 12881
  Payload ID: 2507
  Gene Symbol: CCZ1
  Gene Name: CCZ1 homolog, vacuolar protein trafficking and biogenesis associated
  Uniprot ID: P86791
  ENSP ID: ENSP00000325681

SEQ ID NO: 12885 - protein, 78 aa, Homo sapiens; identical to SEQ ID NO: 12882
  Payload ID: 2507
  Gene Symbol: CCZ1
  Gene Name: CCZ1 homolog, vacuolar protein trafficking and biogenesis associated
  ENSP ID: ENSP00000486988

SEQ ID NO: 12886 - protein, 1021 aa, Homo sapiens
  Payload ID: 2508
  Gene Symbol: CD101
  Gene Name: CD101 molecule
  Uniprot ID: Q93033
  ENSP ID: ENSP00000256652
MAGISYVASFFLLLTKLSIGQREVTVQKGPLFRAEGYPVSIGCNVTGHQGPSEQHFQWSVYLPTNPTQEVQIISTKDAAFSYAVYTQRVRSGDVYVERVQGNSVLLHISKLQMKDAGEYECHTPNTDEKYYGSYSAKTNLIVIPDTLSATMSSQTLGKEEGEPLALTCEASKATAQHTHLSVTWYLTQDGGGSQATEIISLSKDFILVPGPLYTERFAASDVQLNKLGPTTFRLSIERLQSSDQGQLFCEATEWIQDPDETWMFITKKQTDQTTLRIQPAVKDFQVNITADSLFAEGKPLELVCLVVSSGRDPQLQGIWFFNGTEIAHIDAGGVLGLKNDYKERASQGELQVSKLGPKAFSLKIFSLGPEDEGAYRCVVAEVMKTRTGSWQVLQRKQSPDSHVHLRKPAARSVVMSTKNKQQVVWEGETLAFLCKAGGAESPLSVSWWHIPRDQTQPEFVAGMGQDGIVQLGASYGVPSYHGNTRLEKMDWATFQLEITFTAITDSGTYECRVSEKSRNQARDLSWTQKISVTVKSLESSLQVSLMSRQPQVMLTNTFDLSCVVRAGYSDLKVPLTVTWQFQPASSHIFHQLIRITHNGTIEWGNFLSRFQKKTKVSQSLFRSQLLVHDATEEETGVYQCEVEVYDRNSLYNNRPPRASAISHPLRIAVTLPESKLKVNSRSQVQELSINSNTDIECSILSRSNGNLQLAIIWYFSPVSTNASWLKILEMDQTNVIKTGDEFHTPQRKQKFHTEKVSQDLFQLHILNVEDSDRGKYHCAVEEWLLSTNGTWHKLGEKKSGLTELKLKPTGSKVRVSKVYWTENVTEHREVAIRCSLESVGSSATLYSVMWYWNRENSGSKLLVHLQHDGLLEYGEEGLRRHLHCYRSSSTDFVLKLHQVEMEDAGMYWCRVAEWQLHGHPSKWINQASDESQRMVLTVLPSEPTLPSRICSSAPLLYFLFICPFVLLLLLLISLLCLYWKARKLSTLRSNTRKEKALWVDLKEAGGVTTNRREDEEEDEGN

SEQ ID NO: 12887 - protein, 1021 aa, Homo sapiens; identical to SEQ ID NO: 12886
  Payload ID: 2508
  Gene Symbol: CD101
  Gene Name: CD101 molecule
  Uniprot ID: Q93033
  ENSP ID: ENSP00000358482

SEQ ID NO: 12888 - protein, 1445 aa, Homo sapiens
  Payload ID: 2509
  Gene Symbol: CD109
  Gene Name: CD109 molecule
  Uniprot ID: Q6YHK3
  ENSP ID: ENSP00000287097
MQGPPLLTAAHLLCVCTAALAVAPGPRFLVTAPGIIRPGGNVTIGVELLEHCPSQVTVKAELLKTASNLTVSVLEAEGVFEKGSFKTLTLPSLPLNSADEIYELRVTGRTQDEILFSNSTRLSFETKRISVFIQTDKALYKPKQEVKFRIVTLFSDFKPYKTSLNILIKDPKSNLIQQWLSQQSDLGVISKTFQLSSHPILGDWSIQVQVNDQTYYQSFQVSEYVLPKFEVTLQTPLYCSMNSKHLNGTITAKYTYGKPVKGDVTLTFLPLSFWGKKKNITKTFKINGSANFSFNDEEMKNVMDSSNGLSEYLDLSSPGPVEILTTVTESVTGISRNVSTNVFFKQHDYIIEFFDYTTVLKPSLNFTATVKVTRADGNQLTLEERRNNVVITVTQRNYTEYWSGSNSGNQKMEAVQKINYTVPQSGTFKIEFPILEDSSELQLKAYFLGSKSSMAVHSLFKSPSKTYIQLKTRDENIKVGSPFELVVSGNKRLKELSYMVVSRGQLVAVGKQNSTMFSLTPENSWTPKACVIVYYIEDDGEIISDVLKIPVQLVFKNKIKLYWSKVKAEPSEKVSLRISVTQPDSIVGIVAVDKSVNLMNASNDITMENVVHELELYNTGYYLGMFMNSFAVFQECGLWVLTDANLTKDYIDGVYDNAEYAERFMEENEGHIVDIHDFSLGSSPHVRKHFPETWIWLDTNMGYRIYQEFEVTVPDSITSWVATGFVISEDLGLGLTTTPVELQAFQPFFIFLNLPYSVIRGEEFALEITIFNYLKDATEVKVIIEKSDKFDILMTSNEINATGHQQTLLVPSEDGATVLFPIRPTHLGEIPITVTALSPTASDAVTQMILVKAEGIEKSYSQSILLDLTDNRLQSTLKTLSFSFPPNTVTGSERVQITAIGDVLGPSINGLASLIRMPYGCGEQNMINFAPNIYILDYLTKKKQLTDNLKEKALSFMRQGYQRELLYQREDGSFSAFGNYDPSGSTWLSAFVLRCFLEADPYIDIDQNVLHRTYTWLKGHQKSNGEFWDPGRVIHSELQGGNKSPVTLTAYIVTSLLGYRKYQPNIDVQESIHFLESEFSRGISDNYTLALITYALSSVGSPKAKEALNMLTWRAEQEGGMQFWVSSESKLSDSWQPRSLDIEVAAYALLSHFLQFQTSEGIPIMRWLSRQRNSLGGFASTQDTTVALKALSEFAALMNTERTNIQVTVTGPSSPSPVKFLIDTHNRLLLQTAELAVVQPTAVNISANGFGFAICQLNVVYNVKASGSSRRRRSIQNQEAFDLDVAVKENKDDLNHVDLNVCTSFSGPGRSGMALMEVNLLSGFMVPSEAISLSETVKKVEYDHGKLNLYLDSVNETQFCVNIPAVRNFKVSNTQDASVSIVDYYEPRRQAVRSYNSEVKLSSCDLCSDVQGCRPCEDGASGSHHHSSVIFIFCFKLLYFMELWL

SEQ ID NO: 12889 - protein, 1428 aa, Homo sapiens
  Payload ID: 2509
  Gene Symbol: CD109
  Gene Name: CD109 molecule
  Uniprot ID: Q6YHK3
  ENSP ID: ENSP00000388062
MQGPPLLTAAHLLCVCTAALAVAPGPRFLVTAPGIIRPGGNVTIGVELLEHCPSQVTVKAELLKTASNLTVSVLEAEGVFEKGSFKTLTLPSLPLNSADEIYELRVTGRTQDEILFSNSTRLSFETKRISVFIQTDKALYKPKQEVKFRIVTLFSDFKPYKTSLNILIKDPKSNLIQQWLSQQSDLGVISKTFQLSSHPILGDWSIQVQVNDQTYYQSFQVSEYVLPKFEVTLQTPLYCSMNSKHLNGTITAKYTYGKPVKGDVTLTFLPLSFWGKKKNITKTFKINGSANFSFNDEEMKNVMDSSNGLSEYLDLSSPGPVEILTTVTESVTGISRNVSTNVFFKQHDYIIEFFDYTTVLKPSLNFTATVKVTRADGNQLTLEERRNNVVITVTQRNYTEYWSGSNSGNQKMEAVQKINYTVPQSGTFKIEFPILEDSSELQLKAYFLGSKSSMAVHSLFKSPSKTYIQLKTRDENIKVGSPFELVVSGNKRLKELSYMVVSRGQLVAVGKQNSTMFSLTPENSWTPKACVIVYYIEDDGEIISDVLKIPVQLVFKNKIKLYWSKVKAEPSEKVSLRISVTQPDSIVGIVAVDKSVNLMNASNDITMENVVHELELYNTGYYLGMFMNSFAVFQECGLWVLTDANLTKDYIDGVYDNAEYAERFMEENEGHIVDIHDFSLGSSPHVRKHFPETWIWLDTNMGYRIYQEFEVTVPDSITSWVATGFVISEDLGLGLTTTPVELQAFQPFFIFLNLPYSVIRGEEFALEITIFNYLKDATEVKVIIEKSDKFDILMTSNEINATGHQQTLLVPSEDGATVLFPIRPTHLGEIPITVTALSPTASDAVTQMILVKAEGIEKSYSQSILLDLTDNRLQSTLKTLSFSFPPNTVTGSERVQITAIGDVLGPSINGLASLIRMPYGCGEQNMINFAPNIYILDYLTKKKQLTDNLKEKALSFMRQGYQRELLYQREDGSFSAFGNYDPSGSTWLSAFVLRCFLEADPYIDIDQNVLHRTYTWLKGHQKSNGEFWDPGRVIHSELQGGNKSPVTLTAYIVTSLLGYRKYQPNIDVQESIHFLESEFSRGISDNYTLALITYALSSVGSPKAKEALNMLTWRAEQEGGMQFWVSSESKLSDSWQPRSLDIEVAAYALLSHFLQFQTSEGIPIMRWLSRQRNSLGGFASTQDTTVALKALSEFAALMNTERTNIQVTVTGPSSPSPLAVVQPTAVNISANGFGFAICQLNVVYNVKASGSSRRRRSIQNQEAFDLDVAVKENKDDLNHVDLNVCTSFSGPGRSGMALMEVNLLSGFMVPSEAISLSETVKKVEYDHGKLNLYLDSVNETQFCVNIPAVRNFKVSNTQDASVSIVDYYEPRRQAVRSYNSEVKLSSCDLCSDVQGCRPCEDGASGSHHHSSVIFIFCFKLLYFMELWL

SEQ ID NO: 12890 - protein, 1368 aa, Homo sapiens
  Payload ID: 2509
  Gene Symbol: CD109
  Gene Name: CD109 molecule
  Uniprot ID: Q6YHK3
  ENSP ID: ENSP00000404475
MQGPPLLTAAHLLCVCTAALAVAPGPRFLVTAPGIIRPGGNVTIGVELLEHCPSQVTVKAELLKTASNLTVSVLEAEGVFEKGSFKTLTLPSDPKSNLIQQWLSQQSDLGVISKTFQLSSHPILGDWSIQVQVNDQTYYQSFQVSEYVLPKFEVTLQTPLYCSMNSKHLNGTITAKYTYGKPVKGDVTLTFLPLSFWGKKKNITKTFKINGSANFSFNDEEMKNVMDSSNGLSEYLDLSSPGPVEILTTVTESVTGISRNVSTNVFFKQHDYIIEFFDYTTVLKPSLNFTATVKVTRADGNQLTLEERRNNVVITVTQRNYTEYWSGSNSGNQKMEAVQKINYTVPQSGTFKIEFPILEDSSELQLKAYFLGSKSSMAVHSLFKSPSKTYIQLKTRDENIKVGSPFELVVSGNKRLKELSYMVVSRGQLVAVGKQNSTMFSLTPENSWTPKACVIVYYIEDDGEIISDVLKIPVQLVFKNKIKLYWSKVKAEPSEKVSLRISVTQPDSIVGIVAVDKSVNLMNASNDITMENVVHELELYNTGYYLGMFMNSFAVFQECGLWVLTDANLTKDYIDGVYDNAEYAERFMEENEGHIVDIHDFSLGSSPHVRKHFPETWIWLDTNMGYRIYQEFEVTVPDSITSWVATGFVISEDLGLGLTTTPVELQAFQPFFIFLNLPYSVIRGEEFALEITIFNYLKDATEVKVIIEKSDKFDILMTSNEINATGHQQTLLVPSEDGATVLFPIRPTHLGEIPITVTALSPTASDAVTQMILVKAEGIEKSYSQSILLDLTDNRLQSTLKTLSFSFPPNTVTGSERVQITAIGDVLGPSINGLASLIRMPYGCGEQNMINFAPNIYILDYLTKKKQLTDNLKEKALSFMRQGYQRELLYQREDGSFSAFGNYDPSGSTWLSAFVLRCFLEADPYIDIDQNVLHRTYTWLKGHQKSNGEFWDPGRVIHSELQGGNKSPVTLTAYIVTSLLGYRKYQPNIDVQESIHFLESEFSRGISDNYTLALITYALSSVGSPKAKEALNMLTWRAEQEGGMQFWVSSESKLSDSWQPRSLDIEVAAYALLSHFLQFQTSEGIPIMRWLSRQRNSLGGFASTQDTTVALKALSEFAALMNTERTNIQVTVTGPSSPSPVKFLIDTHNRLLLQTAELAVVQPTAVNISANGFGFAICQLNVVYNVKASGSSRRRRSIQNQEAFDLDVAVKENKDDLNHVDLNVCTSFSGPGRSGMALMEVNLLSGFMVPSEAISLSETVKKVEYDHGKLNLYLDSVNETQFCVNIPAVRNFKVSNTQDASVSIVDYYEPRRQAVRSYNSEVKLSSCDLCSDVQGCRPCEDGASGSHHHSSVIFIFCFKLLYFMELWL

SEQ ID NO: 12891 - protein, 375 aa, Homo sapiens
  Payload ID: 2510
  Gene Symbol: CD14
  Gene Name: CD14 molecule
  Uniprot ID: P08571
  ENSP ID: ENSP00000304236
MERASCLLLLLLPLVHVSATTPEPCELDDEDFRCVCNFSEPQPDWSEAFQCVSAVEVEIHAGGLNLEPFLKRVDADADPRQYADTVKALRVRRLTVGAAQVPAQLLVGALRVLAYSRLKELTLEDLKITGTMPPLPLEATGLALSSLRLRNVSWATGRSWLAELQQWLKPGLKVLSIAQAHSPAFSCEQVRAFPALTSLDLSDNPGLGERGLMAALCPHKFPAIQNLALRNTGMETPTGVCAALAAAGVQPHSLDLSHNSLRATVNPSAPRCMWSSALNSLNLSFAGLEQVPKGLPAKLRVLDLSCNRLNRAPQPDELPEVDNLTLDGNPFLVPGTALPHEGSMNSGVVPACARSTLSVGVSGTLVLLQGARGFA

SEQ ID NO: 12892 - protein, 375 aa, Homo sapiens; identical to SEQ ID NO: 12891
  Payload ID: 2510
  Gene Symbol: CD14
  Gene Name: CD14 molecule
  Uniprot ID: P08571
  ENSP ID: ENSP00000385519

SEQ ID NO: 12893 - protein, 55 aa, Homo sapiens
  Payload ID: 2510
  Gene Symbol: CD14
  Gene Name: CD14 molecule
  ENSP ID: ENSP00000425447
MERASCLLLLLLPLVHVSATTPEPCELDDEDFRCVCNFSEPQPDWSEAFQCVSAV

SEQ ID NO: 12894 - protein, 213 aa, Homo sapiens
  Payload ID: 2510
  Gene Symbol: CD14
  Gene Name: CD14 molecule
  ENSP ID: ENSP00000426543
MERASCLLLLLLPLVHVSATTPEPCELDDEDFRCVCNFSEPQPDWSEAFQCVSAVEVEIHAGGLNLEPFLKRVDADADPRQYADTVKALRVRRLTVGAAQVPAQLLVGALRVLAYSRLKELTLEDLKITGTMPPLPLEATGLALSSLRLRNVSWATGRSWLAELQQWLKPGLKVLSIAQAHSPAFSCEQVRAFPALTSLDLSDNPGLGERGLM

SEQ ID NO: 12895 - protein, 81 aa, Homo sapiens
  Payload ID: 2510
  Gene Symbol: CD14
  Gene Name: CD14 molecule
  ENSP ID: ENSP00000430884
MERASCLLLLLLPLVHVSATTPEPCELDDEDFRCVCNFSEPQPDWSEAFQCVSAVEVEIHAGGLNLEPFLKRVDADADPRQ

SEQ ID NO: 12896 - protein, 253 aa, Homo sapiens
  Payload ID: 2511
  Gene Symbol: CD151
  Gene Name: CD151 molecule (Raph blood group)
  Uniprot ID: P48509
  ENSP ID: ENSP00000324101
MGEFNEKKTTCGTVCLKYLLFTYNCCFWLAGLAVMAVGIWTLALKSDYISLLASGTYLATAYILVVAGTVVMVTGVLGCCATFKERRNLLRLYFILLLIIFLLEIIAGILAYAYYQQLNTELKENLKDTMTKRYHQPGHEAVTSAVDQLQQEFHCCGSNNSQDWRDSEWIRSQEAGGRVVPDSCCKTVVALCGQRDHASNIYKVEGGCITKLETFIQEHLRVIGAVGIGIACVQVFGMIFTCCLYRSLKLEHY

SEQ ID NO: 12897 - protein, 253 aa, Homo sapiens; identical to SEQ ID NO: 12896
  Payload ID: 2511
  Gene Symbol: CD151
  Gene Name: CD151 molecule (Raph blood group)
  Uniprot ID: P48509
  ENSP ID: ENSP00000380565

SEQ ID NO: 12898 - protein, 253 aa, Homo sapiens; identical to SEQ ID NO: 12896
  Payload ID: 2511
  Gene Symbol: CD151
  Gene Name: CD151 molecule (Raph blood group)
  Uniprot ID: P48509
  ENSP ID: ENSP00000380566

SEQ ID NO: 12899 - protein, 180 aa, Homo sapiens
  Payload ID: 2511
  Gene Symbol: CD151
  Gene Name: CD151 molecule (Raph blood group)
  ENSP ID: ENSP00000431403
MGEFNEKKTTCGTVCLKYLLFTYNCCFWLAGLAVMAVGIWTLALKSDYISLLASGTYLATAYILVVAGTVVMVTGVLGCCATFKERRNLLRLYFILLLIIFLLEIIAGILAYAYYQQLNTELKENLKDTMTKRYHQPGHEAVTSAVDQLQQEFHCCGSNNSQDWRDSEWIRSQEAGGRVV

SEQ ID NO: 12900 - protein, 79 aa, Homo sapiens
  Payload ID: 2511
  Gene Symbol: CD151
  Gene Name: CD151 molecule (Raph blood group)
  ENSP ID: ENSP00000431671
MGEFNEKKTTCGTVCLKYLLFTYNCCFWLAGLAVMAVGIWTLALKSDYISLLASGTYLATAYILVVAGTVVMVTGVLGC

SEQ ID NO: 12901 - protein, 178 aa, Homo sapiens
  Payload ID: 2511
  Gene Symbol: CD151
  Gene Name: CD151 molecule (Raph blood group)
  ENSP ID: ENSP00000432258
MGEFNEKKTTCGTVCLKYLLFTYNCCFWLAGLAVMAVGIWTLALKSDYISLLASGTYLATAYILVVAGTVVMVTGVLGCCATFKERRNLLRLLNTELKENLKDTMTKRYHQPGHEAVTSAVDQLQQEFHCCGSNNSQDWRDSEWIRSQEAGGRVVPDSCCKTVVALCGQRDHASNIYK

SEQ ID NO: 12902 - protein, 253 aa, Homo sapiens; identical to SEQ ID NO: 12896
  Payload ID: 2511
  Gene Symbol: CD151
  Gene Name: CD151 molecule (Raph blood group)
  Uniprot ID: P48509
  ENSP ID: ENSP00000432385

SEQ ID NO: 12903 - protein, 251 aa, Homo sapiens
  Payload ID: 2511
  Gene Symbol: CD151
  Gene Name: CD151 molecule (Raph blood group)
  ENSP ID: ENSP00000432990
MGEFNEKKTTCGTVCLKYLLFTYNCCFWLAGLAVMAVGIWTLALKSDYISLLASGTYLATAYILVVAGTVVMVTGVLGCCATFKERRNLLRLYFILLLIIFLLEIIAGILAYAYYQQLNTELKENLKDTMTKRYHQPGHEAVTSAVDQLQQEFHCCGSNNSQDWRDSEWIRSQEAGGRVVPDSCCKTVVALCGQRDHASNIYKGGCITKLETFIQEHLRVIGAVGIGIACVQVFGMIFTCCLYRSLKLEHY

SEQ ID NO: 12904 - protein, 90 aa, Homo sapiens
  Payload ID: 2511
  Gene Symbol: CD151
  Gene Name: CD151 molecule (Raph blood group)
  ENSP ID: ENSP00000433752
MGEFNEKKTTCGTVCLKYLLFTYNCCFWLAGLAVMAVGIWTLALKSDYISLLASGTYLATAYILVVAGTVVMVTGVLGCCATFKERRNLL

SEQ ID NO: 12905 - protein, 170 aa, Homo sapiens
  Payload ID: 2511
  Gene Symbol: CD151
  Gene Name: CD151 molecule (Raph blood group)
  ENSP ID: ENSP00000433787
MGEFNEKKTTCGTVCLKYLLFTYNCCFWLAGLAVMAVGIWTLALKSDYISLLASGTYLATAYILVVAGTVVMVTGVLGCCATFKERRNLLRLYFILLLIIFLLEIIAGILAYAYYQQLNTELKENLKDTMTKRYHQPGHEAVTSAVDQLQQEFHCCGSNNSQDWRDSEWI

SEQ ID NO: 12906 - protein, 64 aa, Homo sapiens
  Payload ID: 2511
  Gene Symbol: CD151
  Gene Name: CD151 molecule (Raph blood group)
  ENSP ID: ENSP00000434663
MGEFNEKKTTCGTVCLKYLLFTYNCCFWLAGLAVMAVGIWTLALKSDYISLLASGTYLATAYIL

SEQ ID NO: 12907 - protein, 176 aa, Homo sapiens
  Payload ID: 2511
  Gene Symbol: CD151
  Gene Name: CD151 molecule (Raph blood group)
  ENSP ID: ENSP00000435054
MGEFNEKKTTCGTVCLKYLLFTYNCCFWLAGLAVMAVGIWTLALKSDYISLLASGTYLATAYILVVAGTVVMVTGVLGCCATFKERRNLLRLYFILLLIIFLLEIIAGILAYAYYQQLNTELKENLKDTMTKRYHQPGHEAVTSAVDQLQQEFHCCGSNNSQDWRDSEWIRSQEAG

SEQ ID NO: 12908 - protein, 92 aa, Homo sapiens
  Payload ID: 2511
  Gene Symbol: CD151
  Gene Name: CD151 molecule (Raph blood group)
  ENSP ID: ENSP00000435854
MGEFNEKKTTCGTVCLKYLLFTYNCCFWLAGLAVMAVGIWTLALKSDYISLLASGTYLATAYILVVAGTVVMVTGVLGCCATFKERRNLLRL

SEQ ID NO: 12909 - protein, 180 aa, Homo sapiens; identical to SEQ ID NO: 12899
  Payload ID: 2511
  Gene Symbol: CD151
  Gene Name: CD151 molecule (Raph blood group)
  ENSP ID: ENSP00000436591

SEQ ID NO: 12910 - protein, 181 aa, Homo sapiens
  Payload ID: 2512
  Gene Symbol: CD160
  Gene Name: CD160 molecule
  Uniprot ID: O95971
  ENSP ID: ENSP00000235933
MLLEPGRGCCALAILLAIVDIQSGGCINITSSASQEGTRLNLICTVWHKKEEAEGFVVFLCKDRSGDCSPETSLKQLRLKRDPGIDGVGEISSQLMFTISQVTPLHSGTYQCCARSQKSGIRLQGHFFSILFTETGNYTVTGLKQRQHLEFSHNEGTLSSGFLQEKVWVMLVTSLVALQAL

SEQ ID NO: 12911 - protein, 181 aa, Homo sapiens; identical to SEQ ID NO: 12910
  Payload ID: 2512
  Gene Symbol: CD160
  Gene Name: CD160 molecule
  Uniprot ID: O95971
  ENSP ID: ENSP00000358294

SEQ ID NO: 12912 - protein, 234 aa, Homo sapiens
  Payload ID: 2512
  Gene Symbol: CD160
  Gene Name: CD160 molecule
  ENSP ID: ENSP00000385199
MLLEPGRGCCALAILLAIVDIQSGGCINITSSASQEGTRLNLICTVWHKKEEAEGFVVFLCKDRSGDCSPETSLKQLRLKRDPGIDGVGEISSQLMFTISQVTPLHSGTYQCCARSQKSGIRLQGHFFSILFTETGNYTVTGLKQRQHLEFSHNEGTLSSGFLQEKVWVMLVTSLVALQGMSKRAVSTPSNEGAIIFLPPWLFSRRRRLERMSRGREKCYSSPGYPQESSNQFH

SEQ ID NO: 12913 - protein, 72 aa, Homo sapiens
  Payload ID: 2512
  Gene Symbol: CD160
  Gene Name: CD160 molecule
  ENSP ID: ENSP00000462594
MLLEPGRGCCALAILLAIVDIQSGETGNYTVTGLKQRQHLEFSHNEGTLSSGFLQEKVWVMLVTSLVALQAL

SEQ ID NO: 12914 - protein, 125 aa, Homo sapiens
  Payload ID: 2512
  Gene Symbol: CD160
  Gene Name: CD160 molecule
  ENSP ID: ENSP00000483935
MLLEPGRGCCALAILLAIVDIQSGETGNYTVTGLKQRQHLEFSHNEGTLSSGFLQEKVWVMLVTSLVALQGMSKRAVSTPSNEGAIIFLPPWLFSRRRRLERMSRGREKCYSSPGYPQESSNQFH

SEQ ID NO: 12915 - protein, 1156 aa, Homo sapiens
  Payload ID: 2513
  Gene Symbol: CD163
  Gene Name: CD163 molecule
  Uniprot ID: Q86VB7
  ENSP ID: ENSP00000352071
MSKLRMVLLEDSGSADFRRHFVNLSPFTITVVLLLSACFVTSSLGGTDKELRLVDGENKCSGRVEVKVQEEWGTVCNNGWSMEAVSVICNQLGCPTAIKAPGWANSSAGSGRIWMDHVSCRGNESALWDCKHDGWGKHSNCTHQQDAGVTCSDGSNLEMRLTRGGNMCSGRIEIKFQGRWGTVCDDNFNIDHASVICRQLECGSAVSFSGSSNFGEGSGPIWFDDLICNGNESALWNCKHQGWGKHNCDHAEDAGVICSKGADLSLRLVDGVTECSGRLEVRFQGEWGTICDDGWDSYDAAVACKQLGCPTAVTAIGRVNASKGFGHIWLDSVSCQGHEPAIWQCKHHEWGKHYCNHNEDAGVTCSDGSDLELRLRGGGSRCAGTVEVEIQRLLGKVCDRGWGLKEADVVCRQLGCGSALKTSYQVYSKIQATNTWLFLSSCNGNETSLWDCKNWQWGGLTCDHYEEAKITCSAHREPRLVGGDIPCSGRVEVKHGDTWGSICDSDFSLEAASVLCRELQCGTVVSILGGAHFGEGNGQIWAEEFQCEGHESHLSLCPVAPRPEGTCSHSRDVGVVCSRYTEIRLVNGKTPCEGRVELKTLGAWGSLCNSHWDIEDAHVLCQQLKCGVALSTPGGARFGKGNGQIWRHMFHCTGTEQHMGDCPVTALGASLCPSEQVASVICSGNQSQTLSSCNSSSLGPTRPTIPEESAVACIESGQLRLVNGGGRCAGRVEIYHEGSWGTICDDSWDLSDAHVVCRQLGCGEAINATGSAHFGEGTGPIWLDEMKCNGKESRIWQCHSHGWGQQNCRHKEDAGVICSEFMSLRLTSEASREACAGRLEVFYNGAWGTVGKSSMSETTVGVVCRQLGCADKGKINPASLDKAMSIPMWVDNVQCPKGPDTLWQCPSSPWEKRLASPSEETWITCDNKIRLQEGPTSCSGRVEIWHGGSWGTVCDDSWDLDDAQVVCQQLGCGPALKAFKEAEFGQGTGPIWLNEVKCKGNESSLWDCPARRWGHSECGHKEDAAVNCTDISVQKTPQKATTGRSSRQSSFIAVGILGVVLLAIFVALFFLTKKRRQRQRLAVSSRGENLVHQIQYREMNSCLNADDLDLMNSSENSHESADFSAAELISVSKFLPISGMEKEAILSHTEKENGNL

SEQ ID NO: 12916 - protein, 1154 aa, Homo sapiens
  Payload ID: 2513
  Gene Symbol: CD163
  Gene Name: CD163 molecule
  ENSP ID: ENSP00000379863
MSKLRMVLLEDSGSADFRRHFVNLSPFTITVVLLLSACFVTSSLGGTDKELRLVDGENKCSGRVEVKVQEEWGTVCNNGWSMEAVSVICNQLGCPTAIKAPGWANSSAGSGRIWMDHVSCRGNESALWDCKHDGWGKHSNCTHQQDAGVTCSDGSNLEMRLTRGGNMCSGRIEIKFQGRWGTVCDDNFNIDHASVICRQLECGSAVSFSGSSNFGEGSGPIWFDDLICNGNESALWNCKHQGWGKHNCDHAEDAGVICSKGADLSLRLVDGVTECSGRLEVRFQGEWGTICDDGWDSYDAAVACKQLGCPTAVTAIGRVNASKGFGHIWLDSVSCQGHEPAIWQCKHHEWGKHYCNHNEDAGVTCSDGSDLELRLRGGGSRCAGTVEVEIQRLLGKVCDRGWGLKEADVVCRQLGCGSALKTSYQVYSKIQATNTWLFLSSCNGNETSLWDCKNWQWGGLTCDHYEEAKITCSAHREPRLVGGDIPCSGRVEVKHGDTWGSICDSDFSLEAASVLCRELQCGTVVSILGGAHFGEGNGQIWAEEFQCEGHESHLSLCPVAPRPEGTCSHSRDVGVVCSSKTQKTSLIGSHTVKGTGLGSHSCLFLKPCLLPGYTEIRLVNGKTPCEGRVELKTLGAWGSLCNSHWDIEDAHVLCQQLKCGVALSTPGGARFGKGNGQIWRHMFHCTGTEQHMGDCPVTALGASLCPSEQVASVICSGNQSQTLSSCNSSSLGPTRPTIPEESAVACIESGQLRLVNGGGRCAGRVEIYHEGSWGTICDDSWDLSDAHVVCRQLGCGEAINATGSAHFGEGTGPIWLDEMKCNGKESRIWQCHSHGWGQQNCRHKEDAGVICSEFMSLRLTSEASREACAGRLEVFYNGAWGTVGKSSMSETTVGVVCRQLGCADKGKINPASLDKAMSIPMWVDNVQCPKGPDTLWQCPSSPWEKRLASPSEETWITCDNKIRLQEGPTSCSGRVEIWHGGSWGTVCDDSWDLDDAQVVCQQLGCGPALKAFKEAEFGQGTGPIWLNEVKCKGNESSLWDCPARRWGHSECGHKEDAAVNCTDISVQKTPQKATTGRSSRQSSFIAVGILGVVLLAIFVALFFLTKKRRQRQRLAVSSRGENLVHQIQYREMNSCLNADDLDLMNSSGGHSEPH

SEQ ID NO: 12917 - protein, 1121 aa, Homo sapiens
  Payload ID: 2513
  Gene Symbol: CD163
  Gene Name: CD163 molecule
  Uniprot ID: Q86VB7
  ENSP ID: ENSP00000403885
MSKLRMVLLEDSGSADFRRHFVNLSPFTITVVLLLSACFVTSSLGGTDKELRLVDGENKCSGRVEVKVQEEWGTVCNNGWSMEAVSVICNQLGCPTAIKAPGWANSSAGSGRIWMDHVSCRGNESALWDCKHDGWGKHSNCTHQQDAGVTCSDGSNLEMRLTRGGNMCSGRIEIKFQGRWGTVCDDNFNIDHASVICRQLECGSAVSFSGSSNFGEGSGPIWFDDLICNGNESALWNCKHQGWGKHNCDHAEDAGVICSKGADLSLRLVDGVTECSGRLEVRFQGEWGTICDDGWDSYDAAVACKQLGCPTAVTAIGRVNASKGFGHIWLDSVSCQGHEPAIWQCKHHEWGKHYCNHNEDAGVTCSDGSDLELRLRGGGSRCAGTVEVEIQRLLGKVCDRGWGLKEADVVCRQLGCGSALKTSYQVYSKIQATNTWLFLSSCNGNETSLWDCKNWQWGGLTCDHYEEAKITCSAHREPRLVGGDIPCSGRVEVKHGDTWGSICDSDFSLEAASVLCRELQCGTVVSILGGAHFGEGNGQIWAEEFQCEGHESHLSLCPVAPRPEGTCSHSRDVGVVCSRYTEIRLVNGKTPCEGRVELKTLGAWGSLCNSHWDIEDAHVLCQQLKCGVALSTPGGARFGKGNGQIWRHMFHCTGTEQHMGDCPVTALGASLCPSEQVASVICSGNQSQTLSSCNSSSLGPTRPTIPEESAVACIESGQLRLVNGGGRCAGRVEIYHEGSWGTICDDSWDLSDAHVVCRQLGCGEAINATGSAHFGEGTGPIWLDEMKCNGKESRIWQCHSHGWGQQNCRHKEDAGVICSEFMSLRLTSEASREACAGRLEVFYNGAWGTVGKSSMSETTVGVVCRQLGCADKGKINPASLDKAMSIPMWVDNVQCPKGPDTLWQCPSSPWEKRLASPSEETWITCDNKIRLQEGPTSCSGRVEIWHGGSWGTVCDDSWDLDDAQVVCQQLGCGPALKAFKEAEFGQGTGPIWLNEVKCKGNESSLWDCPARRWGHSECGHKEDAAVNCTDISVQKTPQKATTGRSSRQSSFIAVGILGVVLLAIFVALFFLTKKRRQRQRLAVSSRGENLVHQIQYREMNSCLNADDLDLMNSSGGHSEPH

SEQ ID NO: 12918 - protein, 137 aa, Homo sapiens
  Payload ID: 2513
  Gene Symbol: CD163
  Gene Name: CD163 molecule
  ENSP ID: ENSP00000439226
  MOD_RES (1)..(1): Any amino acid
XGPIWLNEVKCKGNESSLWDCPARRWGHSECGHKEDAAVNCTDISVQKTPQKATTGRSSRQSSFIAVGILGVVLLAIFVALFFLTKKRRQRQRLAENSHESADFSAAELISVSKFLPISGMEKEAILSHTEKENGNL

SEQ ID NO: 12919 - protein, 1109 aa, Homo sapiens
  Payload ID: 2513
  Gene Symbol: CD163
  Gene Name: CD163 molecule
  ENSP ID: ENSP00000444071
MSLDFRRHFVNLSPFTITVVLLLSACFVTSSLGGTDKELRLVDGENKCSGRVEVKVQEEWGTVCNNGWSMEAVSVICNQLGCPTAIKAPGWANSSAGSGRIWMDHVSCRGNESALWDCKHDGWGKHSNCTHQQDAGVTCSDGSNLEMRLTRGGNMCSGRIEIKFQGRWGTVCDDNFNIDHASVICRQLECGSAVSFSGSSNFGEGSGPIWFDDLICNGNESALWNCKHQGWGKHNCDHAEDAGVICSKGADLSLRLVDGVTECSGRLEVRFQGEWGTICDDGWDSYDAAVACKQLGCPTAVTAIGRVNASKGFGHIWLDSVSCQGHEPAIWQCKHHEWGKHYCNHNEDAGVTCSDGSDLELRLRGGGSRCAGTVEVEIQRLLGKVCDRGWGLKEADVVCRQLGCGSALKTSYQVYSKIQATNTWLFLSSCNGNETSLWDCKNWQWGGLTCDHYEEAKITCSAHREPRLVGGDIPCSGRVEVKHGDTWGSICDSDFSLEAASVLCRELQCGTVVSILGGAHFGEGNGQIWAEEFQCEGHESHLSLCPVAPRPEGTCSHSRDVGVVCSRYTEIRLVNGKTPCEGRVELKTLGAWGSLCNSHWDIEDAHVLCQQLKCGVALSTPGGARFGKGNGQIWRHMFHCTGTEQHMGDCPVTALGASLCPSEQVASVICSGNQSQTLSSCNSSSLGPTRPTIPEESAVACIESGQLRLVNGGGRCAGRVEIYHEGSWGTICDDSWDLSDAHVVCRQLGCGEAINATGSAHFGEGTGPIWLDEMKCNGKESRIWQCHSHGWGQQNCRHKEDAGVICSEFMSLRLTSEASREACAGRLEVFYNGAWGTVGKSSMSETTVGVVCRQLGCADKGKINPASLDKAMSIPMWVDNVQCPKGPDTLWQCPSSPWEKRLASPSEETWITCDNKIRLQEGPTSCSGRVEIWHGGSWGTVCDDSWDLDDAQVVCQQLGCGPALKAFKEAEFGQGTGPIWLNEVKCKGNESSLWDCPARRWGHSECGHKEDAAVNCTDISVQKTPQKATTGRSSRQSSFIAVGILGVVLLAIFVALFFLTKKRRQRQRLAVSSRGENLVHQIQYREMNSCLNADDLDLMNSSGGHSEPH

SEQ ID NO: 12920 - protein, 124 aa, Homo sapiens
  Payload ID: 2513
  Gene Symbol: CD163
  Gene Name: CD163 molecule
  ENSP ID: ENSP00000445438
DDAQVVCQQLGCGPALKAFKEAEFGQGTGPIWLNEVKCKGNESSLWDCPARRWGHSECGHKEDAAVNCTDISVQKTPQKATTENSHESADFSAAELISVSKFLPISGMEKEAILSHTEKENGNL

SEQ ID NO: 12921 - protein, 1453 aa, Homo sapiens
  Payload ID: 2514
  Gene Symbol: CD163L1
  Gene Name: CD163 molecule-like 1
  Uniprot ID: Q9NR16
  ENSP ID: ENSP00000315945
MMLPQNSWHIDFGRCCCHQNLFSAVVTCILLLNSCFLISSFNGTDLELRLVNGDGPCSGTVEVKFQGQWGTVCDDGWNTTASTVVCKQLGCPFSFAMFRFGQAVTRHGKIWLDDVSCYGNESALWECQHREWGSHNCYHGEDVGVNCYGEANLGLRLVDGNNSCSGRVEVKFQERWGTICDDGWNLNTAAVVCRQLGCPSSFISSGVVNSPAVLRPIWLDDILCQGNELALWNCRHRGWGNHDCSHNEDVTLTCYDSSDLELRLVGGTNRCMGRVELKIQGRWGTVCHHKWNNAAADVVCKQLGCGTALHFAGLPHLQSGSDVVWLDGVSCSGNESFLWDCRHSGTVNFDCLHQNDVSVICSDGADLELRLADGSNNCSGRVEVRIHEQWWTICDQNWKNEQALVVCKQLGCPFSVFGSRRAKPSNEARDIWINSISCTGNESALWDCTYDGKAKRTCFRRSDAGVICSDKADLDLRLVGAHSPCYGRLEVKYQGEWGTVCHDRWSTRNAAVVCKQLGCGKPLHVFGMTYFKEASGPIWLDDVSCIGNESNIWDCEHSGWGKHNCVHREDVIVTCSGDATWGLRLVGGSNRCSGRLEVYFQGRWGTVCDDGWNSKAAAVVCSQLDCPSSIIGMGLGNASTGYGKIWLDDVSCDGDESDLWSCRNSGWGNNDCSHSEDVGVICSDASDMELRLVGGSSRCAGKVEVNVQGAVGILCANGWGMNIAEVVCRQLECGSAIRVSREPHFTERTLHILMSNSGCTGGEASLWDCIRWEWKQTACHLNMEASLICSAHRQPRLVGADMPCSGRVEVKHADTWRSVCDSDFSLHAANVLCRELNCGDAISLSVGDHFGKGNGLTWAEKFQCEGSETHLALCPIVQHPEDTCIHSREVGVVCSRYTDVRLVNGKSQCDGQVEINVLGHWGSLCDTHWDPEDARVLCRQLSCGTALSTTGGKYIGERSVRVWGHRFHCLGNESLLDNCQMTVLGAPPCIHGNTVSVICTGSLTQPLFPCLANVSDPYLSAVPEGSALICLEDKRLRLVDGDSRCAGRVEIYHDGFWGTICDDGWDLSDAHVVCQKLGCGVAFNATVSAHFGEGSGPIWLDDLNCTGMESHLWQCPSRGWGQHDCRHKEDAGVICSEFTALRLYSETETESCAGRLEVFYNGTWGSVGRRNITTAIAGIVCRQLGCGENGVVSLAPLSKTGSGFMWVDDIQCPKTHISIWQCLSAPWERRISSPAEETWITCEDRIRVRGGDTECSGRVEIWHAGSWGTVCDDSWDLAEAEVVCQQLGCGSALAALRDASFGQGTGTIWLDDMRCKGNESFLWDCHAKPWGQSDCGHKEDAGVRCSGQSLKSLNASSGHLALILSSIFGLLLLVLFILFLTWCRVQKQKHLPLRVSTRRRGSLEENLFHEMETCLKREDPHGTRTSDDTPNHGCEDASDTSLLGVLPASEATK

SEQ ID NO: 12922 - protein, 1463 aa, Homo sapiens
  Payload ID: 2514
  Gene Symbol: CD163L1
  Gene Name: CD163 molecule-like 1
  Uniprot ID: Q9NR16
  ENSP ID: ENSP00000393474
MMLPQNSWHIDFGRCCCHQNLFSAVVTCILLLNSCFLISSFNGTDLELRLVNGDGPCSGTVEVKFQGQWGTVCDDGWNTTASTVVCKQLGCPFSFAMFRFGQAVTRHGKIWLDDVSCYGNESALWECQHREWGSHNCYHGEDVGVNCYGKSLTRVGRQGEANLGLRLVDGNNSCSGRVEVKFQERWGTICDDGWNLNTAAVVCRQLGCPSSFISSGVVNSPAVLRPIWLDDILCQGNELALWNCRHRGWGNHDCSHNEDVTLTCYDSSDLELRLVGGTNRCMGRVELKIQGRWGTVCHHKWNNAAADVVCKQLGCGTALHFAGLPHLQSGSDVVWLDGVSCSGNESFLWDCRHSGTVNFDCLHQNDVSVICSDGADLELRLADGSNNCSGRVEVRIHEQWWTICDQNWKNEQALVVCKQLGCPFSVFGSRRAKPSNEARDIWINSISCTGNESALWDCTYDGKAKRTCFRRSDAGVICSDKADLDLRLVGAHSPCYGRLEVKYQGEWGTVCHDRWSTRNAAVVCKQLGCGKPLHVFGMTYFKEASGPIWLDDVSCIGNESNIWDCEHSGWGKHNCVHREDVIVTCSGDATWGLRLVGGSNRCSGRLEVYFQGRWGTVCDDGWNSKAAAVVCSQLDCPSSIIGMGLGNASTGYGKIWLDDVSCDGDESDLWSCRNSGWGNNDCSHSEDVGVICSDASDMELRLVGGSSRCAGKVEVNVQGAVGILCANGWGMNIAEVVCRQLECGSAIRVSREPHFTERTLHILMSNSGCTGGEASLWDCIRWEWKQTACHLNMEASLICSAHRQPRLVGADMPCSGRVEVKHADTWRSVCDSDFSLHAANVLCRELNCGDAISLSVGDHFGKGNGLTWAEKFQCEGSETHLALCPIVQHPEDTCIHSREVGVVCSRYTDVRLVNGKSQCDGQVEINVLGHWGSLCDTHWDPEDARVLCRQLSCGTALSTTGGKYIGERSVRVWGHRFHCLGNESLLDNCQMTVLGAPPCIHGNTVSVICTGSLTQPLFPCLANVSDPYLSAVPEGSALICLEDKRLRLVDGDSRCAGRVEIYHDGFWGTICDDGWDLSDAHVVCQKLGCGVAFNATVSAHFGEGSGPIWLDDLNCTGMESHLWQCPSRGWGQHDCRHKEDAGVICSEFTALRLYSETETESCAGRLEVFYNGTWGSVGRRNITTAIAGIVCRQLGCGENGVVSLAPLSKTGSGFMWVDDIQCPKTHISIWQCLSAPWERRISSPAEETWITCEDRIRVRGGDTECSGRVEIWHAGSWGTVCDDSWDLAEAEVVCQQLGCGSALAALRDASFGQGTGTIWLDDMRCKGNESFLWDCHAKPWGQSDCGHKEDAGVRCSGQSLKSLNASSGHLALILSSIFGLLLLVLFILFLTWCRVQKQKHLPLRVSTRRRGSLEENLFHEMETCLKREDPHGTRTSDDTPNHGCEDASDTSLLGVLPASEATK

SEQ ID NO: 12923 - protein, 109 aa, Homo sapiens
  Payload ID: 2514
  Gene Symbol: CD163L1
  Gene Name: CD163 molecule-like 1
  ENSP ID: ENSP00000438217
  MOD_RES (1)..(1): Any amino acid
XSGQSLKSLNASSGHLALILSSIFGLLLLVLFILFLTWCRVQKQKHLPLRVSTRRRGSLEENLFHEMETCLKREDPHGTRTSDDTPNHGCEDASDTSLLGVLPASEATK

SEQ ID NO: 12924 - protein, 189 aa, Homo sapiens
  Payload ID: 2514
  Gene Symbol: CD163L1
  Gene Name: CD163 molecule-like 1
  ENSP ID: ENSP00000439921
TFLCDFILDGADLELRLADGSNNCSGRVEVRIHEQWWTICDQNWKNEQALVVCKQLGCPFSVFGSRRAKPSNEARDIWINSISCTGNESALWDCTYDGKAKRTCFRRSDAGVICSGDATWGLRLVGGSNRCSGRLEVYFQGRWGTVCDDGWNSKAAAVVCSQLDCPSSIIGMGLGNASTGYGKIWLDDV

SEQ ID NO: 12925 - protein, 61 aa, Homo sapiens
  Payload ID: 2514
  Gene Symbol: CD163L1
  Gene Name: CD163 molecule-like 1
  ENSP ID: ENSP00000442328
MFRFGQAVTRHGKIWLDDVSCYGNESALWECQHREWGSHNCYHGEDVGVNCYGEANLGLRL

SEQ ID NO: 12926 - protein, 58 aa, Homo sapiens
  Payload ID: 2514
  Gene Symbol: CD163L1
  Gene Name: CD163 molecule-like 1
  ENSP ID: ENSP00000443004
  MOD_RES (1)..(1): Any amino acid
XSGQSLKSLNASSGHLALILSSIFGLLLLVLFILFLTWCRVQKQKHLPLRGESPTRIV

SEQ ID NO: 12927 - protein, 184 aa, Homo sapiens
  Payload ID: 2515
  Gene Symbol: CD164
  Gene Name: CD164 molecule, sialomucin
  Uniprot ID: Q04900
  ENSP ID: ENSP00000275080
MSRLSRSLLWAATCLGVLCVLSADKNTTQHPNVTTLAPISNVTSAPVTSLPLVTTPAPETCEGRNSCVSCFNVSVVNTTCFWIECKDESYCSHNSTVSDCQVGNTTDFCSAKPTVQPSPSTTSKTVTTSGTTNNTVTPTSQPVRKSTFDAASFIGGIVLVLGVQAVIFFLYKFCKSKERNYHTL

SEQ ID NO: 12928 - protein, 197 aa, Homo sapiens
  Payload ID: 2515
  Gene Symbol: CD164
  Gene Name: CD164 molecule, sialomucin
  Uniprot ID: Q04900
  ENSP ID: ENSP00000309376
MSRLSRSLLWAATCLGVLCVLSADKNTTQHPNVTTLAPISNVTSAPVTSLPLVTTPAPETCEGRNSCVSCFNVSVVNTTCFWIECKDESYCSHNSTVSDCQVGNTTDFCSVSTATPVPTANSTAKPTVQPSPSTTSKTVTTSGTTNNTVTPTSQPVRKSTFDAASFIGGIVLVLGVQAVIFFLYKFCKSKERNYHTL

SEQ ID NO: 12929 - protein, 178 aa, Homo sapiens
  Payload ID: 2515
  Gene Symbol: CD164
  Gene Name: CD164 molecule, sialomucin
  Uniprot ID: Q04900
  ENSP ID: ENSP00000314177
MSRLSRSLLWAATCLGVLCVLSADKNTTQHPNVTTLAPISNVTSAPVTSLPLVTTPAPETCEGRNSCVSCFNVSVVNTTCFWIECKDESYCSHNSTVSDCQVGNTTDFCSVSTATPVPTANSTGTTNNTVTPTSQPVRKSTFDAASFIGGIVLVLGVQAVIFFLYKFCKSKERNYHTL

SEQ ID NO: 12930 - protein, 147 aa, Homo sapiens
  Payload ID: 2515
  Gene Symbol: CD164
  Gene Name: CD164 molecule, sialomucin
  ENSP ID: ENSP00000357957
MSRLSRSLLWAATCLGVLCVLSADKNTTQHPNVTTLAPISNVTSAPVTSLPLVTTPAPETCEGRNSCVSCFNVSVVNTTCFWIECKDESYCSHNSTVSDCQVGNTTDFCSVSTAQCQQPILQLNPQFSPPLLQLPRQLLHQVQQITL

SEQ ID NO: 12931 - protein, 189 aa, Homo sapiens
  Payload ID: 2515
  Gene Symbol: CD164
  Gene Name: CD164 molecule, sialomucin
  Uniprot ID: Q04900
  ENSP ID: ENSP00000402237
MSRLSRSLLWAATCLGVLCVLSADKNTTQHPNVTTLAPISNVTSAPVTSLPLVTTPAPETCEGRNSCVSCFNVSVVNTTCFWIECKDESYCSHNSTVSDCQVGNTTDFCSVSTATPVPTANSTAKPTVQPSPSTTSKTVTTSGTTNNTVTPTSQPVRKSTFDAASFIGGIVLVLEIRCHTRNYIPDLKK

SEQ ID NO: 12932 - protein, 163 aa, Homo sapiens
  Payload ID: 2515
  Gene Symbol: CD164
  Gene Name: CD164 molecule, sialomucin
  ENSP ID: ENSP00000422999
MRKGRKVPMYVPGVLRTYPKAKLEETCEGRNSCVSCFNVSVVNTTCFWIECKDESYCSHNSTVSDCQVGNTTDFCSVSTATPVPTANSTAKPTVQPSPSTTSKTVTTSGTTNNTVTPTSQPVRKSTFDAASFIGGIVLVLGVQAVIFFLYKFCKSKERNYHTL

SEQ ID NO: 12933 - protein, 157 aa, Homo sapiens
  Payload ID: 2515
  Gene Symbol: CD164
  Gene Name: CD164 molecule, sialomucin
  Uniprot ID: Q04900
  ENSP ID: ENSP00000427546
MSRLSRSLLWAATCLGVLCVLSADKNTTQHPNVTTLAPISNVTSAPVTSLPLVTTPAPETCEGRNSCVSCFNVSVVNTTCFWIECKDESYCSHNSTVSDCQVGNTTDFCSVSTATPVPTANSTAKPTVQPSPSTTSKTVTTSEIRCHTRNYIPDLKK

SEQ ID NO: 12934 - protein, 173 aa, Homo sapiens
  Payload ID: 2516
  Gene Symbol: CD164L2
  Gene Name: CD164 sialomucin-like 2
  Uniprot ID: Q6UWJ8
  ENSP ID: ENSP00000363139
MEAPGPRALRTALCGGCCCLLLCAQLAVAGKGARGFGRGALIRLNIWPAVQGACKQLEVCEHCVEGDGARNLSSCVWEQCRPEEPGHCVAQSEVVKEGCSIYNRSEACPAAHHHPTYEPKTVTTGSPPVPEAHSPGFDGASFIGGVVLVLSLQAVAFFVLHFLKAKDSTYQTL

SEQ ID NO: 12935 - protein, 174 aa, Homo sapiens
  Payload ID: 2516
  Gene Symbol: CD164L2
  Gene Name: CD164 sialomucin-like 2
  Uniprot ID: Q6UWJ8
  ENSP ID: ENSP00000363142
MEAPGPRALRTALCGGCCCLLLCAQLAVAGKGARGFGRGALIRLNIWPAVQGACKQLEVCEHCVEGDGARNLSSCVWEQCRPEEPGHCVAQSEVVKEGCSIYNRSEACPAAHHHPTYEPKTVTTGSPPVPEAHSPGFDGASFIGGVVLVLSLQAVAFFVLHFLKAKDSTYQTLI

SEQ ID NO: 12936 - protein, 145 aa, Homo sapiens
  Payload ID: 2517
  Gene Symbol: CD177
  Gene Name: CD177 molecule
  Uniprot ID: Q8N6Q3
  ENSP ID: ENSP00000367251
MSAVLLLALLGFILPLPGVQALLCQFGTVQHVWKVSDLPRQWTPKNTSCDSGLGCQDTLMLIESGPQVSLVLSKGCTEAKDQEPRVTEHRMGPGLSLISYTFVCRQEDFCNNLVNSLPLWAPQPPADPMMGAAEGPFGKAEQVDS

SEQ ID NO: 12937 - protein, 437 aa, Homo sapiens
  Payload ID: 2517
  Gene Symbol: CD177
  Gene Name: CD177 molecule
  ENSP ID: ENSP00000479536
MSAVLLLALLGFILPLPGVQALLCQFGTVQHVWKVSDLPRQWTPKNTSCDSGLGCQDTLMLIESGPQVSLVLSKGCTEAKDQEPRVTEHRMGPGLSLISYTFVCRQEDFCNNLVNSLPLWAPQPPADPGSLRCPVCLSMEGCLEGTTEEICPKGTTHCYDGLLRLRGGGIFSNLRVQGCMPQPVCNLLNGTQEIGPVGMTENCDMKDFLTCHRGTTIMTHGNLAQEPTDWTTSNTEMCEVGQVCQETLLLLDVGLTSTLVGTKGCSTVGAQNSQKTTIHSAPPGVLVASYTHFCSSDLCNSASSSSVLLNSLPPQAAPVPGDRQCPTCVQPLGTCSSGSPRMTCPRGATHCYDGYIHLSGGGLSTKMSIQGCVAQPSSFLLNHTRQIGIFSAREKRDVQPPASQHEGGGAEGLESLTWGVGLALAPALWWGVVCPSC

SEQ ID NO: 12938 - protein, 139 aa, Homo sapiens
  Payload ID: 2517
  Gene Symbol: CD177
  Gene Name: CD177 molecule
  ENSP ID: ENSP00000483817
MSAVLLLALLGFILPLPGVQALLCQFGTVQHVWKVSDLPRQWTPKNTSCDSGLGCQDTLMLIESGPQVSLVLSKGCTEAKDQEPRVTEHRMGPGLSLISYTFVCRQEDFCNNLVNSLPLWAPQPPAGACGRVGRRGRGC

SEQ ID NO: 12939 - protein, 661 aa, Homo sapiens
  Payload ID: 2518
  Gene Symbol: CD180
  Gene Name: CD180 molecule
  Uniprot ID: Q99467
  ENSP ID: ENSP00000256447
MAFDVSCFFWVVLFSAGCKVITSWDQMCIEKEANKTYNCENLGLSEIPDTLPNTTEFLEFSFNFLPTIHNRTFSRLMNLTFLDLTRCQINWIHEDTFQSHHQLSTLVLTGNPLIFMAETSLNGPKSLKHLFLIQTGISNLEFIPVHNLENLESLYLGSNHISSIKFPKDFPARNLKVLDFQNNAIHYISREDMRSLEQAINLSLNFNGNNVKGIELGAFDSTIFQSLNFGGTPNLSVIFNGLQNSTTQSLWLGTFEDIDDEDISSAMLKGLCEMSVESLNLQEHRFSDISSTTFQCFTQLQELDLTATHLKGLPSGMKGLNLLKKLVLSVNHFDQLCQISAANFPSLTHLYIRGNVKKLHLGVGCLEKLGNLQTLDLSHNDIEASDCCSLQLKNLSHLQTLNLSHNEPLGLQSQAFKECPQLELLDLAFTRLHINAPQSPFQNLHFLQVLNLTYCFLDTSNQHLLAGLPVLRHLNLKGNHFQDGTITKTNLLQTVGSLEVLILSSCGLLSIDQQAFHSLGKMSHVDLSHNSLTCDSIDSLSHLKGIYLNLAANSINIISPRLLPILSQQSTINLSHNPLDCTCSNIHFLTWYKENLHKLEGSEETTCANPPSLRGVKLSDVKLSCGITAIGIFFLIVFLLLLAILLFFAVKYLLRWKYQHI

SEQ ID NO: 12940 - protein, 556 aa, Homo sapiens [sequence omitted]

SEQ ID NO: 12941 - protein, 557 aa, Homo sapiens
  Payload ID: 2519
  Gene Symbol: CD19
  Gene Name: CD19 molecule
  Uniprot ID: P15391
  ENSP ID: ENSP00000437940
MPPPRLLFFLLFLTPMEVRPEEPLVVKVEEGDNAVLQCLKGTSDGPTQQLTWSRESPLKPFLKLSLGLPGLGIHMRPLAIWLFIFNVSQQMGGFYLCQPGPPSEKAWQPGWTVNVEGSGELFRWNVSDLGGLGCGLKNRSSEGPSSPSGKLMSPKLYVWAKDRPEIWEGEPPCLPPRDSLNQSLSQDLTMAPGSTLWLSCGVPPDSVSRGPLSWTHVHPKGPKSLLSLELKDDRPARDMWVMETGLLLPRATAQDAGKYYCHRGNLTMSFHLEITARPVLWHWLLRTGGWKVSAVTLAYLIFCLCSLVGILHLQRALVLRRKRKRMTDPTRRFFKVTPPPGSGPQNQYGNVLSLPTPTSGLGRAQRWAAGLGGTAPSYGNPSSDVQADGALGSRSPPGVGPEEEEGEGYEEPDSEEDSEFYENDSNLGQDQLSQDGSGYENPEDEPLGPEDEDSFSNAESYENEDEELTQPVARTMDFLSPHGSAWDPSREATSLAGSQSYEDMRGILYAAPQLRSIRGQPGPNHEEDADSYENMDNPDGPDPAWGGGGRMGTWSTR

SEQ ID NO: 12942 - protein, 557 aa, Homo sapiens; identical to SEQ ID NO: 12941
  Payload ID: 2519
  Gene Symbol: CD19
  Gene Name: CD19 molecule
  Uniprot ID: P15391
  ENSP ID: ENSP00000456201

SEQ ID NO: 12943 - protein, 467 aa, Homo sapiens
  Payload ID: 2519
  Gene Symbol: CD19
  Gene Name: CD19 molecule
  ENSP ID: ENSP00000481090
MPPPRLLFFLLFLTPMEVRPEEPLVVKVEEGDNAVLQCLKGTSDGPTQQLTWSRESPLKPFLKLSLGLPGLGIHMRPLAIWLFIFNVSQQMGGFYLCQPGPPSEKAWQPGWTVNVEGSGELFRWNVSDLGGLGCGLKNRSSEGPSSPSGKLMSPKLYVWAKDRPEIWEGEPPCLPPRDSLNQSLSQDLTMAPGSTLWLSCGVPPDSVSRGPLSWTHVHPKGPKSLLSLELKDDRPARDMWVMETGLLLPRATAQDAGKYYCHRGNLTMSFHLEITARPVLWHWLLRTGGWKVSAVTLAYLIFCLCSLVGILHLQRALVLRRKRKRMTDPTRRFFKVTPPPGSGPQNQYGNVLSLPTPTSGLGRAQRWAAGLGGTAPSYGNPSSDVQADGALGSRSRREWAQKKRKGRAMRNLTVRRTPSSMRTTPTLGRTSSPRMAAATRTLRMSPWVLRMKTPSPTLSLMRTRMKS

SEQ ID NO: 12944 - protein, 327 aa, Homo sapiens
  Payload ID: 2520
  Gene Symbol: CD1A
  Gene Name: CD1a molecule
  Uniprot ID: P06126
  ENSP ID: ENSP00000289429
MLFLLLPLLAVLPGDGNADGLKEPLSFHVTWIASFYNHSWKQNLVSGWLSDLQTHTWDSNSSTIVFLCPWSRGNFSNEEWKELETLFRIRTIRSFEGIRRYAHELQFEYPFEIQVTGGCELHSGKVSGSFLQLAYQGSDFVSFQNNSWLPYPVAGNMAKHFCKVLNQNQHENDITHNLLSDTCPRFILGLLDAGKAHLQRQVKPEAWLSHGPSPGPGHLQLVCHVSGFYPKPVWVMWMRGEQEQQGTQRGDILPSADGTWYLRATLEVAAGEAADLSCRVKHSSLEGQDIVLYWEHHSSVGFIILAVIVPLLLLIGLALWFRKRCFC

SEQ ID NO: 12945 - protein, 333 aa, Homo sapiens
  Payload ID: 2521
  Gene Symbol: CD1B
  Gene Name: CD1b molecule
  Uniprot ID: P29016
  ENSP ID: ENSP00000357150
MLLLPFQLLAVLFPGGNSEHAFQGPTSFHVIQTSSFTNSTWAQTQGSGWLDDLQIHGWDSDSGTAIFLKPWSKGNFSDKEVAELEEIFRVYIFGFAREVQDFAGDFQMKYPFEIQGIAGCELHSGGAIVSFLRGALGGLDFLSVKNASCVPSPEGGSRAQKFCALIIQYQGIMETVRILLYETCPRYLLGVLNAGKADLQRQVKPEAWLSSGPSPGPGRLQLVCHVSGFYPKPVWVMWMRGEQEQQGTQLGDILPNANWTWYLRATLDVADGEAAGLSCRVKHSSLEGQDIILYWRNPTSIGSIVLAIIVPSLLLLLCLALWYMRRRSYQNIP

SEQ ID NO: 12946 - protein, 246 aa, Homo sapiens
  Payload ID: 2521
  Gene Symbol: CD1B
  Gene Name: CD1b molecule
  ENSP ID: ENSP00000395161
  MOD_RES (1)..(1): Any amino acid
XSSFTNSTWAQTQGSGWLDDLQIHGWDSDSGTAIFLKPWSKGNFSDKEVAELEEIFRVYIFGFAREVQDFAGDFQMKYPFEIQGIAGCELHSGGAIVSFLRGALGGLDFLSVKNASCVPSPEGGSRAQKFCALIIQYQGIMETVRILLYETCPRYLLGVLNAGKADLQRQVKPEAWLSSGPSPGPGRLQLVCHVSGFYPKPVWVMWMRGNPTSIGSIVLAIIVPSLLLLLCLALWYMRRRSYQNIP

SEQ ID NO: 12947 - protein, 333 aa, Homo sapiens
  Payload ID: 2522
  Gene Symbol: CD1C
  Gene Name: CD1c molecule
  Uniprot ID: P29017
  ENSP ID: ENSP00000357152
MLFLQFLLLALLLPGGDNADASQEHVSFHVIQIFSFVNQSWARGQGSGWLDELQTHGWDSESGTIIFLHNWSKGNFSNEELSDLELLFRFYLFGLTREIQDHASQDYSKYPFEVQVKAGCELHSGKSPEGFFQVAFNGLDLLSFQNTTWVPSPGCGSLAQSVCHLLNHQYEGVTETVYNLIRSTCPRFLLGLLDAGKMYVHRQVRPEAWLSSRPSLGSGQLLLVCHASGFYPKPVWVTWMRNEQEQLGTKHGDILPNADGTWYLQVILEVASEEPAGLSCRVRHSSLGGQDIILYWGHHFSMNWIALVVIVPLVILIVLVLWFKKHCSYQDIL

SEQ ID NO: 12948 - protein, 281 aa, Homo sapiens
  Payload ID: 2522
  Gene Symbol: CD1C
  Gene Name: CD1c molecule
  ENSP ID: ENSP00000408755
  MOD_RES (1)..(1): Any amino acid
XFLHNWSKGNFSNEELSDLELLFRFYLFGLTREIQDHASQDYSKYPFEVQVKAGCELHSGKSPEGFFQVAFNGLDLLSFQNTTWVPSPGCGSLAQSVCHLLNHQYEGVTETVYNLIRSTCPRFLLGLLDAGKMYVHRQVRPEAWLSSRPSLGSGQLLLVCHASGFYPKPVWVTWMRNEQEQLGTKHGDILPNADGTWYLQVILEVASEEPAGLSCRVRHSSLGGQDIILYWAHIRTSCETLPPDSPIVLRTQQPRSLVQYSDAIPSTLHLNCFSFCIINIC

SEQ ID NO: 12949 - protein, 335 aa, Homo sapiens
  Payload ID: 2523
  Gene Symbol: CD1D
  Gene Name: CD1d molecule
  Uniprot ID: P15813
  ENSP ID: ENSP00000357153
MGCLLFLLLWALLQAWGSAEVPQRLFPLRCLQISSFANSSWTRTDGLAWLGELQTHSWSNDSDTVRSLKPWSQGTFSDQQWETLQHIFRVYRSSFTRDVKEFAKMLRLSYPLELQVSAGCEVHPGNASNNFFHVAFQGKDILSFQGTSWEPTQEAPLWVNLAIQVLNQDKWTRETVQWLLNGTCPQFVSGLLESGKSELKKQVKPKAWLSRGPSPGPGRLLLVCHVSGFYPKPVWVKWMRGEQEQQGTQPGDILPNADETWYLRATLDVVAGEAAGLSCRVKHSSLEGQDIVLYWGGSYTSMGLIALAVLACLLFLLIVGFTSRFKRQTSYQGVL

SEQ ID NO: 12950 - protein, 144 aa, Homo sapiens
  Payload ID: 2524
  Gene Symbol: CD1E
  Gene Name: CD1e molecule
  Uniprot ID: P15812
  ENSP ID: ENSP00000357136
MLLLFLLFEGLCCPGENTAVKPEAWLSCGPSPGPGRLQLVCHVSGFYPKPVWVMWMRGGYSIFLILICLTVIVTLVILVVVDSRLKKQSSNKNILSPHTPSPVFLMGANTQDTKNSRHQFCLAQVSWIKNRVLKKWKTRLNQLW

SEQ ID NO: 12951 - protein, 231 aa, Homo sapiens
  Payload ID: 2524
  Gene Symbol: CD1E
  Gene Name: CD1e molecule
  Uniprot ID: P15812
  ENSP ID: ENSP00000357137
MLLLFLLFEGLCCPGENTAAPQALQSYHLAAEEQLSFRMLQTSSFANHSWAHSEGSGWLGDLQTHGWDTVLGTIRFLKPWSHGNFSKQELKNLQSLFQLYFHSFIQIVQASAGQFQLELKPEAWLSCGPSPGPGRLQLVCHVSGFYPKPVWVMWMRGGYSIFLILICLTVIVTLVILVVVDSRLKKQSPVFLMGANTQDTKNSRHQFCLAQVSWIKNRVLKKWKTRLNQLW

SEQ ID NO: 12952 - protein, 286 aa, Homo sapiens
  Payload ID: 2524
  Gene Symbol: CD1E
  Gene Name: CD1e molecule
  Uniprot ID: P15812
  ENSP ID: ENSP00000357138
MLLLFLLFEGLCCPGENTAAPQALQSYHLAAEEQLSFRMLQTSSFANHSWAHSEGSGWLGDLQTHGWDTVLGTIRFLKPWSHGNFSKQELKNLQSLFQLYFHSFIQIVQASAGQFQLELKPEAWLSCGPSPGPGRLQLVCHVSGFYPKPVWVMWMRGEQEQRGTQRGDVLPNADETWYLRATLDVAAGEAAGLSCRVKHSSLGGHDLIIHWGGYSIFLILICLTVIVTLVILVVVDSRLKKQSPVFLMGANTQDTKNSRHQFCLAQVSWIKNRVLKKWKTRLNQLW

SEQ ID NO: 12953 - protein, 132 aa, Homo sapiens
  Payload ID: 2524
  Gene Symbol: CD1E
  Gene Name: CD1e molecule
  Uniprot ID: P15812
  ENSP ID: ENSP00000357139
MLLLFLLFEGLCCPGENTAVKPEAWLSCGPSPGPGRLQLVCHVSGFYPKPVWVMWMRGGYSIFLILICLTVIVTLVILVVVDSRLKKQSPVFLMGANTQDTKNSRHQFCLAQVSWIKNRVLKKWKTRLNQLW

SEQ ID NO: 12954 - protein, 376 aa, Homo sapiens
  Payload ID: 2524
  Gene Symbol: CD1E
  Gene Name: CD1e molecule
  Uniprot ID: P15812
  ENSP ID: ENSP00000357142
MLLLFLLFEGLCCPGENTAAPQALQSYHLAAEEQLSFRMLQTSSFANHSWAHSEGSGWLGDLQTHGWDTVLGTIRFLKPWSHGNFSKQELKNLQSLFQLYFHSFIQIVQASAGQFQLEYPFEIQILAGCRMNAPQIFLNMAYQGSDFLSFQGISWEPSPGAGIRAQNICKVLNRYLDIKEILQSLLGHTCPRFLAGLMEAGESELKRKVKPEAWLSCGPSPGPGRLQLVCHVSGFYPKPVWVMWMRGEQEQRGTQRGDVLPNADETWYLRATLDVAAGEAAGLSCRVKHSSLGGHDLIIHWGGYSIFLILICLTVIVTLVILVVVDSRLKKQSPVFLMGANTQDTKNSRHQFCLAQVSWIKNRVLKKWKTRLNQLW

SEQ ID NO: 12955 - protein, 290 aa, Homo sapiens
  Payload ID: 2524
  Gene Symbol: CD1E
  Gene Name: CD1e molecule
  Uniprot ID: P15812
  ENSP ID: ENSP00000357143
MLLLFLLFEGLCCPGENTAAPQALQSYHLAAEEQLSFRMLQTSSFANHSWAHSEGSGWLGDLQTHGWDTVLGTIRFLKPWSHGNFSKQELKNLQSLFQLYFHSFIQIVQASAGQFQLEYPFEIQILAGCRMNAPQIFLNMAYQGSDFLSFQGISWEPSPGAGIRAQNICKVLNRYLDIKEILQSLLGHTCPRFLAGLMEAGESELKRKVKPEAWLSCGPSPGPGRLQLVCHVSGFYPKPVWVMWMRGEQEQRGTQRGDVLPNADETWWIFHLSHPDLFDCDSYPGHIGCS

SEQ ID NO: 12956 - protein, 60 aa, Homo sapiens
  Payload ID: 2524
  Gene Symbol: CD1E
  Gene Name: CD1e molecule
  ENSP ID: ENSP00000357144
  MOD_RES (1)..(1): Any amino acid
XVSGFYPKPVWVMWMRGEQEQRGTQRGDVLPNADETWWIFHLSHPDLFDCDSYPGHIGCS

SEQ ID NO: 12957 - protein, 321 aa, Homo sapiens
  Payload ID: 2524
  Gene Symbol: CD1E
  Gene Name: CD1e molecule
  Uniprot ID: P15812
  ENSP ID: ENSP00000357145
MLLLFLLFEGLCCPGENTAAPQALQSYHLAAEEQLSFRMLQTSSFANHSWAHSEGSGWLGDLQTHGWDTVLGTIRFLKPWSHGNFSKQELKNLQSLFQLYFHSFIQIVQASAGQFQLEYPFEIQILAGCRMNAPQIFLNMAYQGSDFLSFQGISWEPSPGAGIRAQNICKVLNRYLDIKEILQSLLGHTCPRFLAGLMEAGESELKRKVKPEAWLSCGPSPGPGRLQLVCHVSGFYPKPVWVMWMRGGYSIFLILICLTVIVTLVILVVVDSRLKKQSPVFLMGANTQDTKNSRHQFCLAQVSWIKNRVLKKWKTRLNQLW

SEQ ID NO: 12958 - protein, 101 aa, Homo sapiens
  Payload ID: 2524
  Gene Symbol: CD1E
  Gene Name: CD1e molecule
  Uniprot ID: P15812
  ENSP ID: ENSP00000357146
MLLLFLLFEGLCCPGENTAVKPEAWLSCGPSPGPGRLQLVCHVSGFYPKPVWVMWMRGEQEQRGTQRGDVLPNADETWWIFHLSHPDLFDCDSYPGHIGCS

SEQ ID NO: 12959 - protein, 298 aa, Homo sapiens
  Payload ID: 2524
  Gene Symbol: CD1E
  Gene Name: CD1e molecule
  Uniprot ID: P15812
  ENSP ID: ENSP00000357147
MLLLFLLFEGLCCPGENTAAPQALQSYHLAAEEQLSFRMLQTSSFANHSWAHSEGSGWLGDLQTHGWDTVLGTIRFLKPWSHGNFSKQELKNLQSLFQLYFHSFIQIVQASAGQFQLELKPEAWLSCGPSPGPGRLQLVCHVSGFYPKPVWVMWMRGEQEQRGTQRGDVLPNADETWYLRATLDVAAGEAAGLSCRVKHSSLGGHDLIIHWGGYSIFLILICLTVIVTLVILVVVDSRLKKQSSNKNILSPHTPSPVFLMGANTQDTKNSRHQFCLAQVSWIKNRVLKKWKTRLNQLW

SEQ ID NO: 12960 - protein, 187 aa, Homo sapiens
  Payload ID: 2524
  Gene Symbol: CD1E
  Gene Name: CD1e molecule
  Uniprot ID: P15812
  ENSP ID: ENSP00000357148
MLLLFLLFEGLCCPGENTAVKPEAWLSCGPSPGPGRLQLVCHVSGFYPKPVWVMWMRGEQEQRGTQRGDVLPNADETWYLRATLDVAAGEAAGLSCRVKHSSLGGHDLIIHWGGYSIFLILICLTVIVTLVILVVVDSRLKKQSPVFLMGANTQDTKNSRHQFCLAQVSWIKNRVLKKWKTRLNQLW

SEQ ID NO: 12961 - protein, 388 aa, Homo sapiens
  Payload ID: 2524
  Gene Symbol: CD1E
  Gene Name: CD1e molecule
  Uniprot ID: P15812
  ENSP ID: ENSP00000357149
MLLLFLLFEGLCCPGENTAAPQALQSYHLAAEEQLSFRMLQTSSFANHSWAHSEGSGWLGDLQTHGWDTVLGTIRFLKPWSHGNFSKQELKNLQSLFQLYFHSFIQIVQASAGQFQLEYPFEIQILAGCRMNAPQIFLNMAYQGSDFLSFQGISWEPSPGAGIRAQNICKVLNRYLDIKEILQSLLGHTCPRFLAGLMEAGESELKRKVKPEAWLSCGPSPGPGRLQLVCHVSGFYPKPVWVMWMRGEQEQRGTQRGDVLPNADETWYLRATLDVAAGEAAGLSCRVKHSSLGGHDLIIHWGGYSIFLILICLTVIVTLVILVVVDSRLKKQSSNKNILSPHTPSPVFLMGANTQDTKNSRHQFCLAQVSWIKNRVLKKWKTRLNQLW

SEQ ID NO: 12962 - protein, 289 aa, Homo sapiens
  Payload ID: 2524
  Gene Symbol: CD1E
  Gene Name: CD1e molecule
  Uniprot ID: P15812
  ENSP ID: ENSP00000402906
MLLLFLLFEGLCCPGENTADPFEIQILAGCRMNAPQIFLNMAYQGSDFLSFQGISWEPSPGAGIRAQNICKVLNRYLDIKEILQSLLGHTCPRFLAGLMEAGESELKRKVKPEAWLSCGPSPGPGRLQLVCHVSGFYPKPVWVMWMRGEQEQRGTQRGDVLPNADETWYLRATLDVAAGEAAGLSCRVKHSSLGGHDLIIHWGGYSIFLILICLTVIVTLVILVVVDSRLKKQSSNKNILSPHTPSPVFLMGANTQDTKNSRHQFCLAQVSWIKNRVLKKWKTRLNQLW

SEQ ID NO: 12963 - protein, 199 aa, Homo sapiens
  Payload ID: 2524
  Gene Symbol: CD1E
  Gene Name: CD1e molecule
  Uniprot ID: P15812
  ENSP ID: ENSP00000416228
MLLLFLLFEGLCCPGENTAVKPEAWLSCGPSPGPGRLQLVCHVSGFYPKPVWVMWMRGEQEQRGTQRGDVLPNADETWYLRATLDVAAGEAAGLSCRVKHSSLGGHDLIIHWGGYSIFLILICLTVIVTLVILVVVDSRLKKQSSNKNILSPHTPSPVFLMGANTQDTKNSRHQFCLAQVSWIKNRVLKKWKTRLNQLW

SEQ ID NO: 12964 - protein, 341 aa, Homo sapiens
  Payload ID: 2525
  Gene Symbol: CD2BP2
  Gene Name: CD2 (cytoplasmic tail) binding protein 2
  Uniprot ID: O95400
  ENSP ID: ENSP00000304903
MPKRKVTFQGVGDEEDEDEIIVPKKKLVDPVAGSGGPGSRFKGKHSLDSDEEEDDDDGGSSKYDILASEDVEGQEAATLPSEGGVRITPFNLQEEMEEGHFDADGNYFLNRDAQIRDSWLDNIDWVKIRERPPGQRQASDSEEEDSLGQTSMSAQALLEGLLELLLPRETVAGALRRLGARGGGKGRKGPGQPSSPQRLDRLSGLADQMVARGNLGVYQETRERLAMRLKGLGCQTLGPHNPTPPPSLDMFAEELAEEELETPTPTQRGEAESRGDGLVDVMWEYKWENTGDAELYGPFTSAQMQTWVSEGYFPDGVYCRKLDPPGGQFYNSKRIDFDLYT

SEQ ID NO: 12965 - protein, 341 aa, Homo sapiens; identical to SEQ ID NO: 12964
  Payload ID: 2525
  Gene Symbol: CD2BP2
  Gene Name: CD2 (cytoplasmic tail) binding protein 2
  Uniprot ID: O95400
  ENSP ID: ENSP00000456935

SEQ ID NO: 12966 - protein, 133 aa, Homo sapiens
  Payload ID: 2526
  Gene Symbol: CD2
  Gene Name: CD2 molecule
  ENSP ID: ENSP00000358489
MSFPCKFVASFLLIFNVSSKGAVSKEITNALETWGALGQDINLDIPSFQMSDDIDDIKWEKTSDKKKIAQFRKEKETFKEKDTYKLFKNGTLKIKHLKTDDQDIYKVSIYDTKGKNVLEKIFDLKIQGKCSFP

SEQ ID NO: 12967 - protein, 351 aa, Homo sapiens
  Payload ID: 2526
  Gene Symbol: CD2
  Gene Name: CD2 molecule
  Uniprot ID: P06729
  ENSP ID: ENSP00000358490
MSFPCKFVASFLLIFNVSSKGAVSKEITNALETWGALGQDINLDIPSFQMSDDIDDIKWEKTSDKKKIAQFRKEKETFKEKDTYKLFKNGTLKIKHLKTDDQDIYKVSIYDTKGKNVLEKIFDLKIQERVSKPKISWTCINTTLTCEVMNGTDPELNLYQDGKHLKLSQRVITHKWTTSLSAKFKCTAGNKVSKESSVEPVSCPEKGLDIYLIIGICGGGSLLMVFVALLVFYITKRKKQRSRRNDEELETRAHRVATEERGRKPHQIPASTPQNPATSQHPPPPPGHRSQAPSHRPPPPGHRVQHQPQKRPPAPSGTQVHQQKGPPLPRPRVQPKPPHGAAENSLSPSSN

SEQ ID NO: 12968 - protein, 269 aa, Homo sapiens
  Payload ID: 2527
  Gene Symbol: CD200
  Gene Name: CD200 molecule
  Uniprot ID: P41217
  ENSP ID: ENSP00000312766
MERLVIRMPFSHLSTYSLVWVMAAVVLCTAQVQVVTQDEREQLYTPASLKCSLQNAQEALIVTWQKKKAVSPENMVTFSENHGVVIQPAYKDKINITQLGLQNSTITFWNITLEDEGCYMCLFNTFGFGKISGTACLTVYVQPIVSLHYKFSEDHLNITCSATARPAPMVFWKVPRSGIENSTVTLSHPNGTTSVTSILHIKDPKNQVGKEVICQVLHLGTVTDFKQTVNKGYWFSVPLLLSIVSLVILLVLISILLYWKRHRNQDREP

SEQ ID NO: 12969 - protein, 195 aa, Homo sapiens
  Payload ID: 2527
  Gene Symbol: CD200
  Gene Name: CD200 molecule
  ENSP ID: ENSP00000373179
MVTFSENHGVVIQPAYKDKINITQLGLQNSTITFWNITLEDEGCYMCLFNTFGFGKISGTACLTVYVQPIVSLHYKFSEDHLNITCSATARPAPMVFWKVPRSGIENSTVTLSHPNGTTSVTSILHIKDPKNQVGKEVICQVLHLGTVTDFKQTVNKGYWFSVPLLLSIVSLVILLVLISILLYWKRHRNQDREP

SEQ ID NO: 12970 - protein, 150 aa, Homo sapiens
  Payload ID: 2527
  Gene Symbol: CD200
  Gene Name: CD200 molecule
  ENSP ID: ENSP00000418576
MERLVIRMPFSHLSTYSLVWVMAAVVLCTAQVQVVTQDEREQLYTPASLKCSLQNAQEALIVTWQKKKAVSPENMVTFSENHGVVIQPAYKDKINITQLGLQNSTITFWNITLEDEGCYMCLFNTFGFGKISGTACLTVYAHSIPSLQIL

SEQ ID NO: 12971 - protein, 76 aa, Homo sapiens
  Payload ID: 2527
  Gene Symbol: CD200
  Gene Name: CD200 molecule
  ENSP ID: ENSP00000419816
MVTFSENHGVVIQPAYKDKINITQLGLQNSTITFWNITLEDEGCYMCLFNTFGFGKISGTACLTVYAHSIPSLQIL

SEQ ID NO: 12972 - protein, 294 aa, Homo sapiens
  Payload ID: 2527
  Gene Symbol: CD200
  Gene Name: CD200 molecule
  Uniprot ID: P41217
  ENSP ID: ENSP00000420298
MERLTLTRTIGGPLLTATLLGKTTINDYQVIRMPFSHLSTYSLVWVMAAVVLCTAQVQVVTQDEREQLYTPASLKCSLQNAQEALIVTWQKKKAVSPENMVTFSENHGVVIQPAYKDKINITQLGLQNSTITFWNITLEDEGCYMCLFNTFGFGKISGTACLTVYVQPIVSLHYKFSEDHLNITCSATARPAPMVFWKVPRSGIENSTVTLSHPNGTTSVTSILHIKDPKNQVGKEVICQVLHLGTVTDFKQTVNKGYWFSVPLLLSIVSLVILLVLISILLYWKRHRNQDREP

SEQ ID NO: 12973 - protein, 202 aa, Homo sapiens
  Payload ID: 2527
  Gene Symbol: CD200
  Gene Name: CD200 molecule
  ENSP ID: ENSP00000475860
MKVQVVTQDEREQLYTPASLKCSLQNAQEALIVTWQKKKAVSPENMVTFSENHGVVIQPAYKDKINITQLGLQNSTITFWNITLEDEGCYMCLFNTFGFGKISGTACLTVYVQPIVSLHYKFSEDHLNITCSATARPAPMVFWKVPRSGIENSTVTLSHPNGTTSVTSILHIKDPKNQVGKEVICQVLHLGTVTDFKQTVNK

SEQ ID NO: 12974 - protein, 62 aa, Homo sapiens
  Payload ID: 2527
  Gene Symbol: CD200
  Gene Name: CD200 molecule
  ENSP ID: ENSP00000476114
MPFSHLSTYSLVWVMAAVVLCTAQVQVVTQDEREQLYTPASLKCSLQNAQEALIVTWQKKKA

SEQ ID NO: 12975 - protein, 212 aa, Homo sapiens
  Payload ID: 2528
  Gene Symbol: CD200R1
  Gene Name: CD200 receptor 1
  ENSP ID: ENSP00000295863
MLCPWRTANLGLLLILTIFLVAVNTSWPVKMATNAVLCCPPIALRNLIIITWEIILRGQPSCTKAYKKETNETKETNCTDERITWVSRPDQNSDLQIRTVAITHDGYYRCIMVTPDGNFHRGYHLQVLVTPEVTLFQNRNRTAVCKAVAGKPAAHISWIPEGDCATKQEYWSNGTVTVKSTCHWEVHNVSTVTCHVSHLTGNKSLYIELLPG

SEQ ID NO: 12976 - protein, 348 aa, Homo sapiens
  Payload ID: 2528
  Gene Symbol: CD200R1
  Gene Name: CD200 receptor 1
  Uniprot ID: Q8TD46
  ENSP ID: ENSP00000311035
MLCPWRTANLGLLLILTIFLVAEAEGAAQPNNSLMLQTSKENHALASSSLCMDEKQITQNYSKVLAEVNTSWPVKMATNAVLCCPPIALRNLIIITWEIILRGQPSCTKAYKKETNETKETNCTDERITWVSRPDQNSDLQIRTVAITHDGYYRCIMVTPDGNFHRGYHLQVLVTPEVTLFQNRNRTAVCKAVAGKPAAHISWIPEGDCATKQEYWSNGTVTVKSTCHWEVHNVSTVTCHVSHLTGNKSLYIELLPVPGAKKSAKLYIPYIILTIIILTIVGFIWLLKVNGCRKYKLNKTESTPVVEEDEMQPYASYTEKNNPLYDTTNKVKASEALQSEVDTDLHTL

SEQ ID NO: 12977 - protein, 188 aa, Homo sapiens
  Payload ID: 2528
  Gene Symbol: CD200R1
  Gene Name: CD200 receptor 1
  Uniprot ID: Q8TD46
  ENSP ID: ENSP00000405733
MLCPWRTANLGLLLILTIFLVAEAEGAAQPNNSLMLQTSKENHALASSSLCMDEKQITQNYSKVLAEVNTSWPVKMATNAVLCCPPIALRNLIIITWEIILRGQPSCTKAYKKETNETKETNCTDERITWVSRPDQNSDLQIRTVAITHDGYYRCIMVTPDGNFHRGYHLQVLGKEHHILRYFTSPDL

SEQ ID NO: 12978 - protein, 165 aa, Homo sapiens
  Payload ID: 2528
  Gene Symbol: CD200R1
  Gene Name: CD200 receptor 1
  Uniprot ID: Q8TD46
  ENSP ID: ENSP00000418801
MLCPWRTANLGLLLILTIFLVAASSSLCMDEKQITQNYSKVLAEVNTSWPVKMATNAVLCCPPIALRNLIIITWEIILRGQPSCTKAYKKETNETKETNCTDERITWVSRPDQNSDLQIRTVAITHDGYYRCIMVTPDGNFHRGYHLQVLGKEHHILRYFTSPDL

SEQ ID NO: 12979 - protein, 325 aa, Homo sapiens
  Payload ID: 2528
  Gene Symbol: CD200R1
  Gene Name: CD200 receptor 1
  Uniprot ID: Q8TD46
  ENSP ID: ENSP00000418928
MLCPWRTANLGLLLILTIFLVAASSSLCMDEKQITQNYSKVLAEVNTSWPVKMATNAVLCCPPIALRNLIIITWEIILRGQPSCTKAYKKETNETKETNCTDERITWVSRPDQNSDLQIRTVAITHDGYYRCIMVTPDGNFHRGYHLQVLVTPEVTLFQNRNRTAVCKAVAGKPAAHISWIPEGDCATKQEYWSNGTVTVKSTCHWEVHNVSTVTCHVSHLTGNKSLYIELLPVPGAKKSAKLYIPYIILTIIILTIVGFIWLLKVNGCRKYKLNKTESTPVVEEDEMQPYASYTEKNNPLYDTTNKVKASEALQSEVDTDLHTL

SEQ ID NO: 12980 - protein, 271 aa, Homo sapiens
  Payload ID: 2529
  Gene Symbol: CD200R1L
  Gene Name: CD200 receptor 1-like
  Uniprot ID: Q6Q8B3
  ENSP ID: ENSP00000381272
MSAPRLLISIIIMVSASSSSCMGGKQMTQNYSTIFAEGNISQPVLMDINAVLCCPPIALRNLIIITWEIILRGQPSCTKAYKKETNETKETNCTVERITWVSRPDQNSDLQIRPVDTTHDGYYRGIVVTPDGNFHRGYHLQVLVTPEVNLFQSRNITAVCKAVTGKPAAQISWIPEGSILATKQEYWGNGTVTVKSTCPWEGHKSTVTCHVSHLTGNKSLSVKLNSGLRTSGSPALSLLIILYVKLSLFVVILVTTGFVFFQRINHVRKVL

SEQ ID NO: 12981 - protein, 250 aa, Homo sapiens
  Payload ID: 2529
  Gene Symbol: CD200R1L
  Gene Name: CD200 receptor 1-like
  ENSP ID: ENSP00000415132
MGGKQMTQNYSTIFAEGNISQPVLMDINAVLCCPPIALRNLIIITWEIILRGQPSCTKAYKKETNETKETNCTVERITWVSRPDQNSDLQIRPVDTTHDGYYRGIVVTPDGNFHRGYHLQVLVTPEVNLFQSRNITAVCKAVTGKPAAQISWIPEGSILATKQEYWGNGTVTVKSTCPWEGHKSTVTCHVSHLTGNKSLSVKLNSGLRTSGSPALSLLIILYVKLSLFVVILVTTGFVFFQRINHVSKFL

SEQ ID NO: 12982 - protein, 250 aa, Homo sapiens
  Payload ID: 2529
  Gene Symbol: CD200R1L
  Gene Name: CD200 receptor 1-like
  Uniprot ID: Q6Q8B3
  ENSP ID: ENSP00000418413
MGGKQMTQNYSTIFAEGNISQPVLMDINAVLCCPPIALRNLIIITWEIILRGQPSCTKAYKKETNETKETNCTVERITWVSRPDQNSDLQIRPVDTTHDGYYRGIVVTPDGNFHRGYHLQVLVTPEVNLFQSRNITAVCKAVTGKPAAQISWIPEGSILATKQEYWGNGTVTVKSTCPWEGHKSTVTCHVSHLTGNKSLSVKLNSGLRTSGSPALSLLIILYVKLSLFVVILVTTGFVFFQRINHVRKVL

SEQ ID NO: 12983 - protein, 55 aa, Homo sapiens
  Payload ID: 2529
  Gene Symbol: CD200R1L
  Gene Name: CD200 receptor 1-like
  ENSP ID: ENSP00000420461
MSAPRLLISIIIMVSGCTGSMAEEASKNLQSWWKCEGEASMSSNGQQKPQIIIPV

SEQ ID NO: 12984 - protein, 253 aa, Homo sapiens
  Payload ID: 2529
  Gene Symbol: CD200R1L
  Gene Name: CD200 receptor 1-like
  ENSP ID: ENSP00000477541
ASSSSCMGGKQMTQNYSTIFAEGNISQPVLMDINAVLCCPPIALRNLIIITWEIILRGQPSCTKAYKKETNETKETNCTVERITWVSRPDQNSDLQIRPVDTTHDGYYRGIVVTPDGNFHRGYHLQVLVTPEVNLFQSRNITAVCKAVTGKPAAQISWIPEGSILATKQEYWGNGTVTVKSTCPWEGHKSTVTCHVSHLTGNKSLSVKLNSGLRTSGSPALSLLIILYVKLSLFVVILVTTGFVFFQRINHVR

SEQ ID NO: 12985 - protein, 328 aa, Homo sapiens
  Payload ID: 2530
  Gene Symbol: CD207
  Gene Name: CD207 molecule, langerin
  Uniprot ID: Q9UJ71
  ENSP ID: ENSP00000386378
MTVEKEAPDAHFTVDKQNISLWPREPPPKSGPSLVPGKTPTVRAALICLTLVLVASVLLQAVLYPRFMGTISDVKTNVQLLKGRVDNISTLDSEIKKNSDGMEAAGVQIQMVNESLGYVRSQFLKLKTSVEKANAQIQILTRSWEEVSTLNAQIPELKSDLEKASALNTKIRALQGSLENMSKLLKRQNDILQVVSQGWKYFKGNFYYFSLIPKTWYSAEQFCVSRNSHLTSVTSESEQEFLYKTAGGLIYWIGLTKAGMEGDWSWVDDTPFNKVQSVRFWIPGEPNNAGNNEHCGNIKAPSLQAWNDAPCDKTFLFICKRPYVPSEP

SEQ ID NO: 12986 - protein, 360 aa, Homo sapiens
  Payload ID: 2531
  Gene Symbol: CD209
  Gene Name: CD209 molecule
  Uniprot ID: Q9NNX6
  ENSP ID: ENSP00000204801
MSDSKEPRLQQLGLLVSKVPSSISQEQSRQDAIYQNLTQLKAAVGELSEKSKLQEIYQELTQLKAAVGELPEKSKLQEIYQELTRLKAAVGELPEKSKLQEIYQELTWLKAAVGELPEKSKMQEIYQELTRLKAAVGELPEKSKQQEIYQELTRLKAAVGELPEKSKQQEIYQELTRLKAAVGELPEKSKQQEIYQELTQLKAAVERLCHPCPWEWTFFQGNCYFMSNSQRNWHDSITACKEVGAQLVVIKSAEEQNFLQLQSSRSNRFTWMGLSDLNQEGTWQWVDGSPLLPSFKQYWNRGEPNNVGEEDCAEFSGNGWNDDKCNLAKFWICKKSAASCSRDEEQFLSPAPATPNPPPA

SEQ ID NO: 12987 - protein, 380 aa, Homo sapiens
  Payload ID: 2531
  Gene Symbol: CD209
  Gene Name: CD209 molecule
  Uniprot ID: Q9NNX6
  ENSP ID: ENSP00000315407
MSDSKEPRLQQLGLLEEEQLRGLGFRQTRGYKSLAVSKVPSSISQEQSRQDAIYQNLTQLKAAVGELSEKSKLQEIYQELTQLKAAVGELPEKSKLQEIYQELTRLKAAVGELPEKSKLQEIYQELTWLKAAVGELPEKSKMQEIYQELTRLKAAVGELPEKSKQQEIYQELTRLKAAVGELPEKSKQQEIYQELTRLKAAVGELPEKSKQQEIYQELTQLKAAVERLCHPCPWEWTFFQGNCYFMSNSQRNWHDSITACKEVGAQLVVIKSAEEQNFLQLQSSRSNRFTWMGLSDLNQEGTWQWVDGSPLLPSFKQYWNRGEPNNVGEEDCAEFSGNGWNDDKCNLAKFWICKKSAASCSRDEEQFLSPAPATPNPPPA

SEQ ID NO: 12988 - protein, 404 aa, Homo sapiens
  Payload ID: 2531
  Gene Symbol: CD209
  Gene Name: CD209 molecule
  Uniprot ID: Q9NNX6
  ENSP ID: ENSP00000315477
MSDSKEPRLQQLGLLEEEQLRGLGFRQTRGYKSLAGCLGHGPLVLQLLSFTLLAGLLVQVSKVPSSISQEQSRQDAIYQNLTQLKAAVGELSEKSKLQEIYQELTQLKAAVGELPEKSKLQEIYQELTRLKAAVGELPEKSKLQEIYQELTWLKAAVGELPEKSKMQEIYQELTRLKAAVGELPEKSKQQEIYQELTRLKAAVGELPEKSKQQEIYQELTRLKAAVGELPEKSKQQEIYQELTQLKAAVERLCHPCPWEWTFFQGNCYFMSNSQRNWHDSITACKEVGAQLVVIKSAEEQNFLQLQSSRSNRFTWMGLSDLNQEGTWQWVDGSPLLPSFKQYWNRGEPNNVGEEDCAEFSGNGWNDDKCNLAKFWICKKSAASCSRDEEQFLSPAPATPNPPPA

SEQ ID NO: 12989 - protein, 398 aa, Homo sapiens
  Payload ID: 2531
  Gene Symbol: CD209
  Gene Name: CD209 molecule
  Uniprot ID: Q9NNX6
  ENSP ID: ENSP00000346373
MSDSKEPRLQQLGLLEEEQLRGLGFRQTRGYKSLAGCLGHGPLVLQLLSFTLLAGLLVQVSKVPSSISQEQSRQDAIYQNLTQLKAAVGELSEKSKLQEIYQELTQLKAAVGELPEKSKLQEIYQELTRLKAAVGELPEKSKLQEIYQELTWLKAAVGELPEKSKMQEIYQELTRLKAAVGELPEKSKQQEIYQELTRLKAAVGELPEKSKQQEIYQELTRLKAAVGELPEKSKQQEIYQELTQLKAAVERLCHPCPWEWTFFQGNCYFMSNSQRNWHDSITACKEVGAQLVVIKSAEEQSSRSNRFTWMGLSDLNQEGTWQWVDGSPLLPSFKQYWNRGEPNNVGEEDCAEFSGNGWNDDKCNLAKFWICKKSAASCSRDEEQFLSPAPATPNPPPA

SEQ ID NO: 12990 - protein, 168 aa, Homo sapiens
  Payload ID: 2531
  Gene Symbol: CD209
  Gene Name: CD209 molecule
  Uniprot ID: Q9NNX6
  ENSP ID: ENSP00000377716
MSDSKEPRLQQLGLLEEEQLRGLGFRQTRGYKSLAGCLGHGPLVLQLLSFTLLAGLLVQVSKVPSSISQEQSRSNRFTWMGLSDLNQEGTWQWVDGSPLLPSFKQYWNRGEPNNVGEEDCAEFSGNGWNDDKCNLAKFWICKKSAASCSRDEEQFLSPAPATPNPPPA

SEQ ID NO: 12991 - protein, 243 aa, Homo sapiens
  Payload ID: 2531
  Gene Symbol: CD209
  Gene Name: CD209 molecule
  ENSP ID: ENSP00000377728
MSDSKEPRLQQLGLLEEEQLRGLGFRQTRGYKSLAGCLGHGPLVLQLLSFTLLAGLLVQVSKVPSSISQEQSRQDAIYQNLTQLKAAVERLCHPCPWEWTFFQGNCYFMSNSQRNWHDSITACKEVGAQLVVIKSAEEQNFLQLQSSRSNRFTWMGLSDLNQEGTWQWVDGSPLLPSFKQYWNRGEPNNVGEEDCAEFSGNGWNDDKCNLAKFWICKKSAASCSRDEEQFLSPAPATPNPPPA

SEQ ID NO: 12992 - protein, 380 aa, Homo sapiens
  Payload ID: 2531
  Gene Symbol: CD209
  Gene Name: CD209 molecule
  Uniprot ID: Q9NNX6
  ENSP ID: ENSP00000468827
MASACPGSDFTSIHSEEEQLRGLGFRQTRGYKSLAVSKVPSSISQEQSRQDAIYQNLTQLKAAVGELSEKSKLQEIYQELTQLKAAVGELPEKSKLQEIYQELTRLKAAVGELPEKSKLQEIYQELTWLKAAVGELPEKSKMQEIYQELTRLKAAVGELPEKSKQQEIYQELTRLKAAVGELPEKSKQQEIYQELTRLKAAVGELPEKSKQQEIYQELTQLKAAVERLCHPCPWEWTFFQGNCYFMSNSQRNWHDSITACKEVGAQLVVIKSAEEQNFLQLQSSRSNRFTWMGLSDLNQEGTWQWVDGSPLLPSFKQYWNRGEPNNVGEEDCAEFSGNGWNDDKCNLAKFWICKKSAASCSRDEEQFLSPAPATPNPPPA

SEQ ID NO: 12993 - protein, 334 aa, Homo sapiens
  Payload ID: 2531
  Gene Symbol: CD209
  Gene Name: CD209 molecule
  ENSP ID: ENSP00000470530
MASACPGSDFTSIHSEEEQLRGLGFRQTRGYKSLAVSKVPSSISQEQSRQDAIYQNLTQLKAAVGELSEKSKLQEIYQELTQLKAAVGELPEKSKLQEIYQELTRLKAAVGELPEKSKLQEIYQELTWLKAAVGELPEKSKMQEIYQELTRLKAAVGELPEKSKQQEIYQELTRLKAAVERLCHPCPWEWTFFQGNCYFMSNSQRNWHDSITACKEVGAQLVVIKSAEEQNFLQLQSSRSNRFTWMGLSDLNQEGTWQWVDGSPLLPSFKQYWNRGEPNNVGEEDCAEFSGNGWNDDKCNLAKFWICKKSAASCSRDEEQFLSPAPATPNPPPA

SEQ ID NO: 12994 - protein, 297 aa, Homo sapiens
  Payload ID: 2531
  Gene Symbol: CD209
  Gene Name: CD209 molecule
  Uniprot ID: Q9NNX6
  ENSP ID: ENSP00000470658
MASACPGSDFTSIHSEEEQLRGLGFRQTRGYKSLAVSKVPSSISQEQSRQDAIYQNLTQLKAAVGELSEKSKLQEIYQELTQLKAAVGELPEKSKLQEIYQELTRLKAAVGELPEKSKLQEIYQELTWLKAAVGELPEKSKMQEIYQELTRLKAAVGELPEKSKQQEIYQELTRLKAAVGELPEKSKQQEIYQELTRLKAAVGELPEKSKQQEIYQELTQLKAAVERLCHPCPWEWTFFQGNCYFMSNSQRNWHDSITACKEVGAQLVVIKSAEEQLQAVLEQRRAQQRWGGRLRGI

SEQ ID NO: 12995 - protein, 312 aa, Homo sapiens
  Payload ID: 2531
  Gene Symbol: CD209
  Gene Name: CD209 molecule
  Uniprot ID: Q9NNX6
  ENSP ID: ENSP00000471137
MSDSKEPRLQQLGLLEEEQLRGLGFRQTRGYKSLAGCLGHGPLVLQLLSFTLLAGLLVQVSKVPSSISQEQSRQDAIYQNLTQLKAAVGELSEKSKLQEIYQELTQLKAAVGELPEKSKLQEIYQELTRLKAAVGELPEKSKLQEIYQELTWLKAAVERLCHPCPWEWTFFQGNCYFMSNSQRNWHDSITACKEVGAQLVVIKSAEEQNFLQLQSSRSNRFTWMGLSDLNQEGTWQWVDGSPLLPSFKQYWNRGEPNNVGEEDCAEFSGNGWNDDKCNLAKFWICKKSAASCSRDEEQFLSPAPATPNPPPA

SEQ ID NO: 12996 - protein, 268 aa, Homo sapiens
  Payload ID: 2531
  Gene Symbol: CD209
  Gene Name: CD209 molecule
  ENSP ID: ENSP00000471348
MSDSKEPRLQQLGLLVSKVPSSISQEQSRQDAIYQNLTQLKAAVGELSEKSKLQEIYQELTQLKAAVGELPEKSKLQEIYQELTRLKAAVGELPEKSKLQEIYQELTWLKAAVERLCHPCPWEWTFFQGNCYFMSNSQRNWHDSITACKEVGAQLVVIKSAEEQNFLQLQSSRSNRFTWMGLSDLNQEGTWQWVDGSPLLPSFKQYWNRGEPNNVGEEDCAEFSGNGWNDDKCNLAKFWICKKSAASCSRDEEQFLSPAPATPNPPPA

SEQ ID NO: 12997 - protein, 847 aa, Homo sapiens
  Payload ID: 2532
  Gene Symbol: CD22
  Gene Name: CD22 molecule
  Uniprot ID: P20273
  ENSP ID: ENSP00000085219
MHLLGPWLLLLVLEYLAFSDSSKWVFEHPETLYAWEGACVWIPCTYRALDGDLESFILFHNPEYNKNTSKFDGTRLYESTKDGKVPSEQKRVQFLGDKNKNCTLSIHPVHLNDSGQLGLRMESKTEKWMERIHLNVSERPFPPHIQLPPEIQESQEVTLTCLLNFSCYGYPIQLQWLLEGVPMRQAAVTSTSLTIKSVFTRSELKFSPQWSHHGKIVTCQLQDADGKFLSNDTVQLNVKHTPKLEIKVTPSDAIVREGDSVTMTCEVSSSNPEYTTVSWLKDGTSLKKQNTFTLNLREVTKDQSGKYCCQVSNDVGPGRSEEVFLQVQYAPEPSTVQILHSPAVEGSQVEFLCMSLANPLPTNYTWYHNGKEMQGRTEEKVHIPKILPWHAGTYSCVAENILGTGQRGPGAELDVQYPPKKVTTVIQNPMPIREGDTVTLSCNYNSSNPSVTRYEWKPHGAWEEPSLGVLKIQNVGWDNTTIACAACNSWCSWASPVALNVQYAPRDVRVRKIKPLSEIHSGNSVSLQCDFSSSHPKEVQFFWEKNGRLLGKESQLNFDSISPEDAGSYSCWVNNSIGQTASKAWTLEVLYAPRRLRVSMSPGDQVMEGKSATLTCESDANPPVSHYTWFDWNNQSLPYHSQKLRLEPVKVQHSGAYWCQGTNSVGKGRSPLSTLTVYYSPETIGRRVAVGLGSCLAILILAICGLKLQRRWKRTQSQQGLQENSSGQSFFVRNKKVRRAPLSEGPHSLGCYNPMMEDGISYTTLRFPEMNIPRTGDAESSEMQRPPPDCDDTVTYSALHKRQVGDYENVIPDFPEDEGIHYSELIQFGVGERPQAQENVDYVILKH

SEQ ID NO: 12998 - protein, 647 aa, Homo sapiens
  Payload ID: 2532
  Gene Symbol: CD22
  Gene Name: CD22 molecule
  ENSP ID: ENSP00000270311
MHLLGPWLLLLVLEYLAFSDSSKWVFEHPETLYAWEGACVWIPCTYRALDGDLESFILFHNPEYNKNTSKFDGTRLYESTKDGKVPSEQKRVQFLGDKNKNCTLSIHPVHLNDSGQLGLRMESKTEKWMERIHLNVSERPFPPHIQLPPEIQESQEVTLTCLLNFSCYGYPIQLQWLLEGVPMRQAAVTSTSLTIKSVFTRSELKFSPQWSHHGKIVTCQLQDADGKFLSNDTVQLNVKHPPKKVTTVIQNPMPIREGDTVTLSCNYNSSNPSVTRYEWKPHGAWEEPSLGVLKIQNVGWDNTTIACAACNSWCSWASPVALNVQYAPRDVRVRKIKPLSEIHSGNSVSLQCDFSSSHPKEVQFFWEKNGRLLGKESQLNFDSISPEDAGSYSCWVNNSIGQTASKAWTLEVLYAPRRLRVSMSPGDQVMEGKSATLTCESDANPPVSHYTWFDWNNQSLPYHSQKLRLEPVKVQHSGAYWCQGTNSVGKGRSPLSTLTVYYSPETIGRRVAVGLGSCLAILILAICGLKLQRRWKRTQSQQGLQENSSGQSFFVRNKKVRRAPLSEGPHSLGCYNPMMEDGISYTTLRFPEMNIPRTGDAESSEMQRPPPDCDDTVTYSALHKRQVGTMRTSFQIFQKMRGFITQS

SEQ ID NO: 12999 - protein, 670 aa, Homo sapiens
  Payload ID: 2532
  Gene Symbol: CD22
  Gene Name: CD22 molecule
  Uniprot ID: P20273
  ENSP ID: ENSP00000339349
MHLLGPWLLLLVLEYLAFSDSSKWVFEHPETLYAWEGACVWIPCTYRALDGDLESFILFHNPEYNKNTSKFDGTRLYESTKDGKVPSEQKRVQFLGDKNKNCTLSIHPVHLNDSGQLGLRMESKTEKWMERIHLNVSERPFPPHIQLPPEIQESQEVTLTCLLNFSCYGYPIQLQWLLEGVPMRQAAVTSTSLTIKSVFTRSELKFSPQWSHHGKIVTCQLQDADGKFLSNDTVQLNVKHPPKKVTTVIQNPMPIREGDTVTLSCNYNSSNPSVTRYEWKPHGAWEEPSLGVLKIQNVGWDNTTIACAACNSWCSWASPVALNVQYAPRDVRVRKIKPLSEIHSGNSVSLQCDFSSSHPKEVQFFWEKNGRLLGKESQLNFDSISPEDAGSYSCWVNNSIGQTASKAWTLEVLYAPRRLRVSMSPGDQVMEGKSATLTCESDANPPVSHYTWFDWNNQSLPYHSQKLRLEPVKVQHSGAYWCQGTNSVGKGRSPLSTLTVYYSPETIGRRVAVGLGSCLAILILAICGLKLQRRWKRTQSQQGLQENSSGQSFFVRNKKVRRAPLSEGPHSLGCYNPMMEDGISYTTLRFPEMNIPRTGDAESSEMQRPPPDCDDTVTYSALHKRQVGDYENVIPDFPEDEGIHYSELIQFGVGERPQAQENVDYVILKH

SEQ ID NO: 13000 - protein, 675 aa, Homo sapiens
  Payload ID: 2532
  Gene Symbol: CD22
  Gene Name: CD22 molecule
  Uniprot ID: P20273
  ENSP ID: ENSP00000403822
MSLWLLEGVPMRQAAVTSTSLTIKSVFTRSELKFSPQWSHHGKIVTCQLQDADGKFLSNDTVQLNVKHTPKLEIKVTPSDAIVREGDSVTMTCEVSSSNPEYTTVSWLKDGTSLKKQNTFTLNLREVTKDQSGKYCCQVSNDVGPGRSEEVFLQVQYAPEPSTVQILHSPAVEGSQVEFLCMSLANPLPTNYTWYHNGKEMQGRTEEKVHIPKILPWHAGTYSCVAENILGTGQRGPGAELDVQYPPKKVTTVIQNPMPIREGDTVTLSCNYNSSNPSVTRYEWKPHGAWEEPSLGVLKIQNVGWDNTTIACAACNSWCSWASPVALNVQYAPRDVRVRKIKPLSEIHSGNSVSLQCDFSSSHPKEVQFFWEKNGRLLGKESQLNFDSISPEDAGSYSCWVNNSIGQTASKAWTLEVLYAPRRLRVSMSPGDQVMEGKSATLTCESDANPPVSHYTWFDWNNQSLPYHSQKLRLEPVKVQHSGAYWCQGTNSVGKGRSPLSTLTVYYSPETIGRRVAVGLGSCLAILILAICGLKLQRRWKRTQSQQGLQENSSGQSFFVRNKKVRRAPLSEGPHSLGCYNPMMEDGISYTTLRFPEMNIPRTGDAESSEMQRPPPDCDDTVTYSALHKRQVGDYENVIPDFPEDEGIHYSELIQFGVGERPQAQENVDYVILKH

SEQ ID NO: 13001 - protein, 751 aa, Homo sapiens
  Payload ID: 2532
  Gene Symbol: CD22
  Gene Name: CD22 molecule
  Uniprot ID: P20273
  ENSP ID: ENSP00000441237
MHLLGPWLLLLVLEYLAFSDSSKWVFEHPETLYAWEGACVWIPCTYRALDGDLESFILFHNPEYNKNTSKFDGTRLYESTKDGKVPSEQKRVQFLGDKNKNCTLSIHPVHLNDSGQLGLRMESKTEKWMERIHLNVSERPFPPHIQLPPEIQESQEVTLTCLLNFSCYGYPIQLQWLLEGVPMRQAAVTSTSLTIKSVFTRSELKFSPQWSHHGKIVTCQLQDADGKFLSNDTVQLNVKHTPKLEIKVTPSDAIVREGDSVTMTCEVSSSNPEYTTVSWLKDGTSLKKQNTFTLNLREVTKDQSGKYCCQVSNDVGPGRSEEVFLQVQYAPEPSTVQILHSPAVEGSQVEFLCMSLANPLPTNYTWYHNGKEMQGRTEEKVHIPKILPWHAGTYSCVAENILGTGQRGPGAELDVQYPPKKVTTVIQNPMPIREGDTVTLSCNYNSSNPSVTRYEWKPHGAWEEPSLGVLKIQNVGWDNTTIACAACNSWCSWASPVALNVQYAPRDVRVRKIKPLSEIHSGNSVSLQCDFSSSHPKEVQFFWEKNGRLLGKESQLNFDSISPEDAGSYSCWVNNSIGQTASKAWTLEVLYAPRRLRVSMSPGDQVMEGKSATLTCESDANPPVSHYTWFDWNNQSLPYHSQKLRLEPVKVQHSGAYWCQGTNSVGKGRSPLSTLTVYYSPETIGRRVAVGLGSCLAILILAICGLKLQRRWKRTQSQQGLQENSSGQSFFVRNKKRCRVLRDAETSPGLR

SEQ ID NO: 13002 - protein, 759 aa, Homo sapiens
  Payload ID: 2532
  Gene Symbol: CD22
  Gene Name: CD22 molecule
  Uniprot ID: P20273
  ENSP ID: ENSP00000442279
MHLLGPWLLLLVLEYLAFSDSSKWVFEHPETLYAWEGACVWIPCTYRALDGDLESFILFHNPEYNKNTSKFDGTRLYESTKDGKVPSEQKRVQFLGDKNKNCTLSIHPVHLNDSGQLGLRMESKTEKWMERIHLNVSERPFPPHIQLPPEIQESQEVTLTCLLNFSCYGYPIQLQWLLEGVPMRQAAVTSTSLTIKSVFTRSELKFSPQWSHHGKIVTCQLQDADGKFLSNDTVQLNVKHTPKLEIKVTPSDAIVREGDSVTMTCEVSSSNPEYTTVSWLKDGTSLKKQNTFTLNLREVTKDQSGKYCCQVSNDVGPGRSEEVFLQVQYPPKKVTTVIQNPMPIREGDTVTLSCNYNSSNPSVTRYEWKPHGAWEEPSLGVLKIQNVGWDNTTIACAACNSWCSWASPVALNVQYAPRDVRVRKIKPLSEIHSGNSVSLQCDFSSSHPKEVQFFWEKNGRLLGKESQLNFDSISPEDAGSYSCWVNNSIGQTASKAWTLEVLYAPRRLRVSMSPGDQVMEGKSATLTCESDANPPVSHYTWFDWNNQSLPYHSQKLRLEPVKVQHSGAYWCQGTNSVGKGRSPLSTLTVYYSPETIGRRVAVGLGSCLAILILAICGLKLQRRWKRTQSQQGLQENSSGQSFFVRNKKVRRAPLSEGPHSLGCYNPMMEDGISYTTLRFPEMNIPRTGDAESSEMQRPPPDCDDTVTYSALHKRQVGDYENVIPDFPEDEGIHYSELIQFGVGERPQAQENVDYVILKH

SEQ ID NO: 13003 - protein, 144 aa, Homo sapiens
  Payload ID: 2532
  Gene Symbol: CD22
  Gene Name: CD22 molecule
  ENSP ID: ENSP00000469503
MHLLGPWLLLLEYLAFSDSSKWVFEHPETLYAWEGACVWIPCTYRALDGDLESFILFHNPEYNKNTSKFDGTRLYESTKDGKVPSEQKRVQFLGDKNKNCTLSIHPVHLNDSGQLGLRMESKTEKWMERIHLNVSERPFPPHIQ

SEQ ID NO: 13004 - protein, 164 aa, Homo sapiens
  Payload ID: 2532
  Gene Symbol: CD22
  Gene Name: CD22 molecule
  ENSP ID: ENSP00000469523
MHLLGPWLLLLVLEYLAFSDSSKWVFEHPETLYAWEGACVWIPCTYRALDGDLESFILFHNPEYNKNTSKFDGTRLYESTKDGKVPSEQKRVQFLGDKNKNCTLSIHPVHLNDSGQLGLRMESKTEKWMERIHLNVSDPPKKVTTVIQNPMPIREGDTVTLSCN

SEQ ID NO: 13005 - protein, 106 aa, Homo sapiens
  Payload ID: 2532
  Gene Symbol: CD22
  Gene Name: CD22 molecule
  ENSP ID: ENSP00000469980
MHLLGPWLLLLVLEYLAFSDSSKWVFEHPETLYAWEGACVWIPCTYRALDGDLESFILFHNPEYNKNTSKFDGTRLYESTKDGKVPSEQKRVQFLGDKNKNCTLSI

SEQ ID NO: 13006 - protein, 670 aa, Homo sapiens; identical to SEQ ID NO: 12999
  Payload ID: 2532
  Gene Symbol: CD22
  Gene Name: CD22 molecule
  Uniprot ID: P20273
  ENSP ID: ENSP00000469984

SEQ ID NO: 13007 - protein, 191 aa, Homo sapiens
  Payload ID: 2532
  Gene Symbol: CD22
  Gene Name: CD22 molecule
  ENSP ID: ENSP00000470193
MHLLGPWLLLLEYLAFSDSSKWVFEHPETLYAWEGACVWIPCTYRALDGDLESFILFHNPEYNKNTSKFDGTRLYESTKDGKVPSEQKRVQFLGDKNKNCTLSIHPVHLNDSGQLGLRMESKTEKWMERIHLNVSVAPRGGSNEAGCCHLDLLDHQVCLHPERAQVLPTVESPWEDCDLPASGCRWEVPLQ

SEQ ID NO: 13008 - protein, 38 aa, Homo sapiens
  Payload ID: 2532
  Gene Symbol: CD22
  Gene Name: CD22 molecule
  ENSP ID: ENSP00000470681
MHLLGPWLLLLVNGFLSTLKPSTPGRGPASGSPAPTEP

SEQ ID NO: 13009 - protein, 148 aa, Homo sapiens
  Payload ID: 2532
  Gene Symbol: CD22
  Gene Name: CD22 molecule
  ENSP ID: ENSP00000470724
VLEYLAFSDSSKWVFEHPETLYAWEGACVWIPCTYRALDGDLESFILFHNPEYNKNTSKFDGTRLYESTKDGKVPSEQKRVQFLGDKNKNCTLSIHPVHLNDSGQLGLRMESKTEKWMERIHLNVSVESPWEDCDLPASGCRWEVPLQ

SEQ ID NO: 13010 - protein, 158 aa, Homo sapiens
  Payload ID: 2532
  Gene Symbol: CD22
  Gene Name: CD22 molecule
  ENSP ID: ENSP00000471399
MHLLGPWLLLLEYLAFSDSSKWVFEHPETLYAWEGACVWIPCTYRALDGDLESFILFHNPEYNKNTSKFDGTRLYESTKDGKVPSEQKRVQFLGDKNKNCTLSIHPVHLNDSGQLGLRMESKTEKWMERIHLNVSDPPKKVTTVIQNPMPIREGDTVT

SEQ ID NO: 13011 - protein, 225 aa, Homo sapiens
  Payload ID: 2532
  Gene Symbol: CD22
  Gene Name: CD22 molecule
  ENSP ID: ENSP00000471972
MHLLGPWLLLLVLEYLAFSDSSKWVFEHPETLYAWEGACVWIPCTYRALDGDLESFILFHNPEYNKNTSKFDGTRLYESTKDGKVPSEQKRVQFLGDKNKNCTLSIHPVHLNDSGQLGLRMESKTEKWMERIHLNVSERPFPPHIQLPPEIQESQEVTLTCLLNFSCYGYPIQLQWLLEGVPMRQAAVTSTSLTIKSVFTRSELKFSPQWSHHGKIVTCQLQDAD

SEQ ID NO: 13012 - protein, 133 aa, Homo sapiens
  Payload ID: 2532
  Gene Symbol: CD22
  Gene Name: CD22 molecule
  ENSP ID: ENSP00000472664
MHLLGPWLLLLVLEYLAFSDSSKWVFEHPETLYAWEGACVWIPCTYRALDGDLESFILFHNPEYNKNTSKFDGTRLYESTKDGKVPSEQKRVQFLGDKNKNCTLSIHPVHLNDSGQLGLRMESKTEKWMERIH

SEQ ID NO: 13013 - protein, 137 aa, Homo sapiens
  Payload ID: 2532
  Gene Symbol: CD22
  Gene Name: CD22 molecule
  ENSP ID: ENSP00000472762
MHLLGPWLLLLEYLAFSDSSKWVFEHPETLYAWEGACVWIPCTYRALDGDLESFILFHNPEYNKNTSKFDGTRLYESTKDGKVPSEQKRVQFLGDKNKNCTLSIHPVHLNDSGQLGLRMESKTEKWMERIHLNVSER

SEQ ID NO: 13014 - protein, 145 aa, Homo sapiens
  Payload ID: 2532
  Gene Symbol: CD22
  Gene Name: CD22 molecule
  ENSP ID: ENSP00000473221
NPLPTNYTWYHNGKEMQGRTEEKVHIPKILPWHAGTYSCVAENILGTGQRGPGAELDVQYPPKKVTTVIQNPMPIREGDTVTLSCNYNSSNPSVTRYEWKPHGAWEEPSLGVLKIQNVGWDNTTIACAACNSWCSWASPVALNVQ

SEQ ID NO: 13015 - protein, 153 aa, Homo sapiens
  Payload ID: 2532
  Gene Symbol: CD22
  Gene Name: CD22 molecule
  ENSP ID: ENSP00000482823
HIQLPPEIQESQEVTLTCLLNFSCYGYPIQLQWLLEGVPMRQAAVTSTSLTIKSVFTRSELKFSPQWSHHGKIVTCQLQDADGKFLSNDTVQLNVKRESPRHACGKGKVCVTFSPAPQGACTQGRGKPAQTAASSSPGHAALSALVFREKDLL

SEQ ID NO: 13016 - protein, 336 aa, Homo sapiens
  Payload ID: 2533
  Gene Symbol: CD226
  Gene Name: CD226 molecule
  Uniprot ID: Q15762
  ENSP ID: ENSP00000280200
MDYPTLLLALLHVYRALCEEVLWHTSVPFAENMSLECVYPSMGILTQVEWFKIGTQQDSIAIFSPTHGMVIRKPYAERVYFLNSTMASNNMTLFFRNASEDDVGYYSCSLYTYPQGTWQKVIQVVQSDSFEAAVPSNSHIVSEPGKNVTLTCQPQMTWPVQAVRWEKIQPRQIDLLTYCNLVHGRNFTSKFPRQIVSNCSHGRWSVIVIPDVTVSDSGLYRCYLQASAGENETFVMRLTVAEGKTDNQYTLFVAGGTVLLLLFVISITTIIVIFLNRRRRRERRDLFTESWDTQKAPNNYRSPISTSQPTNQSMDDTREDIYVNYPTFSRRPKTRV

SEQ ID NO: 13017 - protein, 336 aa, Homo sapiens; identical to SEQ ID NO: 13016
  Payload ID: 2533
  Gene Symbol: CD226
  Gene Name: CD226 molecule
  Uniprot ID: Q15762
  ENSP ID: ENSP00000461947

SEQ ID NO: 13018 - protein, 181 aa, Homo sapiens
  Payload ID: 2533
  Gene Symbol: CD226
  Gene Name: CD226 molecule
  ENSP ID: ENSP00000462453
MTWPVQAVRWEKIQPRQIDLLTYCNLVHGRNFTSKFPRQIVSNCSHGRWSVIVIPDVTVSDSGLYRCYLQASAGENETFVMRLTVAEGKTDNQYTLFVAGGTVLLLLFVISITTIIVIFLNRRRRRERRDLFTESWDTQKAPNNYRSPISTSQPTNQSMDDTREDIYVNYPTFSRRPKTRV

SEQ ID NO: 13019 - protein, 37 aa, Homo sapiens
  Payload ID: 2533
  Gene Symbol: CD226
  Gene Name: CD226 molecule
  ENSP ID: ENSP00000463152
IVIPDVTVSDSGLYRCYLQASAGENETFVMRLTVAEG

SEQ ID NO: 13020 - protein, 127 aa, Homo sapiens
  Payload ID: 2533
  Gene Symbol: CD226
  Gene Name: CD226 molecule
  ENSP ID: ENSP00000463335
MDYPTLLLALLHVYRALCEEVLWHTSVPFAENMSLECVYPSMGILTQVEWFKIGTQQDSIAIFSPTHGMVIRKPYAERVYFLNSTMASNNMTLFFRNASEDDVGYYSCSLYTYPQGTWQKVIQVVQS

SEQ ID NO: 13021 - protein, 276 aa, Homo sapiens
  Payload ID: 2533
  Gene Symbol: CD226
  Gene Name: CD226 molecule
  ENSP ID: ENSP00000463927
MDYPTLLLALLHVYRALCEEVLWHTSVPFAENMSLECVYPSMGILTQVEWFKIGTQQDSIAIFSPTHGMVIRKPYAERVYFLNSTMASNNMTLFFRNASEDDVGYYSCSLYTYPQGTWQKVIQVVQSDSFEAAVPSNSHIVSEPGKNVTLTCQPQMTWPVQAVRWEKIQPRQIDLLTYCNLVHGRNFTSKFPRQIVSNCSHGRWSVIVIPDVTVSDSGLYRCYLQASAGENETFVMRLTVAEGKTDNQYTLFVAGGTVLLLLFVISITTIIVIFLN

SEQ ID NO: 13022 - protein, 181 aa, Homo sapiens; identical to SEQ ID NO: 13018
  Payload ID: 2533
  Gene Symbol: CD226
  Gene Name: CD226 molecule
  ENSP ID: ENSP00000464084

SEQ ID NO: 13023 - protein, 132 aa, Homo sapiens
  Payload ID: 2533
  Gene Symbol: CD226
  Gene Name: CD226 molecule
  ENSP ID: ENSP00000464334
MDYPTLLLALLHVYRALCEEVLWHTSVPFAENMSLECVYPSMGILTQVEWFKIGTQQDSIAIFSPTHGMVIRKPYAERVYFLNSTMASNNMTLFFRNASEDDVGYYSCSLYTYPQGTWQKVIQVVQSDSFEA

SEQ ID NO: 13024 - protein, 80 aa, Homo sapiens
  Payload ID: 2534
  Gene Symbol: CD24
  Gene Name: CD24 molecule
  ENSP ID: ENSP00000475625
MGRAMVARLGLGLLLLALLLPTQIYSSETTTGTSSNSSQSTSNSGLAPNPTNATTKAAGGALQSTASLFVVSLSLLHLYS

SEQ ID NO: 13025 - protein, 37 aa, Homo sapiens
  Payload ID: 2534
  Gene Symbol: CD24
  Gene Name: CD24 molecule
  ENSP ID: ENSP00000478302
MGRAMVARLGLGLLLLALLLPTQKMLRIPNLIDLKNM

SEQ ID NO: 13026 - protein, 88 aa, Homo sapiens
  Payload ID: 2534
  Gene Symbol: CD24
  Gene Name: CD24 molecule
  ENSP ID: ENSP00000478460
  MOD_RES (1)..(1): Any amino acid
XDRSGPGHRLRGAPTSREGFALGGARVPSARIYSSETTTGTSSNSSQSTSNSGLAPNPTNATTKAAGGALQSTASLFVVSLSLLHLYS

SEQ ID NO: 13027 - protein, 122 aa, Homo sapiens
  Payload ID: 2534
  Gene Symbol: CD24
  Gene Name: CD24 molecule
  ENSP ID: ENSP00000479895
  MOD_RES (1)..(1): Any amino acid
XLSSAAGREITLPEGSRRPPPTRSHWNSQPLSGPRGAFCSLSGNALAPGQAATPPQRRRGLFFWGIYSSETTTGTSSNSSQSTSNSGLAPNPTNATTKAAGGALQSTASLFVVSLSLLHLYS

SEQ ID NO: 13028 - protein, 129 aa, Homo sapiens
  Payload ID: 2534
  Gene Symbol: CD24
  Gene Name: CD24 molecule
  ENSP ID: ENSP00000481841
MVGRFCPESPPGFVRVAATSAVSLDPPSGEPRPGCGYPGPRSAASRVYGCTAPARETGGWAWETLAGAGAKKIYSSETTTGTSSNSSQSTSNSGLAPNPTNATTKAAGGALQSTASLFVVSLSLLHLYS

SEQ ID NO: 13029 - protein, 80 aa, Homo sapiens; identical to SEQ ID NO: 13024
  Payload ID: 2534
  Gene Symbol: CD24
  Gene Name: CD24 molecule
  ENSP ID: ENSP00000483838

SEQ ID NO: 13030 - protein, 80 aa, Homo sapiens; identical to SEQ ID NO: 13024
  Payload ID: 2534
  Gene Symbol: CD24
  Gene Name: CD24 molecule
  ENSP ID: ENSP00000483985

SEQ ID NO: 13031 - protein, 273 aa, Homo sapiens
  Payload ID: 2535
  Gene Symbol: CD244
  Gene Name: CD244 molecule, natural killer cell receptor 2B4
  Uniprot ID: Q9BZW8
  ENSP ID: ENSP00000313619
MLGQVVTLILLLLLKVYQGKGCQGSADHVVSISGVPLQLQPNSIQTKVDSIAWKKLLPSQNGFHHILKWENGSLPSNTSNDRFSFIVKNLSLLIKAAQQQDSGLYCLEVTSISGKVQTATFQVFVFEFRFWPFLVIIVILSALFLGTLACFCVWRRKRKEKQSETSPKEFLTIYEDVKDLKTRRNHEQEQTFPGGGSTIYSMIQSQSSAPTSQEPAYTLYSLIQPSRKSGSRKRNHSPSFNSTIYEVIGKSQPKAQNPARLSRKELENFDVYS

SEQ ID NO: 13032 - protein, 370 aa, Homo sapiens
  Payload ID: 2535
  Gene Symbol: CD244
  Gene Name: CD244 molecule, natural killer cell receptor 2B4
  Uniprot ID: Q9BZW8
  ENSP ID: ENSP00000357012
MLGQVVTLILLLLLKVYQGKGCQGSADHVVSISGVPLQLQPNSIQTKVDSIAWKKLLPSQNGFHHILKWENGSLPSNTSNDRFSFIVKNLSLLIKAAQQQDSGLYCLEVTSISGKVQTATFQVFVFESLLPDKVEKPRLQGQGKILDRGRCQVALSCLVSRDGNVSYAWYRGSKLIQTAGNLTYLDEEVDINGTHTYTCNVSNPVSWESHTLNLTQDCQNAHQEFRFWPFLVIIVILSALFLGTLACFCVWRRKRKEKQSETSPKEFLTIYEDVKDLKTRRNHEQEQTFPGGGSTIYSMIQSQSSAPTSQEPAYTLYSLIQPSRKSGSRKRNHSPSFNSTIYEVIGKSQPKAQNPARLSRKELENFDVYS

SEQ ID NO: 13033 - protein, 365 aa, Homo sapiens
  Payload ID: 2535
  Gene Symbol: CD244
  Gene Name: CD244 molecule, natural killer cell receptor 2B4
  Uniprot ID: Q9BZW8
  ENSP ID: ENSP00000357013
MLGQVVTLILLLLLKVYQGKGCQGSADHVVSISGVPLQLQPNSIQTKVDSIAWKKLLPSQNGFHHILKWENGSLPSNTSNDRFSFIVKNLSLLIKAAQQQDSGLYCLEVTSISGKVQTATFQVFVFDKVEKPRLQGQGKILDRGRCQVALSCLVSRDGNVSYAWYRGSKLIQTAGNLTYLDEEVDINGTHTYTCNVSNPVSWESHTLNLTQDCQNAHQEFRFWPFLVIIVILSALFLGTLACFCVWRRKRKEKQSETSPKEFLTIYEDVKDLKTRRNHEQEQTFPGGGSTIYSMIQSQSSAPTSQEPAYTLYSLIQPSRKSGSRKRNHSPSFNSTIYEVIGKSQPKAQNPARLSRKELENFDVYS

SEQ ID NO: 13034 - protein, 329 aa, Homo sapiens
  Payload ID: 2535
  Gene Symbol: CD244
  Gene Name: CD244 molecule, natural killer cell receptor 2B4
  Uniprot ID: Q9BZW8
  ENSP ID: ENSP00000432636
MLGQVVTLILLLLLKVYQGKGCQGSADHVVSISGVPLQLQPNSIQTKVDSIAWKKLLPSQNGFHHILKWENGSLPSNTSNDRFSFIVKNLSLLIKAAQQQDSGLYCLEVTSISGKVQTATFQVFVFDKVEKPRLQGQGKILDRGRCQVALSCLVSRDGNVSYAWYRGSKLIQTAGNLTYLDEEVDINGTHTYTCNVSNPVSWESHTLNLTQDCQNAHQEFRFWPFLVIIVILSALFLGTLACFCVWRRKRKEKQSETSPKEFLTIYEDVKDLKTRRNHEQEQTFPGGGSTIYSMIQSQSSAPTSQEPAYTLYSLIQPSRKGDRFYSFSG

SEQ ID NO: 13035 - protein, 164 aa, Homo sapiens
  Payload ID: 2536
  Gene Symbol: CD247
  Gene Name: CD247 molecule
  Uniprot ID: P20963
  ENSP ID: ENSP00000354782
MKWKALFTAAILQAQLPITEAQSFGLLDPKLCYLLDGILFIYGVILTALFLRVKFSRSADAPAYQQGQNQLYNELNLGRREEYDVLDKRRGRDPEMGGKPQRRKNPQEGLYNELQKDKMAEAYSEIGMKGERRRGKGHDGLYQGLSTATKDTYDALHMQALPPR

SEQ ID NO: 13036 - protein, 163 aa, Homo sapiens
  Payload ID: 2536
  Gene Symbol: CD247
  Gene Name: CD247 molecule
  Uniprot ID: P20963
  ENSP ID: ENSP00000375969
MKWKALFTAAILQAQLPITEAQSFGLLDPKLCYLLDGILFIYGVILTALFLRVKFSRSADAPAYQQGQNQLYNELNLGRREEYDVLDKRRGRDPEMGGKPRRKNPQEGLYNELQKDKMAEAYSEIGMKGERRRGKGHDGLYQGLSTATKDTYDALHMQALPPR

SEQ ID NO: 13037 - protein, 757 aa, Homo sapiens
  Payload ID: 2537
  Gene Symbol: CD248
  Gene Name: CD248 molecule, endosialin
  Uniprot ID: Q9HCU0
  ENSP ID: ENSP00000308117
MLLRLLLAWAAAGPTLGQDPWAAEPRAACGPSSCYALFPRRRTFLEAWRACRELGGDLATPRTPEEAQRVDSLVGAGPASRLLWIGLQRQARQCQLQRPLRGFTWTTGDQDTAFTNWAQPASGGPCPAQRCVALEASGEHRWLEGSCTLAVDGYLCQFGFEGACPALQDEAGQAGPAVYTTPFHLVSTEFEWLPFGSVAAVQCQAGRGASLLCVKQPEGGVGWSRAGPLCLGTGCSPDNGGCEHECVEEVDGHVSCRCTEGFRLAADGRSCEDPCAQAPCEQQCEPGGPQGYSCHCRLGFRPAEDDPHRCVDTDECQIAGVCQQMCVNYVGGFECYCSEGHELEADGISCSPAGAMGAQASQDLGDELLDDGEDEEDEDEAWKAFNGGWTEMPGILWMEPTQPPDFALAYRPSFPEDREPQIPYPEPTWPPPLSAPRVPYHSSVLSVTRPVVVSATHPTLPSAHQPPVIPATHPALSRDHQIPVIAANYPDLPSAYQPGILSVSHSAQPPAHQPPMISTKYPELFPAHQSPMFPDTRVAGTQTTTHLPGIPPNHAPLVTTLGAQLPPQAPDALVLRTQATQLPIIPTAQPSLTTTSRSPVSPAHQISVPAATQPAALPTLLPSQSPTNQTSPISPTHPHSKAPQIPREDGPSPKLALWLPSPAPTAAPTALGEAGLAEHSQRDDRWLLVALLVPTCVFLVVLLALGIVYCTRCGPHAPNKRITDCYRWVIHAGSKSPTEPMPPRGSLTGVQTCRTSV

SEQ ID NO: 13038 - protein, 260 aa, Homo sapiens
  Payload ID: 2538
  Gene Symbol: CD27
  Gene Name: CD27 molecule
  Uniprot ID: P26842
  ENSP ID: ENSP00000266557
MARPHPWWLCVLGTLVGLSATPAPKSCPERHYWAQGKLCCQMCEPGTFLVKDCDQHRKAAQCDPCIPGVSFSPDHHTRPHCESCRHCNSGLLVRNCTITANAECACRNGWQCRDKECTECDPLPNPSLTARSSQALSPHPQPTHLPYVSEMLEARTAGHMQTLADFRQLPARTLSTHWPPQRSLCSSDFIRILVIFSGMFLVFTLAGALFLHQRRKYRSNKGESPVEPAEPCHYSCPREEEGSTIPIQEDYRKPEPACSP

SEQ ID NO: 13039 - protein, 176 aa, Homo sapiens
  Payload ID: 2539
  Gene Symbol: CD274
  Gene Name: CD274 molecule
  Uniprot ID: Q9NZQ7
  ENSP ID: ENSP00000370985
MRIFAVFIFMTYWHLLNAPYNKINQRILVVDPVTSEHELTCQAEGYPKAEVIWTSSDHQVLSGKTTTTNSKREEKLFNVTSTLRINTTTNEIFYCTFRRLDPEENHTAELVIPELPLAHPPNERTHLVILGAILLCLGVALTFIFRLRKGRMMDVKKCGIQDTNSKKQSDTHLEET

SEQ ID NO: 13040 - protein, 290 aa, Homo sapiens
  Payload ID: 2539
  Gene Symbol: CD274
  Gene Name: CD274 molecule
  Uniprot ID: Q9NZQ7
  ENSP ID: ENSP00000370989
MRIFAVFIFMTYWHLLNAFTVTVPKDLYVVEYGSNMTIECKFPVEKQLDLAALIVYWEMEDKNIIQFVHGEEDLKVQHSSYRQRARLLKDQLSLGNAALQITDVKLQDAGVYRCMISYGGADYKRITVKVNAPYNKINQRILVVDPVTSEHELTCQAEGYPKAEVIWTSSDHQVLSGKTTTTNSKREEKLFNVTSTLRINTTTNEIFYCTFRRLDPEENHTAELVIPELPLAHPPNERTHLVILGAILLCLGVALTFIFRLRKGRMMDVKKCGIQDTNSKKQSDTHLEET

SEQ ID NO: 13041 - protein, 316 aa, Homo sapiens
  Payload ID: 2540
  Gene Symbol: CD276
  Gene Name: CD276 molecule
  Uniprot ID: Q5ZPR3
  ENSP ID: ENSP00000320058
MLRRRGSPGMGVHVGAALGALWFCLTGALEVQVPEDPVVALVGTDATLCCSFSPEPGFSLAQLNLIWQLTDTKQLVHSFAEGQDQGSAYANRTALFPDLLAQGNASLRLQRVRVADEGSFTCFVSIRDFGSAAVSLQVAAPYSKPSMTLEPNKDLRPGDTVTITCSSYRGYPEAEVFWQDGQGVPLTGNVTTSQMANEQGLFDVHSVLRVVLGANGTYSCLVRNPVLQQDAHGSVTITGQPMTFPPEALWVTVGLSVCLIALLVALAFVCWRKIKQSCEEENAGAEDQDGEGEGSKTALQPLKHSDSKEDDGQEIA

SEQ ID NO: 13042 - protein, 534 aa, Homo sapiens
  Payload ID: 2540
  Gene Symbol: CD276
  Gene Name: CD276 molecule
  Uniprot ID: Q5ZPR3
  ENSP ID: ENSP00000320084
MLRRRGSPGMGVHVGAALGALWFCLTGALEVQVPEDPVVALVGTDATLCCSFSPEPGFSLAQLNLIWQLTDTKQLVHSFAEGQDQGSAYANRTALFPDLLAQGNASLRLQRVRVADEGSFTCFVSIRDFGSAAVSLQVAAPYSKPSMTLEPNKDLRPGDTVTITCSSYQGYPEAEVFWQDGQGVPLTGNVTTSQMANEQGLFDVHSILRVVLGANGTYSCLVRNPVLQQDAHSSVTITPQRSPTGAVEVQVPEDPVVALVGTDATLRCSFSPEPGFSLAQLNLIWQLTDTKQLVHSFTEGRDQGSAYANRTALFPDLLAQGNASLRLQRVRVADEGSFTCFVSIRDFGSAAVSLQVAAPYSKPSMTLEPNKDLRPGDTVTITCSSYRGYPEAEVFWQDGQGVPLTGNVTTSQMANEQGLFDVHSVLRVVLGANGTYSCLVRNPVLQQDAHGSVTITGQPMTFPPEALWVTVGLSVCLIALLVALAFVCWRKIKQSCEEENAGAEDQDGEGEGSKTALQPLKHSDSKEDDGQEIA

SEQ ID NO: 13043 - protein, 388 aa, Homo sapiens
  Payload ID: 2540
  Gene Symbol: CD276
  Gene Name: CD276 molecule
  ENSP ID: ENSP00000441087
MTLEPNKDLRPGDTVTITCSSYQGYPEAEVFWQDGQGVPLTGNVTTSQMANEQGLFDVHSILRVVLGANGTYSCLVRNPVLQQDAHSSVTITPQRSPTGAVEVQVPEDPVVALVGTDATLRCSFSPEPGFSLAQLNLIWQLTDTKQLVHSFTEGRDQGSAYANRTALFPDLLAQGNASLRLQRVRVADEGSFTCFVSIRDFGSAAVSLQVAAPYSKPSMTLEPNKDLRPGDTVTITCSSYRGYPEAEVFWQDGQGVPLTGNVTTSQMANEQGLFDVHSVLRVVLGANGTYSCLVRNPVLQQDAHGSVTITGQPMTFPPEALWVTVGLSVCLIALLVALAFVCWRKIKQSCEEENAGAEDQDGEGEGSKTALQPLKHSDSKEDDGQEIA

SEQ ID NO: 13044 - protein, 156 aa, Homo sapiens
  Payload ID: 2540
  Gene Symbol: CD276
  Gene Name: CD276 molecule
  ENSP ID: ENSP00000452649
MLRRRGSPGMGVHVGAALGALWFCLTGALEVQVPEDPVVALVGTDATLCCSFSPEPGFSLAQLNLIWQLTDTKQLVHSFAEGQDQGSAYANRTALFPDLLAQGNASLRLQRVRVADEGSFTCFVSIRDFGSAAVSLQVAAPYSKPSMTLEPNKDLR

SEQ ID NO: 13045 - protein, 165 aa, Homo sapiens
  Payload ID: 2540
  Gene Symbol: CD276
  Gene Name: CD276 molecule
  ENSP ID: ENSP00000452669
MLRRRGSPGMGVHVGAALGALWFCLTGALEVQVPEDPVVALVGTDATLCCSFSPEPGFSLAQLNLIWQLTDTKQLVHSFAEGQDQGSAYANRTALFPDLLAQGNASLRLQRVRVADEGSFTCFVSIRDFGSAAVSLQVAAPYSKPSMTLEPNKDLRPGDTVTITC

SEQ ID NO: 13046 - protein, 533 aa, Homo sapiens
  Payload ID: 2540
  Gene Symbol: CD276
  Gene Name: CD276 molecule
  Uniprot ID: Q5ZPR3
  ENSP ID: ENSP00000452736
MLRRRGSPGMGVHVGAALGALWFCLTGALEVQVPEDPVVALVGTDATLCCSFSPEPGFSLAQLNLIWQLTDTKQLVHSFAEGQDQGSAYANRTALFPDLLAQGNASLRLQRVRVADEGSFTCFVSIRDFGSAAVSLQVAAPYSKPSMTLEPNKDLRPGDTVTITCSSYQGYPEAEVFWQDGQGVPLTGNVTTSQMANEQGLFDVHSILRVVLGANGTYSCLVRNPVLQQDAHSSVTITPQRSPTGAVEVQVPEDPVVALVGTDATLRCSFSPEPGFSLAQLNLIWQLTDTKQLVHSFTEGRDQGSAYANRTALFPDLLAQGNASLRLQRVRVADEGSFTCFVSIRDFGSAAVSLQVAAPYSKPSMTLEPNKDLRPGDTVTITCSSYRGYPEAEVFWQDGQGVPLTGNVTTSQMANEQGLFDVHSVLRVVLGANGTYSCLVRNPVLQQDAHGSVTITGQPMTFPPEALWVTVGLSVCLIALLVALAFVCWRKIKQSCEEENAGAEDQDGEGEGSKTALQPLKHSDSKEGKDTWA

SEQ ID NO: 13047 - protein, 51 aa, Homo sapiens
  Payload ID: 2540
  Gene Symbol: CD276
  Gene Name: CD276 molecule
  ENSP ID: ENSP00000452905
MLRRRGSPGMGVHVGAALGALWFCLTGALEVQVPEDPVVALVGTDATLCCS

SEQ ID NO: 13048 - protein, 199 aa, Homo sapiens
  Payload ID: 2540
  Gene Symbol: CD276
  Gene Name: CD276 molecule
  ENSP ID: ENSP00000453014
  MOD_RES (1)..(1): Any amino acid
XRVRVADEGSFTCFVSIRDFGSAAVSLQVAAPYSKPSMTLEPNKDLRPGDTVTITCSSYRGYPEAEVFWQDGQGVPLTGNVTTSQMANEQGLFDVHSVLRVVLGANGTYSCLVRNPVLQQDAHGSVTITEALWVTVGLSVCLIALLVALAFVCWRKIKQSCEEENAGAEDQDGEGEGSKTALQPLKHSDSKEDDGQEIA

SEQ ID NO: 13049 - protein, 38 aa, Homo sapiens
  Payload ID: 2540
  Gene Symbol: CD276
  Gene Name: CD276 molecule
  ENSP ID: ENSP00000453330
MLRRRGSPGMGVHVGAALGALWFCLTADRYQTAGAQLC

SEQ ID NO: 13050 - protein, 132 aa, Homo sapiens
  Payload ID: 2540
  Gene Symbol: CD276
  Gene Name: CD276 molecule
  ENSP ID: ENSP00000453336
MLRRRGSPGMGVHVGAALGALWFCLTGALEVQVPEDPVVALVGTDATLCCSFSPEPGFSLAQLNLIWQLTDTKQLVHSFAEGQDQGSAYANRTALFPDLLAQGNASLRLQRVRVADEGSFTCFVSIRDFGSA

SEQ ID NO: 13051 - protein, 170 aa, Homo sapiens
  Payload ID: 2540
  Gene Symbol: CD276
  Gene Name: CD276 molecule
  ENSP ID: ENSP00000453842
  MOD_RES (1)..(1): Any amino acid
XTLEPNKDLRPGDTVTITCSSYRGYPEAEVFWQDGQGVPLTGNVTTSQMANEQGLFDVHSVLRVVLGANGTYSCLVRNPVLQQDAHGSVTITGQPMTFPPEALWVTVGLSVCLIALLVALAFVCWRKIKQSCEEENAGAEDQDGEGEGSKTALQPLKHSDSKEDDGQEIA

SEQ ID NO: 13052 - protein, 136 aa, Homo sapiens
  Payload ID: 2540
  Gene Symbol: CD276
  Gene Name: CD276 molecule
  ENSP ID: ENSP00000453907
MLRRRGSPGMGVHVGAALGALWFCLTGALEVQVPEDPVVALVGTDATLCCSFSPEPGFSLAQLNLIWQLTDTKQLVHSFAEGQDQGSAYANRTALFPDLLAQGNASLRLQRVRVADEGSFTCFVSIRDFGSAAVSL

SEQ ID NO: 13053 - protein, 146 aa, Homo sapiens
  Payload ID: 2540
  Gene Symbol: CD276
  Gene Name: CD276 molecule
  ENSP ID: ENSP00000454258
MSLKAPMSSRKKKLYLQQHCEAGAAFHHGEPSCQPPHRKMLRRRGSPGMGVHVGAALGALWFCLTGALEVQVPEDPVVALVGTDATLCCSFSPEPGFSLAQLNLIWQLTDTKQLVHSFAEGQDQGSAYANRTALFPDLLAQGNASL

SEQ ID NO: 13054 - protein, 316 aa, Homo sapiens; identical to SEQ ID NO: 13041
  Payload ID: 2540
  Gene Symbol: CD276
  Gene Name: CD276 molecule
  Uniprot ID: Q5ZPR3
  ENSP ID: ENSP00000454940

SEQ ID NO: 13055 - protein, 132 aa, Homo sapiens; identical to SEQ ID NO: 13050
  Payload ID: 2540
  Gene Symbol: CD276
  Gene Name: CD276 molecule
  ENSP ID: ENSP00000455366

SEQ ID NO: 13056 - protein, 38 aa, Homo sapiens; identical to SEQ ID NO: 13049
  Payload ID: 2540
  Gene Symbol: CD276
  Gene Name: CD276 molecule
  ENSP ID: ENSP00000456657

SEQ ID NO: 13057 - protein, 220 aa, Homo sapiens
  Payload ID: 2541
  Gene Symbol: CD28
  Gene Name: CD28 molecule
  Uniprot ID: P10747
  ENSP ID: ENSP00000324890
MLRLLLALNLFPSIQVTGNKILVKQSPMLVAYDNAVNLSCKYSYNLFSREFRASLHKGLDSAVEVCVVYGNYSQQLQVYSKTGFNCDGKLGNESVTFYLQNLYVNQTDIYFCKIEVMYPPPYLDNEKSNGTIIHVKGKHLCPSPLFPGPSKPFWVLVVVGGVLACYSLLVTVAFIIFWVRSKRSRLLHSDYMNMTPRRPGPTRKHYQPYAPPRDFAAYRS

SEQ ID NO: 13058 - protein, 101 aa, Homo sapiens
  Payload ID: 2541
  Gene Symbol: CD28
  Gene Name: CD28 molecule
  Uniprot ID: P10747
  ENSP ID: ENSP00000363605
MLRLLLALNLFPSIQVTGKHLCPSPLFPGPSKPFWVLVVVGGVLACYSLLVTVAFIIFWVRSKRSRLLHSDYMNMTPRRPGPTRKHYQPYAPPRDFAAYRS

SEQ ID NO: 13059 - protein, 234 aa, Homo sapiens
  Payload ID: 2541
  Gene Symbol: CD28
  Gene Name: CD28 molecule
  Uniprot ID: P10747
  ENSP ID: ENSP00000393648
MPCGLSALIMCPKGMVAVVVAVDDGDSQALAGNKILVKQSPMLVAYDNAVNLSCKYSYNLFSREFRASLHKGLDSAVEVCVVYGNYSQQLQVYSKTGFNCDGKLGNESVTFYLQNLYVNQTDIYFCKIEVMYPPPYLDNEKSNGTIIHVKGKHLCPSPLFPGPSKPFWVLVVVGGVLACYSLLVTVAFIIFWVRSKRSRLLHSDYMNMTPRRPGPTRKHYQPYAPPRDFAAYRS

SEQ ID NO: 13060 - protein, 639 aa, Homo sapiens
  Payload ID: 2542
  Gene Symbol: CD2AP
  Gene Name: CD2-associated protein
  Uniprot ID: Q9Y5K6
  ENSP ID: ENSP00000352264
MVDYIVEYDYDAVHDDELTIRVGEIIRNVKKLQEEGWLEGELNGRRGMFPDNFVKEIKRETEFKDDSLPIKRERHGNVASLVQRISTYGLPAGGIQPHPQTKNIKKKTKKRQCKVLFEYIPQNEDELELKVGDIIDINEEVEEGWWSGTLNNKLGLFPSNFVKELEVTDDGETHEAQDDSETVLAGPTSPIPSLGNVSETASGSVTQPKKIRGIGFGDIFKEGSVKLRTRTSSSETEEKKPEKPLILQSLGPKTQSVEITKTDTEGKIKAKEYCRTLFAYEGTNEDELTFKEGEIIHLISKETGEAGWWRGELNGKEGVFPDNFAVQINELDKDFPKPKKPPPPAKAPAPKPELIAAEKKYFSLKPEEKDEKSTLEQKPSKPAAPQVPPKKPTPPTKASNLLRSSGTVYPKRPEKPVPPPPPIAKINGEVSSISSKFETEPVSKLKLDSEQLPLRPKSVDFDSLTVRTSKETDVVNFDDIASSENLLHLTANRPKMPGRRLPGRFNGGHSPTHSPEKILKLPKEEDSANLKPSELKKDTCYSPKPSVYLSTPSSASKANTTAFLTPLEIKAKVETDDVKKNSLDELRAQIIELLCIVEALKKDHGKELEKLRKDLEEEKTMRSNLEMEIEKLKKAVLSS

SEQ ID NO: 13061 - protein, 148 aa, Homo sapiens
  Payload ID: 2543
  Gene Symbol: CD300LB
  Gene Name: CD300 molecule-like family member b
  ENSP ID: ENSP00000317337
MWLPPALLLLSLSGCFSIQGPESVRAPEQGSLTVQCHYKQGWETYIKWWCRGVRWDTCKILIETRGSEQGEKSDRVSIKDNQKDRTFTVTMEGLRRDDADVYWCGIERRGPDLGTQVKVIVDPEGAASTTASSPTNSNMAVFIGSHKR

SEQ ID NO: 13062 - protein, 201 aa, Homo sapiens
  Payload ID: 2543
  Gene Symbol: CD300LB
  Gene Name: CD300 molecule-like family member b
  Uniprot ID: A8K4G0
  ENSP ID: ENSP00000376397
MWLPPALLLLSLSGCFSIQGPESVRAPEQGSLTVQCHYKQGWETYIKWWCRGVRWDTCKILIETRGSEQGEKSDRVSIKDNQKDRTFTVTMEGLRRDDADVYWCGIERRGPDLGTQVKVIVDPEGAASTTASSPTNSNMAVFIGSHKRNHYMLLVFVKVPILLILVTAILWLKGSQRVPEEPGEQPIYMNFSEPLTKDMAT

SEQ ID NO: 13063 - protein, 194 aa, Homo sapiens
  Payload ID: 2544
  Gene Symbol: CD300LD
  Gene Name: CD300 molecule-like family member d
  Uniprot ID: Q6UXZ3
  ENSP ID: ENSP00000364501
MWLSPSLLLLILPGYSIAAKITGPTTVNGSEQGSLTVQCAYGSGWETYLKWRCQGADWNYCNILVKTNGSEQEVKKNRVSIRDNQKNHVFTVTMENLKRDDADSYWCGTERPGIDLGVKVQVTINPGTQTAVSEWTTTTASLAFTAAATQKTSSPLTRSPLKSTHFLFLFLLELPLLLSMLGTVLWVNRPQRRS

SEQ ID NO: 13064 - protein, 244 aa, Homo sapiens
  Payload ID: 2545
  Gene Symbol: CD300LF
  Gene Name: CD300 molecule-like family member f
  Uniprot ID: Q8TDQ1
  ENSP ID: ENSP00000301573
MPLLTLYLLLFWLSGYSIVTQITGPTTVNGLERGSLTVQCVYRSGWETYLKWWCRGAIWRDCKILVKTSGSEQEVKRDRVSIKDNQKNRTFTVTMEDLMKTDADTYWCGIEKTGNDLGVTVQVTIDPAPVTQEETSSSPTLTGHHLDNRSEGSQAANYRPAAHQAQAPEAQCPPAPHLHHIAAAFGGRLTLGLEDDEVPAESSRDVPRAGTAAPGGRPLLCRPDPAAGRNLPAKGYHEAFLCPG

SEQ ID NO: 13065 - protein, 290 aa, Homo sapiens
  Payload ID: 2545
  Gene Symbol: CD300LF
  Gene Name: CD300 molecule-like family member f
  Uniprot ID: Q8TDQ1
  ENSP ID: ENSP00000327075
MPLLTLYLLLFWLSGYSIVTQITGPTTVNGLERGSLTVQCVYRSGWETYLKWWCRGAIWRDCKILVKTSGSEQEVKRDRVSIKDNQKNRTFTVTMEDLMKTDADTYWCGIEKTGNDLGVTVQVTIDPAPVTQEETSSSPTLTGHHLDNRHKLLKLSVLLPLIFTILLLLLVAASLLAWRMMKYQQKAAGMSPEQVLQPLEGDLCYADLTLQLAGTSPQKATTKLSSAQVDQVEVEYVTMASLPKEDISYASLTLGAEDQEPTYCNMGHLSSHLPGRGPEEPTEYSTISRP

SEQ ID NO: 13066 - protein, 194 aa, Homo sapiens
  Payload ID: 2545
  Gene Symbol: CD300LF
  Gene Name: CD300 molecule-like family member f
  Uniprot ID: Q8TDQ1
  ENSP ID: ENSP00000343751
MWLPQLDLMRVISAKSQGYSIVTQITGPTTVNGLERGSLTVQCVYRSGWETYLKWWCRGAIWRDCKILVKTSGSEQEVKRDRVSIKDNQKNRTFTVTMEDLMKTDADTYWCGIEKTGNDLGVTVQVTIDPAPVTQEETSSSPTLTGHHLDNSSRDVPRAGTAAPGGRPLLCRPDPAAGRNLPAKGYHEAFLCPG

SEQ ID NO: 13067 - protein, 239 aa, Homo sapiens
  Payload ID: 2545
  Gene Symbol: CD300LF
  Gene Name: CD300 molecule-like family member f
  Uniprot ID: Q8TDQ1
  ENSP ID: ENSP00000355294
MWLPQLDLMRVISAKSQGYSIVTQITGPTTVNGLERGSLTVQCVYRSGWETYLKWWCRGAIWRDCKILVKTSGSEQEVKRDRVSIKDNQKNRTFTVTMEDLMKTDADTYWCGIEKTGNDLGVTVQVTIDPASTPAPTTPTSTTFTAPVTQEETSSSPTLTGHHLDNRHKLLKLSVLLPLIFTILLLLLVAASLLAWRMMKYQQKGTAAPGGRPLLCRPDPAAGRNLPAKGYHEAFLCPG

SEQ ID NO: 13068 - protein, 305 aa, Homo sapiens
  Payload ID: 2545
  Gene Symbol: CD300LF
  Gene Name: CD300 molecule-like family member f
  ENSP ID: ENSP00000462309
MPLLTLYLLLFWLSGYSIVTQITGPTTVNGLERGSLTVQCVYRSGWETYLKWWCRGAIWRDCKILVKTSGSEQEVKRDRVSIKDNQKNRTFTVTMEDLMKTDADTYWCGIEKTGNDLGVTVQVTIDPASTPAPTTPTSTTFTAPVTQEETSSSPTLTGHHLDNRHKLLKLSVLLPLIFTILLLLLVAASLLAWRMMKYQQKAAGMSPEQVLQPLEGDLCYADLTLQLAGTSPQKATTKLSSAQVDQVEVEYVTMASLPKEDISYASLTLGAEDQEPTYCNMGHLSSHLPGRGPEEPTEYSTISRP

SEQ ID NO: 13069 - protein, 194 aa, Homo sapiens; identical to SEQ ID NO: 13066
  Payload ID: 2545
  Gene Symbol: CD300LF
  Gene Name: CD300 molecule-like family member f
  Uniprot ID: Q8TDQ1
  ENSP ID: ENSP00000463743

SEQ ID NO: 13070 - protein, 165 aa, Homo sapiens
  Payload ID: 2545
  Gene Symbol: CD300LF
  Gene Name: CD300 molecule-like family member f
  Uniprot ID: Q8TDQ1
  ENSP ID: ENSP00000464223
MWLPQLDLMRVISAKSQGYSIVTQITGPTTVNGLERGSLTVQCVYRSGWETYLKWWCRGAIWRDCKILVKTSGSEQEVKRDRVSIKDNQKNRTFTVTMEDLMKTDADTYWCGIEKTGNDLGVTVQVTIDPAPVTQEETSSSPTLTGHHLDNRYCSPWRATSAMQT

SEQ ID NO: 13071 - protein, 293 aa, Homo sapiens
  Payload ID: 2545
  Gene Symbol: CD300LF
  Gene Name: CD300 molecule-like family member f
  Uniprot ID: Q8TDQ1
  ENSP ID: ENSP00000464257
MWLPQLDLMRVISAKSQGYSIVTQITGPTTVNGLERGSLTVQCVYRSGWETYLKWWCRGAIWRDCKILVKTSGSEQEVKRDRVSIKDNQKNRTFTVTMEDLMKTDADTYWCGIEKTGNDLGVTVQVTIDPAPVTQEETSSSPTLTGHHLDNRHKLLKLSVLLPLIFTILLLLLVAASLLAWRMMKYQQKAAGMSPEQVLQPLEGDLCYADLTLQLAGTSPQKATTKLSSAQVDQVEVEYVTMASLPKEDISYASLTLGAEDQEPTYCNMGHLSSHLPGRGPEEPTEYSTISRP

SEQ ID NO: 13072 - protein, 239 aa, Homo sapiens; identical to SEQ ID NO: 13067
  Payload ID: 2545
  Gene Symbol: CD300LF
  Gene Name: CD300 molecule-like family member f
  Uniprot ID: Q8TDQ1
  ENSP ID: ENSP00000464610

SEQ ID NO: 13073 - protein, 233 aa, Homo sapiens
  Payload ID: 2546
  Gene Symbol: CD300LG
  Gene Name: CD300 molecule-like family member g
  Uniprot ID: Q6UXG3
  ENSP ID: ENSP00000293396
MRLLVLLWGCLLLPGYEALEGPEEISGFEGDTVSLQCTYREELRDHRKYWCRKGGILFSRCSGTIYAEEEGQETMKGRVSIRDSRQELSLIVTLWNLTLQDAGEYWCGVEKRGPDESLLISLFVFPGSSRPPMQLDSTSAEDTSPALSSGSSKPRVSIPMVRILAPVLVLLSLLSAAGLIAFCSHLLLWRKEAQQATETQRNEKFCLSRLNHRTSELDPDEAFEISSLTFLSV

SEQ ID NO: 13074 - protein, 332 aa, Homo sapiens
  Payload ID: 2546
  Gene Symbol: CD300LG
  Gene Name: CD300 molecule-like family member g
  Uniprot ID: Q6UXG3
  ENSP ID: ENSP00000321005
MRLLVLLWGCLLLPGYEALEGPEEISGFEGDTVSLQCTYREELRDHRKYWCRKGGILFSRCSGTIYAEEEGQETMKGRVSIRDSRQELSLIVTLWNLTLQDAGEYWCGVEKRGPDESLLISLFVFPGPCCPPSPSPTFQPLATTRLQPKAKAQQTQPPGLTSPGLYPAATTAKQGKTGAEAPPLPGTSQYGHERTSQYTGTSPHPATSPPAGSSRPPMQLDSTSAEDTSPALSSGSSKPRVSIPMVRILAPVLVLLSLLSAAGLIAFCSHLLLWRKEAQQATETQRNEKFCLSRLTAEEKEAPSQAPEGDVISMPPLHTSEEELGFSKFVSA

SEQ ID NO: 13075 - protein, 273 aa, Homo sapiens
  Payload ID: 2546
  Gene Symbol: CD300LG
  Gene Name: CD300 molecule-like family member g
  Uniprot ID: Q6UXG3
  ENSP ID: ENSP00000366408
MRLLVLLWGCLLLPGYEALEGPEEISGFEGDTVSLQCTYREELRDHRKYWCRKGGILFSRCSGTIYAEEEGQETMKGRVSIRDSRQELSLIVTLWNLTLQDAGEYWCGVEKRGPDESLLISLFVFPASPGLYPAATTAKQGKTGAEAPPLPGTSQYGHERTSQYTGTSPHPATSPPAGSSRPPMQLDSTSAEDTSPALSSGSSKPRVSIPMVRILAPVLVLLSLLSAAGLIAFCSHLLLWRKEAQQATETQRNEKFCLSRLNSLMFSLSLPWL

SEQ ID NO: 13076 - protein, 307 aa, Homo sapiens
  Payload ID: 2546
  Gene Symbol: CD300LG
  Gene Name: CD300 molecule-like family member g
  Uniprot ID: Q6UXG3
  ENSP ID: ENSP00000442368
MRLLVLLWGCLLLPGYEALEGPEEISGFEGDTVSLQCTYREELRDHRKYWCRKGGILFSRCSGTIYAEEEGQETMKGRVSIRDSRQELSLIVTLWNLTLQDAGEYWCGVEKRGPDESLLISLFVFPGPCCPPSPSPTFQPLATTRLQPKAKAQQTQPPGLTSPGLYPAATTAKQGKTGAEAPPLPGTSQYGHERTSQYTGTSPHPATSPPAGSSRPPMQLDSTSAEDTSPALSSGSSKPRVSIPMVRILAPVLVLLSLLSAAGLIAFCSHLLLWRKEAQQATETQRNEKFCLSRLNSLMFSLSLPWL

SEQ ID NO: 13077 - protein, 150 aa, Homo sapiens
  Payload ID: 2546
  Gene Symbol: CD300LG
  Gene Name: CD300 molecule-like family member g
  ENSP ID: ENSP00000465863
MRLLVLLWGCLLLPGYEALEGPEEISGFEGDTVSLQCTYREELRDHRKYWCRKGGILFSRCSGTIYAEEEGQETMKGRVSIRDSRQELSLIVTLWNLTLQDAGEYWCGVEKRGPDESLLISLFVFPGNRYLSFPRLGTGAAEGRGRGGGA

SEQ ID NO: 13078 - protein, 222 aa, Homo sapiens
  Payload ID: 2546
  Gene Symbol: CD300LG
  Gene Name: CD300 molecule-like family member g
  Uniprot ID: Q6UXG3
  ENSP ID: ENSP00000468800
MRLLVLLWGCLLLPGYEALEGPEEISGFEGDTVSLQCTYREELRDHRKYWCRKGGILFSRCSGTIYAEEEGQETMKGRVSIRDSRQELSLIVTLWNLTLQDAGEYWCGVEKRGPDESLLISLFVFPGSSRPPMQLDSTSAEDTSPALSSGSSKPRVSIPMVRILAPVLVLLSLLSAAGLIAFCSHLLLWRKEAQQATETQRNEKFCLSRLNSLMFSLSLPWL

SEQ ID NO: 13079 - protein, 186 aa, Homo sapiens
  Payload ID: 2547
  Gene Symbol: CD300A
  Gene Name: CD300a molecule
  Uniprot ID: Q9UGN4
  ENSP ID: ENSP00000308188
MWLPWALLLLWVPASTSMTPASITAAKTSTITTAFPPVSSTTLFAVGATHSASIQEETEEVVNSQLPLLLSLLALLLLLLVGASLLAWRMFQKWIKAGDHSELSQNPKQAATQSELHYANLELLMWPLQEKPAPPREVEVEYSTVASPREELHYASVVFDSNTNRIAAQRPREEEPDSDYSVIRKT

SEQ ID NO: 13080 - protein, 299 aa, Homo sapiens
  Payload ID: 2547
  Gene Symbol: CD300A
  Gene Name: CD300a molecule
  Uniprot ID: Q9UGN4
  ENSP ID: ENSP00000353259
MWLPWALLLLWVPGCFALSKCRTVAGPVGGSLSVQCPYEKEHRTLNKYWCRPPQIFLCDKIVETKGSAGKRNGRVSIRDSPANLSFTVTLENLTEEDAGTYWCGVDTPWLRDFHDPVVEVEVSVFPASTSMTPASITAAKTSTITTAFPPVSSTTLFAVGATHSASIQEETEEVVNSQLPLLLSLLALLLLLLVGASLLAWRMFQKWIKAGDHSELSQNPKQAATQSELHYANLELLMWPLQEKPAPPREVEVEYSTVASPREELHYASVVFDSNTNRIAAQRPREEEPDSDYSVIRKT

SEQ ID NO: 13081 - protein, 103 aa, Homo sapiens
  Payload ID: 2547
  Gene Symbol: CD300A
  Gene Name: CD300a molecule
  Uniprot ID: Q9UGN4
  ENSP ID: ENSP00000354564
MWLPWALLLLWVPAGDHSELSQNPKQAATQSELHYANLELLMWPLQEKPAPPREVEVEYSTVASPREELHYASVVFDSNTNRIAAQRPREEEPDSDYSVIRKT

SEQ ID NO: 13082 - protein, 150 aa, Homo sapiens
  Payload ID: 2547
  Gene Symbol: CD300A
  Gene Name: CD300a molecule
  Uniprot ID: Q9UGN4
  ENSP ID: ENSP00000376401
MWLPWALLLLWVPASTSMTPASITAAKTSTITTAFPPVSSTTLFAVGATHSASIQEETEEVVNSQLPLLLSLLALLLLLLVGASLLAWRMFQKWIKAGDHSELSQNPKQASPREELHYASVVFDSNTNRIAAQRPREEEPDSDYSVIRKT

SEQ ID NO: 13083 - protein, 169 aa, Homo sapiens
  Payload ID: 2547
  Gene Symbol: CD300A
  Gene Name: CD300a molecule
  ENSP ID: ENSP00000463189
MTPASITAAKTSTITTAFPPVSSTTLFAVGATHSASIQEETEEVVNSQLPLLLSLLALLLLLLVGASLLAWRMFQKWIKAGDHSELSQNPKQAATQSELHYANLELLMWPLQEKPAPPREVEVEYSTVASPREELHYASVVFDSNTNRIAAQRPREEEPDSDYSVIRKT

SEQ ID NO: 13084 - protein, 224 aa, Homo sapiens
  Payload ID: 2548
  Gene Symbol: CD300C
  Gene Name: CD300c molecule
  Uniprot ID: Q08708
  ENSP ID: ENSP00000329507
MTARAWASWRSSALLLLLVPGYFPLSHPMTVAGPVGGSLSVQCRYEKEHRTLNKFWCRPPQILRCDKIVETKGSAGKRNGRVSIRDSPANLSFTVTLENLTEEDAGTYWCGVDTPWLRDFHDPIVEVEVSVFPAGTTTASSPQSSMGTSGPPTKLPVHTWPSVTRKDSPEPSPHPGSLFSNVRFLLLVLLELPLLLSMLGAVLWVNRPQRSSRSRQNWPKGENQ

SEQ ID NO: 13085 - protein, 205 aa, Homo sapiens
  Payload ID: 2549
  Gene Symbol: CD300E
  Gene Name: CD300e molecule
  Uniprot ID: Q496F6
  ENSP ID: ENSP00000376395
MWLLPALLLLCLSGCLSLKGPGSVTGTAGDSLTVWCQYESMYKGYNKYWCRGQYDTSCESIVETKGEEKVERNGRVSIRDHPEALAFTVTMQNLNEDDAGSYWCKIQTVWVLDSWSRDPSDLVRVYVSPAITTPRRTTHPATPPIFLVVNPGRNLSTGEVLTQNSGFRLSSPHFLLVVLLKLPLLLSMLGAVFWVNRPQWAPPGR

SEQ ID NO: 13086 - protein, 121 aa, Homo sapiens
  Payload ID: 2549
  Gene Symbol: CD300E
  Gene Name: CD300e molecule
  ENSP ID: ENSP00000415488
MCHLQEEAGGRWKGGGCLSLKGPGSVTGTAGDSLTVWCQYESMYKGYNKYWCRGQYDTSCESIVETKGEEKVERNGRVSIRDHPEALAFTVTMQNLNEDDAGSYWCKIQTVWVLDSWSRDP

SEQ ID NO: 13087 - protein, 232 aa, Homo sapiens
  Payload ID: 2550
  Gene Symbol: CD302
  Gene Name: CD302 molecule
  Uniprot ID: Q8IX05
  ENSP ID: ENSP00000259053
MLRAALPALLLPLLGLAAAAVADCPSSTWIQFQDSCYIFLQEAIKVESIEDVRNQCTDHGADMISIHNEEENAFILDTLKKQWKGPDDILLGMFYDTDDASFKWFDNSNMTFDKWTDQDDDEDLVDTCAFLHIKTGEWKKGNCEVSSVEGTLCKTAIPYKRKYLSDNHILISALVIASTVILTVLGAIIWFLYKKHSDSRFTTVFSTAPQSPYNEDCVLVVGEENEYPVQFD

SEQ ID NO: 13088 - protein, 174 aa, Homo sapiens
  Payload ID: 2550
  Gene Symbol: CD302
  Gene Name: CD302 molecule
  Uniprot ID: Q8IX05
  ENSP ID: ENSP00000394301
MLRAALPALLLPLLGLAAAAVADCPSSTWIQFQDSCYIFLQEAIKVESIEDVRNQCTDHGADMISIHNEEENAFILDTLKKQWKGPDDILLGMFYDTDVPYKRKYLSDNHILISALVIASTVILTVLGAIIWFLYKKHSDSRFTTVFSTAPQSPYNEDCVLVVGEENEYPVQFD

SEQ ID NO: 13089 - protein, 195 aa, Homo sapiens
  Payload ID: 2550
  Gene Symbol: CD302
  Gene Name: CD302 molecule
  ENSP ID: ENSP00000451446
MLRAALPALLLPLLGLAAAAVAGADMISIHNEEENAFILDTLKKQWKGPDDILLGMFYDTDDASFKWFDNSNMTFDKWTDQDDDEDLVDTCAFLHIKTGEWKKGNCEVSSVEGTLCKTAIPYKRKYLSDNHILISALVIASTVILTVLGAIIWFLYKKHSDSRFTTVFSTAPQSPYNEDCVLVVGEENEYPVQFD

SEQ ID NO: 13090 - protein, 282 aa, Homo sapiens
  Payload ID: 2551
  Gene Symbol: CD320
  Gene Name: CD320 molecule
  Uniprot ID: Q9NPF0
  ENSP ID: ENSP00000301458
MSGGWMAQVGAWRTGALGLALLLLLGLGLGLEAAASPLSTPTSAQAAGPSSGSCPPTKFQCRTSGLCVPLTWRCDRDLDCSDGSDEEECRIEPCTQKGQCPPPPGLPCPCTGVSDCSGGTDKKLRNCSRLACLAGELRCTLSDDCIPLTWRCDGHPDCPDSSDELGCGTNEILPEGDATTMGPPVTLESVTSLRNATTMGPPVTLESVPSVGNATSSSAGDQSGSPTAYGVIAAAAVLSASLVTATLLLLSWLRAQERLRPLGLLVAMKESLLLSEQKTSLP

SEQ ID NO: 13091 - protein, 240 aa, Homo sapiens
  Payload ID: 2551
  Gene Symbol: CD320
  Gene Name: CD320 molecule
  Uniprot ID: Q9NPF0
  ENSP ID: ENSP00000437697
MSGGWMAQVGAWRTGALGLALLLLLGLGLGLEAAASPLSTPTSAQAAGIEPCTQKGQCPPPPGLPCPCTGVSDCSGGTDKKLRNCSRLACLAGELRCTLSDDCIPLTWRCDGHPDCPDSSDELGCGTNEILPEGDATTMGPPVTLESVTSLRNATTMGPPVTLESVPSVGNATSSSAGDQSGSPTAYGVIAAAAVLSASLVTATLLLLSWLRAQERLRPLGLLVAMKESLLLSEQKTSLP

SEQ ID NO: 13092 - protein, 88 aa, Homo sapiens
  Payload ID: 2551
  Gene Symbol: CD320
  Gene Name: CD320 molecule
  ENSP ID: ENSP00000471551
  MOD_RES (1)..(1): Any amino acid
XQVGAWRTGALGLALLLLLGLGLGLEAAASPLSTPTSAQAAGPSSGSCPPTKFQCRTSGLCVPLTWRCDRDLDCSDGSDEEECTAWPA

SEQ ID NO: 13093 - protein, 81 aa, Homo sapiens
  Payload ID: 2551
  Gene Symbol: CD320
  Gene Name: CD320 molecule
  ENSP ID: ENSP00000471773
MSGGWMAQVGAWRTGALGLALLLLLGLGLGLEAAASPLSTPTSAQAADHLAMRSLVKTLGSARPEFEAQLRYQLFFFSFLW

SEQ ID NO: 13094 - protein, 364 aa, Homo sapiens
  Payload ID: 2552
  Gene Symbol: CD33
  Gene Name: CD33 molecule
  Uniprot ID: P20138
  ENSP ID: ENSP00000262262
MPLLLLLPLLWAGALAMDPNFWLQVQESVTVQEGLCVLVPCTFFHPIPYYDKNSPVHGYWFREGAIISRDSPVATNKLDQEVQEETQGRFRLLGDPSRNNCSLSIVDARRRDNGSYFFRMERGSTKYSYKSPQLSVHVTDLTHRPKILIPGTLEPGHSKNLTCSVSWACEQGTPPIFSWLSAAPTSLGPRTTHSSVLIITPRPQDHGTNLTCQVKFAGAGVTTERTIQLNVTYVPQNPTTGIFPGDGSGKQETRAGVVHGAIGGAGVTALLALCLCLIFFIVKTHRRKAARTAVGRNDTHPTTGSASPKHQKKSKLHGPTETSSCSGAAPTVEMDEELHYASLNFHGMNPSKDTSTEYSEVRTQ

SEQ ID NO: 13095 - protein, 310 aa, Homo sapiens
  Payload ID: 2552
  Gene Symbol: CD33
  Gene Name: CD33 molecule
  Uniprot ID: P20138
  ENSP ID: ENSP00000375673
MPLLLLLPLLWAGALAMDPNFWLQVQESVTVQEGLCVLVPCTFFHPIPYYDKNSPVHGYWFREGAIISRDSPVATNKLDQEVQEETQGRFRLLGDPSRNNCSLSIVDARRRDNGSYFFRMERGSTKYSYKSPQLSVHVTDLTHRPKILIPGTLEPGHSKNLTCSVSWACEQGTPPIFSWLSAAPTSLGPRTTHSSVLIITPRPQDHGTNLTCQVKFAGAGVTTERTIQLNVTYVPQNPTTGIFPGDGSGKQETRAGVVHGAIGGAGVTALLALCLCLIFFIVKTHRRKAARTAVGRNDTHPTTGSASPVR

SEQ ID NO: 13096 - protein, 212 aa, Homo sapiens
  Payload ID: 2552
  Gene Symbol: CD33
  Gene Name: CD33 molecule
  ENSP ID: ENSP00000403331
MPLLLLLPLLWADLTHRPKILIPGTLEPGHSKNLTCSVSWACEQGTPPIFSWLSAAPTSLGPRTTHSSVLIITPRPQDHGTNLTCQVKFAGAGVTTERTIQLNVTYVPQNPTTGIFPGDGSGKQETRAGVVHGAIGGAGVTALLALCLCLIFFIVKTHRRKAARTAVGRNDTHPTTGSASPVSDGASWHPVCPADTSSQCGPPSCPIQHFQN

SEQ ID NO: 13097 - protein, 237 aa, Homo sapiens
  Payload ID: 2552
  Gene Symbol: CD33
  Gene Name: CD33 molecule
  Uniprot ID: P20138
  ENSP ID: ENSP00000410126
MPLLLLLPLLWADLTHRPKILIPGTLEPGHSKNLTCSVSWACEQGTPPIFSWLSAAPTSLGPRTTHSSVLIITPRPQDHGTNLTCQVKFAGAGVTTERTIQLNVTYVPQNPTTGIFPGDGSGKQETRAGVVHGAIGGAGVTALLALCLCLIFFIVKTHRRKAARTAVGRNDTHPTTGSASPKHQKKSKLHGPTETSSCSGAAPTVEMDEELHYASLNFHGMNPSKDTSTEYSEVRTQ

SEQ ID NO: 13098 - protein, 385 aa, Homo sapiens
  Payload ID: 2553
  Gene Symbol: CD34
  Gene Name: CD34 molecule
  Uniprot ID: P28906
  ENSP ID: ENSP00000310036
MLVRRGARAGPRMPRGWTALCLLSLLPSGFMSLDNNGTATPELPTQGTFSNVSTNVSYQETTTPSTLGSTSLHPVSQHGNEATTNITETTVKFTSTSVITSVYGNTNSSVQSQTSVISTVFTTPANVSTPETTLKPSLSPGNVSDLSTTSTSLATSPTKPYTSSSPILSDIKAEIKCSGIREVKLTQGICLEQNKTSSCAEFKKDRGEGLARVLCGEEQADADAGAQVCSLLLAQSEVRPQCLLLVLANRTEISSKLQLMKKHQSDLKKLGILDFTEQDVASHQSYSQKTLIALVTSGALLAVLGITGYFLMNRRSWSPTGERLGEDPYYTENGGGQGYSSGPGTSPEAQGKASVNRGAQENGTGQATSRNGHSARQHVVADTEL

SEQ ID NO: 13099 - protein, 328 aa, Homo sapiens
  Payload ID: 2553
  Gene Symbol: CD34
  Gene Name: CD34 molecule
  Uniprot ID: P28906
  ENSP ID: ENSP00000348916
MLVRRGARAGPRMPRGWTALCLLSLLPSGFMSLDNNGTATPELPTQGTFSNVSTNVSYQETTTPSTLGSTSLHPVSQHGNEATTNITETTVKFTSTSVITSVYGNTNSSVQSQTSVISTVFTTPANVSTPETTLKPSLSPGNVSDLSTTSTSLATSPTKPYTSSSPILSDIKAEIKCSGIREVKLTQGICLEQNKTSSCAEFKKDRGEGLARVLCGEEQADADAGAQVCSLLLAQSEVRPQCLLLVLANRTEISSKLQLMKKHQSDLKKLGILDFTEQDVASHQSYSQKTLIALVTSGALLAVLGITGYFLMNRRSWSPTGERLELEP

SEQ ID NO: 13100 - protein, 227 aa, Homo sapiens
  Payload ID: 2553
  Gene Symbol: CD34
  Gene Name: CD34 molecule
  ENSP ID: ENSP00000356003
MDFGPGRLFRFFSYCVVAHIQLAVFFFSVGILETRILLADGAEFKKDRGEGLARVLCGEEQADADAGAQVCSLLLAQSEVRPQCLLLVLANRTEISSKLQLMKKHQSDLKKLGILDFTEQDVASHQSYSQKTLIALVTSGALLAVLGITGYFLMNRRSWSPTGERLGEDPYYTENGGGQGYSSGPGTSPEAQGKASVNRGAQENGTGQATSRNGHSARQHVVADTEL

SEQ ID NO: 13101 - protein, 472 aa, Homo sapiens
  Payload ID: 2554
  Gene Symbol: CD36
  Gene Name: CD36 molecule (thrombospondin receptor)
  Uniprot ID: P16671
  ENSP ID: ENSP00000308165
MGCDRNCGLIAGAVIGAVLAVFGGILMPVGDLLIQKTIKKQVVLEEGTIAFKNWVKTGTEVYRQFWIFDVQNPQEVMMNSSNIQVKQRGPYTYRVRFLAKENVTQDAEDNTVSFLQPNGAIFEPSLSVGTEADNFTVLNLAVAAASHIYQNQFVQMILNSLINKSKSSMFQVRTLRELLWGYRDPFLSLVPYPVTTTVGLFYPYNNTADGVYKVFNGKDNISKVAIIDTYKGKRNLSYWESHCDMINGTDAASFPPFVEKSQVLQFFSSDICRSIYAVFESDVNLKGIPVYRFVLPSKAFASPVENPDNYCFCTEKIISKNCTSYGVLDISKCKEGRPVYISLPHFLYASPDVSEPIDGLNPNEEEHRTYLDIEPITGFTLQFAKRLQVNLLVKPSEKIQVLKNLKRNYIVPILWLNETGTIGDEKANMFRSQVTGKINLLGLIEMILLSVGVVMFVAFMISYCACRSKTIK

SEQ ID NO: 13102 - protein, 472 aa, Homo sapiens; identical to SEQ ID NO: 13101
  Payload ID: 2554
  Gene Symbol: CD36
  Gene Name: CD36 molecule (thrombospondin receptor)
  Uniprot ID: P16671
  ENSP ID: ENSP00000378268

SEQ ID NO: 13103 - protein, 463 aa, Homo sapiens
  Payload ID: 2554
  Gene Symbol: CD36
  Gene Name: CD36 molecule (thrombospondin receptor)
  ENSP ID: ENSP00000392298
MGCDRNCGLIAGAVIGAVLAVFGGILMPVGDLLIQKTIKKQVVLEEGTIAFKNWVKTGTEVYRQFWIFDVQNPQEVMMNSSNIQVKQRGPYTYRVRFLAKENVTQDAEDNTVSFLQPNGAIFEPSLSVGTEADNFTVLNLAVAAASHIYQNQFVQMILNSLINKSKSSMFQVRTLRELLWGYRDPFLSLVPYPVTTTVGLFYPYNNTADGVYKVFNGKDNISKVAIIDTYKGKRNLSYWESHCDMINGTDAASFPPFVEKSQVLQFFSSDICRSIYAVFESDVNLKGIPVYRFVLPSKAFASPVENPDNYCFCTEKIISKNCTSYGVLDISKCKEGRPVYISLPHFLYASPDVSEPIDGLNPNEEEHRTYLDIEPITGFTLQFAKRLQVNLLVKPSEKIQVLKNLKRNYIVPILWLNETGTIGDEKANMFRSQVTGKINLLGLIEMILLSVGVVMFVAFMISY

SEQ ID NO: 13104 - protein, 99 aa, Homo sapiens
  Payload ID: 2554
  Gene Symbol: CD36
  Gene Name: CD36 molecule (thrombospondin receptor)
  ENSP ID: ENSP00000396258
MGCDRNCGLIAGAVIGAVLAVFGGILMPVGDLLIQKTIKKQVVLEEGTIAFKNWVKTGTEVYRQFWIFDVQNPQEVMMNSSCIPYLSKSICSNDPQFTY

SEQ ID NO: 13105 - protein, 93 aa, Homo sapiens
  Payload ID: 2554
  Gene Symbol: CD36
  Gene Name: CD36 molecule (thrombospondin receptor)
  ENSP ID: ENSP00000398760
MGCDRNCGLIAGAVIGAVLAVFGGILMPVGDLLIQKTIKKQVVLEEGTIAFKNWVKTGTEVYRQFWIFDVQNPQEVMMNSSNIQVKQRGPYTY

SEQ ID NO: 13106 - protein, 472 aa, Homo sapiens; identical to SEQ ID NO: 13101
  Payload ID: 2554
  Gene Symbol: CD36
  Gene Name: CD36 molecule (thrombospondin receptor)
  Uniprot ID: P16671
  ENSP ID: ENSP00000399421

SEQ ID NO: 13107 - protein, 433 aa, Homo sapiens
  Payload ID: 2554
  Gene Symbol: CD36
  Gene Name: CD36 molecule (thrombospondin receptor)
  Uniprot ID: P16671
  ENSP ID: ENSP00000401863
MGCDRNCGLIAGAVIGAVLAVFGGILMPVGDLLIQKTIKKQVVLEEGTIAFKNWVKTGTEVYRQFWIFDVQNPQEVMMNSSNIQVKQRGPYTYRVRFLAKENVTQDAEDNTVSFLQPNGAIFEPSLSVGTEADNFTVLNLAVAAASHIYQNQFVQMILNSLINKSKSSMFQVRTLRELLWGYRDPFLSLVPYPVTTTVGLFYPYNNTADGVYKVFNGKDNISKVAIIDTYKGKRSIYAVFESDVNLKGIPVYRFVLPSKAFASPVENPDNYCFCTEKIISKNCTSYGVLDISKCKEGRPVYISLPHFLYASPDVSEPIDGLNPNEEEHRTYLDIEPITGFTLQFAKRLQVNLLVKPSEKIQVLKNLKRNYIVPILWLNETGTIGDEKANMFRSQVTGKINLLGLIEMILLSVGVVMFVAFMISYCACRSKTIK

SEQ ID NO: 13108 - protein, 203 aa, Homo sapiens
  Payload ID: 2554
  Gene Symbol: CD36
  Gene Name: CD36 molecule (thrombospondin receptor)
  ENSP ID: ENSP00000407690
MGCDRNCGLIAGAVIGAVLAVFGGILMPVGDLLIQKTIKKQVVLEEGTIAFKNWVKTGTEVYRQFWIFDVQNPQEVMMNSSNIQVKQRGPYTYRVRFLAKENVTQDAEDNTVSFLQPNGAIFEPSLSVGTEADNFTVLNLAVAAASHIYQNQFVQMILNSLINKSKSSMFQVRTLRELLWGYRDPFLSLVPYPVTTTVGLFYP

SEQ ID NO: 13109 - protein, 93 aa, Homo sapiens; identical to SEQ ID NO: 13105
  Payload ID: 2554
  Gene Symbol: CD36
  Gene Name: CD36 molecule (thrombospondin receptor)
  ENSP ID: ENSP00000409762

SEQ ID NO: 13110 - protein, 143 aa, Homo sapiens
  Payload ID: 2554
  Gene Symbol: CD36
  Gene Name: CD36 molecule (thrombospondin receptor)
  ENSP ID: ENSP00000410371
MGCDRNCGLIAGAVIGAVLAVFGGILMPVGDLLIQKTIKKQVVLEEGTIAFKNWVKTGTEVYRQFWIFDVQNPQEVMMNSSNIQVKQRGPYTYRVRFLAKENVTQDAEDNTVSFLQPNGAIFEPSLSVGTEADNFTVLNLAVA

SEQ ID NO: 13111 - protein, 472 aa, Homo sapiens; identical to SEQ ID NO: 13101
  Payload ID: 2554
  Gene Symbol: CD36
  Gene Name: CD36 molecule (thrombospondin receptor)
  Uniprot ID: P16671
  ENSP ID: ENSP00000411411

SEQ ID NO: 13112 - protein, 472 aa, Homo sapiens; identical to SEQ ID NO: 13101
  Payload ID: 2554
  Gene Symbol: CD36
  Gene Name: CD36 molecule (thrombospondin receptor)
  Uniprot ID: P16671
  ENSP ID: ENSP00000415743

SEQ ID NO: 13113 - protein, 148 aa, Homo sapiens
  Payload ID: 2554
  Gene Symbol: CD36
  Gene Name: CD36 molecule (thrombospondin receptor)
  ENSP ID: ENSP00000416388
MGCDRNCGLIAGAVIGAVLAVFGGILMPVGDLLIQKTIKKQVVLEEGTIAFKNWVKTGTEVYRQFWIFDVQNPQEVMMNSSNIQVKQRGPYTYRVRFLAKENVTQDAEDNTVSFLQPNGAIFEPSLSVGTEADNFTVLNLAVAAASHI

SEQ ID NO: 13114 - protein, 396 aa, Homo sapiens
  Payload ID: 2554
  Gene Symbol: CD36
  Gene Name: CD36 molecule (thrombospondin receptor)
  ENSP ID: ENSP00000431296
MMNSSNIQVKQRGPYTYRVRFLAKENVTQDAEDNTVSFLQPNGAIFEPSLSVGTEADNFTVLNLAVAAASHIYQNQFVQMILNSLINKSKSSMFQVRTLRELLWGYRDPFLSLVPYPVTTTVGLFYPYNNTADGVYKVFNGKDNISKVAIIDTYKGKRNLSYWESHCDMINGTDAASFPPFVEKSQVLQFFSSDICRSIYAVFESDVNLKGIPVYRFVLPSKAFASPVENPDNYCFCTEKIISKNCTSYGVLDISKCKEGRPVYISLPHFLYASPDVSEPIDGLNPNEEEHRTYLDIEPITGFTLQFAKRLQVNLLVKPSEKIQVLKNLKRNYIVPILWLNETGTIGDEKANMFRSQVTGKINLLGLIEMILLSVGVVMFVAFMISYCACRSKTIK

SEQ ID NO: 13115 - protein, 65 aa, Homo sapiens
  Payload ID: 2554
  Gene Symbol: CD36
  Gene Name: CD36 molecule (thrombospondin receptor)
  ENSP ID: ENSP00000433659
MGCDRNCGLIAGAVIGAVLAVFGGILMPVGDLLIQKTIKKQVVLEEGTIAFKNWVKTGTEVYRQF

SEQ ID NO: 13116 - protein, 66 aa, Homo sapiens
  Payload ID: 2554
  Gene Symbol: CD36
  Gene Name: CD36 molecule (thrombospondin receptor)
  ENSP ID: ENSP00000435698
  MOD_RES (1)..(1): Any amino acid
XNYIVPILWLNETGTIGDEKANMFRSQVTGKINLLGLIEMILLSVGVVMFVAFMISYCACRSKTIK

SEQ ID NO: 13117 - protein, 412 aa, Homo sapiens
  Payload ID: 2554
  Gene Symbol: CD36
  Gene Name: CD36 molecule (thrombospondin receptor)
  Uniprot ID: P16671
  ENSP ID: ENSP00000439543
MGCDRNCGLIAGAVIGAVLAVFGGILMPVGDLLIQKTIKKQVVLEEGTIAFKNWVKTGTEVYRQFWIFDVQNPQEVMMNSSNIQVKQRGPYTYRVRFLAKENVTQDAEDNTVSFLQPNGAIFEPSLSVGTEADNFTVLNLAVAYNNTADGVYKVFNGKDNISKVAIIDTYKGKRNLSYWESHCDMINGTDAASFPPFVEKSQVLQFFSSDICRSIYAVFESDVNLKGIPVYRFVLPSKAFASPVENPDNYCFCTEKIISKNCTSYGVLDISKCKEGRPVYISLPHFLYASPDVSEPIDGLNPNEEEHRTYLDIEPITGFTLQFAKRLQVNLLVKPSEKIQVLKNLKRNYIVPILWLNETGTIGDEKANMFRSQVTGKINLLGLIEMILLSVGVVMFVAFMISYCACRSKTIK

SEQ ID NO: 13118 - protein, 288 aa, Homo sapiens
  Payload ID: 2554
  Gene Symbol: CD36
  Gene Name: CD36 molecule (thrombospondin receptor)
  Uniprot ID: P16671
  ENSP ID: ENSP00000441956
MGCDRNCGLIAGAVIGAVLAVFGGILMPVGDLLIQKTIKKQVVLEEGTIAFKNWVKTGTEVYRQFWIFDVQNPQEVMMNSSNIQVKQRGPYTYRVRFLAKENVTQDAEDNTVSFLQPNGAIFEPSLSVGTEADNFTVLNLAVAAASHIYQNQFVQMILNSLINKSKSSMFQVRTLRELLWGYRDPFLSLVPYPVTTTVGLFYPYNNTADGVYKVFNGKDNISKVAIIDTYKGKRNLSYWESHCDMINGTDAASFPPFVEKSQVLQFFSSDICRETCVHFTSSFSVCKS

SEQ ID NO: 13119 - protein, 281 aa, Homo sapiens
  Payload ID: 2555
  Gene Symbol: CD37
  Gene Name: CD37 molecule
  Uniprot ID: P11049
  ENSP ID: ENSP00000325708
MSAQESCLSLIKYFLFVFNLFFFVLGSLIFCFGIWILIDKTSFVSFVGLAFVPLQIWSKVLAISGIFTMGIALLGCVGALKELRCLLGLYFGMLLLLFATQITLGILISTQRAQLERSLRDVVEKTIQKYGTNPEETAAEESWDYVQFQLRCCGWHYPQDWFQVLILRGNGSEAHRVPCSCYNLSATNDSTILDKVILPQLSRLGHLARSRHSADICAVPAESHIYREGCAQGLQKWLHNNLISIVGICLGVGLLELGFMTLSIFLCRNLDHVYNRLARYR

SEQ ID NO: 13120 - protein, 156 aa, Homo sapiens
  Payload ID: 2555
  Gene Symbol: CD37
  Gene Name: CD37 molecule
  ENSP ID: ENSP00000375732
MSAQESCLSLIKYFLFVFNLFFFVLGSLIFCFGIWILIDKTSFVSFVGLAFVPLQIWSKVLAISGIFTMGIALLGCVGALKELRCLLGLYFGMLLLLFATQITLGILISTQRAQKDTPTWTKGDRHKQLQRETHGKKREQEKEIDALKEETETYEP

SEQ ID NO: 13121 - protein, 213 aa, Homo sapiens
  Payload ID: 2555
  Gene Symbol: CD37
  Gene Name: CD37 molecule
  Uniprot ID: P11049
  ENSP ID: ENSP00000413151
MGIALLGCVGALKELRCLLGLYFGMLLLLFATQITLGILISTQRAQLERSLRDVVEKTIQKYGTNPEETAAEESWDYVQFQLRCCGWHYPQDWFQVLILRGNGSEAHRVPCSCYNLSATNDSTILDKVILPQLSRLGHLARSRHSADICAVPAESHIYREGCAQGLQKWLHNNLISIVGICLGVGLLELGFMTLSIFLCRNLDHVYNRLARYR

SEQ ID NO: 13122 - protein, 270 aa, Homo sapiens
  Payload ID: 2555
  Gene Symbol: CD37
  Gene Name: CD37 molecule
  ENSP ID: ENSP00000441037
MSAQESCLSLIKYFLFVFNLFFFVLGSLIFCFGIWILIDKTSFVSFVGLAFVPLQIWSKVLAISGIFTMGIALLGCVGALKELRCLLGLYFGMLLLLFATQITLGILISTQRAQLERSLRDVVEKTIQKYGTNPEETAAEESWDYVQFQLRCCGWHYPQDWFQVLILRGNGSEAHRVPCSCYNLSATNDSTILDKVILPQLSRLGHLARSRHSADICAVPAESHIYREGCAQGLQKWLHNNLISIVGICLGVGLLEVIWPRPHPRSALNP

SEQ ID NO: 13123 - protein, 160 aa, Homo sapiens
  Payload ID: 2555
  Gene Symbol: CD37
  Gene Name: CD37 molecule
  ENSP ID: ENSP00000470260
MSAQESCLSLIKYFLFVFNLFFFVLGSLIFCFGIWILIDKTSFVSFVGRLQAPIHCSPEASWSLSLLPANGVVHTNNNDHESHFSSTSYLSGLVAGLAFVPLQIWSKVLAISGIFTMGIALLGCVGALKELRCLLGLYFGMLLLLFATQITLGILISTQR

SEQ ID NO: 13124 - protein, 202 aa, Homo sapiens
  Payload ID: 2555
  Gene Symbol: CD37
  Gene Name: CD37 molecule
  Uniprot ID: P11049
  ENSP ID: ENSP00000470394
MGIALLGCVGALKELRCLLGLYFGMLLLLFATQITLGILISTQRAQLERSLRDVVEKTIQKYGTNPEETAAEESWDYVQFQLRCCGWHYPQDWFQVLILRGNGSEAHRVPCSCYNLSATNDSTILDKVILPQLSRLGHLARSRHSADICAVPAESHIYREGCAQGLQKWLHNNLISIVGICLGVGLLEVIWPRPHPRSALNP

SEQ ID NO: 13125 - protein, 254 aa, Homo sapiens
  Payload ID: 2555
  Gene Symbol: CD37
  Gene Name: CD37 molecule
  ENSP ID: ENSP00000470683
  MOD_RES (1)..(1): Any amino acid
XAQLERSLRDVVEKTIQKYGTNPEETAAEESWDYVQFQLRCCGWHYPQDWFQVLILRGNGSEAHRVPCSCYNLSATNDSTILDKVILPQLSRLGHLARSRHSADICAVPAESHIYREGCAQGLQKWLHNNLISIVGICLGVGLLEMTVMVLSVQLQRRALRRKCEPHVPGAGDSSPGPSLIADGGGGHSGSLWGGWGMAGACPNWGDKAPQGKLPMALGLWPLWVQDEDQPDTGSAGAELEEAQLEAEAEGEDR

SEQ ID NO: 13126 - protein, 26 aa, Homo sapiens
  Payload ID: 2555
  Gene Symbol: CD37
  Gene Name: CD37 molecule
  ENSP ID: ENSP00000471078
MGIALLGCVGALKELRCLLGLYFGML

SEQ ID NO: 13127 - protein, 121 aa, Homo sapiens
  Payload ID: 2555
  Gene Symbol: CD37
  Gene Name: CD37 molecule
  ENSP ID: ENSP00000471902
MSAQESCLSLIKYFLFVFNLFFFVLGSLIFCFGIWILIDKTSFVSFAWPSCLCRSGPKSWPSQESSPWASPSWVVWGPSRSSAASWACILGCCCSCLPHRSPWESSSPLSGPSWSEACGTS

SEQ ID NO: 13128 - protein, 300 aa, Homo sapiens
  Payload ID: 2556
  Gene Symbol: CD38
  Gene Name: CD38 molecule
  Uniprot ID: P28907
  ENSP ID: ENSP00000226279
MANCEFSPVSGDKPCCRLSRRAQLCLGVSILVLILVVVLAVVVPRWRQQWSGPGTTKRFPETVLARCVKYTEIHPEMRHVDCQSVWDAFKGAFISKHPCNITEEDYQPLMKLGTQTVPCNKILLWSRIKDLAHQFTQVQRDMFTLEDTLLGYLADDLTWCGEFNTSKINYQSCPDWRKDCSNNPVSVFWKTVSRRFAEAACDVVHVMLNGSRSKIFDKNSTFGSVEVHNLQPEKVQTLEAWVIHGGREDSRDLCQDPTIKELESIISKRNIQFSCKNIYRPDKFLQCVKNPEDSSCTSEI

SEQ ID NO: 13129 - protein, 151 aa, Homo sapiens
  Payload ID: 2556
  Gene Symbol: CD38
  Gene Name: CD38 molecule
  ENSP ID: ENSP00000423047
QPLMKLGTQTVPCNKILLWSRIKDLAHQFTQVQRDMFTLEDTLLGYLADDLTWCEINYQSCPDWRKDCSNNPVSVFWKTVSRRFAEAACDVVHVMLNGSRSKIFDKNSTFGSVEVHNLQPEKVQTLEAWVIHGGREDSRDLCQDPTIKELE

SEQ ID NO: 13130 - protein, 122 aa, Homo sapiens
  Payload ID: 2556
  Gene Symbol: CD38
  Gene Name: CD38 molecule
  Uniprot ID: P28907
  ENSP ID: ENSP00000427277
MANCEFSPVSGDKPCCRLSRRAQLCLGVSILVLILVVVLAVVVPRWRQQWSGPGTTKRFPETVLARCVKYTEIHPEMRHVDCQSVWDAFKGAFISKHPCNITEEDYQPLMKLGTQTVPCNKK

SEQ ID NO: 13131 - protein, 171 aa, Homo sapiens
  Payload ID: 2557
  Gene Symbol: CD3D
  Gene Name: CD3d molecule, delta (CD3-TCR complex)
  Uniprot ID: P04234
  ENSP ID: ENSP00000300692
MEHSTFLSGLVLATLLSQVSPFKIPIEELEDRVFVNCNTSITWVEGTVGTLLSDITRLDLGKRILDPRGIYRCNGTDIYKDKESTVQVHYRMCQSCVELDPATVAGIIVTDVIATLLLALGVFCFAGHETGRLSGAADTQALLRNDQVYQPLRDRDDAQYSHLGGNWARNK

SEQ ID NO: 13132 - protein, 127 aa, Homo sapiens
  Payload ID: 2557
  Gene Symbol: CD3D
  Gene Name: CD3d molecule, delta (CD3-TCR complex)
  Uniprot ID: P04234
  ENSP ID: ENSP00000376622
MEHSTFLSGLVLATLLSQVSPFKIPIEELEDRVFVNCNTSITWVEGTVGTLLSDITRLDLGKRILDPRGIYRCNGTDIYKDKESTVQVHYRTADTQALLRNDQVYQPLRDRDDAQYSHLGGNWARNK

SEQ ID NO: 13133 - protein, 132 aa, Homo sapiens
  Payload ID: 2557
  Gene Symbol: CD3D
  Gene Name: CD3d molecule, delta (CD3-TCR complex)
  ENSP ID: ENSP00000434794
  MOD_RES (1)..(1): Any amino acid
XSRCFSGPCSPYSSSVVWIHFQEVSPFKIPIEELEDRVFVNCNTSITWVEGTVGTLLSDITRLDLGKRILDPRGIYRCNGTDIYKDKESTVQVHYRTADTQALLRNDQVYQPLRDRDDAQYSHLGGNWARNK

SEQ ID NO: 13134 - protein, 98 aa, Homo sapiens
  Payload ID: 2557
  Gene Symbol: CD3D
  Gene Name: CD3d molecule, delta (CD3-TCR complex)
  ENSP ID: ENSP00000437335
MEHSTFLSGLVLATLLSQVCQSCVELDPATVAGIIVTDVIATLLLALGVFCFAGHETGRLSGAADTQALLRNDQVYQPLRDRDDAQYSHLGGNWARNK

SEQ ID NO: 13135 - protein, 207 aa, Homo sapiens
  Payload ID: 2558
  Gene Symbol: CD3E
  Gene Name: CD3e molecule, epsilon (CD3-TCR complex)
  Uniprot ID: P07766
  ENSP ID: ENSP00000354566
MQSGTHWRVLGLCLLSVGVWGQDGNEEMGGITQTPYKVSISGTTVILTCPQYPGSEILWQHNDKNIGGDEDDKNIGSDEDHLSLKEFSELEQSGYYVCYPRGSKPEDANFYLYLRARVCENCMEMDVMSVATIVIVDICITGGLLLLVYYWSKNRKAKAKPVTRGAGAGGRQRGQNKERPPPVPNPDYEPIRKGQRDLYSGLNQRRI

SEQ ID NO: 13136 - protein, 201 aa, Homo sapiens
  Payload ID: 2558
  Gene Symbol: CD3E
  Gene Name: CD3e molecule, epsilon (CD3-TCR complex)
  ENSP ID: ENSP00000433975
MQSGTHWRVLGLCLLSVGVWGQDGNEEMAYKVSISGTTVILTCPQYPGSEILWQHNDKNIGGDEDDKNIGSDEDHLSLKEFSELEQSGYYVCYPRGSKPEDANFYLYLRARVCENCMEMDVMSVATIVIVDICITGGLLLLVYYWSKNRKAKAKPVTRGAGAGGRQRGQNKERPPPVPNPDYEPIRKGQRDLYSGLNQRRI

SEQ ID NO: 13137 - protein, 510 aa, Homo sapiens
  Payload ID: 2559
  Gene Symbol: CD3EAP
  Gene Name: CD3e molecule, epsilon associated protein
  Uniprot ID: O15446
  ENSP ID: ENSP00000310966
MEEPQAGDAARFSCPPNFTAKPPASESPRFSLEALTGPDTELWLIQAPADFAPECFNGRHVPLSGSQIVKGKLAGKRHRYRVLSSCPQAGEATLLAPSTEAGGGLTCASAPQGTLRILEGPQQSLSGSPLQPIPASPPPQIPPGLRPRFCAFGGNPPVTGPRSALAPNLLTSGKKKKEMQVTEAPVTQEAVNGHGALEVDMALGSPEMDVRKKKKKKNQQLKEPEAAGPVGTEPTVETLEPLGVLFPSTTKKRKKPKGKETFEPEDKTVKQEQINTEPLEDTVLSPTKKRKRQKGTEGMEPEEGVTVESQPQVKVEPLEEAIPLPPTKKRKKEKGQMAMMEPGTEAMEPVEPEMKPLESPGGTMAPQQPEGAKPQAQAALAAPKKKTKKEKQQDATVEPETEVVGPELPDDLEPQAAPTSTKKKKKKKERGHTVTEPIQPLEPELPGEGQPEARATPGSTKKRKKQSQESRMPETVPQEEMPGPPLNSESGEEAPTGRDKKRKQQQQQPV

SEQ ID NO: 13138 - protein, 512 aa, Homo sapiens
  Payload ID: 2559
  Gene Symbol: CD3EAP
  Gene Name: CD3e molecule, epsilon associated protein
  Uniprot ID: O15446
  ENSP ID: ENSP00000465099
MEEPQAGGEDAARFSCPPNFTAKPPASESPRFSLEALTGPDTELWLIQAPADFAPECFNGRHVPLSGSQIVKGKLAGKRHRYRVLSSCPQAGEATLLAPSTEAGGGLTCASAPQGTLRILEGPQQSLSGSPLQPIPASPPPQIPPGLRPRFCAFGGNPPVTGPRSALAPNLLTSGKKKKEMQVTEAPVTQEAVNGHGALEVDMALGSPEMDVRKKKKKKNQQLKEPEAAGPVGTEPTVETLEPLGVLFPSTTKKRKKPKGKETFEPEDKTVKQEQINTEPLEDTVLSPTKKRKRQKGTEGMEPEEGVTVESQPQVKVEPLEEAIPLPPTKKRKKEKGQMAMMEPGTEAMEPVEPEMKPLESPGGTMAPQQPEGAKPQAQAALAAPKKKTKKEKQQDATVEPETEVVGPELPDDLEPQAAPTSTKKKKKKKERGHTVTEPIQPLEPELPGEGQPEARATPGSTKKRKKQSQESRMPETVPQEEMPGPPLNSESGEEAPTGRDKKRKQQQQQPV

SEQ ID NO: 13139 - protein, 67 aa, Homo sapiens
  Payload ID: 2559
  Gene Symbol: CD3EAP
  Gene Name: CD3e molecule, epsilon associated protein
  ENSP ID: ENSP00000466503
  MOD_RES (1)..(1): Any amino acid
XEEPQAGASMGGMCLSLAPRSSRANWQASGTAIESSAAVPKLEKRPCWPPQRRQEVDSPVPQPPRAP

SEQ ID NO: 13140 - protein, 39 aa, Homo sapiens
  Payload ID: 2559
  Gene Symbol: CD3EAP
  Gene Name: CD3e molecule, epsilon associated protein
  ENSP ID: ENSP00000467771
MQVTEAPVTQEAVNGHGALEVDMALGSPEMDVRKKKKKK

SEQ ID NO: 13141 - protein, 40 aa, Homo sapiens
  Payload ID: 2560
  Gene Symbol: CD3G
  Gene Name: CD3g molecule, gamma (CD3-TCR complex)
  ENSP ID: ENSP00000292144
MEQGKGLAVLILAIILLQGTLAQSIKGRRNGFFLYSDSEY

SEQ ID NO: 13142 - protein, 78 aa, Homo sapiens
  Payload ID: 2560
  Gene Symbol: CD3G
  Gene Name: CD3g molecule, gamma (CD3-TCR complex)
  ENSP ID: ENSP00000376621
MIGFLTEDKKKWNLGSNAKDPRGMYQCKGSQNKSKPLQVYYRTSDKQTLLPNDQLYQPLKDREDDQYSHLQGNQLRRN

SEQ ID NO: 13143 - protein, 182 aa, Homo sapiens
  Payload ID: 2560
  Gene Symbol: CD3G
  Gene Name: CD3g molecule, gamma (CD3-TCR complex)
  Uniprot ID: P09693
  ENSP ID: ENSP00000431445
MEQGKGLAVLILAIILLQGTLAQSIKGNHLVKVYDYQEDGSVLLTCDAEAKNITWFKDGKMIGFLTEDKKKWNLGSNAKDPRGMYQCKGSQNKSKPLQVYYRMCQNCIELNAATISGFLFAEIVSIFVLAVGVYFIAGQDGVRQSRASDKQTLLPNDQLYQPLKDREDDQYSHLQGNQLRRN

SEQ ID NO: 13144 - protein, 458 aa, Homo sapiens
  Payload ID: 2561
  Gene Symbol: CD4
  Gene Name: CD4 molecule
  Uniprot ID: P01730
  ENSP ID: ENSP00000011653
MNRGVPFRHLLLVLQLALLPAATQGKKVVLGKKGDTVELTCTASQKKSIQFHWKNSNQIKILGNQGSFLTKGPSKLNDRADSRRSLWDQGNFPLIIKNLKIEDSDTYICEVEDQKEEVQLLVFGLTANSDTHLLQGQSLTLTLESPPGSSPSVQCRSPRGKNIQGGKTLSVSQLELQDSGTWTCTVLQNQKKVEFKIDIVVLAFQKASSIVYKKEGEQVEFSFPLAFTVEKLTGSGELWWQAERASSSKSWITFDLKNKEVSVKRVTQDPKLQMGKKLPLHLTLPQALPQYAGSGNLTLALEAKTGKLHQEVNLVVMRATQLQKNLTCEVWGPTSPKLMLSLKLENKEAKVSKREKAVWVLNPEAGMWQCLLSDSGQVLLESNIKVLPTWSTPVQPMALIVLGGVAGLLLFIGLGIFFCVRCRHRRRQAERMSQIKRLLSEKKTCQCPHRFQKTCSPI

SEQ ID NO: 13145 - protein, 45 aa, Homo sapiens
  Payload ID: 2561
  Gene Symbol: CD4
  Gene Name: CD4 molecule
  ENSP ID: ENSP00000440720
MNRGVPFRHLLLVLQLALLPAATQGKKVVLGKKGDTVELTCTASQ

SEQ ID NO: 13146 - protein, 148 aa, Homo sapiens
  Payload ID: 2561
  Gene Symbol: CD4
  Gene Name: CD4 molecule
  ENSP ID: ENSP00000445167
MNRGVPFRHLLLVLQLGPSKLNDRADSRRSLWDQGNFPLIIKNLKIEDSDTYICEVEDQKEEVQLLVFGLTANSDTHLLQGQSLTLTLESPPGSSPSVQCRSPRGKNIQGGKTLSVSQLELQDSGTWTCTVLQNQKKVEFKIDIVVLG

SEQ ID NO: 13147 - protein, 240 aa, Homo sapiens
  Payload ID: 2562
  Gene Symbol: CD40LG
  Gene Name: CD40 ligand
  ENSP ID: ENSP00000359662
MIETYNQTSPRSAATGLPISMKIFMYLLTVFLITQMIGSALFAVYLHRRLDKIEDERNLHEDFVFMKTIQRCNTGERSLSLLNCEEIKSQFEGFVKDIMLNKEETKKENSFEMQKVLQWAEKGYYTMSNNLVTLENGKQLTVKRQGLYYIYAQVTFCSNREASSQAPFIASLCLKSPGRFERILLRAANTHSSAKPCGQQSIHLGGVFELQPGASVFVNVTDPSQVSHGTGFTSFGLLKL

SEQ ID NO: 13148 - protein, 261 aa, Homo sapiens
  Payload ID: 2562
  Gene Symbol: CD40LG
  Gene Name: CD40 ligand
  Uniprot ID: P29965
  ENSP ID: ENSP00000359663
MIETYNQTSPRSAATGLPISMKIFMYLLTVFLITQMIGSALFAVYLHRRLDKIEDERNLHEDFVFMKTIQRCNTGERSLSLLNCEEIKSQFEGFVKDIMLNKEETKKENSFEMQKGDQNPQIAAHVISEASSKTTSVLQWAEKGYYTMSNNLVTLENGKQLTVKRQGLYYIYAQVTFCSNREASSQAPFIASLCLKSPGRFERILLRAANTHSSAKPCGQQSIHLGGVFELQPGASVFVNVTDPSQVSHGTGFTSFGLLKL

SEQ ID NO: 13149 - protein, 203 aa, Homo sapiens
  Payload ID: 2563
  Gene Symbol: CD40
  Gene Name: CD40 molecule, TNF receptor superfamily member 5
  Uniprot ID: P25942
  ENSP ID: ENSP00000361350
MVRLPLQCVLWGCLLTAVHPEPPTACREKQYLINSQCCSLCQPGQKLVSDCTEFTETECLPCGESEFLDTWNRETHCHQHKYCDPNLGLRVQQKGTSETDTICTCEEGWHCTSEACESCVLHRSCSPGFGVKQIATGVSDTICEPCPVGFFSNVSSAFEKCHPWTRSPGSAESPGGDPHHLRDPVCHPLGAGLYQKGGQEANQ

SEQ ID NO: 13150 - protein, 277 aa, Homo sapiens
  Payload ID: 2563
  Gene Symbol: CD40
  Gene Name: CD40 molecule, TNF receptor superfamily member 5
  Uniprot ID: P25942
  ENSP ID: ENSP00000361359
MVRLPLQCVLWGCLLTAVHPEPPTACREKQYLINSQCCSLCQPGQKLVSDCTEFTETECLPCGESEFLDTWNRETHCHQHKYCDPNLGLRVQQKGTSETDTICTCEEGWHCTSEACESCVLHRSCSPGFGVKQIATGVSDTICEPCPVGFFSNVSSAFEKCHPWTSCETKDLVVQQAGTNKTDVVCGPQDRLRALVVIPIIFGILFAILLVLVFIKKVAKKPTNKAPHPKQEPQEINFPDDLPGSNTAAPVQETLHGCQPVTQEDGKESRISVQERQ

SEQ ID NO: 13151 - protein, 159 aa, Homo sapiens
  Payload ID: 2563
  Gene Symbol: CD40
  Gene Name: CD40 molecule, TNF receptor superfamily member 5
  ENSP ID: ENSP00000434825
  MOD_RES (1)..(1): Any amino acid
XRLPLQCVLWGCLLTAVHPEPPTACREKQYLINSQCCSLCQPGQKLVSDCTEFTETECLPCGESEFLDTWNRETHCHQHKYCDPNLGLRVQQKGTSETDTICTCEEGWHCTSEACESCVLHRSCSPGFGVKQIAVRPKTWLCNRQAQTRLMLSVVPRIG

SEQ ID NO: 13152 - protein, 151 aa, Homo sapiens
  Payload ID: 2563
  Gene Symbol: CD40
  Gene Name: CD40 molecule, TNF receptor superfamily member 5
  ENSP ID: ENSP00000484074
MVRLPLQCVLWGCLLTAVHPEPPTACREKQYLINSQCCSLCQPGQKLVSDCTEFTETECLPCGESEFLDTWNRETHCHQHKYCDPNLGLRVQQKGTSETDTICTCEEGWHCTSEACESCVLHRSCSPGFGVKQIDICQPHFPKDRGLNLLM

SEQ ID NO: 13153 - protein, 361 aa, Homo sapiens
  Payload ID: 2564
  Gene Symbol: CD44
  Gene Name: CD44 molecule (Indian blood group)
  Uniprot ID: P16070
  ENSP ID: ENSP00000263398
MDKFWWHAAWGLCLVPLSLAQIDLNITCRFAGVFHVEKNGRYSISRTEAADLCKAFNSTLPTMAQMEKALSIGFETCRYGFIEGHVVIPRIHPNSICAANNTGVYILTSNTSQYDTYCFNASAPPEEDCTSVTDLPNAFDGPITITIVNRDGTRYVQKGEYRTNPEDIYPSNPTDDDVSSGSSSERSSTSGGYIFYTFSTVHPIPDEDSPWITDSTDRIPATRDQDTFHPSGGSHTTHGSESDGHSHGSQEGGANTTSGPIRTPQIPEWLIILASLLALALILAVCIAVNSRRRCGQKKKLVINSGNGAVEDRKPSGLNGEASKSQEMVHLVNKESSETPDQFMTADETRNLQNVDMKIGV

SEQ ID NO: 13154 - protein, 232 aa, Homo sapiens
  Payload ID: 2564
  Gene Symbol: CD44
  Gene Name: CD44 molecule (Indian blood group)
  ENSP ID: ENSP00000278385
PEDIYPSNPTDDDVSSGSSSERSSTSGGYIFYTFSTVHPIPDEDSPWITDSTDRIPATNMDSSHSITLQPTANPNTGLVEDLDRTGPLSMTTQQSNSQSFSTSHEGLEEDKDHPTTSTLTSSRDQDTFHPSGGSHTTHGSESDGHSHGSQEGGANTTSGPIRTPQIPEWLIILASLLALALILAVCIAVNSRRRCGQKKKLVINSGNGAVEDRKPSGLNGEASKSQEMVHLV

SEQ ID NO: 13155 - protein, 139 aa, Homo sapiens
  Payload ID: 2564
  Gene Symbol: CD44
  Gene Name: CD44 molecule (Indian blood group)
  Uniprot ID: P16070
  ENSP ID: ENSP00000278386
MDKFWWHAAWGLCLVPLSLAQIDLNITCRFAGVFHVEKNGRYSISRTEAADLCKAFNSTLPTMAQMEKALSIGFETCSLHCSQQSKKVWAEEKASDQQWQWSCGGQKAKWTQRRGQQVSGNGAFGEQGVVRNSRPVYDS

SEQ ID NO: 13156 - protein, 287 aa, Homo sapiens
  Payload ID: 2564
  Gene Symbol: CD44
  Gene Name: CD44 molecule (Indian blood group)
  ENSP ID: ENSP00000279452
RYSISRTEAADLCKAFNSTLPTMAQMEKALSIGFETCRYGFIEGHVVIPRIHPNSICAANNTGVYILTSNTSQYDTYCFNASAPPEEDCTSVTDLPNAFDGPITITIVNRDGTRYVQKGEYRTNPEDIYPSNPTDDDVSSGSSSERSSTSGGDQDTFHPSGGSHTTHGSESDGHSHGSQEGGANTTSGPIRTPQIPEWLIILASLLALALILAVCIAVNSRRRCGQKKKLVINSGNGAVEDRKPSGLNGEASKSQEMVHLVNKESSETPDQFMTADETRNLQNVDMK

SEQ ID NO: 13157 - protein, 340 aa, Homo sapiens
  Payload ID: 2564
  Gene Symbol: CD44
  Gene Name: CD44 molecule (Indian blood group)
  Uniprot ID: P16070
  ENSP ID: ENSP00000309732
MDKFWWHAAWGLCLVPLSLAQIDLNITCRFAGVFHVEKNGRYSISRTEAADLCKAFNSTLPTMAQMEKALSIGFETCRYGFIEGHVVIPRIHPNSICAANNTGVYILTSNTSQYDTYCFNASAPPEEDCTSVTDLPNAFDGPITITIVNRDGTRYVQKGEYRTNPEDIYPSNPTDDDVSSGSSSERSSTSGGYIFYTFSTVHPIPDEDSPWITDSTDRIPATRHSHGSQEGGANTTSGPIRTPQIPEWLIILASLLALALILAVCIAVNSRRRCGQKKKLVINSGNGAVEDRKPSGLNGEASKSQEMVHLVNKESSETPDQFMTADETRNLQNVDMKIGV

SEQ ID NO: 13158 - protein, 699 aa, Homo sapiens
  Payload ID: 2564
  Gene Symbol: CD44
  Gene Name: CD44 molecule (Indian blood group)
  Uniprot ID: P16070
  ENSP ID: ENSP00000389830
MDKFWWHAAWGLCLVPLSLAQIDLNITCRFAGVFHVEKNGRYSISRTEAADLCKAFNSTLPTMAQMEKALSIGFETCRYGFIEGHVVIPRIHPNSICAANNTGVYILTSNTSQYDTYCFNASAPPEEDCTSVTDLPNAFDGPITITIVNRDGTRYVQKGEYRTNPEDIYPSNPTDDDVSSGSSSERSSTSGGYIFYTFSTVHPIPDEDSPWITDSTDRIPATSTSSNTISAGWEPNEENEDERDRHLSFSGSGIDDDEDFISSTISTTPRAFDHTKQNQDWTQWNPSHSNPEVLLQTTTRMTDVDRNGTTAYEGNWNPEAHPPLIHHEHHEEEETPHSTSTIQATPSSTTEETATQKEQWFGNRWHEGYRQTPKEDSHSTTGTAAASAHTSHPMQGRTTPSPEDSSWTDFFNPISHPMGRGHQAGRRMDMDSSHSITLQPTANPNTGLVEDLDRTGPLSMTTQQSNSQSFSTSHEGLEEDKDHPTTSTLTSSNRNDVTGGRRDPNHSEGSTTLLEGYTSHYPHTKESRTFIPVTSAKTGSFGVTAVTVGDSNSNVNRSLSGDQDTFHPSGGSHTTHGSESDGHSHGSQEGGANTTSGPIRTPQIPEWLIILASLLALALILAVCIAVNSRRRCGQKKKLVINSGNGAVEDRKPSGLNGEASKSQEMVHLVNKESSETPDQFMTADETRNLQNVDMKIGV

SEQ ID NO: 13159 - protein, 493 aa, Homo sapiens
  Payload ID: 2564
  Gene Symbol: CD44
  Gene Name: CD44 molecule (Indian blood group)
  Uniprot ID: P16070
  ENSP ID: ENSP00000392331
MDKFWWHAAWGLCLVPLSLAQIDLNITCRFAGVFHVEKNGRYSISRTEAADLCKAFNSTLPTMAQMEKALSIGFETCRYGFIEGHVVIPRIHPNSICAANNTGVYILTSNTSQYDTYCFNASAPPEEDCTSVTDLPNAFDGPITITIVNRDGTRYVQKGEYRTNPEDIYPSNPTDDDVSSGSSSERSSTSGGYIFYTFSTVHPIPDEDSPWITDSTDRIPATNMDSSHSITLQPTANPNTGLVEDLDRTGPLSMTTQQSNSQSFSTSHEGLEEDKDHPTTSTLTSSNRNDVTGGRRDPNHSEGSTTLLEGYTSHYPHTKESRTFIPVTSAKTGSFGVTAVTVGDSNSNVNRSLSGDQDTFHPSGGSHTTHGSESDGHSHGSQEGGANTTSGPIRTPQIPEWLIILASLLALALILAVCIAVNSRRRCGQKKKLVINSGNGAVEDRKPSGLNGEASKSQEMVHLVNKESSETPDQFMTADETRNLQNVDMKIGV

SEQ ID NO: 13160 - protein, 80 aa, Homo sapiens
  Payload ID: 2564
  Gene Symbol: CD44
  Gene Name: CD44 molecule (Indian blood group)
  ENSP ID: ENSP00000395953
MDKFWWHAAWGLCLVPLSLAQIDLNITCRFAGVFHVEKNGRYSISRTEAADLCKAFNSTLPTMAQMEKALSIGFETCSST

SEQ ID NO: 13161 - protein, 294 aa, Homo sapiens
  Payload ID: 2564
  Gene Symbol: CD44
  Gene Name: CD44 molecule (Indian blood group)
  ENSP ID: ENSP00000398099
  MOD_RES (1)..(1): Any amino acid
XDKFWWHAAWGLCLVPLSLAQIDLNITCRFAGVFHVEKNGRYSISRTEAADLCKAFNSTLPTMAQMEKALSIGFETCRYGFIEGHVVIPRIHPNSICAANNTGVYILTSNTSQYDTYCFNASAPPEEDCTSVTDLPNAFDGPITITIVNRDGTRYVQKGEYRTNPEDIYPSNPTDDDVSSGSSSERSSTSGGYIFYTFSTVHPIPDEDSPWITDSTDRIPATRDQDTFHPSGGSHTTHGSESDGHSHGSQEGGANTTSGPIRTPQIPEWLIILASLLALALILAVCIAVNSRRS

SEQ ID NO: 13162 - protein, 742 aa, Homo sapiens
  Payload ID: 2564
  Gene Symbol: CD44
  Gene Name: CD44 molecule (Indian blood group)
  Uniprot ID: P16070
  ENSP ID: ENSP00000398632
MDKFWWHAAWGLCLVPLSLAQIDLNITCRFAGVFHVEKNGRYSISRTEAADLCKAFNSTLPTMAQMEKALSIGFETCRYGFIEGHVVIPRIHPNSICAANNTGVYILTSNTSQYDTYCFNASAPPEEDCTSVTDLPNAFDGPITITIVNRDGTRYVQKGEYRTNPEDIYPSNPTDDDVSSGSSSERSSTSGGYIFYTFSTVHPIPDEDSPWITDSTDRIPATTLMSTSATATETATKRQETWDWFSWLFLPSESKNHLHTTTQMAGTSSNTISAGWEPNEENEDERDRHLSFSGSGIDDDEDFISSTISTTPRAFDHTKQNQDWTQWNPSHSNPEVLLQTTTRMTDVDRNGTTAYEGNWNPEAHPPLIHHEHHEEEETPHSTSTIQATPSSTTEETATQKEQWFGNRWHEGYRQTPKEDSHSTTGTAAASAHTSHPMQGRTTPSPEDSSWTDFFNPISHPMGRGHQAGRRMDMDSSHSITLQPTANPNTGLVEDLDRTGPLSMTTQQSNSQSFSTSHEGLEEDKDHPTTSTLTSSNRNDVTGGRRDPNHSEGSTTLLEGYTSHYPHTKESRTFIPVTSAKTGSFGVTAVTVGDSNSNVNRSLSGDQDTFHPSGGSHTTHGSESDGHSHGSQEGGANTTSGPIRTPQIPEWLIILASLLALALILAVCIAVNSRRRCGQKKKLVINSGNGAVEDRKPSGLNGEASKSQEMVHLVNKESSETPDQFMTADETRNLQNVDMKIGV

SEQ ID NO: 13163 - protein, 429 aa, Homo sapiens
  Payload ID: 2564
  Gene Symbol: CD44
  Gene Name: CD44 molecule (Indian blood group)
  Uniprot ID: P16070
  ENSP ID: ENSP00000404447
MDKFWWHAAWGLCLVPLSLAQIDLNITCRFAGVFHVEKNGRYSISRTEAADLCKAFNSTLPTMAQMEKALSIGFETCRYGFIEGHVVIPRIHPNSICAANNTGVYILTSNTSQYDTYCFNASAPPEEDCTSVTDLPNAFDGPITITIVNRDGTRYVQKGEYRTNPEDIYPSNPTDDDVSSGSSSERSSTSGGYIFYTFSTVHPIPDEDSPWITDSTDRIPATNRNDVTGGRRDPNHSEGSTTLLEGYTSHYPHTKESRTFIPVTSAKTGSFGVTAVTVGDSNSNVNRSLSGDQDTFHPSGGSHTTHGSESDGHSHGSQEGGANTTSGPIRTPQIPEWLIILASLLALALILAVCIAVNSRRRCGQKKKLVINSGNGAVEDRKPSGLNGEASKSQEMVHLVNKESSETPDQFMTADETRNLQNVDMKIGV

SEQ ID NO: 13164 - protein, 195 aa, Homo sapiens
  Payload ID: 2564
  Gene Symbol: CD44
  Gene Name: CD44 molecule (Indian blood group)
  ENSP ID: ENSP00000431860
RNGTTAYEGNWNPEAHPPLIHHEHHEEEETPHSTSTIQATPSSTTEETATQKEQWFGNRWHEGYRQTPKEDSHSTTGTADMDSSHSITLQPTANPNTGLVEDLDRTGPLSMTTQQSNSQSFSTSHEGLEEDKDHPTTSTLTSSNRNDVTGGRRDPNHSEGSTTLLEGYTSHYPHTKESRTFIPVTSAKTGSFGVT

SEQ ID NO: 13165 - protein, 249 aa, Homo sapiens
  Payload ID: 2564
  Gene Symbol: CD44
  Gene Name: CD44 molecule (Indian blood group)
  ENSP ID: ENSP00000432405
IDLNITCRFAGVFHVEKNGRYSISRTEAADLCKAFNSTLPTMAQMEKALSIGFETCRYGFIEGHVVIPRIHPNSICAANNTGVYILTSNTSQYDTYCFNASAPPEEDCTSVTDLPNAFDGPITITIVNRDGTRYVQKGEYRTNPEDIYPSNPTDDDVSSGSSSERSSTSGGYIFYTFSTVHPIPDEDSPWITDSTDRIPATTASAHTSHPMQGRTTPSPEDSSWTDFFNPISHPMGRGHQAGRRMGNSL

SEQ ID NO: 13166 - protein, 206 aa, Homo sapiens
  Payload ID: 2564
  Gene Symbol: CD44
  Gene Name: CD44 molecule (Indian blood group)
  ENSP ID: ENSP00000432704
MDKFWWHAAWGLCLVPLSLAQIDLNITCRFAGVFHVEKNGRYSISRTEAADLCKAFNSTLPTMAQMEKALSIGFETCRYGFIEGHVVIPRIHPNSICGANTTSGPIRTPQIPEWLIILASLLALALILAVCIAVNSRRRCGQKKKLVINSGNGAVEDRKPSGLNGEASKSQEMVHLVNKESSETPDQFMTADETRNLQNVDMKIGV

SEQ ID NO: 13167 - protein, 229 aa, Homo sapiens
  Payload ID: 2564
  Gene Symbol: CD44
  Gene Name: CD44 molecule (Indian blood group)
  ENSP ID: ENSP00000432718
  MOD_RES (1)..(1): Any amino acid
XQMEKALSIGFETCRYGFIEGHVVIPRIHPNSICAANNTGVYILTSNTSQYDTYCFNASAPPEEDCTSVTDLPNAFDGPITITIVNRDGTRYVQKGEYRTNPEDIYPSNPTDDDVSSGSSSERSSTSGGYIFYTFSTVHPIPDEDSPWITDSTDRIPATISTTPRAFDHTKQNQDWTQWNPSHSNPEVLLQTTTRMTDVDRNGTTAYEGNWNPEAHPPLIHHEHHEEEE

SEQ ID NO: 13168 - protein, 195 aa, Homo sapiens
  Payload ID: 2564
  Gene Symbol: CD44
  Gene Name: CD44 molecule (Indian blood group)
  ENSP ID: ENSP00000433189
  MOD_RES (1)..(1): Any amino acid
XFIEGHVVIPRIHPNSICAANNTGVYILTSNTSQYDTYCFNASAPPEEDCTSVTDLPNAFDGPITITIVNRDGTRYVQKGEYRTNPEDIYPSNPTDDDVSSGSSSERSSTSGGYIFYTFSTVHPIPDEDSPWITDSTDRIPATKQSNSQSFSTSHEGLEEDKDHPTTSTLTSSNRNDVTGGRRDPNHSEGSTTLL

SEQ ID NO: 13169 - protein, 191 aa, Homo sapiens
  Payload ID: 2564
  Gene Symbol: CD44
  Gene Name: CD44 molecule (Indian blood group)
  ENSP ID: ENSP00000434418
  MOD_RES (1)..(1): Any amino acid
XSTTPRAFDHTKQNQDWTQWNPSHSNPEVLLQTTTRMTVQATPSSTTEETATQKEQWFGNRWHEGYRQTPKEDSHSTTGTAASAHTSHPMQGRTTPSPEDSSWTDFFNPISHPMGRGHQAGRRMDMDSSHSITLQPTANPNTGLVEDLDRTGPLSMTTQQSNSQSFSTSHEGLEEDKDHPTTSTLTSSSKD

SEQ ID NO: 13170 - protein, 240 aa, Homo sapiens
  Payload ID: 2564
  Gene Symbol: CD44
  Gene Name: CD44 molecule (Indian blood group)
  ENSP ID: ENSP00000434465
DLNITCRFAGVFHVEKNGRYSISRTEAADLCKAFNSTLPTMAQMEKALSIGFETCRYGFIEGHVVIPRIHPNSICAANNTGVYILTSNTSQYDTYCFNASAPPEEDCTSVTDLPNAFDGPITITIVNRDGTRYVQKGEYRTNPEDIYPSNPTDDDVSSGSSSERSSTSGDRNDVTGGRRDPNHSEGSTTLLEGYTSHYPHTKESRTFIPVTSAKTGSFGVTAVTVGDSNSNVNRSLSGDQ

SEQ ID NO: 13171 - protein, 181 aa, Homo sapiens
  Payload ID: 2564
  Gene Symbol: CD44
  Gene Name: CD44 molecule (Indian blood group)
  ENSP ID: ENSP00000434530
  MOD_RES (1)..(1): Any amino acid
XRTEAADLCKAFNSTLPTMAQMEKALSIGFETCRYGFIEGHVVIPRIHPNSICAANNTGVYILTSNTSQYDTYCFNASAPPEEDCTSVTDLPNAFDGPITITIVNRDGTRYVQKGEYRTNPEDIYPSNPTDDDVSSGSSSERSSTSGDMDSSHSITLQPTANPNTGLVEDLDRTGPLSMTT

SEQ ID NO: 13172 - protein, 82 aa, Homo sapiens
  Payload ID: 2564
  Gene Symbol: CD44
  Gene Name: CD44 molecule (Indian blood group)
  ENSP ID: ENSP00000434920
SKHNLWSYKDTPNSRCGQKKKLVINSGNGAVEDRKPSGLNGEASKSQEMVHLVNKESSETPDQFMTADETRNLQNVDMKIGV

SEQ ID NO: 13173 - protein, 193 aa, Homo sapiens
  Payload ID: 2564
  Gene Symbol: CD44
  Gene Name: CD44 molecule (Indian blood group)
  ENSP ID: ENSP00000435321
IYPSNPTDDDVSSGSSSERSSTSGGYIFYTFSTVHPIPDEDSPWITDSTDRIPATSTSSNTISAGWEPNEENEDERDRHLSFSGSGIDDDEDFISSTNMDSSHSITLQPTANPNTGLVEDLDRTGPLSMTTQQSNSQSFSTSHEGLEEDKDHPTTSTLTSSNRNDVTGGRRDPNHSEGSTTLLEGYTSHYPHT

SEQ ID NO: 13174 - protein, 78 aa, Homo sapiens
  Payload ID: 2564
  Gene Symbol: CD44
  Gene Name: CD44 molecule (Indian blood group)
  ENSP ID: ENSP00000435377
MDKFWWHAAWGLCLVPLSLAQIDLNITCRFAGVFHVEKNGRYSISRTEAADLCKAFNSTLPTMAQMEKALSIGFETCR

SEQ ID NO: 13175 - protein, 118 aa, Homo sapiens
  Payload ID: 2564
  Gene Symbol: CD44
  Gene Name: CD44 molecule (Indian blood group)
  ENSP ID: ENSP00000436451
  MOD_RES (1)..(1): Any amino acid
XPDEDSPWITDSTDRIPATSWEPNEENEDERDRHLSFSGSGIDDDEDFISSTISTTPRAFDHTKQNQDWTQWNPSHSNPEVLLQTTTRMTDVDRNGTTAYEGNWNPEAHPPLIHHEHH

SEQ ID NO: 13176 - protein, 249 aa, Homo sapiens
  Payload ID: 2564
  Gene Symbol: CD44
  Gene Name: CD44 molecule (Indian blood group)
  ENSP ID: ENSP00000436549
EDCTSVTDLPNAFDGPITITIVNRDGTRYVQKGEYRTNPEDIYPSNPTDDDVSSGSSSERSSTSGGYIFYTFSTVHPIPDEDSPWITDSTDRIPATIQATPSSTTEETATQKEQWFGNRWHEGYRQTPKEDSHSTTGTAAASAHTSHPMQGRTTPSPEDSSWTDFFNPISHPMGRGHQAGRRMDMDSSHSITLQPTANPNTGLVEDLDRTGPLSMTTQQSNSQSFSTSHEGLEEDKDHPTTSTLTSSSK

SEQ ID NO: 13177 - protein, 243 aa, Homo sapiens
  Payload ID: 2564
  Gene Symbol: CD44
  Gene Name: CD44 molecule (Indian blood group)
  ENSP ID: ENSP00000436623
  MOD_RES (1)..(1): Any amino acid
XDLPNAFDGPITITIVNRDGTRYVQKGEYRTNPEDIYPSNPTDDDVSSGSSSERSSTSGGYIFYTFSTVHPIPDEDSPWITDSTDRIPATTLMSTSATATETATKRQETWDWFSWLFLPSESKNHLHTTTQMAGTSSNTISAGWEPNEENEDERDRHLSFSGSGIDDDEDFISSTNMDSSHSITLQPTANPNTGLVEDLDRTGPLSMTTQQSNSQSFSTSHEGLEEDKDHPTTSTLTSSSKDY

SEQ ID NO: 13178 - protein, 186 aa, Homo sapiens
  Payload ID: 2564
  Gene Symbol: CD44
  Gene Name: CD44 molecule (Indian blood group)
  ENSP ID: ENSP00000436980
RTNPEDIYPSNPTDDDVSSGSSSERSSTSGGYIFYTFSTVHPIPDEDSPWITDSTDRIPATSTSSNTISAGWEPNEENEDERDRHLSFSGSGIDDDEDFISSTRDQDTFHPSGGSHTTHGSESDGHSHGSQEGGANTTSGPIRTPQIPEWLIILASLLALALILAVCIAVNSRRRCGQKKKLVINS

SEQ ID NO: 13179 - protein, 399 aa, Homo sapiens
  Payload ID: 2565
  Gene Symbol: CD46
  Gene Name: CD46 molecule, complement regulatory protein
  Uniprot ID: P15529
  ENSP ID: ENSP00000313875
MEPPGRRECPFPSWRFPGLLLAAMVLLLYSFSDACEEPPTFEAMELIGKPKPYYEIGERVDYKCKKGYFYIPPLATHTICDRNHTWLPVSDDACYRETCPYIRDPLNGQAVPANGTYEFGYQMHFICNEGYYLIGEEILYCELKGSVAIWSGKPPICEKVLCTPPPKIKNGKHTFSEVEVFEYLDAVTYSCDPAPGPDPFSLIGESTIYCGDNSVWSRAAPECKVVKCRFPVVENGKQISGFGKKFYYKATVMFECDKGFYLDGSDTIVCDSNSTWDPPVPKCLKVLPPSSTKPPALSHSVSTSSTTKSPASSASGPRPTYKPPVSNYPGYPKPEEGILDSLDVWVIAVIVIAIVVGVAVICVVPYRYLQRRKKKGKADGGAEYATYQTKSTTPAEQRG

SEQ ID NO: 13180 - protein, 349 aa, Homo sapiens
  Payload ID: 2565
  Gene Symbol: CD46
  Gene Name: CD46 molecule, complement regulatory protein
  Uniprot ID: P15529
  ENSP ID: ENSP00000314664
MEPPGRRECPFPSWRFPGLLLAAMVLLLYSFSDACEEPPTFEAMELIGKPKPYYEIGERVDYKCKKGYFYIPPLATHTICDRNHTWLPVSDDACYRETCPYIRDPLNGQAVPANGTYEFGYQMHFICNEGYYLIGEEILYCELKGSVAIWSGKPPICEKVLCTPPPKIKNGKHTFSEVEVFEYLDAVTYSCDPAPGPDPFSLIGESTIYCGDNSVWSRAAPECKVVKCRFPVVENGKQISGFGKKFYYKATVMFECDKGFYLDGSDTIVCDSNSTWDPPVPKCLKGPRPTYKPPVSNYPGYPKPEEGILDSLDVWVIAVIVIAIGKQMVELNMPLTRLNQPLQQSREAE

SEQ ID NO: 13181 - protein, 384 aa, Homo sapiens
  Payload ID: 2565
  Gene Symbol: CD46
  Gene Name: CD46 molecule, complement regulatory protein
  Uniprot ID: P15529
  ENSP ID: ENSP00000346912
MEPPGRRECPFPSWRFPGLLLAAMVLLLYSFSDACEEPPTFEAMELIGKPKPYYEIGERVDYKCKKGYFYIPPLATHTICDRNHTWLPVSDDACYRETCPYIRDPLNGQAVPANGTYEFGYQMHFICNEGYYLIGEEILYCELKGSVAIWSGKPPICEKVLCTPPPKIKNGKHTFSEVEVFEYLDAVTYSCDPAPGPDPFSLIGESTIYCGDNSVWSRAAPECKVVKCRFPVVENGKQISGFGKKFYYKATVMFECDKGFYLDGSDTIVCDSNSTWDPPVPKCLKVSTSSTTKSPASSASGPRPTYKPPVSNYPGYPKPEEGILDSLDVWVIAVIVIAIVVGVAVICVVPYRYLQRRKKKGKADGGAEYATYQTKSTTPAEQRG

SEQ ID NO: 13182 - protein, 369 aa, Homo sapiens
  Payload ID: 2565
  Gene Symbol: CD46
  Gene Name: CD46 molecule, complement regulatory protein
  Uniprot ID: P15529
  ENSP ID: ENSP00000350346
MEPPGRRECPFPSWRFPGLLLAAMVLLLYSFSDACEEPPTFEAMELIGKPKPYYEIGERVDYKCKKGYFYIPPLATHTICDRNHTWLPVSDDACYRETCPYIRDPLNGQAVPANGTYEFGYQMHFICNEGYYLIGEEILYCELKGSVAIWSGKPPICEKVLCTPPPKIKNGKHTFSEVEVFEYLDAVTYSCDPAPGPDPFSLIGESTIYCGDNSVWSRAAPECKVVKCRFPVVENGKQISGFGKKFYYKATVMFECDKGFYLDGSDTIVCDSNSTWDPPVPKCLKGPRPTYKPPVSNYPGYPKPEEGILDSLDVWVIAVIVIAIVVGVAVICVVPYRYLQRRKKKGKADGGAEYATYQTKSTTPAEQRG

SEQ ID NO: 13183 - protein, 392 aa, Homo sapiens [sequence omitted]

SEQ ID NO: 13184 - protein, 355 aa, Homo sapiens
  Payload ID: 2565
  Gene Symbol: CD46
  Gene Name: CD46 molecule, complement regulatory protein
  Uniprot ID: P15529
  ENSP ID: ENSP00000353342
MEPPGRRECPFPSWRFPGLLLAAMVLLLYSFSDACEEPPTFEAMELIGKPKPYYEIGERVDYKCKKGYFYIPPLATHTICDRNHTWLPVSDDACYRETCPYIRDPLNGQAVPANGTYEFGYQMHFICNEGYYLIGEEILYCELKGSVAIWSGKPPICEKVLCTPPPKIKNGKHTFSEVEVFEYLDAVTYSCDPAPGPDPFSLIGESTIYCGDNSVWSRAAPECKVVKCRFPVVENGKQISGFGKKFYYKATVMFECDKGFYLDGSDTIVCDSNSTWDPPVPKCLKGYPKPEEGILDSLDVWVIAVIVIAIVVGVAVICVVPYRYLQRRKKKGKADGGAEYATYQTKSTTPAEQRG

SEQ ID NO: 13185 - protein, 362 aa, Homo sapiens
  Payload ID: 2565
  Gene Symbol: CD46
  Gene Name: CD46 molecule, complement regulatory protein
  Uniprot ID: P15529
  ENSP ID: ENSP00000356008
MEPPGRRECPFPSWRFPGLLLAAMVLLLYSFSDACEEPPTFEAMELIGKPKPYYEIGERVDYKCKKGYFYIPPLATHTICDRNHTWLPVSDDACYRETCPYIRDPLNGQAVPANGTYEFGYQMHFICNEGYYLIGEEILYCELKGSVAIWSGKPPICEKVLCTPPPKIKNGKHTFSEVEVFEYLDAVTYSCDPAPGPDPFSLIGESTIYCGDNSVWSRAAPECKVVKCRFPVVENGKQISGFGKKFYYKATVMFECDKGFYLDGSDTIVCDSNSTWDPPVPKCLKGPRPTYKPPVSNYPGYPKPEEGILDSLDVWVIAVIVIAIVVGVAVICVVPYRYLQRRKKKGTYLTDETHREVKFTSL

SEQ ID NO: 13186 - protein, 377 aa, Homo sapiens
  Payload ID: 2565
  Gene Symbol: CD46
  Gene Name: CD46 molecule, complement regulatory protein
  Uniprot ID: P15529
  ENSP ID: ENSP00000356009
MEPPGRRECPFPSWRFPGLLLAAMVLLLYSFSDACEEPPTFEAMELIGKPKPYYEIGERVDYKCKKGYFYIPPLATHTICDRNHTWLPVSDDACYRETCPYIRDPLNGQAVPANGTYEFGYQMHFICNEGYYLIGEEILYCELKGSVAIWSGKPPICEKVLCTPPPKIKNGKHTFSEVEVFEYLDAVTYSCDPAPGPDPFSLIGESTIYCGDNSVWSRAAPECKVVKCRFPVVENGKQISGFGKKFYYKATVMFECDKGFYLDGSDTIVCDSNSTWDPPVPKCLKVSTSSTTKSPASSASGPRPTYKPPVSNYPGYPKPEEGILDSLDVWVIAVIVIAIVVGVAVICVVPYRYLQRRKKKGTYLTDETHREVKFTSL

SEQ ID NO: 13187 - protein, 336 aa, Homo sapiens
  Payload ID: 2565
  Gene Symbol: CD46
  Gene Name: CD46 molecule, complement regulatory protein
  Uniprot ID: P15529
  ENSP ID: ENSP00000356014
MEPPGRRECPFPSWRFPGLLLAAMVLLLYSFSGETCPYIRDPLNGQAVPANGTYEFGYQMHFICNEGYYLIGEEILYCELKGSVAIWSGKPPICEKVLCTPPPKIKNGKHTFSEVEVFEYLDAVTYSCDPAPGPDPFSLIGESTIYCGDNSVWSRAAPECKVVKCRFPVVENGKQISGFGKKFYYKATVMFECDKGFYLDGSDTIVCDSNSTWDPPVPKCLKVLPPSSTKPPALSHSVSTSSTTKSPASSASGPRPTYKPPVSNYPGYPKPEEGILDSLDVWVIAVIVIAIVVGVAVICVVPYRYLQRRKKKGKADGGAEYATYQTKSTTPAEQRG

SEQ ID NO: 13188 - protein, 370 aa, Homo sapiens
  Payload ID: 2565
  Gene Symbol: CD46
  Gene Name: CD46 molecule, complement regulatory protein
  Uniprot ID: P15529
  ENSP ID: ENSP00000418471
MEPPGRRECPFPSWRFPGLLLAAMVLLLYSFSDACEEPPTFEAMELIGKPKPYYEIGERVDYKCKKGYFYIPPLATHTICDRNHTWLPVSDDACYRETCPYIRDPLNGQAVPANGTYEFGYQMHFICNEGYYLIGEEILYCELKGSVAIWSGKPPICEKVLCTPPPKIKNGKHTFSEVEVFEYLDAVTYSCDPAPGPDPFSLIGESTIYCGDNSVWSRAAPECKVVKCRFPVVENGKQISGFGKKFYYKATVMFECDKGFYLDGSDTIVCDSNSTWDPPVPKCLKVSTSSTTKSPASSASGYPKPEEGILDSLDVWVIAVIVIAIVVGVAVICVVPYRYLQRRKKKGKADGGAEYATYQTKSTTPAEQRG

SEQ ID NO: 13189 - protein, 78 aa, Homo sapiens
  Payload ID: 2565
  Gene Symbol: CD46
  Gene Name: CD46 molecule, complement regulatory protein
  ENSP ID: ENSP00000473449
  MOD_RES (1)..(1): Any amino acid
XPPVSNYPGYPKPEEGILDSLDVWVIAVIVIAIVVGVAVICVVPYRYLQRRKKKGKADGGAEYATYQTKSTTPAEQRG

SEQ ID NO: 13190 - protein, 305 aa, Homo sapiens
  Payload ID: 2566
  Gene Symbol: CD47
  Gene Name: CD47 molecule
  Uniprot ID: Q08722
  ENSP ID: ENSP00000347512
MWPLVAALLLGSACCGSAQLLFNKTKSVEFTFCNDTVVIPCFVTNMEAQNTTEVYVKWKFKGRDIYTFDGALNKSTVPTDFSSAKIEVSQLLKGDASLKMDKSDAVSHTGNYTCEVTELTREGETIIELKYRVVSWFSPNENILIVIFPIFAILLFWGQFGIKTLKYRSGGMDEKTIALLVAGLVITVIVIVGAILFVPGEYSLKNATGLGLIVTSTGILILLHYYVFSTAIGLTSFVIAILVIQVIAYILAVVGLSLCIAACIPMHGPLLISGLSILALAQLLGLVYMKFVASNQKTIQPPRNN

SEQ ID NO: 13191 - protein, 323 aa, Homo sapiens
  Payload ID: 2566
  Gene Symbol: CD47
  Gene Name: CD47 molecule
  Uniprot ID: Q08722
  ENSP ID: ENSP00000355361
MWPLVAALLLGSACCGSAQLLFNKTKSVEFTFCNDTVVIPCFVTNMEAQNTTEVYVKWKFKGRDIYTFDGALNKSTVPTDFSSAKIEVSQLLKGDASLKMDKSDAVSHTGNYTCEVTELTREGETIIELKYRVVSWFSPNENILIVIFPIFAILLFWGQFGIKTLKYRSGGMDEKTIALLVAGLVITVIVIVGAILFVPGEYSLKNATGLGLIVTSTGILILLHYYVFSTAIGLTSFVIAILVIQVIAYILAVVGLSLCIAACIPMHGPLLISGLSILALAQLLGLVYMKFVASNQKTIQPPRKAVEEPLNAFKESKGMMNDE

SEQ ID NO: 13192 - protein, 86 aa, Homo sapiens
  Payload ID: 2566
  Gene Symbol: CD47
  Gene Name: CD47 molecule
  ENSP ID: ENSP00000381309
  MOD_RES (1)..(1): Any amino acid
XWTESLYCGVYTNAWPSSDFRFEYLSSSTITWTSLYEICGVQRDTYSQLKGKKRQASNQKTIQPPRKAVEEPLNAFKESKGMMNDE

SEQ ID NO: 13193 - protein, 109 aa, Homo sapiens
  Payload ID: 2566
  Gene Symbol: CD47
  Gene Name: CD47 molecule
  ENSP ID: ENSP00000430843
  MOD_RES (1)..(1): Any amino acid
XKNATGLGLIVTSTGILILLHYYVFSTAIGLTSFVIAILVIQVIAYILAVVGLSLCIAACIPMHGPLLISGLSILALAQLLGLVYMKFVASNQKTIQPPRKAVEEPLNE

SEQ ID NO: 13194 - protein, 169 aa, Homo sapiens
  Payload ID: 2567
  Gene Symbol: CD48
  Gene Name: CD48 molecule
  Uniprot ID: P09326
  ENSP ID: ENSP00000357024
MCSRGWDSCLALELLLLPLSLLVTSIQGHLVHMTVVSGSNVTLNISESLPENYKQLTWFYTFDQKIVEWDSRKSKYFESKFKGRVRLDPQSGALYISKVQKEDNSTYIMRVLKKTGNEQEWKIKLQVLGESGEPKSKSPLQWPQMDHCRASWEAWGTLGEEERKTSGQV

SEQ ID NO: 13195 - protein, 243 aa, Homo sapiens
  Payload ID: 2567
  Gene Symbol: CD48
  Gene Name: CD48 molecule
  Uniprot ID: P09326
  ENSP ID: ENSP00000357025
MCSRGWDSCLALELLLLPLSLLVTSIQGHLVHMTVVSGSNVTLNISESLPENYKQLTWFYTFDQKIVEWDSRKSKYFESKFKGRVRLDPQSGALYISKVQKEDNSTYIMRVLKKTGNEQEWKIKLQVLDPVPKPVIKIEKIEDMDDNCYLKLSCVIPGESVNYTWYGDKRPFPKELQNSVLETTLMPHNYSRCYTCQVSNSVSSKNGTVCLSPPCTLARSFGVEWIASWLVVTVPTILGLLLT

SEQ ID NO: 13196 - protein, 252 aa, Homo sapiens
  Payload ID: 2567
  Gene Symbol: CD48
  Gene Name: CD48 molecule
  ENSP ID: ENSP00000484431
MCSRGWDSCLALELLLLPLSLLVTSIQGHLVHMTVVSGSNVTLNISESLPENYKQLTWFYTFDQKIVEWDSRKSKYFESKFKGRVRLDPQSGALYISKVQKEDNSTYIMRVLKKTGNEQEWKIKLQVLDPVPKPVIKIEKIEDMDDNCYLKLSCVIPGESVNYTWYGDKRPFPKELQNSVLETTLMPHNYSRCYTCQVSNSVSSKNGTVCLSPPCTLGKKDPWELRGAQGNWSCFEQRKAGGPIQPPCTVWW

SEQ ID NO: 13197 - protein, 495 aa, Homo sapiens
  Payload ID: 2568
  Gene Symbol: CD5
  Gene Name: CD5 molecule
  Uniprot ID: P06127
  ENSP ID: ENSP00000342681
MPMGSLQPLATLYLLGMLVASCLGRLSWYDPDFQARLTRSNSKCQGQLEVYLKDGWHMVCSQSWGRSSKQWEDPSQASKVCQRLNCGVPLSLGPFLVTYTPQSSIICYGQLGSFSNCSHSRNDMCHSLGLTCLEPQKTTPPTTRPPPTTTPEPTAPPRLQLVAQSGGQHCAGVVEFYSGSLGGTISYEAQDKTQDLENFLCNNLQCGSFLKHLPETEAGRAQDPGEPREHQPLPIQWKIQNSSCTSLEHCFRKIKPQKSGRVLALLCSGFQPKVQSRLVGGSSICEGTVEVRQGAQWAALCDSSSARSSLRWEEVCREQQCGSVNSYRVLDAGDPTSRGLFCPHQKLSQCHELWERNSYCKKVFVTCQDPNPAGLAAGTVASIILALVLLVVLLVVCGPLAYKKLVKKFRQKKQRQWIGPTGMNQNMSFHRNHTATVRSHAENPTASHVDNEYSQPPRNSHLSAYPALEGALHRSSMQPDNSSDSDYDLHGAQRL

SEQ ID NO: 13198 - protein, 165 aa, Homo sapiens
  Payload ID: 2568
  Gene Symbol: CD5
  Gene Name: CD5 molecule
  ENSP ID: ENSP00000440899
MPMGSLQPLATLYLLGMLVASCLGRLSWYDPDFQARLTRSNSKCQGQLEVYLKDGWHMVCSQSWGRSSKQWEDPSQASKVCQRLNCGVPLSLGPFLVTYTPQSSIICYGQLGSFSNCSHSRNDMCHSLGLTCLEPQKTTPPTTRPPPTTTPEPTAMRPRTRPRTW

SEQ ID NO: 13199 - protein, 347 aa, Homo sapiens
  Payload ID: 2569
  Gene Symbol: CD5L
  Gene Name: CD5 molecule-like
  Uniprot ID: O43866
  ENSP ID: ENSP00000357156
MALLFSLILAICTRPGFLASPSGVRLVGGLHRCEGRVEVEQKGQWGTVCDDGWDIKDVAVLCRELGCGAASGTPSGILYEPPAEKEQKVLIQSVSCTGTEDTLAQCEQEEVYDCSHDEDAGASCENPESSFSPVPEGVRLADGPGHCKGRVEVKHQNQWYTVCQTGWSLRAAKVVCRQLGCGRAVLTQKRCNKHAYGRKPIWLSQMSCSGREATLQDCPSGPWGKNTCNHDEDTWVECEDPFDLRLVGGDNLCSGRLEVLHKGVWGSVCDDNWGEKEDQVVCKQLGCGKSLSPSFRDRKCYGPGVGRIWLDNVRCSGEEQSLEQCQHRFWGFHDCTHQEDVAVICSG

SEQ ID NO: 13200 - protein, 61 aa, Homo sapiens
  Payload ID: 2570
  Gene Symbol: CD52
  Gene Name: CD52 molecule
  Uniprot ID: P31358
  ENSP ID: ENSP00000363330
MKRFLFLLLTISLLVMVQIQTGLSGQNDTSQTSSPSASSNISGGIFLFFVANAIIHLFCFS

SEQ ID NO: 13201 - protein, 219 aa, Homo sapiens
  Payload ID: 2571
  Gene Symbol: CD53
  Gene Name: CD53 molecule
  Uniprot ID: P19397
  ENSP ID: ENSP00000271324
MGMSSLKLLKYVLFFFNLLFWICGCCILGFGIYLLIHNNFGVLFHNLPSLTLGNVFVIVGSIIMVVAFLGCMGSIKENKCLLMSFFILLLIILLAEVTLAILLFVYEQKLNEYVAKGLTDSIHRYHSDNSTKAAWDSIQSFLQCCGINGTSDWTSGPPASCPSDRKVEGCYAKARLWFHSNFLYIGIITICVCVIEVLGMSFALTLNCQIDKTSQTIGL

SEQ ID NO: 13202 - protein, 440 aa, Homo sapiens
  Payload ID: 2572
  Gene Symbol: CD55
  Gene Name: CD55 molecule, decay accelerating  factor for complement (Cromer blood group)
  Uniprot ID: P08174
  ENSP ID: ENSP00000316333
MTVARPSVPAALPLLGELPRLLLLVLLCLPAVWGDCGLPPDVPNAQPALEGRTSFPEDTVITYKCEESFVKIPGEKDSVICLKGSQWSDIEEFCNRSCEVPTRLNSASLKQPYITQNYFPVGTVVEYECRPGYRREPSLSPKLTCLQNLKWSTAVEFCKKKSCPNPGEIRNGQIDVPGGILFGATISFSCNTGYKLFGSTSSFCLISGSSVQWSDPLPECREIYCPAPPQIDNGIIQGERDHYGYRQSVTYACNKGFTMIGEHSIYCTVNNDEGEWSGPPPECRGKSLTSKVPPTVQKPTTVNVPTTEVSPTSQKTTTKTTTPNAQATRSTPVSRTTKHFHETTPNKGSGTTSGTTRLLSGSRPVTQAGMRWCDRSSLQSRTPGFKRSFHFSLPSSWYYRAHVFHVDRFAWDASNHGLADLAKEELRRKYTQVYRLFLVS

SEQ ID NO: 13203 - protein, 326 aa, Homo sapiens
  Payload ID: 2572
  Gene Symbol: CD55
  Gene Name: CD55 molecule, decay accelerating  factor for complement (Cromer blood group)
  ENSP ID: ENSP00000340631
  MOD_RES (1)..(1): Any amino acid
XAALPLLGELPRLLLLVLLCLPAVWESSRVEHTMLQTCMSSLSGDCGLPPDVPNAQPALEGRTSFPEDTVITYKCEESFVKIPGEKDSVICLKGSQWSDIEEFCNRSCEVPTRLNSASLKQPYITQNYFPVGTVVEYECRPGYRREPSLSPKLTCLQNLKWSTAVEFCKKKSCPNPGEIRNGQIDVPGGILFGATISFSCNTGYKLFGSTSSFCLISGSSVQWSDPLPECREIYCPAPPQIDNGIIQGERDHYGYRQSVTYACNKGFTMIGEHSIYCTVNNDEGEWSGPPPECRGKSLTSKVPPTVQKPTTVNVPTTEVSPTSQKT

SEQ ID NO: 13204 - protein, 444 aa, Homo sapiens
  Payload ID: 2572
  Gene Symbol: CD55
  Gene Name: CD55 molecule, decay accelerating  factor for complement (Cromer blood group)
  ENSP ID: ENSP00000356030
MTVARPSVPAALPLLGELPRLLLLVLLCLPAVWGDCGLPPDVPNAQPALEGRTSFPEDTVITYKCEESFVKIPGEKDSVICLKGSQWSDIEEFCNRSCEVPTRLNSASLKQPYITQNYFPVGTVVEYECRPGYRREPSLSPKLTCLQNLKWSTAVEFCKKKSCPNPGEIRNGQIDVPGGILFGATISFSCNTGYKLFGSTSSFCLISGSSVQWSDPLPECREIYCPAPPQIDNGIIQGERDHYGYRQSVTYACNKGFTMIGEHSIYCTVNNDEGEWSGPPPECRGKSLTSKVPPTVQKPTTVNVPTTEVSPTSQKTTTKTTTPNAQATRSTPVSRTTKHFHETTPNKGSGTTSGTTRLLSGSRPVTQAGMRWCDRSSLQSRTPGFKRSFHFSLPSSWYYRCVPRHPAKFLKFIFCRDRIFLCCPGWFQTPGRKRFFRPPKTLRL

SEQ ID NO: 13205 - protein, 381 aa, Homo sapiens
  Payload ID: 2572
  Gene Symbol: CD55
  Gene Name: CD55 molecule, decay accelerating  factor for complement (Cromer blood group)
  Uniprot ID: P08174
  ENSP ID: ENSP00000356031
MTVARPSVPAALPLLGELPRLLLLVLLCLPAVWGDCGLPPDVPNAQPALEGRTSFPEDTVITYKCEESFVKIPGEKDSVICLKGSQWSDIEEFCNRSCEVPTRLNSASLKQPYITQNYFPVGTVVEYECRPGYRREPSLSPKLTCLQNLKWSTAVEFCKKKSCPNPGEIRNGQIDVPGGILFGATISFSCNTGYKLFGSTSSFCLISGSSVQWSDPLPECREIYCPAPPQIDNGIIQGERDHYGYRQSVTYACNKGFTMIGEHSIYCTVNNDEGEWSGPPPECRGKSLTSKVPPTVQKPTTVNVPTTEVSPTSQKTTTKTTTPNAQATRSTPVSRTTKHFHETTPNKGSGTTSGTTRLLSGHTCFTLTGLLGTLVTMGLLT

SEQ ID NO: 13206 - protein, 550 aa, Homo sapiens
  Payload ID: 2572
  Gene Symbol: CD55
  Gene Name: CD55 molecule, decay accelerating  factor for complement (Cromer blood group)
  ENSP ID: ENSP00000356034
MTVARPSVPAALPLLGELPRLLLLVLLCLPAVWGDCGLPPDVPNAQPALEGRTSFPEDTVITYKCEESFVKIPGEKDSVICLKGSQWSDIEEFCNRSCEVPTRLNSASLKQPYITQNYFPVGTVVEYECRPGYRREPSLSPKLTCLQNLKWSTAVEFCKKKSCPNPGEIRNGQIDVPGGILFGATISFSCNTGYKLFGSTSSFCLISGSSVQWSDPLPECREIYCPAPPQIDNGIIQGERDHYGYRQSVTYACNKGFTMIGEHSIYCTVNNDEGEWSGPPPECRGKSLTSKVPPTVQKPTTVNVPTTEVSPTSQKTTTKTTTPNAQGTETPSVLQKHTTENVSATRTPPTPQKPTTVNVPATIVTPTPKPTTINVPATGVSSTPQRHTIVNVSATGTLPTLQKPTRANDSATKSPAAAQTSFISKTLSTKTPSAAQNPMMTNASATQATLTAQKFTTAKVAFTQSPSAARKSTNVHSPVTNGLKSTQRFPSAHITATRSTPVSRTTKHFHETTPNKGSGTTSGTTRLLSGHTCFTLTGLLGTLVTMGLLT

SEQ ID NO: 13207 - protein, 317 aa, Homo sapiens
  Payload ID: 2572
  Gene Symbol: CD55
  Gene Name: CD55 molecule, decay accelerating  factor for complement (Cromer blood group)
  ENSP ID: ENSP00000375788
MTVARPSVPAALPLLGELPRLLLLVLLCLPAVWGDCGLPPDVPNAQPALEGRTSFPEDTVITYKCEESFVKIPGEKDSVICLKGSQWSDIEEFCNQKSCPNPGEIRNGQIDVPGGILFGATISFSCNTGYKLFGSTSSFCLISGSSVQWSDPLPECREIYCPAPPQIDNGIIQGERDHYGYRQSVTYACNKGFTMIGEHSIYCTVNNDEGEWSGPPPECRGKSLTSKVPPTVQKPTTVNVPTTEVSPTSQKTTTKTTTPNAQATRSTPVSRTTKHFHETTPNKGSGTTSGTTRLLSGHTCFTLTGLLGTLVTMGLLT

SEQ ID NO: 13208 - protein, 240 aa, Homo sapiens
  Payload ID: 2573
  Gene Symbol: CD58
  Gene Name: CD58 molecule
  ENSP ID: ENSP00000358499
MVAGSDAGRALGVLSVVCLLHCFGFISCFSQQIYGVVYGNVTFHVPSNVPLKEVLWKKQKDKVAELENSEFRAFSSFKNRVYLDTVSGSLTIYNLTSSDEDEYEMESPNITDTMKFFLYVLESLPSPTLTCALTNGSIEVQCMIPEHYNSHRGLIMYSWDCPMEQCKRNSTSIYFKMENDLPQKIQCTLSNPLFNTTSSIILTTCIPSSGHSRHRYALIPIPLAVITTCIVLYMNGMYAF

SEQ ID NO: 13209 - protein, 250 aa, Homo sapiens
  Payload ID: 2573
  Gene Symbol: CD58
  Gene Name: CD58 molecule
  Uniprot ID: P19256
  ENSP ID: ENSP00000358501
MVAGSDAGRALGVLSVVCLLHCFGFISCFSQQIYGVVYGNVTFHVPSNVPLKEVLWKKQKDKVAELENSEFRAFSSFKNRVYLDTVSGSLTIYNLTSSDEDEYEMESPNITDTMKFFLYVLESLPSPTLTCALTNGSIEVQCMIPEHYNSHRGLIMYSWDCPMEQCKRNSTSIYFKMENDLPQKIQCTLSNPLFNTTSSIILTTCIPSSGHSRHRYALIPIPLAVITTCIVLYMNGILKCDRKPDRTNSN

SEQ ID NO: 13210 - protein, 248 aa, Homo sapiens
  Payload ID: 2573
  Gene Symbol: CD58
  Gene Name: CD58 molecule
  Uniprot ID: P19256
  ENSP ID: ENSP00000409080
MVAGSDAGRALGVLSVVCLLHCFGFISCFSQQIYGVVYGNVTFHVPSNVPLKEVLWKKQKDKVAELENSEFRAFSSFKNRVYLDTVSGSLTIYNLTSSDEDEYEMESPNITDTMKFFLYVLESLPSPTLTCALTNGSIEVQCMIPEHYNSHRGLIMYSWDCPMEQCKRNSTSIYFKMENDLPQKIQCTLSNPLFNTTSSIILTTCIPSSGHSRHRYALIPIPLAVITTCIVLYMNGILKCDRKPDRTK

SEQ ID NO: 13211 - protein, 237 aa, Homo sapiens
  Payload ID: 2573
  Gene Symbol: CD58
  Gene Name: CD58 molecule
  Uniprot ID: P19256
  ENSP ID: ENSP00000432773
MVAGSDAGRALGVLSVVCLLHCFGFISCFSQQIYGVVYGNVTFHVPSNVPLKEVLWKKQKDKVAELENSEFRAFSSFKNRVYLDTVSGSLTIYNLTSSDEDEYEMESPNITDTMKFFLYVLESLPSPTLTCALTNGSIEVQCMIPEHYNSHRGLIMYSWDCPMEQCKRNSTSIYFKMENDLPQKIQCTLSNPLFNTTSSIILTTCIPSSGHSRHRYALIPIPLAVITTCIVLYMNVL

SEQ ID NO: 13212 - protein, 131 aa, Homo sapiens
  Payload ID: 2573
  Gene Symbol: CD58
  Gene Name: CD58 molecule
  ENSP ID: ENSP00000433648
FSQQIYGVVYGNVTFHVPSNVPLKEVLWKKQKDKVAELENSEFRAFSSFKNRVYLDTVSGSLTIYNLTSSDEDEYEMESPNITDTMKFFLYVLGHSRHRYALIPIPLAVITTCIVLYMNGILKCDRKPDRT

SEQ ID NO: 13213 - protein, 128 aa, Homo sapiens
  Payload ID: 2574
  Gene Symbol: CD59
  Gene Name: CD59 molecule, complement regulatory protein
  Uniprot ID: P13987
  ENSP ID: ENSP00000340210
MGIQGGSVLFGLLLVLAVFCHSGHSLQCYNCPNPTADCKTAVNCSSDFDACLITKAGLQVYNKCWKFEHCNFNDVTTRLRENELTYYCCKKDLCNFNEQLENGGTSLSEKTVLLLVTPFLAAAWSLHP

SEQ ID NO: 13214 - protein, 128 aa, Homo sapiens; identical to SEQ ID NO: 13213
  Payload ID: 2574
  Gene Symbol: CD59
  Gene Name: CD59 molecule, complement regulatory protein
  Uniprot ID: P13987
  ENSP ID: ENSP00000379191

SEQ ID NO: 13215 - protein, 128 aa, Homo sapiens; identical to SEQ ID NO: 13213
  Payload ID: 2574
  Gene Symbol: CD59
  Gene Name: CD59 molecule, complement regulatory protein
  Uniprot ID: P13987
  ENSP ID: ENSP00000402425

SEQ ID NO: 13216 - protein, 128 aa, Homo sapiens; identical to SEQ ID NO: 13213
  Payload ID: 2574
  Gene Symbol: CD59
  Gene Name: CD59 molecule, complement regulatory protein
  Uniprot ID: P13987
  ENSP ID: ENSP00000403511

SEQ ID NO: 13217 - protein, 128 aa, Homo sapiens; identical to SEQ ID NO: 13213
  Payload ID: 2574
  Gene Symbol: CD59
  Gene Name: CD59 molecule, complement regulatory protein
  Uniprot ID: P13987
  ENSP ID: ENSP00000404822

SEQ ID NO: 13218 - protein, 128 aa, Homo sapiens; identical to SEQ ID NO: 13213
  Payload ID: 2574
  Gene Symbol: CD59
  Gene Name: CD59 molecule, complement regulatory protein
  Uniprot ID: P13987
  ENSP ID: ENSP00000410182

SEQ ID NO: 13219 - protein, 130 aa, Homo sapiens
  Payload ID: 2574
  Gene Symbol: CD59
  Gene Name: CD59 molecule, complement regulatory protein
  ENSP ID: ENSP00000432362
MGIQGGSVLFGLLLVLAVFCHSGHSLQCYNCPNPTADCKTAVNCSSDFDACLITKAGLQVYNKCWKFEHCNFNDVTTRLRENELTYYCCKKDLCNFNEQLENDTFLKALKDEKLQGLKTKQPGKKSASLS

SEQ ID NO: 13220 - protein, 128 aa, Homo sapiens; identical to SEQ ID NO: 13213
  Payload ID: 2574
  Gene Symbol: CD59
  Gene Name: CD59 molecule, complement regulatory protein
  Uniprot ID: P13987
  ENSP ID: ENSP00000432942

SEQ ID NO: 13221 - protein, 128 aa, Homo sapiens; identical to SEQ ID NO: 13213
  Payload ID: 2574
  Gene Symbol: CD59
  Gene Name: CD59 molecule, complement regulatory protein
  Uniprot ID: P13987
  ENSP ID: ENSP00000434617

SEQ ID NO: 13222 - protein, 128 aa, Homo sapiens; identical to SEQ ID NO: 13213
  Payload ID: 2574
  Gene Symbol: CD59
  Gene Name: CD59 molecule, complement regulatory protein
  Uniprot ID: P13987
  ENSP ID: ENSP00000435179

SEQ ID NO: 13223 - protein, 52 aa, Homo sapiens
  Payload ID: 2574
  Gene Symbol: CD59
  Gene Name: CD59 molecule, complement regulatory protein
  ENSP ID: ENSP00000436497
  MOD_RES (1)..(1): Any amino acid
XRLRENELTYYCCKKDLCNFNEQLENGGTSLSEKTVLLLVTPFLAAAWSLHP

SEQ ID NO: 13224 - protein, 119 aa, Homo sapiens
  Payload ID: 2574
  Gene Symbol: CD59
  Gene Name: CD59 molecule, complement regulatory protein
  ENSP ID: ENSP00000436737
MGIQGGSVLFGLLLVLAVFCHSGHSLQCYNCPNPTADCKTAVNCSSDFDACLITKAELGYHYVAQAGRRQSSHFSLLKCWDYRCEPSHWPHCPYFNWGYKCITSVGSLSIAISTTSQPA

SEQ ID NO: 13225 - protein, 108 aa, Homo sapiens
  Payload ID: 2574
  Gene Symbol: CD59
  Gene Name: CD59 molecule, complement regulatory protein
  ENSP ID: ENSP00000437122
MGIQGGSVLFGLLLVLAVFCHSGHSLQCYNCPNPTADCKTAVNCSSDFDACLITKAGLQVYNKCWKFEHCNFNDVTTRLRENELTYYCCKKDLCNFNEQLENGSEPGA

SEQ ID NO: 13226 - protein, 668 aa, Homo sapiens
  Payload ID: 2575
  Gene Symbol: CD6
  Gene Name: CD6 molecule
  Uniprot ID: P30203
  ENSP ID: ENSP00000323280
MWLFFGITGLLTAALSGHPSPAPPDQLNTSSAESELWEPGERLPVRLTNGSSSCSGTVEVRLEASWEPACGALWDSRAAEAVCRALGCGGAEAASQLAPPTPELPPPPAAGNTSVAANATLAGAPALLCSGAEWRLCEVVEHACRSDGRRARVTCAENRALRLVDGGGACAGRVEMLEHGEWGSVCDDTWDLEDAHVVCRQLGCGWAVQALPGLHFTPGRGPIHRDQVNCSGAEAYLWDCPGLPGQHYCGHKEDAGAVCSEHQSWRLTGGADRCEGQVEVHFRGVWNTVCDSEWYPSEAKVLCQSLGCGTAVERPKGLPHSLSGRMYYSCNGEELTLSNCSWRFNNSNLCSQSLAARVLCSASRSLHNLSTPEVPASVQTVTIESSVTVKIENKESRELMLLIPSIVLGILLLGSLIFIAFILLRIKGKYALPVMVNHQHLPTTIPAGSNSYQPVPITIPKEVFMLPIQVQAPPPEDSDSGSDSDYEHYDFSAQPPVALTTFYNSQRHRVTDEEVQQSRFQMPPLEEGLEELHASHIPTANPGHCITDPPSLGPQYHPRSNSESSTSSGEDYCNSPKSKLPPWNPQVFSSERSSFLEQPPNLELAGTQPAFSAGPPADDSSSTSSGEWYQNFQPPPQPPSEEQFGCPGSPSPQPDSTDNDDYDDISAA

SEQ ID NO: 13227 - protein, 468 aa, Homo sapiens
  Payload ID: 2575
  Gene Symbol: CD6
  Gene Name: CD6 molecule
  ENSP ID: ENSP00000340334
MWLFFGITGLLTAALSGHPSPAPPDQLNTSSAESELWEPGERLPVRLTNGSSSCSGTVEVRLEASWEPACGALWDSRAAEAVCRALGCGGAEAASQLAPPTPELPPPPAAGNTSVAANATLAGAPALLCSGAEWRLCEVVEHACRSDGRRARVTCAENRALRLVDGGGACAGRVEMLEHGEWGSVCDDTWDLEDAHVVCRQLGCGWAVQALPGLHFTPGRGPIHRDQVNCSGAEAYLWDCPGLPGQHYCGHKEDAGAVCSEHQSWRLTGGADRCEGQVEVHFRGVWNTVCDSEWYPSEAKVLCQSLGCGTAVERPKGLPHSLSGRMYYSCNGEELTLSNCSWRFNNSNLCSQSLAARVLCSASRSLHNLSTPEVPASVQTVTIESSVTVKIENKESRELMLLIPSIVLGILLLGSLIFIAFILLRIKGKYALPVMVNHQHLPTTIPAGSNSYQPVPITIPKEGPGPAP

SEQ ID NO: 13228 - protein, 601 aa, Homo sapiens
  Payload ID: 2575
  Gene Symbol: CD6
  Gene Name: CD6 molecule
  Uniprot ID: P30203
  ENSP ID: ENSP00000340628
MWLFFGITGLLTAALSGHPSPAPPDQLNTSSAESELWEPGERLPVRLTNGSSSCSGTVEVRLEASWEPACGALWDSRAAEAVCRALGCGGAEAASQLAPPTPELPPPPAAGNTSVAANATLAGAPALLCSGAEWRLCEVVEHACRSDGRRARVTCAENRALRLVDGGGACAGRVEMLEHGEWGSVCDDTWDLEDAHVVCRQLGCGWAVQALPGLHFTPGRGPIHRDQVNCSGAEAYLWDCPGLPGQHYCGHKEDAGAVCSEHQSWRLTGGADRCEGQVEVHFRGVWNTVCDSEWYPSEAKVLCQSLGCGTAVERPKGLPHSLSGRMYYSCNGEELTLSNCSWRFNNSNLCSQSLAARVLCSASRSLHNLSTPEVPASVQTVTIESSVTVKIENKESRELMLLIPSIVLGILLLGSLIFIAFILLRIKGKYVFMLPIQVQAPPPEDSDSGSDSDYEHYDFSAQPPVALTTFYNSQRHRVTDEEVQQSRFQMPPLEEGLEELHASHIPTANPGHCITDPPSLGPQYHPRSNSESSTSSGEDYCNSPKSKLPPWNPQVFSSERSSFLEQPPNLELAGTQPAFSGSPSPQPDSTDNDDYDDISAA

SEQ ID NO: 13229 - protein, 592 aa, Homo sapiens
  Payload ID: 2575
  Gene Symbol: CD6
  Gene Name: CD6 molecule
  Uniprot ID: P30203
  ENSP ID: ENSP00000390676
MWLFFGITGLLTAALSGHPSPAPPDQLNTSSAESELWEPGERLPVRLTNGSSSCSGTVEVRLEASWEPACGALWDSRAAEAVCRALGCGGAEAASQLAPPTPELPPPPAAGNTSVAANATLAGAPALLCSGAEWRLCEVVEHACRSDGRRARVTCAENRALRLVDGGGACAGRVEMLEHGEWGSVCDDTWDLEDAHVVCRQLGCGWAVQALPGLHFTPGRGPIHRDQVNCSGAEAYLWDCPGLPGQHYCGHKEDAGAVCSEHQSWRLTGGADRCEGQVEVHFRGVWNTVCDSEWYPSEAKVLCQSLGCGTAVERPKGLPHSLSGRMYYSCNGEELTLSNCSWRFNNSNLCSQSLAARVLCSASRSLHNLSTPEVPASVQTVTIESSVTVKIENKESRELMLLIPSIVLGILLLGSLIFIAFILLRIKGKYALPVMVNHQHLPTTIPAGSNSYQPVPITIPKEDSQRHRVTDEEVQQSRFQMPPLEEGLEELHASHIPTANPGHCITDPPSLGPQYHPRSNSESSTSSGEDYCNSPKSKLPPWNPQVFSSERSSFLEQPPNLELAGTQPAFSGSPSPQPDSTDNDDYDDISAA

SEQ ID NO: 13230 - protein, 422 aa, Homo sapiens
  Payload ID: 2575
  Gene Symbol: CD6
  Gene Name: CD6 molecule
  ENSP ID: ENSP00000410638
MWLFFGITGLLTAALSGHPSPAPPDQLNTSSAESELWEPGERLPVRLTNGSSSCSGTVEVRLEASWEPACGALWDSRAAEAVCRALGCGGAEAASQLAPPTPELPPPPAAGNTSVAANATLAGAPALLCSGAEWRLCEVVEHACRSDGRRARVTCAENRALRLVDGGGACAGRVEMLEHGEWGSVCDDTWDLEDAHVVCRQLGCGWAVQALPGLHFTPGRGPIHRDQVNCSGAEAYLWDCPGLPGQHYCGHKEDAGAVCSASRSLHNLSTPEVPASVQTVTIESSVTVKIENKESRELMLLIPSIVLGILLLGSLIFIAFILLRIKGKYVFMLPIQVQAPPPEDSDSGSDSDYEHYDFSAQPPVALTTFYNSQRHRVTDEEVQQSRFQMPPLEEGLEELHASHIPTANPGHCITDPPSLGPQ

SEQ ID NO: 13231 - protein, 278 aa, Homo sapiens
  Payload ID: 2575
  Gene Symbol: CD6
  Gene Name: CD6 molecule
  ENSP ID: ENSP00000440055
MWLFFGITGLLTAALSGHPSPAPPDQLNTSSAESELWEPGERLPVRLTNGSSSCSGTVEVRLEASWEPACGALWDSRAAEAVCRALGCGGAEAASQLAPPTPELPPPPAAGNTSVAANATLAGAPALLCSGAEWRLCEVVEHACRSDGRRARVTCAENRALRLVDGGGACAGRVEMLEHGEWGSVCDDTWDLEDAHVVCRQLGCGWAVQALPGLHFTPGRGPIHRDQVNCSGAEAYLWDCPGLPGQHYCGHKEDAGAVCSESSVTVKIENKESRELML

SEQ ID NO: 13232 - protein, 185 aa, Homo sapiens
  Payload ID: 2575
  Gene Symbol: CD6
  Gene Name: CD6 molecule
  ENSP ID: ENSP00000443747
  MOD_RES (1)..(1): Any amino acid
XNRALRLVDGGGACAGRVEMLEHGEWGSVCDDTWDLEDAHVVCRQLGCGWAVQALPGLHFTPGRGPIHRDQVNCSGAEAYLWDCPGLPGQHYCGHKEDAGAVCSASRSLHNLSTPEVPASVQTVTIESSVTVKIENKESRELMLLIPSIVLGILLLGSLIFIAFILLRIKGKYALPVMVNHQHLP

SEQ ID NO: 13233 - protein, 38 aa, Homo sapiens
  Payload ID: 2575
  Gene Symbol: CD6
  Gene Name: CD6 molecule
  ENSP ID: ENSP00000443748
MWLFFGITGLLTAALSGCTVAKWIQLLGEICCFAGMGF

SEQ ID NO: 13234 - protein, 238 aa, Homo sapiens
  Payload ID: 2576
  Gene Symbol: CD63
  Gene Name: CD63 molecule
  Uniprot ID: P08962
  ENSP ID: ENSP00000257857
MAVEGGMKCVKFLLYVLLLAFCACAVGLIAVGVGAQLVLSQTIIQGATPGSLLPVVIIAVGVFLFLVAFVGCCGACKENYCLMITFAIFLSLIMLVEVAAAIAGYVFRDKVMSEFNNNFRQQMENYPKNNHTASILDRMQADFKCCGAANYTDWEKIPSMSKNRVPDSCCINVTVGCGINFNEKAIHKEGCVEKIGGWLRKNVLVVAAAALGIAFVEVLGIVFACCLVKSIRSGYEVM

SEQ ID NO: 13235 - protein, 238 aa, Homo sapiens; identical to SEQ ID NO: 13234
  Payload ID: 2576
  Gene Symbol: CD63
  Gene Name: CD63 molecule
  Uniprot ID: P08962
  ENSP ID: ENSP00000393502

SEQ ID NO: 13236 - protein, 215 aa, Homo sapiens
  Payload ID: 2576
  Gene Symbol: CD63
  Gene Name: CD63 molecule
  ENSP ID: ENSP00000446752
MAVEGGMKCVKFLLYVLLLAFCACAVGLIAVGVGAQLVLSQTIIQGATPGSLLPVVIIAVGVFLFLVAFVGCCGACKENYCLMITFAIFLSLIMLVEVAAAIAGYVFRDKVMSEFNNNFRQQMENYPKNNHTASILDRMQADFKCCGAANYTDWEKIPSMSKNRVPDSCCINVTVGCGINFNEKAIHKEGCVEKIGGWLRKNVLVVAAAALGIAF

SEQ ID NO: 13237 - protein, 215 aa, Homo sapiens
  Payload ID: 2576
  Gene Symbol: CD63
  Gene Name: CD63 molecule
  Uniprot ID: P08962
  ENSP ID: ENSP00000446807
MAVEGGMKCVKFLLYVLLLAFCGATPGSLLPVVIIAVGVFLFLVAFVGCCGACKENYCLMITFAIFLSLIMLVEVAAAIAGYVFRDKVMSEFNNNFRQQMENYPKNNHTASILDRMQADFKCCGAANYTDWEKIPSMSKNRVPDSCCINVTVGCGINFNEKAIHKEGCVEKIGGWLRKNVLVVAAAALGIAFVEVLGIVFACCLVKSIRSGYEVM

SEQ ID NO: 13238 - protein, 156 aa, Homo sapiens
  Payload ID: 2576
  Gene Symbol: CD63
  Gene Name: CD63 molecule
  Uniprot ID: P08962
  ENSP ID: ENSP00000447356
MITFAIFLSLIMLVEVAAAIAGYVFRDKVMSEFNNNFRQQMENYPKNNHTASILDRMQADFKCCGAANYTDWEKIPSMSKNRVPDSCCINVTVGCGINFNEKAIHKEGCVEKIGGWLRKNVLVVAAAALGIAFVEVLGIVFACCLVKSIRSGYEVM

SEQ ID NO: 13239 - protein, 238 aa, Homo sapiens; identical to SEQ ID NO: 13234
  Payload ID: 2576
  Gene Symbol: CD63
  Gene Name: CD63 molecule
  Uniprot ID: P08962
  ENSP ID: ENSP00000447730

SEQ ID NO: 13240 - protein, 145 aa, Homo sapiens
  Payload ID: 2576
  Gene Symbol: CD63
  Gene Name: CD63 molecule
  ENSP ID: ENSP00000447938
MLVEVAAAIAGYVFRDKVMSEFNNNFRQQMENYPKNNHTASILDRMQADFKCCGAANYTDWEKIPSMSKNRVPDSCCINVTVGCGINFNEKAIHKEGCVEKIGGWLRKNVLVVAAAALGIAFVEVLGIVFACCLVKSIRSGYEVM

SEQ ID NO: 13241 - protein, 156 aa, Homo sapiens; identical to SEQ ID NO: 13238
  Payload ID: 2576
  Gene Symbol: CD63
  Gene Name: CD63 molecule
  Uniprot ID: P08962
  ENSP ID: ENSP00000448091

SEQ ID NO: 13242 - protein, 217 aa, Homo sapiens
  Payload ID: 2576
  Gene Symbol: CD63
  Gene Name: CD63 molecule
  ENSP ID: ENSP00000449281
MAVEGGMKCVKFLLYVLLLAFCACAVGLIAVGVGAQLVLSQTIIQGATPGSLLPVVIIAVGVFLFLVAFVGCCGACKENYCLMITFAIFLSLIMLVEVAAAIAGYVFRDKVMSEFNNNFRQQMENYPKNNHTASILDRMQADFKCCGAANYTDWEKIPSMSKNRVPDSCCINVTVGCGINFNEKAIHKEGCVEKIGGWLRKNVLVVAAAALGIAFVE

SEQ ID NO: 13243 - protein, 238 aa, Homo sapiens; identical to SEQ ID NO: 13234
  Payload ID: 2576
  Gene Symbol: CD63
  Gene Name: CD63 molecule
  Uniprot ID: P08962
  ENSP ID: ENSP00000449337

SEQ ID NO: 13244 - protein, 110 aa, Homo sapiens
  Payload ID: 2576
  Gene Symbol: CD63
  Gene Name: CD63 molecule
  ENSP ID: ENSP00000449435
MAVEGGMKCVKFLLYVLLLAFCACAVGLIAVGVGAQLVLSQTIIQGATPGSLLPVVIIAVGVFLFLVAFVGCCGACKENYCLMITLPSFCLLSCWWRWPQPLLAMCLEIR

SEQ ID NO: 13245 - protein, 145 aa, Homo sapiens; identical to SEQ ID NO: 13240
  Payload ID: 2576
  Gene Symbol: CD63
  Gene Name: CD63 molecule
  ENSP ID: ENSP00000449654

SEQ ID NO: 13246 - protein, 145 aa, Homo sapiens; identical to SEQ ID NO: 13240
  Payload ID: 2576
  Gene Symbol: CD63
  Gene Name: CD63 molecule
  ENSP ID: ENSP00000449684

SEQ ID NO: 13247 - protein, 133 aa, Homo sapiens
  Payload ID: 2576
  Gene Symbol: CD63
  Gene Name: CD63 molecule
  ENSP ID: ENSP00000450191
MAVEGGMKCVKFLLYVLLLAFCACAVGLIAVGVGAQLVLSQTIIQGATPGSLLPVVIIAVGVFLFLVAFVGCCGACKENYCLMITFAIFLSLIMLVEVAAAIAGYVFRDKVMSEFNNNFRQQMENYPKNNHTA

SEQ ID NO: 13248 - protein, 354 aa, Homo sapiens
  Payload ID: 2577
  Gene Symbol: CD68
  Gene Name: CD68 molecule
  Uniprot ID: P34810
  ENSP ID: ENSP00000250092
MRLAVLFSGALLGLLAAQGTGNDCPHKKSATLLPSFTVTPTVTESTGTTSHRTTKSHKTTTHRTTTTGTTSHGPTTATHNPTTTSHGNVTVHPTSNSTATSQGPSTATHSPATTSHGNATVHPTSNSTATSPGFTSSAHPEPPPPSPSPSPTSKETIGDYTWTNGSQPCVHLQAQIQIRVMYTTQGGGEAWGISVLNPNKTKVQGSCEGAHPHLLLSFPYGHLSFGFMQDLQQKVVYLSYMAVEYNVSFPHAAQWTFSAQNASLRDLQAPLGQSFSCSNSSIILSPAVHLDLLSLRLQAAQLPHTGVFGQSFSCPSDRSILLPLIIGLILLGLLALVLIAFCIIRRRPSAYQAL

SEQ ID NO: 13249 - protein, 327 aa, Homo sapiens
  Payload ID: 2577
  Gene Symbol: CD68
  Gene Name: CD68 molecule
  Uniprot ID: P34810
  ENSP ID: ENSP00000369867
MRLAVLFSGALLGLLAESTGTTSHRTTKSHKTTTHRTTTTGTTSHGPTTATHNPTTTSHGNVTVHPTSNSTATSQGPSTATHSPATTSHGNATVHPTSNSTATSPGFTSSAHPEPPPPSPSPSPTSKETIGDYTWTNGSQPCVHLQAQIQIRVMYTTQGGGEAWGISVLNPNKTKVQGSCEGAHPHLLLSFPYGHLSFGFMQDLQQKVVYLSYMAVEYNVSFPHAAQWTFSAQNASLRDLQAPLGQSFSCSNSSIILSPAVHLDLLSLRLQAAQLPHTGVFGQSFSCPSDRSILLPLIIGLILLGLLALVLIAFCIIRRRPSAYQAL

SEQ ID NO: 13250 - protein, 121 aa, Homo sapiens
  Payload ID: 2577
  Gene Symbol: CD68
  Gene Name: CD68 molecule
  ENSP ID: ENSP00000462198
  MOD_RES (1)..(1): Any amino acid
XKTKVQGSCEGAHPHLLLSFPYGHLSFGFMQDLQQKVVYLSYMAVEYNVSFPHAAQWTFSAQNASLRDLQAPLGQSFSCSNSSIILSPAVHLDLLSLRLQAAQLPHTGVFGQSKTYLLLPS

SEQ ID NO: 13251 - protein, 180 aa, Homo sapiens
  Payload ID: 2577
  Gene Symbol: CD68
  Gene Name: CD68 molecule
  ENSP ID: ENSP00000462768
MRLAVLFSGALLGLLAATLLPSFTVTPTVTESTGTTSHRTTKSHKTTTHRTTTTGTTSHGPTTATHNPTTTSHGNVTVHPTSNSTATSQGPSTATHSPATTSHGNATVHPTSNSTATSPGFTSSAHPEPPPPSPSPSPTSKETIGDYTWTNGSQPCVHLQAQIQIRVMYTTQGGGEAWGI

SEQ ID NO: 13252 - protein, 199 aa, Homo sapiens
  Payload ID: 2578
  Gene Symbol: CD69
  Gene Name: CD69 molecule
  Uniprot ID: Q07108
  ENSP ID: ENSP00000228434
MSSENCFVAENSSLHPESGQENDATSPHFSTRHEGSFQVPVLCAVMNVVFITILIIALIALSVGQYNCPGQYTFSMPSDSHVSSCSEDWVGYQRKCYFISTVKRSWTSAQNACSEHGATLAVIDSEKDMNFLKRYAGREEHWVGLKKEPGHPWKWSNGKEFNNWFNVTGSDKCVFLKNTEVSSMECEKNLYWICNKPYK

SEQ ID NO: 13253 - protein, 164 aa, Homo sapiens
  Payload ID: 2578
  Gene Symbol: CD69
  Gene Name: CD69 molecule
  ENSP ID: ENSP00000442597
MSSENCFVAENSSLHPESGQENDATSPHFSTRHEGSFQVPVLCAVMNVVFITILIIALIALSVGQYNCPGQYTFSMPSDSHVSSCSEDWVGYQRKCYFISTVKRSWTSAQNACSEHGATLAVIDSEKDMNFLKRYAGREEHWVGLKKEPGHPWKWSNGKEFNNW

SEQ ID NO: 13254 - protein, 240 aa, Homo sapiens
  Payload ID: 2579
  Gene Symbol: CD7
  Gene Name: CD7 molecule
  Uniprot ID: P09564
  ENSP ID: ENSP00000312027
MAGPPRLLLLPLLLALARGLPGALAAQEVQQSPHCTTVPVGASVNITCSTSGGLRGIYLRQLGPQPQDIIYYEDGVVPTTDRRFRGRIDFSGSQDNLTITMHRLQLSDTGTYTCQAITEVNVYGSGTLVLVTEEQSQGWHRCSDAPPRASALPAPPTGSALPDPQTASALPDPPAASALPAALAVISFLLGLGLGVACVLARTQIKKLCSWRDKNSAACVVYEDMSHSRCNTLSSPNQYQ

SEQ ID NO: 13255 - protein, 140 aa, Homo sapiens
  Payload ID: 2579
  Gene Symbol: CD7
  Gene Name: CD7 molecule
  ENSP ID: ENSP00000463489
MHRLQLSDTGTYTCQAITEVNVYGSGTLVLVTEEQSQGWHRCSDAPPRASALPAPPTGSALPDPQTASALPDPPAASALPAALAVISFLLGLGLGVACVLARTQIKKLCSWRDKNSAACVVYEDMSHSRCNTLSSPNQYQ

SEQ ID NO: 13256 - protein, 221 aa, Homo sapiens
  Payload ID: 2579
  Gene Symbol: CD7
  Gene Name: CD7 molecule
  ENSP ID: ENSP00000463612
MAGPPRLLLLPLLLALARGLPGALAAQEVQQSPHCTTVPVGASVNITCSTSGGLRGIYLRQLGPQPQDIIYYEDGVVPTTDRRFRGRIDFSGSQDNLTITMHRLQLSDTGTYTCQAITEVNVYGSGTLVLVTEEQSQGWHRCSDAPPRASALPAPPTGSALPDPQTASALPDPPAASALPAALAVISFLLGLGLGVACVLARTQVSVSPSCHLHPKDCSLS

SEQ ID NO: 13257 - protein, 160 aa, Homo sapiens
  Payload ID: 2579
  Gene Symbol: CD7
  Gene Name: CD7 molecule
  ENSP ID: ENSP00000464182
MAGPPRLLLLPLLLALARGLPGALAAQGRTFSVLLARLMVTAQVLPRGAAVSPLHDCPRGSLRQHHLLHQRGPAWDLPEAARATAPRHHLLRGRGGAHYGQTVPGPHRLLRVPGQPDYHHAPPAAVGHWHLHLPGHHGGQCLRLRHPGPGDRGTVPRMAQ

SEQ ID NO: 13258 - protein, 35 aa, Homo sapiens
  Payload ID: 2579
  Gene Symbol: CD7
  Gene Name: CD7 molecule
  ENSP ID: ENSP00000464546
MAGPPRLLLLPLLLALARGLPGALAAQAGACVGST

SEQ ID NO: 13259 - protein, 121 aa, Homo sapiens
  Payload ID: 2579
  Gene Symbol: CD7
  Gene Name: CD7 molecule
  ENSP ID: ENSP00000464565
MHRLQLSDTGTYTCQAITEVNVYGSGTLVLVTEEQSQGWHRCSDAPPRASALPAPPTGSALPDPQTASALPDPPAASALPAALAVISFLLGLGLGVACVLARTQVSVSPSCHLHPKDCSLS

SEQ ID NO: 13260 - protein, 193 aa, Homo sapiens
  Payload ID: 2580
  Gene Symbol: CD70
  Gene Name: CD70 molecule
  Uniprot ID: P32970
  ENSP ID: ENSP00000245903
MPEEGSGCSVRRRPYGCVLRAALVPLVAGLVICLVVCIQRFAQAQQQLPLESLGWDVAELQLNHTGPQQDPRLYWQGGPALGRSFLHGPELDKGQLRIHRDGIYMVHIQVTLAICSSTTASRHHPTTLAVGICSPASRSISLLRLSFHQGCTIASQRLTPLARGDTLCTNLTGTLLPSRNTDETFFGVQWVRP

SEQ ID NO: 13261 - protein, 208 aa, Homo sapiens
  Payload ID: 2580
  Gene Symbol: CD70
  Gene Name: CD70 molecule
  Uniprot ID: P32970
  ENSP ID: ENSP00000395294
MPEEGSGCSVRRRPYGCVLRAALVPLVAGLVICLVVCIQRFAQAQQQLPLESLGWDVAELQLNHTGPQQDPRLYWQGGPALGRSFLHGPELDKGQLRIHRDGIYMVHIQVTLAICSSTTASRHHPTTLAVGICSPASRSISLLRLSFHQGLFGFWNWGLKVKCFLRHLIWTAHCFIPLTQLVFMQALQSWRNHHCSHFTDEENRGVNR

SEQ ID NO: 13262 - protein, 65 aa, Homo sapiens
  Payload ID: 2580
  Gene Symbol: CD70
  Gene Name: CD70 molecule
  ENSP ID: ENSP00000470805
MPEEGSGCSVRRRPYGCVLRAALVPLVAGLVICLVVCIQRFAQAQQQLPLESLGWDVAELQLNHT

SEQ ID NO: 13263 - protein, 359 aa, Homo sapiens
  Payload ID: 2581
  Gene Symbol: CD72
  Gene Name: CD72 molecule
  Uniprot ID: P21854
  ENSP ID: ENSP00000259633
MAEAITYADLRFVKAPLKKSISSRLGQDPGADDDGEITYENVQVPAVLGVPSSLASSVLGDKAAVKSEQPTASWRAVTSPAVGRILPCRTTCLRYLLLGLLLTCLLLGVTAICLGVRYLQVSQQLQQTNRVLEVTNSSLRQQLRLKITQLGQSAEDLQGSRRELAQSQEALQVEQRAHQAAEGQLQACQADRQKTKETLQSEEQQRRALEQKLSNMENRLKPFFTCGSADTCCPSGWIMHQKSCFYISLTSKNWQESQKQCETLSSKLATFSEIYPQSHSYYFLNSLLPNGGSGNSYWTGLSSNKDWKLTDDTQRTRTYAQSSKCNKVHKTWSWWTLESESCRSSLPYICEMTAFRFPD

SEQ ID NO: 13264 - protein, 120 aa, Homo sapiens
  Payload ID: 2581
  Gene Symbol: CD72
  Gene Name: CD72 molecule
  ENSP ID: ENSP00000367687
MAEAITYADLRFVKAPLKKSISSRLGQDPGADDDGEITYENVQVPAVLGVPSSLASSVLGDKAAVKSEQPTASWRAVTSPAVGRILPCECACAGQPRGQVLAPVPAADGAGPRGVQLLPG

SEQ ID NO: 13265 - protein, 119 aa, Homo sapiens
  Payload ID: 2581
  Gene Symbol: CD72
  Gene Name: CD72 molecule
  ENSP ID: ENSP00000367688
MAEAITYADLRFVKAPLKKSISSRLGQDPGADDDGEITYENVQVPAVLGVPSSLASSVLGDKAAVKSEQPTASWRAVTSPAVGRILPCRTTCLRYLLLGLLLTCLLLGVTAICLGVRCE

SEQ ID NO: 13266 - protein, 359 aa, Homo sapiens; identical to SEQ ID NO: 13263
  Payload ID: 2581
  Gene Symbol: CD72
  Gene Name: CD72 molecule
  Uniprot ID: P21854
  ENSP ID: ENSP00000379980

SEQ ID NO: 13267 - protein, 359 aa, Homo sapiens [sequence omitted]

SEQ ID NO: 13268 - protein, 296 aa, Homo sapiens
  Payload ID: 2582
  Gene Symbol: CD74
  Gene Name: CD74 molecule, major histocompatibility complex, class II invariant chain
  Uniprot ID: P04233
  ENSP ID: ENSP00000009530
MHRRRSRSCREDQKPVMDDQRDLISNNEQLPMLGRRPGAPESKCSRGALYTGFSILVTLLLAGQATTAYFLYQQQGRLDKLTVTSQNLQLENLRMKLPKPPKPVSKMRMATPLLMQALPMGALPQGPMQNATKYGNMTEDHVMHLLQNADPLKVYPPLKGSFPENLRHLKNTMETIDWKVFESWMHHWLLFEMSRHSLEQKPTDAPPKVLTKCQEEVSHIPAVHPGSFRPKCDENGNYLPLQCYGSIGYCWCVFPNGTEVPNTRSRGHHNCSESLELEDPSSGLGVTKQDLGPVPM

SEQ ID NO: 13269 - protein, 232 aa, Homo sapiens
  Payload ID: 2582
  Gene Symbol: CD74
  Gene Name: CD74 molecule, major histocompatibility complex, class II invariant chain
  Uniprot ID: P04233
  ENSP ID: ENSP00000230685
MHRRRSRSCREDQKPVMDDQRDLISNNEQLPMLGRRPGAPESKCSRGALYTGFSILVTLLLAGQATTAYFLYQQQGRLDKLTVTSQNLQLENLRMKLPKPPKPVSKMRMATPLLMQALPMGALPQGPMQNATKYGNMTEDHVMHLLQNADPLKVYPPLKGSFPENLRHLKNTMETIDWKVFESWMHHWLLFEMSRHSLEQKPTDAPPKESLELEDPSSGLGVTKQDLGPVPM

SEQ ID NO: 13270 - protein, 160 aa, Homo sapiens
  Payload ID: 2582
  Gene Symbol: CD74
  Gene Name: CD74 molecule, major histocompatibility complex, class II invariant chain
  Uniprot ID: P04233
  ENSP ID: ENSP00000367026
MHRRRSRSCREDQKPVMDDQRDLISNNEQLPMLGRRPGAPESKCSRGALYTGFSILVTLLLAGQATTAYFLYQQQGRLDKLTVTSQNLQLENLRMKLPKPPKPVSKMRMATPLLMQALPMGALPQGPMQNATKYGNMTEDHVMHLLQSHWNWRTRLLGWV

SEQ ID NO: 13271 - protein, 152 aa, Homo sapiens [sequence omitted]

SEQ ID NO: 13272 - protein, 52 aa, Homo sapiens
  Payload ID: 2582
  Gene Symbol: CD74
  Gene Name: CD74 molecule, major histocompatibility complex, class II invariant chain
  ENSP ID: ENSP00000429478
MHRRRSRSCREDQKPVMDDQRDLISNNEQLPMLGRRPGAPESPCRMPPSMAT

SEQ ID NO: 13273 - protein, 122 aa, Homo sapiens
  Payload ID: 2582
  Gene Symbol: CD74
  Gene Name: CD74 molecule, major histocompatibility complex, class II invariant chain
  ENSP ID: ENSP00000429641
MHRRRSRSCREDQKPVMDDQRDLISNNEQLPMLGRRPGAPESKCSRGALYTGFSILVTLLLAGQATTAYFLYQQQGRLDKLTVTSQNLQLENLRMKLPKPHAECHQVWQHDRGPCDAPAPEC

SEQ ID NO: 13274 - protein, 316 aa, Homo sapiens
  Payload ID: 2582
  Gene Symbol: CD74
  Gene Name: CD74 molecule, major histocompatibility complex, class II invariant chain
  ENSP ID: ENSP00000430614
  MOD_RES (1)..(1): Any amino acid
XRSCREDQKPVMDDQRDLISNNEQLPMLGRRPGAPESKCSRGALYTGFSILVTLLLAGQATTAYFLYQQQGRLDKLTVTSQNLQLENLRMKLPKPPKPVSKMRMATPLLMQALPMGALPQGPMQNATKYGNMTEDHVMHLLQNADPLKVYPPLKGSFPENLRHLKNTMETIDWKVFESWMHHWLLFEMSRHSLEQKPTDAPPKVLTKCQEEVSHIPAVHPGSFRPKCDENGNYLPLQCYGSIGYCWCVFPNGTEVPNTRSRGHHNCSESLELEDPSSGLGVTKQDLGPGKGLAEGHLVTSSSSPAGPAPLWAGEGV

SEQ ID NO: 13275 - protein, 145 aa, Homo sapiens
  Payload ID: 2582
  Gene Symbol: CD74
  Gene Name: CD74 molecule, major histocompatibility complex, class II invariant chain
  ENSP ID: ENSP00000430654
  MOD_RES (1)..(1): Any amino acid
XRSRSCREDQKPVMDDQRDLISNNEQLPMLGRRPGAPESKCSRGALYTGFSILVTLLLAGQATTAYFLYQQQGRLDKLTVTSQNLQLENLRMKLPKPPKPVSKMRMATPLLMQALPMGALPQGPMQNATKYGNMTEDHVMHLLQY

SEQ ID NO: 13276 - protein, 226 aa, Homo sapiens
  Payload ID: 2583
  Gene Symbol: CD79A
  Gene Name: CD79a molecule, immunoglobulin-associated alpha
  Uniprot ID: P11912
  ENSP ID: ENSP00000221972
MPGGPGVLQALPATIFLLFLLSAVYLGPGCQALWMHKVPASLMVSLGEDAHFQCPHNSSNNANVTWWRVLHGNYTWPPEFLGPGEDPNGTLIIQNVNKSHGGIYVCRVQEGNESYQQSCGTYLRVRQPPPRPFLDMGEGTKNRIITAEGIILLFCAVVPGTLLLFRKRWQNEKLGLDAGDEYEDENLYEGLNLDDCSMYEDISRGLQGTYQDVGSLNIGDVQLEKP

SEQ ID NO: 13277 - protein, 188 aa, Homo sapiens
  Payload ID: 2583
  Gene Symbol: CD79A
  Gene Name: CD79a molecule, immunoglobulin-associated alpha
  Uniprot ID: P11912
  ENSP ID: ENSP00000400605
MPGGPGVLQALPATIFLLFLLSAVYLGPGCQALWMHKVPASLMVSLGEDAHFQCPHNSSNNANVTWWRVLHGNYTWPPEFLGPGEDPNEPPPRPFLDMGEGTKNRIITAEGIILLFCAVVPGTLLLFRKRWQNEKLGLDAGDEYEDENLYEGLNLDDCSMYEDISRGLQGTYQDVGSLNIGDVQLEKP

SEQ ID NO: 13278 - protein, 258 aa, Homo sapiens
  Payload ID: 2583
  Gene Symbol: CD79A
  Gene Name: CD79a molecule, immunoglobulin-associated alpha
  ENSP ID: ENSP00000468922
MPGGPGVLQALPATIFLLFLLSAVYLGPGCQALWMHKVPASLMVSLGEDAHFQCPHNSSNNANVTWWRVLHGNYTWPPEFLGPGEDPNGTLIIQNVNKSHGGIYVCRVQEGNESYQQSCGTYLRVRREWPSPGPYSHCPAGDTRFIFEVGIEPVPSMWVSNRLGQRDGHSPLQSGVSGGSGALQEVGGARRLGRARGARALSHTTSLQSRPPGPSWTWGRAPRTESSQPRGSSSCSARWCLGRCCCSGNDGRTRSSGW

SEQ ID NO: 13279 - protein, 229 aa, Homo sapiens
  Payload ID: 2584
  Gene Symbol: CD79B
  Gene Name: CD79b molecule, immunoglobulin-associated beta
  Uniprot ID: P40259
  ENSP ID: ENSP00000006750
MARLALSPVPSHWMVALLLLLSAEPVPAARSEDRYRNPKGSACSRIWQSPRFIARKRGFTVKMHCYMNSASGNVSWLWKQEMDENPQQLKLEKGRMEESQNESLATLTIQGIRFEDNGIYFCQQKCNNTSEVYQGCGTELRVMGFSTLAQLKQRNTLKDGIIMIQTLLIILFIIVPIFLLLDKDDSKAGMEEDHTYEGLDIDQTATYEDIVTLRTGEVKWSVGEHPGQE

SEQ ID NO: 13280 - protein, 125 aa, Homo sapiens
  Payload ID: 2584
  Gene Symbol: CD79B
  Gene Name: CD79b molecule, immunoglobulin-associated beta
  Uniprot ID: P40259
  ENSP ID: ENSP00000245862
MARLALSPVPSHWMVALLLLLSAEPVPAARSEDRYRNPKGFSTLAQLKQRNTLKDGIIMIQTLLIILFIIVPIFLLLDKDDSKAGMEEDHTYEGLDIDQTATYEDIVTLRTGEVKWSVGEHPGQE

SEQ ID NO: 13281 - protein, 230 aa, Homo sapiens
  Payload ID: 2584
  Gene Symbol: CD79B
  Gene Name: CD79b molecule, immunoglobulin-associated beta
  Uniprot ID: P40259
  ENSP ID: ENSP00000376544
MARLALSPVPSHWMVALLLLLSAAEPVPAARSEDRYRNPKGSACSRIWQSPRFIARKRGFTVKMHCYMNSASGNVSWLWKQEMDENPQQLKLEKGRMEESQNESLATLTIQGIRFEDNGIYFCQQKCNNTSEVYQGCGTELRVMGFSTLAQLKQRNTLKDGIIMIQTLLIILFIIVPIFLLLDKDDSKAGMEEDHTYEGLDIDQTATYEDIVTLRTGEVKWSVGEHPGQE

SEQ ID NO: 13282 - protein, 288 aa, Homo sapiens
  Payload ID: 2585
  Gene Symbol: CD80
  Gene Name: CD80 molecule
  Uniprot ID: P33681
  ENSP ID: ENSP00000264246
MGHTRRQGTSPSKCPYLNFFQLLVLAGLSHFCSGVIHVTKEVKEVATLSCGHNVSVEELAQTRIYWQKEKKMVLTMMSGDMNIWPEYKNRTIFDITNNLSIVILALRPSDEGTYECVVLKYEKDAFKREHLAEVTLSVKADFPTPSISDFEIPTSNIRRIICSTSGGFPEPHLSWLENGEELNAINTTVSQDPETELYAVSSKLDFNMTTNHSFMCLIKYGHLRVNQTFNWNTTKQEHFPDNLLPSWAITLISVNGIFVICCLTYCFAPRCRERRRNERLRRESVRPV

SEQ ID NO: 13283 - protein, 256 aa, Homo sapiens
  Payload ID: 2585
  Gene Symbol: CD80
  Gene Name: CD80 molecule
  Uniprot ID: P33681
  ENSP ID: ENSP00000373165
MGHTRRQGTSPSKCPYLNFFQLLVLAGLSHFCSGVIHVTKEVKEVATLSCGHNVSVEELAQTRIYWQKEKKMVLTMMSGDMNIWPEYKNRTIFDITNNLSIVILALRPSDEGTYECVVLKYEKDAFKREHLAEVTLSVKADFPTPSISDFEIPTSNIRRIICSTSGGFPEPHLSWLENGEELNAINTTVSQDPETELYAVSSKLDFNMTTNHSFMCLIKYGHLRVNQTFNWNTSFAPRCRERRRNERLRRESVRPV

SEQ ID NO: 13284 - protein, 288 aa, Homo sapiens; identical to SEQ ID NO: 13282
  Payload ID: 2585
  Gene Symbol: CD80
  Gene Name: CD80 molecule
  Uniprot ID: P33681
  ENSP ID: ENSP00000418364

SEQ ID NO: 13285 - protein, 236 aa, Homo sapiens
  Payload ID: 2586
  Gene Symbol: CD81
  Gene Name: CD81 molecule
  Uniprot ID: P60033
  ENSP ID: ENSP00000263645
MGVEGCTKCIKYLLFVFNFVFWLAGGVILGVALWLRHDPQTTNLLYLELGDKPAPNTFYVGIYILIAVGAVMMFVGFLGCYGAIQESQCLLGTFFTCLVILFACEVAAGIWGFVNKDQIAKDVKQFYDQALQQAVVDDDANNAKAVVKTFHETLDCCGSSTLTALTTSVLKNNLCPSGSNIISNLFKEDCHQKIDDLFSGKLYLIGIAAIVVAVIMIFEMILSMVLCCGIRNSSVY

SEQ ID NO: 13286 - protein, 274 aa, Homo sapiens
  Payload ID: 2586
  Gene Symbol: CD81
  Gene Name: CD81 molecule
  ENSP ID: ENSP00000370424
MWCGWSFSWQPVHWVRSACGCSLTWVSWSLASSSSRSLLKVGELGMAPFVHARAGKTKAQLAGGVILGVALWLRHDPQTTNLLYLELGDKPAPNTFYVGIYILIAVGAVMMFVGFLGCYGAIQESQCLLGTFFTCLVILFACEVAAGIWGFVNKDQIAKDVKQFYDQALQQAVVDDDANNAKAVVKTFHETLDCCGSSTLTALTTSVLKNNLCPSGSNIISNLFKEDCHQKIDDLFSGKLYLIGIAAIVVAVIMIFEMILSMVLCCGIRNSSVY

SEQ ID NO: 13287 - protein, 165 aa, Homo sapiens
  Payload ID: 2586
  Gene Symbol: CD81
  Gene Name: CD81 molecule
  ENSP ID: ENSP00000431780
MMFVGFLGCYGAIQESQCLLGTFFTCLVILFACEVAAGIWGFVNKDQIAKDVKQFYDQALQQAVVDDDANNAKAVVKTFHETLDCCGSSTLTALTTSVLKNNLCPSGSNIISNLFKEDCHQKIDDLFSGKLYLIGIAAIVVAVIMIFEMILSMVLCCGIRNSSVY

SEQ ID NO: 13288 - protein, 242 aa, Homo sapiens
  Payload ID: 2586
  Gene Symbol: CD81
  Gene Name: CD81 molecule
  ENSP ID: ENSP00000432033
MEEVTEAQKTHQARLGCEVPCCSSLAVSNPTSSQLGGPWWVRHPGPSGVLGCGECVGTHLVSLSPQGIYILIAVGAVMMFVGFLGCYGAIQESQCLLGTFFTCLVILFACEVAAGIWGFVNKDQIAKDVKQFYDQALQQAVVDDDANNAKAVVKTFHETLDCCGSSTLTALTTSVLKNNLCPSGSNIISNLFKEDCHQKIDDLFSGKLYLIGIAAIVVAVIMIFEMILSMVLCCGIRNSSVY

SEQ ID NO: 13289 - protein, 209 aa, Homo sapiens
  Payload ID: 2586
  Gene Symbol: CD81
  Gene Name: CD81 molecule
  ENSP ID: ENSP00000432249
MAPFVHARAGKTKAQLAGGVILGVALWLRHDPQTTNLLYLELGDKPAPNTFYVGIYILIAVGAVMMFVGFLGCYGAIQESQCLLGTFFTCLVILFACEVAAGIWGFVNKDQIAKDVKQFYDQALQQAVVDDDANNAKAVVKTFHETLDCCGSSTLTALTTSVLKNNLCPSGSNIISNLFKEDCHQKIDDLFSGKLYLIGIAAIVVAVIM

SEQ ID NO: 13290 - protein, 99 aa, Homo sapiens
  Payload ID: 2586
  Gene Symbol: CD81
  Gene Name: CD81 molecule
  ENSP ID: ENSP00000432497
MCKPATDPRFTRSPLAGGVILGVALWLRHDPQTTNLLYLELGDKPAPNTFYVGIYILIAVGAVMMFVGFLGCYGAIQESQCLLGTFFTCLVILFACEVA

SEQ ID NO: 13291 - protein, 51 aa, Homo sapiens
  Payload ID: 2586
  Gene Symbol: CD81
  Gene Name: CD81 molecule
  ENSP ID: ENSP00000432723
MMFVGFLGCYGAIQESQCLLGTFFTCLVILFACEVAAGIWGFVNKDQIAKD

SEQ ID NO: 13292 - protein, 92 aa, Homo sapiens
  Payload ID: 2586
  Gene Symbol: CD81
  Gene Name: CD81 molecule
  ENSP ID: ENSP00000433178
MMFVGFLGCYGAIQESQCLLGTFFTCLVILFACEVAAGIWGFVNKDQIAKDVKQFYDQALQQAVVDDDANNAKAVVKTFHETLDCCGSSTLT

SEQ ID NO: 13293 - protein, 225 aa, Homo sapiens
  Payload ID: 2586
  Gene Symbol: CD81
  Gene Name: CD81 molecule
  ENSP ID: ENSP00000433767
GGSRWQRGFPQLAGGVILGVALWLRHDPQTTNLLYLELGDKPAPNTFYVGIYILIAVGAVMMFVGFLGCYGAIQESQCLLGTFFTCLVILFACEVAAGIWGFVNKDQIAKDVKQFYDQALQQAVVDDDANNAKAVVKTFHETLDCCGSSTLTALTTSVLKNNLCPSGSNIISNLFKEDCHQKIDDLFSGKLYLIGIAAIVVAVIMIFEMILSMVLCCGIRNSSVY

SEQ ID NO: 13294 - protein, 221 aa, Homo sapiens
  Payload ID: 2586
  Gene Symbol: CD81
  Gene Name: CD81 molecule
  ENSP ID: ENSP00000433904
  MOD_RES (1)..(1): Any amino acid
XQRGFPQLAGGVILGVALWLRHDPQTTNLLYLELGDKPAPNTFYVGIYILIAVGAVMMFVGFLGCYGAIQESQCLLGTFFTCLVILFACEVAAGIWGFVNKDQIAKDVKQFYDQALQQAVVDDDANNAKAVVKTFHETLDCCGSSTLTALTTSVLKNNLCPSGSNIISNLFKEDCHQKIDDLFSGKLYLIGIAAIVVAVIMVSGRGRRACSLGCPFRGALC

SEQ ID NO: 13295 - protein, 148 aa, Homo sapiens
  Payload ID: 2586
  Gene Symbol: CD81
  Gene Name: CD81 molecule
  ENSP ID: ENSP00000435633
QTQDVPLPAPEAPSPDELAGGVILGVALWLRHDPQTTNLLYLELGDKPAPNTFYVGIYILIAVGAVMMFVGFLGCYGAIQESQCLLGTFFTCLVILFACEVAAGIWGFVNKDQIAKDVKQFYDQALQQAVVDDDANNAKAVVKTFHET

SEQ ID NO: 13296 - protein, 165 aa, Homo sapiens; identical to SEQ ID NO: 13287
  Payload ID: 2586
  Gene Symbol: CD81
  Gene Name: CD81 molecule
  ENSP ID: ENSP00000437242

SEQ ID NO: 13297 - protein, 267 aa, Homo sapiens
  Payload ID: 2587
  Gene Symbol: CD82
  Gene Name: CD82 molecule
  Uniprot ID: P27701
  ENSP ID: ENSP00000227155
MGSACIKVTKYFLFLFNLIFFILGAVILGFGVWILADKSSFISVLQTSSSSLRMGAYVFIGVGAVTMLMGFLGCIGAVNEVRCLLGLYFAFLLLILIAQVTAGALFYFNMGKLKQEMGGIVTELIRDYNSSREDSLQDAWDYVQAQVKCCGWVSFYNWTDNAELMNRPEVTYPCSCEVKGEEDNSLSVRKGFCEAPGNRTQSGNHPEDWPVYQEGCMEKVQAWLQENLGIILGVGVGVAIIELLGMVLSICLCRHVHSEDYSKVPKY

SEQ ID NO: 13298 - protein, 242 aa, Homo sapiens
  Payload ID: 2587
  Gene Symbol: CD82
  Gene Name: CD82 molecule
  Uniprot ID: P27701
  ENSP ID: ENSP00000339686
MGSACIKVTKYFLFLFNLIFFILGAVILGFGVWILADKSSFISVLQTSSSSLRMGAYVFIGVGAVTMLMGFLGCIGAVNEVRCLLGLLKQEMGGIVTELIRDYNSSREDSLQDAWDYVQAQVKCCGWVSFYNWTDNAELMNRPEVTYPCSCEVKGEEDNSLSVRKGFCEAPGNRTQSGNHPEDWPVYQEGCMEKVQAWLQENLGIILGVGVGVAIIELLGMVLSICLCRHVHSEDYSKVPKY

SEQ ID NO: 13299 - protein, 108 aa, Homo sapiens
  Payload ID: 2587
  Gene Symbol: CD82
  Gene Name: CD82 molecule
  ENSP ID: ENSP00000431767
MGSACIKVTKYFLFLFNLIFFILGAVILGFGVWILADKSSFISVLQTSSSSLRMGAYVFIGVGAVTMLMGFLGCIGAVNEVRCLLGLYFAFLLLILIAQVTAGALFYF

SEQ ID NO: 13300 - protein, 57 aa, Homo sapiens
  Payload ID: 2587
  Gene Symbol: CD82
  Gene Name: CD82 molecule
  ENSP ID: ENSP00000433036
DNSLSVRKGFCEAPGNRTQSGNHPEDWPVYQELLGMVLSICLCRHVHSEDYSKVPKY

SEQ ID NO: 13301 - protein, 179 aa, Homo sapiens
  Payload ID: 2587
  Gene Symbol: CD82
  Gene Name: CD82 molecule
  ENSP ID: ENSP00000433151
MARDWIRPQRASDCWSGKQQLFQIIIIIIISPPCCCVDDTWAQAEVGPVTSCTGFVEGSSRTGGMGSACIKVTKYFLFLFNLIFFILGAVILGFGVWILADKSSFISVLQTSSSSLRMGAYVFIGVGAVTMLMGFLGCIGAVNEVRCLLGLYFAFLLLILIAQVTAGALFYFNMGKVSP

SEQ ID NO: 13302 - protein, 157 aa, Homo sapiens
  Payload ID: 2587
  Gene Symbol: CD82
  Gene Name: CD82 molecule
  ENSP ID: ENSP00000433788
MEILGAVILGFGVWILADKSSFISVLQTSSSSLRMGAYVFIGVGAVTMLMGFLGCIGAVNEVRCLLGLYFAFLLLILIAQVTAGALFYFNMGKLKQEMGGIVTELIRDYNSSREDSLQDAWDYVQAQVKCCGWVSFYNWTDNAELMNRPEVTYPCSC

SEQ ID NO: 13303 - protein, 104 aa, Homo sapiens
  Payload ID: 2587
  Gene Symbol: CD82
  Gene Name: CD82 molecule
  ENSP ID: ENSP00000433804
MGSACIKVTKYFLFLFNLIFFILGAVILGFGVWILADKSSFISVLQTSSSSLRMGAYVFIGVGAVTMLMGFLGCIGAVNEVRCLLGLYFAFLLLILIAQVTAGA

SEQ ID NO: 13304 - protein, 38 aa, Homo sapiens
  Payload ID: 2587
  Gene Symbol: CD82
  Gene Name: CD82 molecule
  ENSP ID: ENSP00000435661
MGSACIKVTKYFLFLFNLIFFILGAVILGFGVWILADK

SEQ ID NO: 13305 - protein, 161 aa, Homo sapiens
  Payload ID: 2587
  Gene Symbol: CD82
  Gene Name: CD82 molecule
  ENSP ID: ENSP00000435682
MPLVINQSPPCCCVDDTWAQAEVGPVTSCTGFVEGSSRTGGMGSACIKVTKYFLFLFNLIFFILGAVILGFGVWILADKSSFISVLQTSSSSLRMGAYVFIGVGAVTMLMGFLGCIGAVNEVRCLLGLYFAFLLLILIAQVTAGALFYFNMGKLKQEMGGI

SEQ ID NO: 13306 - protein, 68 aa, Homo sapiens
  Payload ID: 2587
  Gene Symbol: CD82
  Gene Name: CD82 molecule
  ENSP ID: ENSP00000436403
MGSACIKVTKYFLFLFNLIFFILGAVILGFGVWILADKSSFISVLQTSSSSLRMGAYVFIGVGAVTML

SEQ ID NO: 13307 - protein, 205 aa, Homo sapiens
  Payload ID: 2588
  Gene Symbol: CD83
  Gene Name: CD83 molecule
  Uniprot ID: Q01151
  ENSP ID: ENSP00000368450
MSRGLQLLLLSCAYSLAPATPEVKVACSEDVDLPCTAPWDPQVPYTVSWVKLLEGGEERMETPQEDHLRGQHYHQKGQNGSFDAPNERPYSLKIRNTTSCNSGTYRCTLQDPDGQRNLSGKVILRVTGCPAQRKEETFKKYRAEIVLLLALVIFYLTLIIFTCKFARLQSIFPDFSKAGMERAFLPVTSPNKHLGLVTPHKTELV

SEQ ID NO: 13308 - protein, 146 aa, Homo sapiens
  Payload ID: 2588
  Gene Symbol: CD83
  Gene Name: CD83 molecule
  ENSP ID: ENSP00000480760
METPQEDHLRGQHYHQKGQNGSFDAPNERPYSLKIRNTTSCNSGTYRCTLQDPDGQRNLSGKVILRVTGCPAQRKEETFKKYRAEIVLLLALVIFYLTLIIFTCKFARLQSIFPDFSKAGMERAFLPVTSPNKHLGLVTPHKTELV

SEQ ID NO: 13309 - protein, 345 aa, Homo sapiens
  Payload ID: 2589
  Gene Symbol: CD84
  Gene Name: CD84 molecule
  Uniprot ID: Q9UIB8
  ENSP ID: ENSP00000312367
MAQHHLWILLLCLQTWPEAAGKDSEIFTVNGILGESVTFPVNIQEPRQVKIIAWTSKTSVAYVTPGDSETAPVVTVTHRNYYERIHALGPNYNLVISDLRMEDAGDYKADINTQADPYTTTKRYNLQIYRRLGKPKITQSLMASVNSTCNVTLTCSVEKEEKNVTYNWSPLGEEGNVLQIFQTPEDQELTYTCTAQNPVSNNSDSISARQLCADIAMGFRTHHTGLLSVLAMFFLLVLILSSVFLFRLFKRRQGRIFPEGSCLNTFTKNPYAASKKTIYTYIMASRNTQPAESRIYDEILQSKVLPSKEEPVNTVYSEVQFADKMGKASTQDSKPPGTSSYEIVI

SEQ ID NO: 13310 - protein, 339 aa, Homo sapiens
  Payload ID: 2589
  Gene Symbol: CD84
  Gene Name: CD84 molecule
  Uniprot ID: Q9UIB8
  ENSP ID: ENSP00000357027
MAQHHLWILLLCLQTWPEAAGKDSEIFTVNGILGESVTFPVNIQEPRQVKIIAWTSKTSVAYVTPGDSETAPVVTVTHRNYYERIHALGPNYNLVISDLRMEDAGDYKADINTQADPYTTTKRYNLQIYRRLGKPKITQSLMASVNSTCNVTLTCSVEKEEKNVTYNWSPLGEEGNVLQIFQTPEDQELTYTCTAQNPVSNNSDSISARQLCADIAMGFRTHHTGLLSVLAMFFLLVLILSSVFLFRLFKRRQGSCLNTFTKNPYAASKKTIYTYIMASRNTQPAESRIYDEILQSKVLPSKEEPVNTVYSEVQFADKMGKASTQDSKPPGTSSYEIVI

SEQ ID NO: 13311 - protein, 272 aa, Homo sapiens
  Payload ID: 2589
  Gene Symbol: CD84
  Gene Name: CD84 molecule
  Uniprot ID: Q9UIB8
  ENSP ID: ENSP00000357030
MAQHHLWILLLCLQTWPEAAGKDSEIFTVNGILGESVTFPVNIQEPRQVKIIAWTSKTSVAYVTPGDSETAPVVTVTHRNYYERIHALGPNYNLVISDLRMEDAGDYKADINTQADPYTTTKRYNLQIYRRLGKPKITQSLMASVNSTCNVTLTCSVEKEEKNVTYNWSPLGEEGNVLQIFQTPEDQELTYTCTAQNPVSNNSDSISARQLCADIAMGFRTHHTGLLSVLAMFFLLVLILSSVFLFRLFKRRQGASLQGRASEHSLFRSAVC

SEQ ID NO: 13312 - protein, 328 aa, Homo sapiens
  Payload ID: 2589
  Gene Symbol: CD84
  Gene Name: CD84 molecule
  Uniprot ID: Q9UIB8
  ENSP ID: ENSP00000357033
MAQHHLWILLLCLQTWPEAAGKDSEIFTVNGILGESVTFPVNIQEPRQVKIIAWTSKTSVAYVTPGDSETAPVVTVTHRNYYERIHALGPNYNLVISDLRMEDAGDYKADINTQADPYTTTKRYNLQIYRRLGKPKITQSLMASVNSTCNVTLTCSVEKEEKNVTYNWSPLGEEGNVLQIFQTPEDQELTYTCTAQNPVSNNSDSISARQLCADIAMGFRTHHTGLLSVLAMFFLLVLILSSVFLFRLFKRRQDAASKKTIYTYIMASRNTQPAESRIYDEILQSKVLPSKEEPVNTVYSEVQFADKMGKASTQDSKPPGTSSYEIVI

SEQ ID NO: 13313 - protein, 214 aa, Homo sapiens
  Payload ID: 2589
  Gene Symbol: CD84
  Gene Name: CD84 molecule
  Uniprot ID: Q9UIB8
  ENSP ID: ENSP00000442845
MAQHHLWILLLCLQTCRLGKPKITQSLMASVNSTCNVTLTCSVEKEEKNVTYNWSPLGEEGNVLQIFQTPEDQELTYTCTAQNPVSNNSDSISARQLCADIAMGFRTHHTGLLSVLAMFFLLVLILSSVFLFRLFKRRQDAASKKTIYTYIMASRNTQPAESRIYDEILQSKVLPSKEEPVNTVYSEVQFADKMGKASTQDSKPPGTSSYEIVI

SEQ ID NO: 13314 - protein, 275 aa, Homo sapiens
  Payload ID: 2590
  Gene Symbol: CD86
  Gene Name: CD86 molecule
  Uniprot ID: P42081
  ENSP ID: ENSP00000264468
MGLSNILFVMAFLLSGAAPLKIQAYFNETADLPCQFANSQNQSLSELVVFWQDQENLVLNEVYLGKEKFDSVHSKYMGRTSFDSDSWTLRLHNLQIKDKGLYQCIIHHKKPTGMIRIHQMNSELSVLANFSQPEIVPISNITENVYINLTCSSIHGYPEPKKMSVLLRTKNSTIEYDGVMQKSQDNVTELYDVSISLSVSFPDVTSNMTIFCILETDKTRLLSSPFSIGTNTMEREESEQTKKREKIHIPERSDEAQRVFKSSKTSSCDKSDTCF

SEQ ID NO: 13315 - protein, 329 aa, Homo sapiens
  Payload ID: 2590
  Gene Symbol: CD86
  Gene Name: CD86 molecule
  Uniprot ID: P42081
  ENSP ID: ENSP00000332049
MDPQCTMGLSNILFVMAFLLSGAAPLKIQAYFNETADLPCQFANSQNQSLSELVVFWQDQENLVLNEVYLGKEKFDSVHSKYMGRTSFDSDSWTLRLHNLQIKDKGLYQCIIHHKKPTGMIRIHQMNSELSVLANFSQPEIVPISNITENVYINLTCSSIHGYPEPKKMSVLLRTKNSTIEYDGVMQKSQDNVTELYDVSISLSVSFPDVTSNMTIFCILETDKTRLLSSPFSIELEDPQPPPDHIPWITAVLPTVIICVMVFCLILWKWKKKKRPRNSYKCGTNTMEREESEQTKKREKIHIPERSDEAQRVFKSSKTSSCDKSDTCF

SEQ ID NO: 13316 - protein, 323 aa, Homo sapiens
  Payload ID: 2590
  Gene Symbol: CD86
  Gene Name: CD86 molecule
  Uniprot ID: P42081
  ENSP ID: ENSP00000377248
MGLSNILFVMAFLLSGAAPLKIQAYFNETADLPCQFANSQNQSLSELVVFWQDQENLVLNEVYLGKEKFDSVHSKYMGRTSFDSDSWTLRLHNLQIKDKGLYQCIIHHKKPTGMIRIHQMNSELSVLANFSQPEIVPISNITENVYINLTCSSIHGYPEPKKMSVLLRTKNSTIEYDGVMQKSQDNVTELYDVSISLSVSFPDVTSNMTIFCILETDKTRLLSSPFSIELEDPQPPPDHIPWITAVLPTVIICVMVFCLILWKWKKKKRPRNSYKCGTNTMEREESEQTKKREKIHIPERSDEAQRVFKSSKTSSCDKSDTCF

SEQ ID NO: 13317 - protein, 277 aa, Homo sapiens
  Payload ID: 2590
  Gene Symbol: CD86
  Gene Name: CD86 molecule
  ENSP ID: ENSP00000417195
  MOD_RES (1)..(1): Any amino acid
XTMGLSNILFVMAFLLSGAAPLKIQAYFNETADLPCQFANSQNQSLSELVVFWQDQENLVLNEVYLGKEKFDSVHSKYMGRTSFDSDSWTLRLHNLQIKDKGLYQCIIHHKKPTGMIRIHQMNSELSVLANFSQPEIVPISNITENVYINLTCSSIHGYPEPKKMSVLLRTKNSTIEYDGVMQKSQDNVTELYDVSISLSVSFPDVTSNMTIFCILETDKTRLLSSPFSIGTNTMEREESEQTKKREKIHIPERSDEAQRVFKSSKTSSCDKSDTCF

SEQ ID NO: 13318 - protein, 247 aa, Homo sapiens
  Payload ID: 2590
  Gene Symbol: CD86
  Gene Name: CD86 molecule
  Uniprot ID: P42081
  ENSP ID: ENSP00000418988
MGRTSFDSDSWTLRLHNLQIKDKGLYQCIIHHKKPTGMIRIHQMNSELSVLANFSQPEIVPISNITENVYINLTCSSIHGYPEPKKMSVLLRTKNSTIEYDGVMQKSQDNVTELYDVSISLSVSFPDVTSNMTIFCILETDKTRLLSSPFSIELEDPQPPPDHIPWITAVLPTVIICVMVFCLILWKWKKKKRPRNSYKCGTNTMEREESEQTKKREKIHIPERSDEAQRVFKSSKTSSCDKSDTCF

SEQ ID NO: 13319 - protein, 167 aa, Homo sapiens
  Payload ID: 2590
  Gene Symbol: CD86
  Gene Name: CD86 molecule
  ENSP ID: ENSP00000419116
MGLSNILFVMAFLLSGAAPLKIQAYFNETADLPCQFANSQNQSLSELVVFWQDQENLVLNEVYLGKEKFDSVHSKYMGRTSFDSDSWTLRLHNLQIKDKGLYQCIIHHKKPTGMIRIHQMNSELSVLANFSQPEIVPISNITENVYINLTCSSIHGYPEPKKMSVLL

SEQ ID NO: 13320 - protein, 217 aa, Homo sapiens
  Payload ID: 2590
  Gene Symbol: CD86
  Gene Name: CD86 molecule
  Uniprot ID: P42081
  ENSP ID: ENSP00000420230
MDPQCTMGLSNILFVMAFLLSANFSQPEIVPISNITENVYINLTCSSIHGYPEPKKMSVLLRTKNSTIEYDGVMQKSQDNVTELYDVSISLSVSFPDVTSNMTIFCILETDKTRLLSSPFSIELEDPQPPPDHIPWITAVLPTVIICVMVFCLILWKWKKKKRPRNSYKCGTNTMEREESEQTKKREKIHIPERSDEAQRVFKSSKTSSCDKSDTCF

SEQ ID NO: 13321 - protein, 235 aa, Homo sapiens
  Payload ID: 2591
  Gene Symbol: CD8A
  Gene Name: CD8a molecule
  Uniprot ID: P01732
  ENSP ID: ENSP00000283635
MALPVTALLLPLALLLHAARPSQFRVSPLDRTWNLGETVELKCQVLLSNPTSGCSWLFQPRGAAASPTFLLYLSQNKPKAAEGLDTQRFSGKRLGDTFVLTLSDFRRENEGYYFCSALSNSIMYFSHFVPVFLPAKPTTTPAPRPPTPAPTIASQPLSLRPEACRPAAGGAVHTRGLDFACDIYIWAPLAGTCGVLLLSLVITLYCNHRNRRRVCKCPRPVVKSGDKPSLSARYV

SEQ ID NO: 13322 - protein, 198 aa, Homo sapiens
  Payload ID: 2591
  Gene Symbol: CD8A
  Gene Name: CD8a molecule
  Uniprot ID: P01732
  ENSP ID: ENSP00000321631
MALPVTALLLPLALLLHAARPSQFRVSPLDRTWNLGETVELKCQVLLSNPTSGCSWLFQPRGAAASPTFLLYLSQNKPKAAEGLDTQRFSGKRLGDTFVLTLSDFRRENEGYYFCSALSNSIMYFSHFVPVFLPAKPTTTPAPRPPTPAPTIASQPLSLRPEACRPAAGGAGNRRRVCKCPRPVVKSGDKPSLSARYV

SEQ ID NO: 13323 - protein, 235 aa, Homo sapiens; identical to SEQ ID NO: 13321
  Payload ID: 2591
  Gene Symbol: CD8A
  Gene Name: CD8a molecule
  Uniprot ID: P01732
  ENSP ID: ENSP00000386559

SEQ ID NO: 13324 - protein, 198 aa, Homo sapiens
  Payload ID: 2591
  Gene Symbol: CD8A
  Gene Name: CD8a molecule
  ENSP ID: ENSP00000387314
MALPVTALLLPLALLLHAARPSQFRVSPLDRTWNLGETVELKCQVLLSNPTSGCSWLFQPRGAAASPTFLLYLSQNKPKAAEGLDTQRFSGKRLGDTFVLTLSDFRRENEGYYFCSALSNSIMYFSHFVPVFLPVHTRGLDFACDIYIWAPLAGTCGVLLLSLVITLYCNHRNRRRVCKCPRPVVKSGDKPSLSARYV

SEQ ID NO: 13325 - protein, 243 aa, Homo sapiens
  Payload ID: 2592
  Gene Symbol: CD8B
  Gene Name: CD8b molecule
  Uniprot ID: P10966
  ENSP ID: ENSP00000331172
MRPRLWLLLAAQLTVLHGNSVLQQTPAYIKVQTNKMVMLSCEAKISLSNMRIYWLRQRQAPSSDSHHEFLALWDSAKGTIHGEEVEQEKIAVFRDASRFILNLTSVKPEDSGIYFCMIVGSPELTFGKGTQLSVVDFLPTTAQPTKKSTLKKRVCRLPRPETQKGPLCSPITLGLLVAGVLVLLVSLGVAIHLCCRRRRARLRFMKQPQGEGISGTFVPQCLHGYYSNTTTSQKLLNPWILKT

SEQ ID NO: 13326 - protein, 213 aa, Homo sapiens
  Payload ID: 2592
  Gene Symbol: CD8B
  Gene Name: CD8b molecule
  Uniprot ID: P10966
  ENSP ID: ENSP00000340592
MRPRLWLLLAAQLTVLHGNSVLQQTPAYIKVQTNKMVMLSCEAKISLSNMRIYWLRQRQAPSSDSHHEFLALWDSAKGTIHGEEVEQEKIAVFRDASRFILNLTSVKPEDSGIYFCMIVGSPELTFGKGTQLSVVDFLPTTAQPTKKSTLKKRVCRLPRPETQKGRRRRARLRFMKQPQGEGISGTFVPQCLHGYYSNTTTSQKLLNPWILKT

SEQ ID NO: 13327 - protein, 210 aa, Homo sapiens
  Payload ID: 2592
  Gene Symbol: CD8B
  Gene Name: CD8b molecule
  Uniprot ID: P10966
  ENSP ID: ENSP00000375070
MRPRLWLLLAAQLTVLHGNSVLQQTPAYIKVQTNKMVMLSCEAKISLSNMRIYWLRQRQAPSSDSHHEFLALWDSAKGTIHGEEVEQEKIAVFRDASRFILNLTSVKPEDSGIYFCMIVGSPELTFGKGTQLSVVDFLPTTAQPTKKSTLKKRVCRLPRPETQKGPLCSPITLGLLVAGVLVLLVSLGVAIHLCCRRRRARLRFMKQFYK

SEQ ID NO: 13328 - protein, 221 aa, Homo sapiens
  Payload ID: 2592
  Gene Symbol: CD8B
  Gene Name: CD8b molecule
  Uniprot ID: P10966
  ENSP ID: ENSP00000377356
MRPRLWLLLAAQLTVLHGNSVLQQTPAYIKVQTNKMVMLSCEAKISLSNMRIYWLRQRQAPSSDSHHEFLALWDSAKGTIHGEEVEQEKIAVFRDASRFILNLTSVKPEDSGIYFCMIVGSPELTFGKGTQLSVVDFLPTTAQPTKKSTLKKRVCRLPRPETQKGPLCSPITLGLLVAGVLVLLVSLGVAIHLCCRRRRARLRFMKQLRLHPLEKCSRMDY

SEQ ID NO: 13329 - protein, 198 aa, Homo sapiens
  Payload ID: 2592
  Gene Symbol: CD8B
  Gene Name: CD8b molecule
  Uniprot ID: P10966
  ENSP ID: ENSP00000377358
MRPRLWLLLAAQLTVLHGNSVLQQTPAYIKVQTNKMVMLSCEAKISLSNMRIYWLRQRQAPSSDSHHEFLALWDSAKGTIHGEEVEQEKIAVFRDASRFILNLTSVKPEDSGIYFCMIVGSPELTFGKGTQLSVVDFLPTTAQPTKKSTLKKRVCRLPRPETQKGLKGKVYQEPLSPNACMDTTAILQPHRSCLTHGS

SEQ ID NO: 13330 - protein, 210 aa, Homo sapiens
  Payload ID: 2592
  Gene Symbol: CD8B
  Gene Name: CD8b molecule
  ENSP ID: ENSP00000394806
MRPRLWLLLAAQLTVLHGNSVLQQTPAYIKVQTNKMVMLSCEAKISLSNMRIYWLRQRQAPSSDSHHEFLALWDSAKGTIHGEEVEQEKIAVFRDASRFILNLTSVKPEDSGIYFCMIVGSPELTFGKGTQLSVVDFLPTTAQPTKKSTLKKRVCRLPRPETQKGPLCSPITLGLLVAGVLVLLVSLGVAIHLCCRRRRARLRFMKQLYK

SEQ ID NO: 13331 - protein, 228 aa, Homo sapiens
  Payload ID: 2593
  Gene Symbol: CD9
  Gene Name: CD9 molecule
  Uniprot ID: P21926
  ENSP ID: ENSP00000009180
MPVKGGTKCIKYLLFGFNFIFWLAGIAVLAIGLWLRFDSQTKSIFEQETNNNNSSFYTGVYILIGAGALMMLVGFLGCCGAVQESQCMLGLFFGFLLVIFAIEIAAAIWGYSHKDEVIKEVQEFYKDTYNKLKTKDEPQRETLKAIHYALNCCGLAGGVEQFISDICPKKDVLETFTVKSCPDAIKEVFDNKFHIIGAVGIGIAVVMIFGMIFSMILCCAIRRNREMV

SEQ ID NO: 13332 - protein, 159 aa, Homo sapiens
  Payload ID: 2593
  Gene Symbol: CD9
  Gene Name: CD9 molecule
  ENSP ID: ENSP00000371955
MMLVGFLGCCGAVQESQCMLGLFFGFLLVIFAIEIAAAIWGYSHKDEVIKEVQEFYKDTYNKLKTKDEPQRETLKAIHYALNCCGLAGGVEQFISDICPKKDVLETFTVKSCPDAIKEVFDNKFHIIGAVGIGIAVVMIFGMIFSMILCCAIRRNREMV

SEQ ID NO: 13333 - protein, 228 aa, Homo sapiens; identical to SEQ ID NO: 13331
  Payload ID: 2593
  Gene Symbol: CD9
  Gene Name: CD9 molecule
  Uniprot ID: P21926
  ENSP ID: ENSP00000371958

SEQ ID NO: 13334 - protein, 228 aa, Homo sapiens
  Payload ID: 2593
  Gene Symbol: CD9
  Gene Name: CD9 molecule
  ENSP ID: ENSP00000371959
MPVKGGTKCIKYLLFGFNFIFWLAGIAVLAIGLWLRFDSQTKSIFEQETNNNNSSFYTGVYILIGAGALMMLVGFLGCCGAVQESQCMLGLATKRTMFPPFLEDHVCFFSLNPQFFGFLLVIFAIEIAAAIWGYSHKDEVIKEVQEFYKDTYNKLKTKDEPQRETLKAIHYALNCCGLAGGVEQFISDICPKKDVLETFTVKSCPDAIKEVFDNKFHIIGAVGIGIAV

SEQ ID NO: 13335 - protein, 141 aa, Homo sapiens
  Payload ID: 2593
  Gene Symbol: CD9
  Gene Name: CD9 molecule
  ENSP ID: ENSP00000440985
MPVKGGTKCIKYLLFGFNFIFWLAGIAVLAIGLWLRFDSQTKSIFEQETNNNNSSFYTGVYILIGAGALMMLVGFLGCCGAVQESQCMLGLFFGFLLVIFAIEIAAAIWGYSHKDEVIKEVQEFYKDTYNKLKTKDEPQRE

SEQ ID NO: 13336 - protein, 182 aa, Homo sapiens
  Payload ID: 2593
  Gene Symbol: CD9
  Gene Name: CD9 molecule
  ENSP ID: ENSP00000478288
MPVKGGTKCIKYLLFGFNFIFWLAGIAVLAIGLWLRFDSQTKSIFEQETNNNNSSFYTGVYILIGAGALMMLVGFLGCCGAVQESQCMLGLFFGFLLVIFAIEIAAAIWGYSHKDEVIKEVQEFYKDTYNKLKTKDEPQRETLKAIHYAVELLWFGWGRGTVYLRHLPQEGRTRNLHREVLS

SEQ ID NO: 13337 - protein, 181 aa, Homo sapiens
  Payload ID: 2593
  Gene Symbol: CD9
  Gene Name: CD9 molecule
  ENSP ID: ENSP00000482643
MPVKGGTKCIKYLLFGFNFIFWLAGIAVLAIGLWLRFDSQTKSIFEQETNNNNSSFYTGVYILIGAGALMMLVGFLGCCGAVQESQCMLGLFFGFLLVIFAIEIAAAIWGYSHKDEVIKEVQEFYKDTYNKLKTKDEPQRETLKAIHYALNLWFGWGRGTVYLRHLPQEGRTRNLHREVLS

SEQ ID NO: 13338 - protein, 652 aa, Homo sapiens
  Payload ID: 2594
  Gene Symbol: CD93
  Gene Name: CD93 molecule
  Uniprot ID: Q9NPY3
  ENSP ID: ENSP00000246006
MATSMGLLLLLLLLLTQPGAGTGADTEAVVCVGTACYTAHSGKLSAAEAQNHCNQNGGNLATVKSKEEAQHVQRVLAQLLRREAALTARMSKFWIGLQREKGKCLDPSLPLKGFSWVGGGEDTPYSNWHKELRNSCISKRCVSLLLDLSQPLLPSRLPKWSEGPCGSPGSPGSNIEGFVCKFSFKGMCRPLALGGPGQVTYTTPFQTTSSSLEAVPFASAANVACGEGDKDETQSHYFLCKEKAPDVFDWGSSGPLCVSPKYGCNFNNGGCHQDCFEGGDGSFLCGCRPGFRLLDDLVTCASRNPCSSSPCRGGATCVLGPHGKNYTCRCPQGYQLDSSQLDCVDVDECQDSPCAQECVNTPGGFRCECWVGYEPGGPGEGACQDVDECALGRSPCAQGCTNTDGSFHCSCEEGYVLAGEDGTQCQDVDECVGPGGPLCDSLCFNTQGSFHCGCLPGWVLAPNGVSCTMGPVSLGPPSGPPDEEDKGEKEGSTVPRAATASPTRGPEGTPKATPTTSRPSLSSDAPITSAPLKMLAPSGSPGVWREPSIHHATAASGPQEPAGGDSSVATQNNDGTDGQKLLLFYILGTVVAILLLLALALGLLVYRKRRAKREEKKEKKPQNAADSYSWVPERAESRAMENQYSPTPGTDC

SEQ ID NO: 13339 - protein, 585 aa, Homo sapiens
  Payload ID: 2595
  Gene Symbol: CD96
  Gene Name: CD96 molecule
  Uniprot ID: P40200
  ENSP ID: ENSP00000283285
MEKKWKYCAVYYIIQIHFVKGVWEKTVNTEENVYATLGSDVNLTCQTQTVGFFVQMQWSKVTNKIDLIAVYHPQYGFYCAYGRPCESLVTFTETPENGSKWTLHLRNMSCSVSGRYECMLVLYPEGIQTKIYNLLIQTHVTADEWNSNHTIEIEINQTLEIPCFQNSSSKISSEFTYAWSVENSSTDSWVLLSKGIKEDNGTQETLISQNHLISNSTLLKDRVKLGTDYRLHLSPVQIFDDGRKFSCHIRVGPNKILRSSTTVKVFAKPEIPVIVENNSTDVLVERRFTCLLKNVFPKANITWFIDGSFLHDEKEGIYITNEERKGKDGFLELKSVLTRVHSNKPAQSDNLTIWCMALSPVPGNKVWNISSEKITFLLGSEISSTDPPLSVTESTLDTQPSPASSVSPARYPATSSVTLVDVSALRPNTTPQPSNSSMTTRGFNYPWTSSGTDTKKSVSRIPSETYSSSPSGAGSTLHDNVFTSTARAFSEVPTTANGSTKTNHVHITGIVVNKPKDGMSWPVIVAALLFCCMILFGLGVRKWCQYQKEIMERPPPFKPPPPPIKYTCIQEPNESDLPYHEMETL

SEQ ID NO: 13340 - protein, 569 aa, Homo sapiens
  Payload ID: 2595
  Gene Symbol: CD96
  Gene Name: CD96 molecule
  Uniprot ID: P40200
  ENSP ID: ENSP00000342040
MEKKWKYCAVYYIIQIHFVKGVWEKTVNTEENVYATLGSDVNLTCQTQTVGFFVQMQWSKVTNKIDLIAVYHPQYGFYCAYGRPCESLVTFTETPENGSKWTLHLRNMSCSVSGRYECMLVLYPEGIQTKIYNLLIQTHVTADEWNSNHTIEIEINQTLEIPCFQNSSSKISSEFTYAWSVEDNGTQETLISQNHLISNSTLLKDRVKLGTDYRLHLSPVQIFDDGRKFSCHIRVGPNKILRSSTTVKVFAKPEIPVIVENNSTDVLVERRFTCLLKNVFPKANITWFIDGSFLHDEKEGIYITNEERKGKDGFLELKSVLTRVHSNKPAQSDNLTIWCMALSPVPGNKVWNISSEKITFLLGSEISSTDPPLSVTESTLDTQPSPASSVSPARYPATSSVTLVDVSALRPNTTPQPSNSSMTTRGFNYPWTSSGTDTKKSVSRIPSETYSSSPSGAGSTLHDNVFTSTARAFSEVPTTANGSTKTNHVHITGIVVNKPKDGMSWPVIVAALLFCCMILFGLGVRKWCQYQKEIMERPPPFKPPPPPIKYTCIQEPNESDLPYHEMETL

SEQ ID NO: 13341 - protein, 402 aa, Homo sapiens
  Payload ID: 2595
  Gene Symbol: CD96
  Gene Name: CD96 molecule
  ENSP ID: ENSP00000389801
MEKKWKYCAVYYIIQIHFVKGVWEKTVNTEENVYATLGSDVNLTCQTQTVGFFVQMQWSKVTNKIDLIAVYHPQYGFYCAYGRPCESLVTFTETPENGSKWTLHLRNMSCSVSGRYECMLVLYPEGIQTKIYNLLIQTHVTADEWNSNHTIEIEINQTLEIPCFQNSSSKISSEFTYAWSVEDNGTQETLISQNHLISNSTLLKDRVKLGTDYRLHLSPVQIFDDGRKFSCHIRVGPNKILRSSTTVKVFAKPEIPVIVENNSTDVLVERRFTCLLKNVFPKANITWFIDGSFLHDEKEGIYITNEERKGKDGFLELKSVLTRVHSNKPAQSDNLTIWCMALSPVPGNKVWNISSEKITFLLGSEISSTDPPLSVTESTLDTQPSPASSVSPASKNVFTLSY

SEQ ID NO: 13342 - protein, 146 aa, Homo sapiens
  Payload ID: 2595
  Gene Symbol: CD96
  Gene Name: CD96 molecule
  ENSP ID: ENSP00000417150
  MOD_RES (1)..(1): Any amino acid
XEIPCFQNSSSKISSEFTYAWSVEDNGTQETLISQNHLISNSTLLKDRVKLGTDYRLHLSPVQIFDDGRKFSCHIRVGPNKILRSSTTVKVFGKGFCSTDSLASSCLLPCSSLKRKHPIMLQSSHMWVTVLESVSLDTCHSCWAGG

SEQ ID NO: 13343 - protein, 568 aa, Homo sapiens
  Payload ID: 2595
  Gene Symbol: CD96
  Gene Name: CD96 molecule
  ENSP ID: ENSP00000417152
MEKKWKYCAVYYIIQIHFVKGVWEKTVNTEENVYATLGSDVNLTCQTQTVGFFVQMQWSKVTNKIDLIAVYHPQYGFYCAYGRPCESLVTFTETPENGSKWTLHLRNMSCSVSGRYECMLVLYPEGIQTKIYNLLIQTHVTADEWNSNHTIEIEINQTLEIPCFQNSSSKISSEFTYAWSVEDNGTQETLISQNHLISNSTLLKDRVKLGTDYRLHLSPVQIFDDGRKFSCHIRVGPNKILRSSTTVKVFAKPEIPVIVENNSTDVLVERRFTCLLKNVFPKANITWFIDGSFLHDEKEGIYITNEERKGKDGFLELKSVLTRVHSNKPAQSDNLTIWCMALSPVPGNKVWNISSEKITFLLGSEISSTDPPLSVTESTLDTQPSPASSVSPARYPATSSVTLVDVSALRPNTTPQPSNSSMTTRGFNYPWTSSGTDTKKFSRIPSETYSSSPSGAGSTLHDNVFTSTARAFSEVPTTANGSTKTNHVHITGIVVNKPKDGMSWPVIVAALLFCCMILFGLGVRKWCQYQKEIMERPPPFKPPPPPIKYTCIQEPNESDLPYHEMETL

SEQ ID NO: 13344 - protein, 118 aa, Homo sapiens
  Payload ID: 2595
  Gene Symbol: CD96
  Gene Name: CD96 molecule
  ENSP ID: ENSP00000417680
MEKKWKYCAVYYIIQIHFVKGVWEKTVNTEENVYATLGSDVNLTCQTQTVGFFVQMQWSKVTNKIDLIAVYHPQYGFYCAYGRPCESLVTFTETPENGSKWTLHLRNMSCSVSGSYSR

SEQ ID NO: 13345 - protein, 18 aa, Homo sapiens
  Payload ID: 2595
  Gene Symbol: CD96
  Gene Name: CD96 molecule
  ENSP ID: ENSP00000475194
MEKKWKYCAVYYIIQIHF

SEQ ID NO: 13346 - protein, 61 aa, Homo sapiens
  Payload ID: 2596
  Gene Symbol: CD99
  Gene Name: CD99 molecule
  ENSP ID: ENSP00000370570
TRKRSYASKKMKELPCACSSVFREKKATLKIEENEAAWITLLKFISACAMHEKILAKSSLT

SEQ ID NO: 13347 - protein, 76 aa, Homo sapiens
  Payload ID: 2596
  Gene Symbol: CD99
  Gene Name: CD99 molecule
  ENSP ID: ENSP00000370573
MARGAALALLLFGLLGVLVAAPGFGDLRLQAARGGRPGVACHSHALRPGPKFGIARSLRPGWWGEGKEKLEKNFEP

SEQ ID NO: 13348 - protein, 177 aa, Homo sapiens
  Payload ID: 2596
  Gene Symbol: CD99
  Gene Name: CD99 molecule
  ENSP ID: ENSP00000370579
MARGAALALLLFGLLGVLVAAPDGGFDLSDALPDNENKKPTAIPKKPSAGDDFDLGDAVVDGENDDPRPPNPPKPMPNPNPNHPSSSGSFSDADLADGVSGGEGKGGSDGGGSHRKEGEEADAPGVIPGIVGAVVVAVAGAISSFIAYQKKKLCFKENGQLAGSLGPCIGIRREADG

SEQ ID NO: 13349 - protein, 169 aa, Homo sapiens
  Payload ID: 2596
  Gene Symbol: CD99
  Gene Name: CD99 molecule
  Uniprot ID: P14209
  ENSP ID: ENSP00000370582
MARGAALALLLFGLLGVLVAAPDGGFDLSDALPGDDFDLGDAVVDGENDDPRPPNPPKPMPNPNPNHPSSSGSFSDADLADGVSGGEGKGGSDGGGSHRKEGEEADAPGVIPGIVGAVVVAVAGAISSFIAYQKKKLCFKENAEQGEVDMESHRNANAEPAVQRTLLEK

SEQ ID NO: 13350 - protein, 185 aa, Homo sapiens
  Payload ID: 2596
  Gene Symbol: CD99
  Gene Name: CD99 molecule
  Uniprot ID: P14209
  ENSP ID: ENSP00000370588
MARGAALALLLFGLLGVLVAAPDGGFDLSDALPDNENKKPTAIPKKPSAGDDFDLGDAVVDGENDDPRPPNPPKPMPNPNPNHPSSSGSFSDADLADGVSGGEGKGGSDGGGSHRKEGEEADAPGVIPGIVGAVVVAVAGAISSFIAYQKKKLCFKENAEQGEVDMESHRNANAEPAVQRTLLEK

SEQ ID NO: 13351 - protein, 201 aa, Homo sapiens
  Payload ID: 2596
  Gene Symbol: CD99
  Gene Name: CD99 molecule
  ENSP ID: ENSP00000405544
RRWGRPAGTPGASSLPGRTRCAHGGPGPEEAPTFSPTLFLEPFQREKSAFVVGVANSYMWGGLGRDGGFDLSDALPDNENKKPTAIPKKPSAGDDFDLGDAVVDGENDDPRPPNPPKPMPNPNPNHPSSSGSFSDADLADGVSGGEGKGGSDGGGSHRKEGEEADAPGVIPGIVGAVVVAVAGAISSFIAYQKKKLCFKEN

SEQ ID NO: 13352 - protein, 160 aa, Homo sapiens
  Payload ID: 2596
  Gene Symbol: CD99
  Gene Name: CD99 molecule
  Uniprot ID: P14209
  ENSP ID: ENSP00000479999
MARGAALALLLFGLLGVLVAAPDGGFDLSDALPDNENKKPTAIPKKPSAGDDFDLGDAVVDGENDDPRPPNPPKPMPNPNPNHPSSSGSFSDADLADGVSGGEGKGGSDGGGSHRKEGEEADAPGVIPGIVGAVVVAVAGAISSFIAYQKKKLCFKENDG

SEQ ID NO: 13353 - protein, 184 aa, Homo sapiens
  Payload ID: 2596
  Gene Symbol: CD99
  Gene Name: CD99 molecule
  ENSP ID: ENSP00000485427
MARGAALALLLFGLLGVLVAAPDGGFDLSDALPDNENKKPTAIPKKPSAGDDFDLGDAVVDGENDDPRPPNPPKPMPNPNPNHPSSSGSFSDADLADGVSGGEGKGGSDGGGSHRKEGEEADAPGVIPGIVGAVVVAVAGAISSFIAYQKKKLCFKENEQGEVDMESHRNANAEPAVQRTLLEK

SEQ ID NO: 13354 - protein, 160 aa, Homo sapiens; identical to SEQ ID NO: 13352
  Payload ID: 2596
  Gene Symbol: CD99
  Gene Name: CD99 molecule
  Uniprot ID: P14209
  ENSP ID: ENSP00000485545

SEQ ID NO: 13355 - protein, 190 aa, Homo sapiens
  Payload ID: 2597
  Gene Symbol: CD99L2
  Gene Name: CD99 molecule-like 2
  Uniprot ID: Q8TCZ2
  ENSP ID: ENSP00000347275
MVAWRSAFLVCLAFSLATLVQRGSGDFDDFNLEDAVKETSSVKRNDFDLADALDDRNDRDDGRRKPIAGGGGFSDKDLEDIVGGGEYKPDKGKGDGRYGSNDDPGSGMVAEPGTIAGVASALAMALIGAVSSYISYQQKKFCFSIQQGLNADYVKGENLEAVVCEEPQVKYSTLHTQSAEPPPPPEPARI

SEQ ID NO: 13356 - protein, 262 aa, Homo sapiens
  Payload ID: 2597
  Gene Symbol: CD99L2
  Gene Name: CD99 molecule-like 2
  Uniprot ID: Q8TCZ2
  ENSP ID: ENSP00000359403
MVAWRSAFLVCLAFSLATLVQRGSGDFDDFNLEDAVKETSSVKQPWDHTTTTTTNRPGTTRAPAKPPGSGLDLADALDDQDDGRRKPGIGGRERWNHVTTTTKRPVTTRAPANTLGNDFDLADALDDRNDRDDGRRKPIAGGGGFSDKDLEDIVGGGEYKPDKGKGDGRYGSNDDPGSGMVAEPGTIAGVASALAMALIGAVSSYISYQQKKFCFSIQQGLNADYVKGENLEAVVCEEPQVKYSTLHTQSAEPPPPPEPARI

SEQ ID NO: 13357 - protein, 157 aa, Homo sapiens
  Payload ID: 2597
  Gene Symbol: CD99L2
  Gene Name: CD99 molecule-like 2
  ENSP ID: ENSP00000391821
  MOD_RES (1)..(1): Any amino acid
XTSSVKQPWDHTTTTTTNRPGTTRAPAKPPGSGLDLADALDDQDDGRRKPGIGGRERWNHVTTTTKRPVTTRAPANTLGNDFDLADALDDRNDRDDGRRKPIAGGGGFSDKDLEDIVGGGEYKPDKGKGDGRYGSNDDPGSGGFLNPEAPVGHVKGK

SEQ ID NO: 13358 - protein, 189 aa, Homo sapiens
  Payload ID: 2597
  Gene Symbol: CD99L2
  Gene Name: CD99 molecule-like 2
  Uniprot ID: Q8TCZ2
  ENSP ID: ENSP00000394858
MVAWRSAFLVCLAFSLATLVQRGSGDFDDFNLEDAVKETSSVKQPWDHTTTTTTNRPGTTRAPAKPPGSGLDLADALDDQDDGRRKPGIGGRGDGRYGSNDDPGSGMVAEPGTIAGVASALAMALIGAVSSYISYQQKKFCFSIQQGLNADYVKGENLEAVVCEEPQVKYSTLHTQSAEPPPPPEPARI

SEQ ID NO: 13359 - protein, 213 aa, Homo sapiens
  Payload ID: 2597
  Gene Symbol: CD99L2
  Gene Name: CD99 molecule-like 2
  Uniprot ID: Q8TCZ2
  ENSP ID: ENSP00000417697
MVAWRSAFLVCLAFSLATLVQRGSGDFDDFNLEDAVKETSSVKQRWNHVTTTTKRPVTTRAPANTLGNDFDLADALDDRNDRDDGRRKPIAGGGGFSDKDLEDIVGGGEYKPDKGKGDGRYGSNDDPGSGMVAEPGTIAGVASALAMALIGAVSSYISYQQKKFCFSIQQGLNADYVKGENLEAVVCEEPQVKYSTLHTQSAEPPPPPEPARI

SEQ ID NO: 13360 - protein, 272 aa, Homo sapiens
  Payload ID: 2597
  Gene Symbol: CD99L2
  Gene Name: CD99 molecule-like 2
  Uniprot ID: Q8TCZ2
  ENSP ID: ENSP00000480322
MVAWRSAFLVCLAFSLATLVQRGSGDFDDFNLEDAVKETSSVKQPWDHTTTTTTNRPGTTRAPAKPPGPTEGSGLDLADALDDQDDGRRKPGIGGRERWNHVTTTTKRPVTTRAPANTLGNDFDLADALDDRNDRDDGRRKPIAGGGGFSDKDLEDIVGGGEYKPDKGKGDGRYGSNDDPGSGMVAEPGTIAGVASALAMALIGAVSSYISYQQKKFCFSIQHAAAGQEGLNADYVKGENLEAVVCEEPQVKYSTLHTQSAEPPPPPEPARI

SEQ ID NO: 13361 - protein, 177 aa, Homo sapiens
  Payload ID: 2597
  Gene Symbol: CD99L2
  Gene Name: CD99 molecule-like 2
  ENSP ID: ENSP00000489166
  MOD_RES (1)..(1): Any amino acid
XERWNHVTTTTKRPVTTRAPANTLGNDFDLADALDDRNDRDDGRRKPIAGGGGFSDKDLEDIVGGGEYKPDKGKGDGRYGSNDDPGSGMVAEPGTIAGVASALAMALIGAVSSYISYQQKKFCFSIQHAAAGQEGLNADYVKGENLEAVVCEEPQVKYSTLHTQSAEPPPPPEPARI

SEQ ID NO: 13362 - protein, 145 aa, Homo sapiens
  Payload ID: 2597
  Gene Symbol: CD99L2
  Gene Name: CD99 molecule-like 2
  ENSP ID: ENSP00000489222
MVAWRSAFLVCLAFSLATLVQRGSGDFDDFNLEDAVKETSSVKPALGMYHKLDGLKQQNFILSLFWMLEVLYQGVGWATFSLKALGKNLSLTFPTSGGSRCSLVCGCITPISASVVTWCSPFCVSLLSLTKMLVSGFKAHLDNPG

SEQ ID NO: 13363 - protein, 79 aa, Homo sapiens [sequence omitted]

SEQ ID NO: 13364 - protein, 67 aa, Homo sapiens
  Payload ID: 2598
  Gene Symbol: CKS1B
  Gene Name: CDC28 protein kinase regulatory subunit 1B
  ENSP ID: ENSP00000357421
MSHKQIYYSDKYDDEEFEYRHVMLPKDIAKLVPKTHLMSESEWRNLGVQQSQGWVHYMIHEPGQCTG

SEQ ID NO: 13365 - protein, 63 aa, Homo sapiens
  Payload ID: 2598
  Gene Symbol: CKS1B
  Gene Name: CDC28 protein kinase regulatory subunit 1B
  ENSP ID: ENSP00000357424
MRTRHVMLPKDIAKLVPKTHLMSESEWRNLGVQQSQGWVHYMIHEPEPHILLFRRPLPKKPKK

SEQ ID NO: 13366 - protein, 79 aa, Homo sapiens
  Payload ID: 2599
  Gene Symbol: CKS2
  Gene Name: CDC28 protein kinase regulatory subunit 2
  Uniprot ID: P33552
  ENSP ID: ENSP00000364976
MAHKQIYYSDKYFDEHYEYRHVMLPRELSKQVPKTHLMSEEEWRRLGVQQSLGWVHYMIHEPEPHILLFRRPLPKDQQK

SEQ ID NO: 13367 - protein, 1732 aa, Homo sapiens
  Payload ID: 2600
  Gene Symbol: CDC42BPA
  Gene Name: CDC42 binding protein kinase alpha (DMPK-like)
  Uniprot ID: Q5VT25
  ENSP ID: ENSP00000335341
MSGEVRLRQLEQFILDGPAQTNGQCFSVETLLDILICLYDECNNSPLRREKNILEYLEWAKPFTSKVKQMRLHREDFEILKVIGRGAFGEVAVVKLKNADKVFAMKILNKWEMLKRAETACFREERDVLVNGDNKWITTLHYAFQDDNNLYLVMDYYVGGDLLTLLSKFEDRLPEDMARFYLAEMVIAIDSVHQLHYVHRDIKPDNILMDMNGHIRLADFGSCLKLMEDGTVQSSVAVGTPDYISPEILQAMEDGKGRYGPECDWWSLGVCMYEMLYGETPFYAESLVETYGKIMNHKERFQFPAQVTDVSENAKDLIRRLICSREHRLGQNGIEDFKKHPFFSGIDWDNIRNCEAPYIPEVSSPTDTSNFDVDDDCLKNSETMPPPTHTAFSGHHLPFVGFTYTSSCVLSDRSCLRVTAGPTSLDLDVNVQRTLDNNLATEAYERRIKRLEQEKLELSRKLQESTQTVQALQYSTVDGPLTASKDLEIKNLKEEIEKLRKQVTESSHLEQQLEEANAVRQELDDAFRQIKAYEKQIKTLQQEREDLNKELVQASERLKNQSKELKDAHCQRKLAMQEFMEINERLTELHTQKQKLARHVRDKEEEVDLVMQKVESLRQELRRTERAKKELEVHTEALAAEASKDRKLREQSEHYSKQLENELEGLKQKQISYSPGVCSIEHQQEITKLKTDLEKKSIFYEEELSKREGIHANEIKNLKKELHDSEGQQLALNKEIMILKDKLEKTRRESQSEREEFESEFKQQYEREKVLLTEENKKLTSELDKLTTLYENLSIHNQQLEEEVKDLADKKESVAHWEAQITEIIQWVSDEKDARGYLQALASKMTEELEALRNSSLGTRATDMPWKMRRFAKLDMSARLELQSALDAEIRAKQAIQEELNKVKASNIITECKLKDSEKKNLELLSEIEQLIKDTEELRSEKGIEHQDSQHSFLAFLNTPTDALDQFERSPSCTPASKGRRTVDSTPLSVHTPTLRKKGCPGSTGFPPKRKTHQFFVKSFTTPTKCHQCTSLMVGLIRQGCSCEVCGFSCHITCVNKAPTTCPVPPEQTKGPLGIDPQKGIGTAYEGHVRIPKPAGVKKGWQRALAIVCDFKLFLYDIAEGKASQPSVVISQVIDMRDEEFSVSSVLASDVIHASRKDIPCIFRVTASQLSASNNKCSILMLADTENEKNKWVGVLSELHKILKKNKFRDRSVYVPKEAYDSTLPLIKTTQAAAIIDHERIALGNEEGLFVVHVTKDEIIRVGDNKKIHQIELIPNDQLVAVISGRNRHVRLFPMSALDGRETDFYKLSETKGCQTVTSGKVRHGALTCLCVAMKRQVLCYELFQSKTRHRKFKEIQVPYNVQWMAIFSEQLCVGFQSGFLRYPLNGEGNPYSMLHSNDHTLSFIAHQPMDAICAVEISSKEYLLCFNSIGIYTDCQGRRSRQQELMWPANPSSCCYNAPYLSVYSENAVDIFDVNSMEWIQTLPLKKVRPLNNEGSLNLLGLETIRLIYFKNKMAEGDELVVPETSDNSRKQMVRNINNKRRYSFRVPEEERMQQRREMLRDPEMRNKLISNPTNFNHIAHMGPGDGIQILKDLPMNPRPQESRTVFSGSVSIPSITKSRPEPGRSMSASSGLSARSSAQNGSALKREFSGGSYSAKRQPMPSPSEGSLSSGGMDQGSDAPARDFDGEDSDSPRHSTASNSSNLSSPPSPASPRKTKSLSLESTDRGSWDP

SEQ ID NO: 13368 - protein, 1699 aa, Homo sapiens
  Payload ID: 2600
  Gene Symbol: CDC42BPA
  Gene Name: CDC42 binding protein kinase alpha (DMPK-like)
  ENSP ID: ENSP00000355726
MSGEVRLRQLEQFILDGPAQTNGQCFSVETLLDILICLYDECNNSPLRREKNILEYLEWAKPFTSKVKQMRLHREDFEILKVIGRGAFGEVAVVKLKNADKVFAMKILNKWEMLKRAETACFREERDVLVNGDNKWITTLHYAFQDDNNLYLVMDYYVGGDLLTLLSKFEDRLPEDMARFYLAEMVIAIDSVHQLHYVHRDIKPDNILMDMNGHIRLADFGSCLKLMEDGTVQSSVAVGTPDYISPEILQAMEDGKGRYGPECDWWSLGVCMYEMLYGETPFYAESLVETYGKIMNHKERFQFPAQVTDVSENAKDLIRRLICSREHRLGQNGIEDFKKHPFFSGIDWDNIRNCEAPYIPEVSSPTDTSNFDVDDDCLKNSETMPPPTHTAFSGHHLPFVGFTYTSSCVLSDRSCLRVTAGPTSLDLDVNVQRTLDNNLATEAYERRIKRLEQEKLELSRKLQESTQTVQALQYSTVDGPLTASKDLEIKNLKEEIEKLRKQVTESSHLEQQLEEANAVRQELDDAFRQIKAYEKQIKTLQQEREDLNKELVQASERLKNQSKELKDAHCQRKLAMQEFMEINERLTELHTQKQKLARHVRDKEEEVDLVMQKVESLRQELRRTERAKKELEVHTEALAAEASKDRKLREQSEHYSKQLENELEGLKQKQISYSPGVCSIEHQQEITKLKTDLEKKSIFYEEELSKREGIHANEIKNLKKELHDSEGQQLALNKEIMILKDKLEKTRRESQSEREEFESEFKQQYEREKVLLTEENKKLTSELDKLTTLYENLSIHNQQLEEEVKDLADKKESVAHWEAQITEIIQWVSDEKDARGYLQALASKMTEELEALRNSSLGTRATDMPWKMRRFAKLDMSARLELQSALDAEIRAKQAIQEELNKVKASNIITECKLKDSEKKNLELLSEIEQLIKDTEELRSEKASKGRRTVDSTPLSVHTPTLRKKGCPGSTGFPPKRKTHQFFVKSFTTPTKCHQCTSLMVGLIRQGCSCEVCGFSCHITCVNKAPTTCPVPPEQTKGPLGIDPQKGIGTAYEGHVRIPKPAGVKKGWQRALAIVCDFKLFLYDIAEGKASQPSVVISQVIDMRDEEFSVSSVLASDVIHASRKDIPCIFRVTASQLSASNNKCSILMLADTENEKNKWVGVLSELHKILKKNKFRDRSVYVPKEAYDSTLPLIKTTQAAAIIDHERIALGNEEGLFVVHVTKDEIIRVGDNKKIHQIELIPNDQLVAVISGRNRHVRLFPMSALDGRETDFYKLSETKGCQTVTSGKVRHGALTCLCVAMKRQVLCYELFQSKTRHRKFKEIQVPYNVQWMAIFSEQLCVGFQSGFLRYPLNGEGNPYSMLHSNDHTLSFIAHQPMDAICAVEISSKEYLLCFNSIGIYTDCQGRRSRQQELMWPANPSSCCYNAPYLSVYSENAVDIFDVNSMEWIQTLPLKKVRPLNNEGSLNLLGLETIRLIYFKNKMAEGDELVVPETSDNSRKQMVRNINNKRRYSFRVPEEERMQQRREMLRDPEMRNKLISNPTNFNHIAHMGPGDGIQILKDLPMNPRPQESRTVFSGSVSIPSITKSRPEPGRSMSASSGLSARSSAQNGSALKREFSGGSYSAKRQPMPSPSEGSLSSGGMDQGSDAPARDFDGEDSDSPRHSTASNSSNLSSPPSPASPRKTKSLSLESTDRGSWDP
